United States Patent Application Publication US 2024/0093182 A1 - sequence listing, part 9

SEQ ID NO: 18136 - DNA, 1938 bp, Artificial sequence
  DNA replication origin
cagccctggctgggctccaaggcccggcctgcctctggtgtcagacccatctgatgtggatttgcttttcccttaagtggaaatccagatggggtggcggctcctcctcttcctccagggagccttcctgggcccctccctcctacccccagggggtcctggctggccagacacagctgggcatctcctagggcttggtggatgccggtgggtcctgttccctccaccccctctgctgaggcctcagtcctcccagacctgctagagtggaccccagactcccaggagaccccagggtgcaggagaggggagaaggctggaaaggttgcggggagggagagggctgggccaggagtcaccggggcaggctgggggtcctggcccaggcggacccgctgatcatctagttagtgggggaggggcccaccaggggtcggggcccggggcagcccctccagggccagacaatgtgtcttcctcaggagtcccagcaacagaggggcctaccagtgaggtcacagagctccgtggtgccgttggggaagagagccaggagactctgatgatgaattctgaccagaaggcagtgaaattcctggcaaatttttacatcaatggaggcaaacactggacccatggtcacctgaggcagacacaaccagagcccacccagtaactggcggagagggggagaaggggcgggccagctgggagtggccagggggctgagggacagtgtggggggcaggttgctgggcaggcggctgggggactgagggacagtgtggggacaggctgtggggcaggcggctgggagcggccaggggctgagggacagtagaggggacaggcggctgggagcggccaggggctgagggacagtgtggggacaggctgtggggcacgtggctgggagcagccgggggctgagggacaatagaggggacaggctgtggggcatgtggctgggagcggccgggggctgagacagtggctgctggtctcccttgcaggcccaaggcatctgtgctgttgttgggcccggagccggggatggcctgggatgagacacagcccccaaagatgaaggagatcccagttggcctcaggttacagacgggcaccccccaggagtccctgcccacctacacccagaccctgagggaactatgtgagtgagggtcctggccaccccacccccaagctggtctttggggggctgtgggaggggcccgctgaaaggagcccaggcccagagcttgcttcctgtggccagtgctggagcaacgccccctgatcacagctgacctggaagtccccagccccaccaggtaccaggtgccgagcccgtccgtacgagagtcctccccacacccccactacagcatcggctgcaagcaccagggccgaggtgtgtgtcccctccctgaggcccaaccaccgggcctgtccctcaccctgggaatgggggcctttgcctctgtgctgaaacccccacggcctgagggcccctccacccttccctgcgttcacctctaggctcagcacctgtaaggaggcctggagagaggagggctagggctggggcatgggtggacattgtgaagacaagggttcaggggccgagggtgggaaccgggagacaggttcgagtggggactgtcacctgggtggggctcccagccttctctctctccatcctccaactacagagggcggtggccgcagggcatggcagactttgtggttccagagcgaaagccccttcacgcagaaagctgacttcgaccaagagcaaaaggttgggggctgggcaggaagggggcggggagtccacgcaggcagggggctgggggttccagtggggccaaaggggggctggctgagggtccgtggggagcaccctgccctgcagcccgtctcctaccccctcgcagt

SEQ ID NO: 18137 - DNA, 1796 bp, Artificial sequence
  DNA replication origin
gatgccctggccccaacacctacaatatccttcctgggagccgcctgcagagcccccgctcgccggccttctcgatgagccgctcccctgcgttcacctcctggctcagcacctgtaaggaggcctggagagaagagggctagggatggggcatgggtgggcaatgtgaggacaagggttcaggggccgggggtgggaactgggagccaggtttgagttggggctgctacctgggtggggctcccagccttctctttcggcagcccgaacccctggcccagccgcctaccacgtggaggactgcaactcacgcttcccttcggcgcctggcgtggtcatccagggtgtacgcagacccaagcgccacgacacaggccccttctgcacgctctagagccagctgggcacaacctgcttggcccggccaccgagtggaaccatggcctcccccggggctttcccaggcctcccctgggacttggggccccagcctggccttctgaccctctgggcaccccgatgcacccttctggctggccaacccttctatgggctgtggacaaggctggcccagcctggatcccccatctgcccatctccccgctacactgagatgctgttggttttcccgagctctgtggtgtgcagttgtctgtccttcacccgggggcggtcctagagatatggctgccgctgggtcatttccggctttccctgttgaggggtctccattcagctgcccctgaaaggtgctctcttctctagggtggcagcctgtgactgaccctgagctctagcctggagcgagatgggaggtgggctctgtgggacacccccacccagccgtgtcactcaggggcctggtctagctgctgtccacctgagggtcagctgcttgccgagccagggaactgggaaggaggcgtcaaatgccctgagccgccacctccaggtggggtcggcctggccagacctcaggaagggcccagggatctgctcaccagggcccagccccacttcccctaggccttgagctgaagacctggctgggcttagtcacctgtgccctgaacactctggcccagggccctgcagactccactcccggggccttcacctgctgggaccctgcactgcccctgcctgcaacttcgcctggctggggcctcccttgtcatcactggcctgccctcctacccagggtcgggccccaaggctgccaccttgcaggagccttacctgcggtgccgtcacccgcacctccccaggtcctccccagacccaggacccagaccaggcccagagctcaaccccttcaaaaaggctctgggcagctgcttctgtggcctcagcaccaccccctttctcagagaggaatcccaggctcaggattgtgtgtgtgctgtgacccttgtcctcctctgccaccgaaccagctgggggttggatcaaggcactggaaccctcgccctagggctgaccaacttggccagcggcaagagagctgtggtagccatggccttgggagctcggcccggcttgtgggaacaggagctctgctcacggctgcaccaccaggcacccctggtgagacccaaagctaggagtgggagcggcaggaaagatggagcgatctcctccagctgggctgaggagggagggcttcctggaggaggtggtggaggaagaagccttcaaggaagagcaagagtttgctgggcagcgggaaagaaatttctagagaaaatttcagcagcggagaccgaaaagagagagggtgtgtgtagggggcttgg

SEQ ID NO: 18138 - DNA, 1461 bp, Artificial sequence
  DNA replication origin
acgcttatgtacacgaaattcactcggctgcgacgacgtccgttcccggagcagacggaccctgagtccgccccccacgccctcacccgccctcttctgccagaaagcccgggcgcgggcgggaccgggtgggcgcatgcgcgctgggctggctgggcggggtctctcgcgccgggtgagggcgctgctcccaggaacctgcgcgcggccccggcggcgtttcccgggggccggttggcgggcggacctgggcggtgcggggcggaagtgggcggctgcgggacgcgcgcggagtcgcgcggcgggcgggacctggccgagctggagggcgccggggagcggggctcgggcggtccccgaggcccggcggagcgggcttctggggtgtctgcggcggcgccgggggaacgggctggggatggggcgcctagccgggcggtggccggggcctcggccatgttcgcggggctgcaggacctgggcgtggccaacggcgaggacctgaaggagaccctgaccaactgcacggagccgctcaaggccatcgagcagttccaggtggggcggcccccggggcggggggagcccagttggagggccgggccgcctgctcgggagtcgggcctggcggaggcgccggaagttttccggctttctgctggtggctgagtcctgttctgggggtggagtccggagccagcacccctttgctggacggctgggtggctttcggtggctgcggttaccgccagcacggctgggaacacctgggtgcgtgcctccctgtgctctcaggacctcggggtgcccgggcgcactgggctgcgtttgaggtttctcttggcttcctcagacagagaatggtgtgctgctgccatctcttcagtcagccctccccttcttggacctgcacgggacgccgcggctggagttccaccagtcggtattcgatgagctgcgggacaagctgctggagcgagtgtcagccatcgcttcggaggggaaggctgaggaaaggtgggtcagcgggaggggtgggcaggtgagatgtgcagccggcctctcagccttggatcgactcaggggcatttattgtccttttggctccacatccttgctcccagaggtggcctgggcctgtgtctgagtgaccccttgacccatgtgtcctgggcgtggaggcttgtcctggtagctgttatctgtgtagggacaggcaggtagctgctgcgatttggcgcatcgctgcaccatcaatcctgtgagttgttccaggtacaagaagctggaagaccttctggagaagagcttttctctggtgaagatgccgtccctgcagcccgtggtgatgtgcgtcatgaagcacctgcccaaggtagggccctaaccctaaccctgatggcgtggaccgtccgcccactctcatgcccttggttagtggaagttccggtggccgcctag

SEQ ID NO: 18139 - DNA, 1224 bp, Artificial sequence
  DNA replication origin
gccggcctctcagccttggatcgactcaggggcatttattgtccttttggctccacatccttgctcccagaggtggcctgggcctgtgtctgagtgaccccttgacccatgtgtcctgggcgtggaggcttgtcctggtagctgttatctgtgtagggacaggcaggtagctgctgcgatttggcgcatcgctgcaccatcaatcctgtgagttgttccaggtacaagaagctggaagaccttctggagaagagcttttctctggtgaagatgccgtccctgcagcccgtggtgatgtgcgtcatgaagcacctgcccaaggtagggccctaaccctaaccctgatggcgtggaccgtccgcccactctcatgcccttggttagtggaagttccggtggccgcctagctccgggagcttcctgtgctgcctgcccaagtgctgtccatggtgagctctgtgctgacttctcccacatgagccgcgtggagaccgaaccttagcactggagttagggtgtggggcccctcctgggaaagagctgttggtatttagcatgtctgtctgacatgctggggccggggaaccagtcataggtgccctgtggggtggagcttagctcgaggtggtctctgcggggctgaggcctcttggcttgtcttgaaggagacccagggacacaggtgccactcacaggcagcctgtggtgtcatgtaggttccggagaaaaaactgaagctggttatggctgacaaggagctgtatcgagcctgcgccgtggaggtgaagcggcagatctggcaagacaaccaggccctcttcggggacgaggtttccccactcctgaagcagtacatcctggagaaggagagcgctctcttcagtacagagctctctgtcctgcacaactttttcagtccttcccccaagaccaggcgccagggcgaggtgaggggacaggccgtgtgcggggtggggcacctcttggggatgccacggctagcgccttcagctgcctggggatcagcactctgctgccctgtgaatgatcgggtggttctgcttcttggctgggtggtgggggagggctggcttgtacacatgctggaaagaaagttggttgtttttctgtttgcattttacttttcgttaaagtgatatatggacaacatttaaaatctgcggaaagcccgctcatgtgaagttaatcccccctcccctactt

SEQ ID NO: 18140 - DNA, 1070 bp, Artificial sequence
  DNA replication origin
gaggaagctggggcaatggtcaaggtccagcccgtaggtcatacagccctcgggaacacagaaagggctggacggggcaagggagtccccgggaacggccaggtctctggctcagatgcaggggactagcctccttcccccatcagggtctggagagaagccaaagggccagcacacaggacagaaagaccagagcccaggaaacaggcatgggagagaagggcgcccaggtggtcccgggccaagccaaacccacggagaggagaggagccaggagggccagggggaaggagggagggcaatgctaccttcaggaggggcagagggggaaggagagagggccggggagttggggggaaggagggagggagggcagcgctaccttcaggagggcggagggggaggagggagggccggggagcgggggagaagggagaaggagggagggagggagggcagcgctaccttcaggagggcagtgggggaaggagggagggccggggagtgggagggaaggagggagggagggcagcactaccttcaggagggtaggggggaaggagggagggcagtgctaccttgtggcacgggtccacggtgcagatttcacccacgtccaggtcgtgcagggacatgagcagctcagcccgcagcgtgcagtagtgcacattccgcgtgcgcaggaagagcgtgcgcagaaactgcagcaccatgtcgtacagcttcacgttcttccccaccatccgcgtcagccgctgcaccacctgcagcaagaggcactgtcaggcccccagaccgtcctgggctccgccagacacagggacgtcacgcccggcgacagcgcggccctctctctggacatctgtccttcctactttttggcagaaaacattccctcctctcattaaatattggcccccagtctgatggtagcaggttctgttatttttattttttttattactttttttgagacaaggccttgctctgttgcccaggctcgagtgcactgctgcaactgtggctcactgcagccttgacctcctggctcaagtgatcctcctgcctca

SEQ ID NO: 18141 - DNA, 853 bp, Artificial sequence
  DNA replication origin
ggccatgcggccactccgctggctgctctgggtggtcagggtgtggacagcagcggccaggtggaggcagctgttggggccctgtggccgccctgctggctgctctggtggtcggggatgtggactgcagtggcccaggtagaggcgtgtgcttccccgctgtgagactgcgtttcaccccgtgtgtggggctggtgatcgcagtcgtgtggtcctggccatgggcaccagagatcctgctgagtaacgagtagggtcagaggagctccatggccaggacacagctgcctgggagaggcgctgagcccgtcctccctacaggacagccccgacctcctgctgctgctccggctgctggcgctgggccagggagcctgggacatgatcgacagccaggtcttcaaggagcccaagatggtaacgagcctcctgtgggggctgccagtttcctacgaggggttgtgggctggaagtggggtggagggggaggcgctagcaaggtgattgtggaggcccctttggtcccaaagcttccttcctggagctgcccaccttccttttgggaaaatgcccaccagggaggttctggggtgtctccgtggaccctggctggttctggggtatctccatggcccgtggctggttctggggtgtctccgtggaccgtggcttgttctgggggtgtctccatggaccatggctggccacaggtggtgactactccatgtgggtccagacctagaagggggtttgaggagatggcctgggtgggggactcgggaggtgggaagagggacctggggacctggagaggagggagggtcggtgaggtatctgggggagtgggagggcc

SEQ ID NO: 18142 - DNA, 1487 bp, Artificial sequence
  DNA replication origin
gggggcacaggggtgggtgcccaccgaccacacacaagcaccacaagggcagcttggcaagcacacacgggctggtagggaccaggtgccttcagatgcagcccccccgggcacccacctggcctgtaggctccagggccttctgcaacgcctccagcttagacggggccaccctggggtgcaggtgaatgaggagccgcagcgcgtgccggtgcacgttctccttcctggaaaaggccgtgcagggctggggcaggaggcaggccctgctgtctgcccaggcccagcccagatgcaggtggccaaggcccctggagacaggacatggccagcctttgggaccctccccagctgtgcccaggcaccctgcagggccacatgcgagccctggtgcccaacagacccacctgcggaccctccgccccaggctggggacagcagccacctctcaggctgctacggacaagagctgagaggacagagcgggccggatggtacccagcaggcctaccttggagaggcggtgaggaagaagccatcgaagaggctgctgcagaagtcctcaagggcaaattcgtcggccagcagcgcaaggttgcccgtgagcaggtggaggaagatgtcgccaaaggccaagtcgccaaaggtctccactgcagacacagcaggcatcagcccagtgccactcaccctgcccaccccagagggcacccttgtcctcaaagacctcagaacctacttctgggggtgctcacatgagagttctcagttgttctgagatgagaagcacagggtctcagcaggtgaagaggggggtgggaagtggacagaggcaggcagggggtgggacctgtggcagggaagcagagctgcagcccagggacaggagggtggagggagggggagacagcccagggacaggaggagggtggagggagggggagacagcccggggacaggaggagggtggaggaagaaggagacagaaaaacgaggtgctcctccagtcccaaaaggccttgcccagcagccgagcccaggagaaacaagcctaacaaatacagggccggcgccagctgcagagagttctccctgactgccagctacactgaaccacaggaaagagaacgaaactcttccacattcttttctgaagccagacaccaaaacacaacaaagacagcattcgtgcccacagacgcctcacgtgcgaccacagcacagaagccacggtgttggcagacatttgccaagagccagcacaacgccccaaacggggcccctgcagggagggagggcggccgcctgcagactgatgcctgaaggagctgtggccaggccacatggaggtgacgtgtgcggacaggttgaggatggccttcctagtatcccggatggggcctttatgaggacaacccagctggcgccacctgcgcccagagtgacagaaacatttccaggagacccaggcccccgaggtgcctgcc

SEQ ID NO: 18143 - DNA, 1937 bp, Artificial sequence
  DNA replication origin
gcctcttcattggcccagcttggcgaaagcgaggcacactgcttactgccttggggttgtggagatggacccgtgacctcgtggaggccgtgtgggggcagcagcctggcctgtgccatggtgggtgtcctggggcctgtgcggagggagccacctcaccctgcagcccagtttgcaggtgtggccttgtttctccttgcccagcagtgctgccttcagcggccgtgacggggccagctggacacacggtgagattttctcgtatgtaaataaaaggcattttggtaaacgtggaggctgagatgtctctgtgcctgccctgaggttggatgtagctcagatggacacaggcatttgtgctatggagccaatacttggggctttgtgggccacagcctctctggactgctcagccctgtctgtgaccagcagctggggacgatataataatttctgggggaggttgatataataatttctgggggaggttgataaaatttctgggggaggatataataatttctgggggaggttgatataatttctgggggaggatgatataataatttctgagggaggttggcaggaagccctcaccctcggggctttggtgcccctaagacgcagatcagctgctttgtttttgtcctgcgattccagggggcacctctcacctcctggtgcacaccagggacaggagccctggaggcccaggatgtgccatgggtcacaggcacagagccagggccatttccagcagatgagacctcaaagccgggcagcagttcatagcatgcaggggcgatggcccggctgccaggtgtcactgtccttggctcgcagcatgcaggggcgatagcctggctgccaggtgtcaccgtgtcctcagagacgcctgttggcgagctcgcctccctggagtgtgaggccacagctgagcaggttgggacctgttgggtgagacaagcccatggtgctgggatctcgtgggtatgggagtctctgagctggtatcctctggggcagagccagggacgcctgggactctgttgcacctgtgcatggggcttgtggtctacactgggagatctgtgcctcagtttattgtggtctacactgccggatccatgcctcagtttatccagtcatgtctctccaagagccccagggcaggcggagaagtcccagcctgagggctttggttgggagctggggacccaggtgaggctgggtgtctggggctggcctggctggtgggtggagggcgcaggttctgggtaggtgtgagcagcagaggagtcttggagggtccagggctctgaacctgcccaggtgggctgtgacgggaagatgaagggcttgtctgacaggcacatgcaatgggtttggggctgtggagctcagaagagactggggccaggttgtggatctggatgctgtcatagggagtggtgtttgagctactgactgggccagatcagcccaggtgagggagagcagccgtgtgctctgggcgggccttcctggccagctggggcgggggggtggcagctggcagcagattgggtgccccacagcccagggaggaggggctgaggaacagtgctttggagggagagctgaggaagcaggagaggcctggagacccagctgagaggcactaaggagtgggatgaaggtcagttccggccaggagtgcgtgctttttttgctttttttttttgagatggagtctcgctctgtcgcccggtctggagtgcaatggcgcaatcttggctcactgcaagctccgcctcccgggttcacaccattctcctgcctcagcgccccccccaccccagcatctgggactacaggcacatgccgccacgcccggctaatttttgtatttttagtagagacggggtttcactgtgttagccaggatggtctcgatc

SEQ ID NO: 18144 - DNA, 800 bp, Artificial sequence
  DNA replication origin
cgggggggtggcagctggcagcagattgggtgccccacagcccagggaggaggggctgaggaacagtgctttggagggagagctgaggaagcaggagaggcctggagacccagctgagaggcactaaggagtgggatgaaggtcagttccggccaggagtgcgtgctttttttgctttttttttttgagatggagtctcgctctgtcgcccggtctggagtgcaatggcgcaatcttggctcactgcaagctccgcctcccgggttcacaccattctcctgcctcagcgccccccccaccccagcatctgggactacaggcacatgccgccacgcccggctaatttttgtatttttagtagagacggggtttcactgtgttagccaggatggtctcgatcttctgaccttgtgatccacctgcttcggcctcccaaagtgctgagattacaggcgtgagccaccgcgcccggcctggtttttttttaaagatagaagaaatagatgtttctgggctgatgggaatgacccagtagggtgaggagtggaggatggtccaggggctgggctgtcactgaatgagcaggtggccggggtctcagcacagcaggggtgtcctcagaggagggctgatgggcgcagatgctggggtgacggctgaggagacactgggagtccactgctgctgcctcccattttctcaggtcttgggctaggaggcaggatagggggaagtggcaggggagaggacgagtagaggacttgactgtaggaggaatggtcagtgagtggacccgggtg

SEQ ID NO: 18145 - DNA, 1002 bp, Artificial sequence
  DNA replication origin
acggggtttcactgtgttagccaggatggtctcgatcttctgaccttgtgatccacctgcttcggcctcccaaagtgctgagattacaggcgtgagccaccgcgcccggcctggtttttttttaaagatagaagaaatagatgtttctgggctgatgggaatgacccagtagggtgaggagtggaggatggtccaggggctgggctgtcactgaatgagcaggtggccggggtctcagcacagcaggggtgtcctcagaggagggctgatgggcgcagatgctggggtgacggctgaggagacactgggagtccactgctgctgcctcccattttctcaggtcttgggctaggaggcaggatagggggaagtggcaggggagaggacgagtagaggacttgactgtaggaggaatggtcagtgagtggacccgggtgcctggtttggtcactgggcagcgggcgcgtcctgtccagggcgcctgcagggggtgccaggcctacgggtggggagtgaaggacagagagtgaggagcccgtgggtgagggactggtgaggtggagggtgtgaattgcaaggactgggatgggaccgtgcgtggacggctgagcctcgggggcgcatggttactgtagcgaaagcctttaggggcagaaagagcagagctgcctgagcgactgggtgtggacgctgctgggaagttagggagaaggacttggtaggggaggaccgagggcccaggcacgggaggcatcgtctggtgaagtgaaacctatggggaatttgggaggagaagtggggaggctgcccacggtttggggaaaacaaccttgctggcaagggctgggggaagcagtgagggtgaagtcctttcagaggctgagaacatgtactgtgtttgtgggtgatggacatgaattctgggcgcagcggcagggctgggttgggtagggaggcgggaggggaggcctcctggaatgggaatgggtgtgattgggggtg

SEQ ID NO: 18146 - DNA, 1503 bp, Artificial sequence
  DNA replication origin
aagtgcagggggtgaggccttggcccaggcctcagattcacctttgacccatagggccaggtcttggggcaccccttgagcgagtccctttcctgcagagggctctggcctgaggatttgctgggccagcctctggcagaagcagctccagccctgggtgcacttggaggcagggcagaggctttgctgcaggttttccagggctcggtcagcctgcatctgcccgagggcctcccctccagggtcctctctgtgtcagaagaagcaccgagactcaaagcctgaggcccccaaaggaccccaacctccgtgctggggccacggggcctggacagccaacctccttccgctctggtcccacagaggccggggagtgggcccaaagagcaccagcattccacctggtgtgtgcggcccccgcggcctcgacaattggggatccgggcccccgagcaccccttgcacaggggaggggagccctaggcctggctcctggaggggagcgtgatagtccggtggaccccataccctggagagaatggaaacccccaacccacgaccggtttccctgatggagcctgtctggttgggtgcagtgtgtgaggaatatacagctggaaccatcaggcccgggctggctgttgggaggagtggggcgtccctgggactgcggggtcctgagctgaatgccagcagcactggtgtggctggagcggccaccttgcccctccttggaaggcggcttccaggctgggccagggtaggaggagtccagggtcctttaggcaggccggcagggggaagggcccagagctccagctcctggctcccggcccaagttgtttctaaatttgttccccaacccccacagggaccctgagccgcacgtggttttttccgtgatagaacttccgtctgtgtgtgctggcctgtcctgggcagggggctccaggctggggacggaggaagggggaaaggaaagacaatgagcccactttggggggcccccgattggggtcaggaggggaatgaaaaagcggggagaggagtaataagagagggattgggggtatgcagctcggcagaggaccctgcccgccccctgtgctgctgccttgctcccgccttgcttacacagggcctggagcccctccccccagctgtaagccctgtgtgtggggtgacaggtggaagggataacctgggggaggtgggggccctggaggacaggctgaggtgcaggagcccagggtgggggcacagcatgcagcaggggccctcggcctcaccaggtgtcctgagcctgaccaagccaggagggctctgagcgctagagaactgaagcgggaatgtgacctccggccaggggatctgggcaagccggccaggcctcccccctttggcgcctccgtccagcccaagtcccgcctgggccgcaccccctgactcacttcctttgcatagaagcggaaacctccccagagcttcctctactccggccgg

SEQ ID NO: 18147 - DNA, 1017 bp, Artificial sequence
  DNA replication origin
gccttgcttacacagggcctggagcccctccccccagctgtaagccctgtgtgtggggtgacaggtggaagggataacctgggggaggtgggggccctggaggacaggctgaggtgcaggagcccagggtgggggcacagcatgcagcaggggccctcggcctcaccaggtgtcctgagcctgaccaagccaggagggctctgagcgctagagaactgaagcgggaatgtgacctccggccaggggatctgggcaagccggccaggcctcccccctttggcgcctccgtccagcccaagtcccgcctgggccgcaccccctgactcacttcctttgcatagaagcggaaacctccccagagcttcctctactccggccggccgctccctggggacccacaggtgtcgctgcccctccaggccgaagctggcccaggaggcccctggcccaccccctcgccctgggaggcgcatttcctgcttggagtctcaggccccagcgtctggcacaggcaggggcctgcggagctgagggcagtggaccagctgcaggtagggggtgggttggggcccagggcccagttcctgccagtcagtggctctcttgctccgaccggcctcttctttctgtccatcttttcgtttcacctccactagtctccggggggctccctgcactgctcagctcgttcactggaggggtgttgggaggaccccagttttggagtcggggctgggaggcctgggttgagcctggggacggggcccgggcctattctcaaaatcataagttccagccagacccccgccaagtgttctggagcgtgtgggggcgtctctgaactcctgggcgctcaggcctctgcttcccgcggcccctccttgggagacggcccagtccagtgggagccgcgggcgggggcagggtccgggggtgactgttcaccccagtgggcgcctgggcggccactgactccttcgacgactcctccaggaagccggggcggccaccagataa

SEQ ID NO: 18148 - DNA, 1638 bp, Artificial sequence
  DNA replication origin
gggaactagcggggcccctccggggacaccggcgctggtgggcgcggtctccgggctgagttcaggcctcggggccggaggagtcccacttgccaggggcgcccgccgtgtgcgctcgactcggggcttccggcgcggccccgcctccaccttcgcggtgcccccacctcgacggcgccccgcaccggcgtgaaacctcctcgctgccctctgagcccctttcgggactggtcatcgccgcccctgcgctcctcccgggcaggcccgggttgggactgcagcggggccggcggcggggacagaggatcggggcggcctgggggactcagggcccagccgcgcgctcagcccccggcgaccacagaagccaccggctgggccgggcgcgccacaaggcggcagcagcggggctgccgggtgcgtcccagacaccggggctgtgggaggaggcgagaaccgtcccgaggcaaccgccggccccgaggagacatggcgcaaaaaacgcccaaagcaccttcccctaaagcccccgtgggcgcggtgggcccatccacgggaggcgtccaggagggcttccgggaggcggcgcgtggggagtgtggggtgtggggtcgactggcgtggggagggcgctctgcgcagagggtgcgggtgggcggaactcggggcacaaaaggccccagggaaagggaggtcgcgcaatcgtggtgaccaggggactggccacgggctaagggtcccacgtgcggagaagagggggatggggagaggcctaggcacctcccgcttgccccgcgggctctcggtcacccagtaagcccaagccagggctggcgggcccggggttggggggtccaggaaggagggggagaggctgcctgaggcgcctccgcctccgctcccctccccttactgtcaagacactccagccttgagctcctgaaaacacgacctgagtgaggggtggggtgggtggagaaggcagccagagccccagcactgtcatggttggctgtggcctcctccggggtcatctccaggggggccggaatgagaaccccacttcagcactgagcaacacgcgaccacccccaagaggcggggtcacgtcccagctgtgtgaccccgggaattgttggccctgagatcatccttgtaccatgggaacccacctcttggggccacagggagaacgcaccagaccatgcctgggacgcccagcagggcaatgggcaagtttgggagggaggtggctgctgtcctgccgcccccagggacagactccggactctgaggcgggtgtggacctggaagcagagctccaagctgatccgcacccaccagccgggcagccacaaattcactagaaacctcaggggcctgcaccagcccacaaggtccctggtcgccctcctactgccgccatcaacccaaacgtcccgtcctgcgcctccactacaggaggttcaccgtggccaccacctgcttgcagccggtgacggcaaactcgcggccagccacgcggtagaagctgagctgcgcggccaggttctccgcgcgggcctggtcaggaaagaagccctcacccgccatctcgtcccggaagcagctgaccacatcccgcttgtccagcagcag

SEQ ID NO: 18149 - DNA, 1142 bp, Artificial sequence
  DNA replication origin
gctcagagggcagcgaggaggtttcacgccggtgcggggcgccgtcgaggtgggggcaccgcgaaggtggaggcggggccgcgccggaagccccgagtcgagcgcacacggcgggcgcccctggcaagtgggactcctccggccccgaggcctgaactcagcccggagaccgcgcccaccagcgccggtgtccccggaggggccccgctagttccctgagcagaggtcctgcggcttcccggagggtgtcctgttctctcccccgcctcgcatccattctcgccctggtggttggtgtctgtggtcgggggcgagggccgtctagtggagacggggattcaggccgcttgaaagtctgggatctctgggcggatggcagcggctccgcggagctcgagctcggcgcgcaggtcctgggcccagggcgggagcgctagcgagagggctgccccgtcctgcccagagggtcctgaggactcccgctgctcctggagtcttggggaggggtccggctccacggggtgggggtgggggctaccaggaaacctttgcctcctggggctgtgcaggaccggctagccagcgctgggaaccagggctgagttcagcccagctctgtccaccccaaccccagggctaggggaaggagctgggagaaggagccccacctctcccaggcgagtatctgtcccaggagcccacacagagggacacccagctctggtctggccttcgtgttggcttcaaggtggtaacagagagagctgcagagtgggggtgtgtttgccagtccctgcatgggtgaatgttggggtgcccactgctccccaggcaggacccccaggactgtcagctccccttcccacagagcacccacctggaggtgtcacctgccggcaagcgtgggccattcatccacctgtcagtcaacaacacccgctgagcatcggcttgtatcaaaaggtccagacctaaggggaaattttatctctttctttctttctttcttttttttttgacacagagttttgctcttgttgcccaggctggagtgcaatgacacgatctcggttcactgcaacctctgcctcctgggttcaagcgattctcctgcctcagcctcccgagtagctgggattaca

SEQ ID NO: 18150 - DNA, 963 bp, Artificial sequence
  DNA replication origin
gctacttgggaggctgaggcaggagaatggtgtgaatccgggaggcggagcttgcagtgagccgagatcgcgccactgcactccagcctgggcgacagaatgagattcactctcaaaaaataaaataaaataaaataataaaaaaatagaaaaggaaagaaaaagcgcctctgcccggccgcccctactgggaagtgaggagcccctctgcccggccagccgccccgtccgggagggaggtgggggggtcggccccccgcccggccagccgccccgtccgggaggtgaggggcgcctctgcccggccgcccctactgggaagtgaggagcccctctgcccggccagccgccccgtccgggagggaggtggggggggtcagcccccctgcccggccagccgccccgtccgggaggtgaggggcgcctctgcccggccgcccctactgggaagtgaggagcccctctgcccggccaccaccccgtctgggaggtgtgcctaacagctcattgagaacgggccaggatgacaatggcggctttgtggaatggaaaggcgggaaaggtggggaaaagattgagaaatcggatggttgccgtgtctgtgtagaaagaagtagacatgggagacttttcattttgttctgcactaagaaaaattcctctgccttgggatcctgttgatctgtgaccttacccccaaccctgtgctctctgaaacatgtgctgtgtccactcagggttaaatggattaagggcggtgcaagatgtgctttgttaaacagatgcttgaaggcagcatgctcgttaagagtcatcacccatccctaatctcaagtaatcagggacacaaacactgcggaaggccgcagagtcctctgcctaggaaaaccagagacctttgttcacttgtttatctgctgaccttccctccactattgtcccatgaccctgccaaatccccct

SEQ ID NO: 18151 - DNA, 1679 bp, Artificial sequence
  DNA replication origin
gggggcgcacccggctcgcagcgccgcgcacccactcgccccagcgctggggtcgcggcctgggacgcgcggctcgtcctggggaccccgccccgcccaccagacgccgccgcgcgtggggctagagtgcgcccggcgcaggtggggaggggggtccgacccagcgcggacctcgccggagacaccccgcccgccccggcccggtccgcgggggcatgcgaggcaggggagggggcgcgcccggggctcccaccgacctcgcccgggcgcaagggccggagcccccgggttcccgagcctcggagccgccgcggctgtgctgccgccctgtggccgccgcccgcactgcgcctcgggcccggccgcgctccagcgcgtgcaccccgcactccgccctgccccggacctccgcgggccccgagtcttcctgccagcccctcggccccagggaggcggggcgggcgccggggtagacggcggggccatgtgggctttgctagctcgggagcggggcggggtgggaggctgcggggagccgggccccaatgcccggaggtcaggggcgccctggggcagaggaagcggcaggtaccccttagcgactcgtggcttctgcagcccctagaaggacccccagacgagggtctggaaaagtgaccccttcatagtcctaaacaagcagttggcaatggtgtgccgttctccacgcggtccgatgggaaagggaggccctgagccgcaacgagtaagtagatagtcagcaggaccacgtggacgcgaccaaccacaggtcacacttcggacgggagcaggacccggcgcccatccctcaggaccgccgagagccgggccctctgggccgcaggtgccgctaccttagccatggagccgcagcagaggaggccggcgctggaattgcaggctcgtcctggctgccccgccgcactcctctcacggaagtggctgtgccggaggcgcgagaacagaactctgttcagacgctcgcgtgctcggagaatggagcctggagacctggttcacacccgctatgtgtttaaatggataaaacgctcctcaggtctgtgagcctgcaaacaaggtccccactgccatctgctggccccacagacaagaacccacacaggaatgaagcccaaaatatcccataaactttccaaagagaaatgacaaaactgaaatagtagtggtgtcaaaacacagtgtacttctcagcccaatgaagctgggatgggtggcccagggagccccagacttcatggataggcttttcgttcacatggctcaaaatggcaccccagatccagccatcacatctgcactccagccagcagaaaggaggcagggccctcttcttcaaggatgcctcccaaaagttgtgttgccacagctgctcacatcccattggctagaacgtagtcatacgacccacctcactgcaagggaggctgggaaatgtagtctttaatctgtgaaatgtgcccgcttaaaacggagccatggaggaagaaggactagcgatctggggggtaggggttgggtgggcgaaaggctgtgcctccctcggtggcgtcaacatcctggccatgttgtcacatgcacttgctggcaaaattcccaagccatgcgctcacagtttgtgcagtgatgagtgtggcaaa

SEQ ID NO: 18152 - DNA, 1369 bp, Artificial sequence
  DNA replication origin
acaggcttgtccttgttaggaagcccggggtagcacattcctagaagcagctcagtggagggggaggctggccacctgtgcgccaagagtgggcctccctggccacaaggggaggggggggcagctctggggtatgggcaaaaaggaggaagtacctggtctctgggtatggccaggtcgatgctgctatgtgtctctgatgcctgtttccctcctgagttcaggggcctgtgcacacgcttcttccagtgcttctgtgttcagcaggtcacttactgcagcagggtgttggtaggtattagcagctatggtgggtactggcctatggcagagttactggggagtccccaacccccctccccaggcaggcccctttgtggccagggtgagaaagaaggtctgggtggcccagcctacaccgtcagccccggcctcccagatctgcaggtgtgccttggaggccaggtgaggtgtccggccgagaggcacggaggacagccacggtggaggggctggcaggtgggggctgggtccctgggaacccctgagagaaaggagacagtcccggcaaggtcagggcctgccccacatcccccgccaggactgctgggctcccgtccaactgtctgtctctgatctgaccccggctggaggcaggaagcactgacgttggaacagacgccacggaaagaccaggaaatgcaggaagatggtcagctagaaagagtgatgtctgaagccagcaggcgtgggagccaggacacagcaggccagaggagggtggacaggacttagaagccagggagacgggtgcagggaaggaagagcgggaaggagctgcccgctggggtctgtcccccaaaggcctcatagctcagcacaggttgggacagaggggtcgtggacactagaacacccggcgcacagagcctccgacatcggtaaggccagctgcccctgaagctccctgagcctgcggggaggaggcagcgtccacctgggccttgaaggacgggaaaggaggccccgcgccagggacacctggggaaggaagcctgaggccgggatgcgacggcttggaacacgggaggggccgtggaaggtctgggaacctccgcaactgctgcttccagggcctccagtgcagaccctccggggcttggaggtccccgggaggccgccctccacccacccccgcacactcaggctccaccgcccggagccgctccccccgctggaaactcccaacacccgtccggcgcattcttctgccgggccgtccttccgaccgtcctccgcgcgtccgtctgtcggtctttcttctctcgcccctccaaagccgcggcccccattcattcccgaggcctct

SEQ ID NO: 18153 - DNA, 860 bp, Artificial sequence
  DNA replication origin
gagcaggtagacacacactctaaaaccaggcacagccctagggagcaggtagacacacactctaaaaccaggcacagccctagggagcaggtagagacacactctaaaaccaggcacagccctagggggcaggtagacacacactctaaaaccaggcacagccctagggggcaggtagacacacactctaaaaccaggcacagccctagggggcaggtagacacacactctaaaaccaggcacagccctagggggcgggtagacacacactctaaaaccaggcacagccctagggggcgggtagacacactctaaaaccaggcacagccctaggggcaggtagacacactctctaaaaccacaattttcttcccacctctgggggtcagatttatgaatgaaatctcagctgggagggtccaggtgttgagagcccaggaggacggtccggggacgctgagcacagcctacaggcttgtccttgttaggaagcccggggtagcacattcctagaagcagctcagtggagggggaggctggccacctgtgcgccaagagtgggcctccctggccacaaggggaggggggggcagctctggggtatgggcaaaaaggaggaagtacctggtctctgggtatggccaggtcgatgctgctatgtgtctctgatgcctgtttccctcctgagttcaggggcctgtgcacacgcttcttccagtgcttctgtgttcagcaggtcacttactgcagcagggtgttggtaggtattagcagctatggtgggtactggcctatggcagagttactggggagtccccaacccccctccccaggcaggcccctttgtggccagggtgaga

SEQ ID NO: 18154 - DNA, 1741 bp, Artificial sequence
  DNA replication origin
cgccgccgtccgcgcgccccccgggcgctccgcgtctctttgcggtcgtcccgccccttctccctccggccacccggggaattccaagctccctcagcagccagacccaggccttgcccggtacccgagcgcgaccgccaggtggccccgagggcggcctctcccgggcagggggttcgcgggcatctcaggcccgtggcgaaggagagacccctctgagcggagaggcgcgcggcgaccccggccagcccgcgcctccgggctcaccgtccacgcgggtggcaactccaggccctgacgtggggccttcagccacgcgggtccttcccgcgcgcgggcagcctcatggccgccggctcagcctatgtgtgccccaaccgtactgatgcgaggggcctccggccggccaccgcggcttctatcgcctggcggtgaagggggttccgctgtcctctcgggaggaagccccgggccggggcgcagcgggagggtcgggaccgcggcctgcctccctctgctgcccacgcaccagcatgcgggacacataggtcctgcccaggtgagcagggctaggtgtggcgccagggccagaagggaattctgaaacgcctggcttccaaactgtaaaacccatttttattgaccactctaacaattgaccgggaggcactagcaggggaagcacagcgcatttcctcattagagttttacagtttacaactcgctgtggtcgttggaaattaaggaggagtgattctcaggcgcggagcaggaggccaggcaggctggggcttgaattccttctgaagccaagccgggaattccgcgcaggcagctctgagctcgggctggggagacccccatgccaggccttgtctgaggaggcttccgcccaccagctccatgtccccacatccggctccccacaggggtgtgtccccaccccatgctgtgcccatactggcaggaaaaactgggcaggctcccttcgggacagaccctggctgaccggagcagggtcctgaggccctggggtcctcctggtgggctgggaacctctgtccctcaaaggcacagctcagagctcgctctggtcttcctggggccgtgatcccgctggttctgttcagctctctcctttgggcctcactgcttctcccaggagctctcaagggggccacggagggtggaggggtgctccccaatatgcaggtgaggacacagtggagtcccggagtaggcccccagcagaacagagatgggcgctgtggagcccaggcccggggcagggatggcatggcctggcctgccgtgctctgctgggcacctttggcctcttaaggagggggagccgctgggctgcctgctggtccctggtgctggctgtgtctctggacctcagaccagggctgggtgtgcagggtgctctgagctcactgtcaggagggcaggagctctgtcctgggcattgatggattttgtgcatatgcccagggcccagccaggctagactggcaagaggcagagggcatgactggggggtgggcagagcccttggtgctcaacaggcacagggcctcccctggagggtgggtggtttgcaaacaggccgaagcccaggtgggctcaagccgggcctggagaaggcatttggctatgctgtgggccaggagcagggcctgggagaaagtgccgtcggcatccgtggcggcggcaaacaaaggggccctgtgtgagctcg

SEQ ID NO: 18155 - DNA, 1107 bp, Artificial sequence
  DNA replication origin
gctggtccctggtgctggctgtgtctctggacctcagaccagggctgggtgtgcagggtgctctgagctcactgtcaggagggcaggagctctgtcctgggcattgatggattttgtgcatatgcccagggcccagccaggctagactggcaagaggcagagggcatgactggggggtgggcagagcccttggtgctcaacaggcacagggcctcccctggagggtgggtggtttgcaaacaggccgaagcccaggtgggctcaagccgggcctggagaaggcatttggctatgctgtgggccaggagcagggcctgggagaaagtgccgtcggcatccgtggcggcggcaaacaaaggggccctgtgtgagctcggtgtgggaacgcggggccccgccacgggcgtgaaatcggcagcggcccctggcgagggccaggcggtgcgggcgccccggcaggcacagtgaggctggtgtggcggccctgcagggcgggaacctaccccctgcccggggtccagagcggggtcaggcagaggtggtggggcctgccacggcagtgtggctgtggcccaaggcaggtacccaggctcatctgtgggactcagaggctggccacaccacactgcccacagggagttcgctgagtggccctggctcctgctcctccaccgtggctcccagctcccctgggcacacccacggccctgaagctgctccatttgaggatgggaaggggggaggggccgggggggcaacagctctgagtcagcacttcccgaatgtttgctgagggacatccaaaaggtggacatctgttccaaatgctgggacacgggggtccacctccagccacccagtacttgtgctcgagaggaccccctggtgtttgccggtgttgcttggagccttctgctgtctgggaggccctgccctgggacctggcaacaggctcagctccgactgtgcagctgggccctgtccttcctcccctgcctgtcctgaggatgctggccccgggggtgccctgcctgtaacccacctgcccccagaaggcaatggtggggccccttctctttgcatgcaccccctttccttccttccctg

SEQ ID NO: 18156 - DNA, 1595 bp, Artificial sequence
  DNA replication origin
gcctgtaacccacctgcccccagaaggcaatggtggggccccttctctttgcatgcaccccctttccttccttccctggaggctcagagcagtgggcaacatggggagggaggtctgtgcggggtggccggcccgcctgggagggcccagggaggacagcgcagaaggggcagctggccagagctgggccgaggcctgcggccaccttaaaggcgctaagcagggagggagggtggcgggcagtgggggcggggcttccagctaattcattaaaatgtgtcgggagcgtgggaaagaggagagtgtttcttcccagcagcccagacacctggtagaagggctgagaggatcgagatcaaataacaaacactcagcccgggccagcacaggccgcggcggaggaaggacgcccgggcaggaactgccgcagacaatccctgcaaccggtggctcctgcccgccgggatggctgctcaaggcatggcctggcactggcagcctcggccacccggtcagcctggtgtctgtcccctagcccaggaagcagcctgatgggtgctgaccccagtgaccgaggcgtgcttccagcacctggaccaggatgggaactgggcagagagcctcacccccaccaaagcctgggcctgggatggacgccgcagagccaggccgagcctatgctgggtagtgagggacgtgtggaggcgggaaacacatatggcacagcacggccatggcggaaagtgagggcgggtggaggcggggccagccgggagggacggaggatgtgtggttctgtctccttgcggcctctgcaccactctgcctccctctgccgagagccagcagcagcacttgggcctgtgttgggagcaggatgcagccaggccgggtggagggtgggtgccctcagccactccctcttaaaccctgccaggcaggagttcggtccggggctgcctccccaggacaggaatgtggagctggggttcccctcccggaagcagatcccggtcccagaaggccctgaccctctcctggggtgctgctctgctcaccctggtgcccccacctgactctcaggctcacgccctgcggctgcccagcaggtcaagggggcaggtcaaaactcgagttggctctgacacaggccaggccctccccgtctcagcctccccctccccatctgtgaaatgacacccctgctggggttgctgggggctgaaggggttgggctgcagtccttaggggtacccaggggcagtggccagccctggtgtggtcgggacccacagggaggccccgactgggccagtccagggatgcccaaggccttcgcacccgaagcctgctccttactctgggcagaggcggctgcttctccccagcccgcccccaggcccctgctgcccgaggcttccgcccacctcctcggccaaatctgagctgatttccgctccaggcaggaagcagaggaaaaggatgtgggtgaggggagggggtacattcctgggatggtccctccccgggcttctcctcctctcccacctctgggaccccctgccctccctgctccacctgacagagcaccctcg

SEQ ID NO: 18157 - DNA, 2125 bp, Artificial sequence
  DNA replication origin
ctggtgggccaggcagggctggtggctccagggggcacattccaagggagctgcaggaagtggagaccctgacacgggcggccacatgtccttgtgtccacaccgtgaggcagtaacacgcttcctggctcacaccctgacacccacccacatgcagacgcccgtgtccctggtgcttctgagagacgtctccccgcgcacgaggggctggctgttgcgcacgtgtgcccagacccggcctccggagactcacgtgccctttcactcctctcccacactcagggccctggcttttgggggctctggggtgagggctgtgggcccagttgtcccgacccccagggaccttctcgccgccgacgctgcccgaggcccatcccccacactgtctgtggagacattgtcctggccacacaaaggggacggggcagcggctgggtgggggaggggctggggttcgtgggaactgcccttccggggccctgggggcggggggacagggggcaagggggcaggggcgaggcctctccagggctgccaccctcagtcacaggctccagacgttcccggggccttagggcgggggtcactgagcgggtggctaccagcttgctccacggggatagactgggttttaaaagcttcccaaaagacggccgctatccccagctgcacacacctccccaggggccaggggctcggccttccgcccaccccagcactgtctccagtggaaagtcagtgccgggactggccaggttcttttggcaaactcgcaactcccttctctctgaagaggctcacagtgccacagcaggggacagtgtcgggtcacctttggggcgggcagcccagggctgcaaggcactctggggacagcgtgggaaggtgaggtgtgggccagacccaggcctcggcgggcaggttggtgcctgattgcttcttcctgggccgctggctcgccctgtccagcaaggtgtcaggcccacaccccagtccccaccatcggttgggcggctctaggggaggtcagagtgcacagggcagcctgggggcctcaggacccacccaggggcttgccagggaccaaatgtgcaatgtccatcctgggacggcacactggcgacccccgccagcatccctcttcccgatgtgaggatctccgcacacagtcctagccgtgcagaggcctgtccagggaaggtgctgggcaccctttcgtgtggtgggtggtgggacggagtgagattttatctttgctctttcatgctttgccgttttcccagtttgctctaaatgagcagaaatgtcctgttgctccagagtgtgctcctacagccccatcgccctgcctggtggcctcaggccttgactcctcctggacctgcctgcagggttggaaatcccaggttggcaactcctgcaggagttccacccaggccagggccccagcccgacggaccccacctgccacaccccccatggggcccagagggaggagtgcaggagacaggcctgggctgaggttgcaacaagcttgctctttgctcagaagcaggaggccccaaagaggcccctgccaccctcacactcccaccccaccttctcagggggtcatgtctagctgggcttgggcacagagcagaaacccctcaggccagatcacccgagggacctgggctcattcccagcctggtggtgggacctgagctccactgggctaggagagcaggggctgtgggagtccccagggtggccggcaggcaggagggatgctcaggtcacctctgcccaggcccagcagacacctggcccagtctcttggaggagcagagctcccttcccaggctcccaacccaacaggccactgcctgctgccctacaccccaggacacgggttccccacatgctgtggccctggcaggtcccagggctcgtgtctcgccctcctctttccctcaagcctccgacttgtcgagacccaaggcctcaggggtgggtggggtccaagggtgttgtgtgcaggggctatgtgcagctgcccagtcctgtctgcctgggagcgtccagtcctccctcaccactcctgtgcaccagccacctattgcttgggatgcataggctg

SEQ ID NO: 18158 - DNA, 1132 bp, Artificial sequence
  DNA replication origin
gaccctgtgtggcccggcttctgtttggtttgacccaaggcaggtgggagcggcccgggtctgggcggggagtggggtctggggctcctgaccctgtttttattcctcctgcccgcccagggcaggccggggatctgacaaacacaggcgcttgctaacaagaatctcagaaaacggtcattttttcatataaaaaagtatcctgcactttatctgaaattcacactacggggctttgtgtcctgctgccccctcccccggggtgggggctgaccatcccatgtgagtgggagacccggtgccggggcctcggcctcctgcccaggccctgtggctcacccccagccctcctggaccgggtcagccgggggcccccaagtctgctgcaacaggggccacacccagaggggtgccagacacccggggctggggccacaggcttcagagctgccagcgggtcaggcccacacgcgtggtctctccggcggtggcggtgggggtgcaggctgggaggaggtgggcaaaggcagccaagccccaggcctggacaccaaggtctgagggcacagggtggggtggccttccttcatcagggcccaggcccgaaagcccggtcggggggtgcccagggaaaggctgaggcccctcacgggaacttggtctggggtgacctgtgcagaggggtgctgggccaaggagggcaaggtgtcgcatggtgacccactgccaggcgctagcccccaccctgctaagcaagccttgggggcagcctggtgggccaggcagggctggtggctccagggggcacattccaagggagctgcaggaagtggagaccctgacacgggcggccacatgtccttgtgtccacaccgtgaggcagtaacacgcttcctggctcacaccctgacacccacccacatgcagacgcccgtgtccctggtgcttctgagagacgtctccccgcgcacgaggggctggctgttgcgcacgtgtgcccagacccggcctccggagactcacgtgccctttcactcctctcccacactcagggccctggcttttgggggctctggggtgagggctgtgggcccagttgtcccgacccccagggaccttctcgccgccgacg

SEQ ID NO: 18159 - DNA, 1213 bp, Artificial sequence
  DNA replication origin
cgtgggaaagtgggaggaggggcggcggagggcggggcgcgcctgggaacggcccccgcccccgcggccggccttggaaacggccactcagggcgcccggcggagattcaaaagctaacggccgcccgcccgcggccttcgcgcgccggcctgggggaccccgcctgcccgtccagggtcgcaggggtgtgtgcagggggccgagacaccctccttcccaggggccgcggggtcgctgggggactcggccccccgcccgcagaggggggtagcccgcgcgccccgggcgtgcccattccaaccaatggggccggtcccggcagcaggtggcaggccctgaacccgccccaagcggccctgggccgaccctcgcagctcccagtgcccgggaggcagggccccagtactccctccaggagcggtgatggtcccgccatcgactgggggacttcctggaggaagcgacgtctaagctggggcctggcaggccagggggagacggaggctgctccgggctgcaggggctgggggacaacagagtggggcgagggccccgggctgggcagggtagagccgctgggggctgagtctaagaggaggccgcggtgggagccgcgtgggctgctggagcctgggagccccgccccgcacaggggcctaggtgtgacgggcctgcctggatggaaggggagtggcccgttcagcccaccctgctctggtccttccaggggagctctatgtgggaggggcacgttgtgggatcttcagaggagttggggagctgggcagggacctcttctcctctccccacttcagcaaacccatgtcatgaggcataggggtgcagggggcagctctcctgctcagcctgacagggcggcccaggtcattctctgagcgtggcgggcctggagggggtgggaaggaaagggtcaggagaccccagccggcctgtgaggaggctgaggctcaggagaggcagccctgcctctgtagctgcgggcaggggaggcggccccaggcgcgcacctgccagcccacgcggggcctctcctgttggatgggcaaaatgtggcgactggacacagaccctaccttgtcaccctgaggagctccccaggactccctcccttgaacctggccatggccggtccctcctgcgtgcacccctggcaccccgaggacagcctgcccatcccatccatccaggctg

SEQ ID NO: 18160 - DNA, 1547 bp, Artificial sequence
  DNA replication origin
cggggtggggtgtcggcagatcatccctcgtgggtccggggtggggtgtcggcagagcatccctcgtgggtccggggtggggtgtcggcagagcatccctcgtgggtccggggtggggtgtcggcagagcatccctcgtgggtccggggtggggtgtcggcagatcacccctcgtgggtccggggtggggtgtcggcagatcatccctcgtgggtccggggtggggtgtcggcagagcatccctcgtgggcccggggtggggtgtcggcagatcacccctcgtgggtccggggtggggtgtcggcagatcacccctcgtgggtccggggtggggtgtcggcagatcatccctcgtgggtccggggtggggtgtcggcagatcacccctcgtgggtccggggtggggtgtcggcagatcacccctcgtgggtccggggtggggtgtcggcagatcacccctcgtgggtccggggtggggtgtcggcagatcacccctcgtgggtccggggtggggtgtcggcagagcatccctcgtgggtccggggtggggtgtcggcagagcatccctcgtgggtccggggtggggtgtcggcagagcatccctcgtgggtccggggtggggtgtcggcagagcatccctcgtgggtccggggtggggtgtcggcagagcatccctcgtgggtccggggtggggtgtcggcagagaatccctcgggggtccgcggtggggtgtcggcagagcatccctcgtgggtctggggtggggtgtcggcagagaatctcttgggggtccggggtggggtgtcggcagaaaatccctcgggggtccggggtgaggtgtcggcagagcatccctcgtggtccggggtgaggtgtcggcagagcatccctcgtggtccggggtgaggtgtcggcagagcatccctcgtggtccgggttgaggtgtcggcagagcatccctcgtggtccggggtgaggtgtcggcagagcatccctcgtggtccggggtgaggtgtcggcagagcatccctcgtgggtccggggtgaggtgtcggcagagcatccctcgtgggtctggggtgagatgttggcagagaatcccttgtgggtccggggtgaggtgtcggcagagaatccctggtccagggtgaggcgtcggcagagcatccctagtgcaggctggcatggccacggggacagctccaatcaggcattggcttggatttggggaattccctctggctcccatggggcttctagaaggaatcgagggaaattgtggaagtcccttcaggctgggtgggtcccactttccaaaggcaacacgcaggacagcctgcgtctgcttggtgacgtctaacaaggtctgggcaacagaagccctgagtgggaactgccgcacctcggtggagatccatagaggaggctggtgggggcaccaaagcccaactcacctctctccctcctctcctgtccccagtgggggactgggctgaggcacctgcccagggctgcactgtccaagcttgctatgccccacaccaact

SEQ ID NO: 18161 - DNA, 2621 bp, Artificial sequence
  DNA replication origin
aataaacacccacatgatgagtaaaaacaactaacatactcccatatgatgagtaaaaacaactaatatacacccatatgatgagtaaaaacaacgaataaacaccgacatgatgagtaaaaacaactaatatacaccaatatgatgagtaaaacaattaatatactcccatatgatgagtaaaaacaacaaatatacacccacatgatgagtaaaaacaacaaataaacacccacatgatgagtaaaaacaacgaataaacacccatatgatgagtaaaaacaactaatatacactcatatgatgagtaaaaacaacgaataaacacccatatgatgagtaaaaacaactaatatacactcatatgatgagtaaaaacaactaatatacactcatatgatgagtaaaaacaactaatatacacctatatgatgagtaaaaacaaaagtaaaaacaaacacaactggtaaataaagtaaatatacgggaaaaaaccaaaggaaacgggtcaaagggaagaaacagactagttacacaggagctacacgggactacacgggactacacggggctacacgggactacacgggactacacggggctacacgggactacacgggactacacgggactacacggggctacacgggactacacagggtcacacgggactacacgggactacacgggactacacggggctacacgggactacacgggactacacggggctacacgggactacacgggactacacggggctacacgggactacacagggtcacacgggactacacgggactacacggggctacacggggctacacgggactacacgggactacacggggctacacgggactacacagggtcacacgggactacacgggactacacggggctacacggggctacacggggctacacgggagctacacgggactacacggggctacacggggctacacggggctacacgggagctacacggggctacacggggctacacggggctacacgggagctacacgggactacacggggctacacgggactacacggggctacacggggctacacggggctacacgggagctacacgggagctacacggggctacacggggctacacgggagctacacgggactacacggggctacacggggctacacgggacgacacggggctacacggggctacacgggagctacacggggctacacggggctacacgggagctacacggggctacagggggctacacggggctacacgggactacacgggagctacacggggctacacggggctacacgggactacacgggagctacacgggagctacacgggactacacggggctacacggggctacacggggctacacgggagctacacgggagctacacggggctacacgggagctacacgggagctacacgggactacacggggtcacacgggactacacgggactacacgggactacacggggtcacacgggactacacgggactacacgggactacacggggctacacgggactacacgggactacacggggtcacacgggactacacgggactacacgggactacacgggactacacggggctacacgggactacacgggactacacggggtcacacgggactacacgggactacacgggactacacgggactacacggggtcacacgggactacacgggactacacggggtcacacgggactacacgggactacacgggactacacggggtcacacgggactacacgggactacacaggagctacacaggactacacaggactacacaggactatgcaggaccacacaggagctatacaggagctacacgggactacacaggactacacaggactacacaggactatgcaggaccacacaggagctatacaggagctacacgggactacacaggactacacaggagctacacaggactacacaggactacacaggactacaccggagctacacgggactacacaggagctacacaggaactacacaggagctacacagggctccacaggagctacacaggagctacacaggagctacacaggaactacaccggagctacacaggactacaccggagctacacgggactacacaggactacacaggactacacaggagctacacaggaactacacaggactacacaggagctacacagggctccacaggagctacacaggaactacacaggaactacacaggagctacacaggaactacaccggagctacacgggactacacaggactacacaggactacacaggagctacacaggagctacacaggactacacaggagctacacagggctccacaggactacacaggagctacacaggactacacaggactacacaggagctacacaggactacaaaggagctacacaggagctacacaggagctacacaggactacgcaggaccacacaggagctatacaggagctacacaggagctacacagggctccacaggagctacacaggactacacaggactacacaggactacacaggactacacaggaactacacaggactacacaggagctacacaggactgatg

SEQ ID NO: 18162 - DNA, 1055 bp, Artificial sequence
  DNA replication origin
tgcaggggctggcacggagcctccgctgtctcggtgtggatgcacgcatgctgggcaatggtgaagaccaccgcagggcggccgaggtgagtttgcggggagggtcttggggtcctcccaaggtgcagctgcccctagcacaggtgtgcccacccctagcatcaaactcctccctccagctcatccatggctgccagctgtgccaggcaggctctgggaacaggacggggtggccaaggatggagcggttgggggccaagtggctgagatggtcccagcctcagccctcattgtcccacaaaaggaatttacagatgtaattgacactattaatcagttgaacttaaaatagagagtctatcttatttgggtgggcccagtgtaatcacatgagcccttaaaagcagaaatggggccggacgcagtggctcatgcctataatcccagcaccttgggaggccgaggtgggtggatcacttgaggccaggagttggagaccagcctgaccaatatggtgaaaccccgtctgtaccaaaaatagaaaaattagccaggcgtagtggcgggcgcctgtaatcccaactactcaggaggctgagacacgagaatcgcttaaacaccggaggcagaggttacagtgagctgagatcacgccactgcactccagcctggctgacagagcaagactccatcttaaaaaaaaaagaaaaaaagcaggaatggaacacagaagacagagagattcaaagcacaggaaggattcagtgtcccattgttggcttgaagatggaggacgccgcacaaggaaacctcagtccaacagccacaagcagccagattctgccaacacctgaccaagcccagaagcaggttcttccccggagtctcctaagaggagcctgccgtcgcgaacactgtgatttcagccatgagaccctgagcagagaacctggttgagtccaccggacttctggacttccacagaactatgttgtaagctgctaagcttttagtaaattgtgacagcagcattagaaaaatgacatggaggctgg

SEQ ID NO: 18163 - DNA, 759 bp, Artificial sequence
  DNA replication origin
gtgtgtgctgtgcataaaacagcagaaacgcagacaaaatgcagtgaaaccacccctggggggctctagtgctcatgctgggggggctccacgtgtgtgtctggggtggcgtgtgtgcccagagaggggtggggatcacggggagggggctagatagagaggggtggggatcacaaggagggggttagatagagaggggtggggatcacgaggaaggtgctagatagagaggggtgaggatcacaaggagggggttagacagagaggggtggggatcatggggagggggctagatagagaggggtggggatcacggggaggggttagatagagaggggtggggatcacaaggagggggctagatagagaggggtggggatcacggggaggggttagatagagaggggagggggagggggctagatagagaggggtggggatcacggggagggggctagatgctgccttgggccatgggaggggcctgccaggccaagtatcaggaggggactggggcactcaggggcacggctgcctcctgagcagtgaccccccaggcaagcgcagcccccgtgacagtcatgcaggaggttcaccaggactttgctcccctctcgctccaggagctgggccccctccacacgctctgacccagtggccttgtctccatgcaggtccttggtttatggacagggatctccttccccaagaatgctgacaaacggaccctgcggggcttcacccacctgcctgggtgcg

SEQ ID NO: 18164 - DNA, 1339 bp, Artificial sequence
  DNA replication origin
gccctgtccacggctggggctggcacgctcgccacccgcatctgctaagacagtgccctgcagggtaacgcgtctggccctggcggcagcacagtcaccgtgcccactcacaccagccctgcgggggctctggaggaggccccgccccctccaccagcggcccccacagcagagacggggagaaggagcggacacatccgaggagaggctccacgtgggggtcccaggctgcaggcactgcacaccagggccagctccgggggccctggtcagcagtcccacggtaaccccgcccagcccctcacagcctcagagagcccgggccctgagtctgtgtggccagctctctgtctctgttttatcttcagaagaggagcactgggtgtgccgtgcataaaacagcagaaacgcagacaaaatgcagcgaaaccacccccggggggctctagtgctcatgctaggggcgctccacgtgtgtgtctggggtggcgtgtgtgcccagagaggggtggggatcacggggaaggtgctagatagagaggggtggggatcacggggaaggttctagatagagaggggtggggatcacgaggaggggctagatagagaggggtggggatcacggggagggttctagatagagaggggtggggatcacggggaaggttctagatagagagggatggggatcacggggaaggttctagatagagaggggtggggatcacggggaaggttctagatagagagggatggggatcacggggaaggtgctagatagagaggggtggggattacggggagagagctagatagagaggggtggggatcacggggaaggttctagatagagagggatggggatcacggggaaggtgctagatagagaggggtggggatcacggggaggggttagatagagaggggtggggatcacggggaaggttctagatagagaggggtggggatcacggggagggggctagatagagaggggtggggatcacggggaaggttctagatagagaggggtggggatcacggggaaggttctagatagagaggggtggggatcacggggaaggtgctagatagagaggggtggggatcacggggagggttctagatagagaggggtggggatcacggggagggttctagatagagaggggtggggatcacaaggagggggctagatagagaggggtggggatcacggggagggggctagatagagccccaggggctccctcccgcagctcctccaagtggaacccagggctcaggtctgggggaaggtgccctcacaccagataacggccccacaggggctcaggga

SEQ ID NO: 18165 - DNA, 1364 bp, Artificial sequence
  DNA replication origin
agctgcctgtggggccgggtgggggctgagagtcaccagagaggtgcaaggcgcctgggcgaggccggaaggaggaaggccaggcccccccagcccggtgccagcgcagagccggccggaagggcagcggacgtcctgaagaatgcgggcggcttccacgtattgtcgtccacgtgggaacccacgccggggaagcagcctcaggctgctgggcctgaagccagcggggcaggcggaccctcctcgaggccgtggggtgggaggtcgtgcaggagctcagcctgctgggcaggtcccctcccttcccgcctgacactcaaggccatcctggacccatggactccaggaccttgcggggagggagaccctcgcttgtgctgggccctgcatttcccagcgggggctgagggtcccgcaggcctgtaggtgcctctgctcctgggctgggcgctgccacggtggctgcggggtgggagagagctcaccctggtgaggatgaggtttctcaggacccccttggtcattgccacccagagggcacccctctgtctgctcctgggccatgggtgaatgggtgcccaatagcctcctgagccctgccagccaaaccccacataatgaggaggaggggaaggggcagaggggctcccctggcaagaggaggagcgtggagatggggcaggctgggcaggtgctccagaaaacatgcccgggctcctgggacccggggtgggggcagatgcctggtgagagcaggagggccggcagaggcttggaggccgggaaggtcagtggaggcttggaggccaggagggccagtggaggcttggaggctggaaaggtcagtggaggcttggaggccaggagggctggtggaggcttggaggccaggaaggtcagcagaggcttggaggccaggagggccggtggaggcttggaggccgggaaggtcagcggaggcttggaggccaggaggggccagctggggctgaactgaggtgggcagccttcacctcaggcttggagacccggaaggccagccggggctacactggggtggacagcctttgcctcagcacctctatctcagccgctttggtcctgtggaaccttgacctcaggcaggacagatgctgcaggcctcaggtggacggctgcccctcctccccgagtgctcatagccagtctgcaaggtcggggtctacgggggtccctcggggcagggccctgtggcacagcaatgtccccatctccatcctcacggccaccctcctcacagggcctggtggggcagagcccgtggcttcaggagcagctgtctcagctgctggtctcccacagtgacccagtcacggccgcccagt

SEQ ID NO: 18166 - DNA, 1683 bp, Artificial sequence
  DNA replication origin
acatggcctattgtgggaccctgtgatcgtgtgagttaatacttaataaactcacctttatatatatatacacatatatatatatcctgtatataatatatatatgtatatatatcctatgagttctgtccctctagagaaccctaatacagacactaagctggagcttggaggaagcaaaagaaaccttaaaagcacaaatgctgtaactaagatactgcgtctgtgaagtggagatgggggccccacagaaagagctttcagactgtaggacagaacttggtggatgaaggacaggatgggaaatgaaagctcagtgggaggtttggaaataatttgaagttgtcttccaaaaagcagtacaaaatacataaagagaaggaaaatcaaagagaaaagatgtttaaaattggagattctgtcaagaaggtccaacatacaaataactgggattccaggaagaagggagagcagggaaggaaactcctaagtaattcatcgctgacaggtttccagatgtgaggccacgggagcccccacaggagccggacttaacaggtttgtggagtggccaaaggtgggtggagagagaccccctgtggggcacgttgtcatgaagtttctcaacactagtgaaaatggaagagcctcaaaacctccagaagagcaggccacatcagaggggcaggaataggaatgggttctggggtctcaacagcagttctgggagccaagcctgcctgtgctaagggaacgttatctcaacccagaagtcttggctccactgaactctcaagctggtgtgcagcgggcacagaccctggaggtgcacatctccaaaaataccccgtggaccttatcttgggaaacacccagcggctgtgcttcaccactacctggaggtcggagggtgtggaccagggcatgggggtgtcagtcccaggaccttgcagggcaggagctagagagtggctggaggggcaggaggagccaagtatcaagggaccaggatgggtaactgagaaacaacagagccagataagcattaaccctgaaagcagcagcagaaggctgggccgttgaggccgttgcacagccagaatatcaccagtgaggaaggtgctgatttagctaaaactctaatactgttatttcgggagtccaccttccgtggggagaagtcaataccaaatacccagaagtcaacaatcaagagatcacaatccaaggatgttatctggaaatgtggaggcaaatacacaaccatttcaatgtcgacctccaagtgctaaggatggggtgggcggggggcggtgacgcctgcattttcttataaacctcacttgaggtttaaactatgcatgcatatgactatgatgaaaatgaaaatcttaaaatgtattaacttaaaacagcaacagaggctgtgcctctctctccccacagacggtaccctgaggtgacctccttgagcctggagaagctgagtccgaaggcgctgagcaggcaggtcttgcgtctgcaggagcggtacggcgtagccccaggtgagtccagcccccacattcctgccccacaggccagggagagccgccaagcgtggccagggacatcctctgtgactggggctgcccgttgttcaggtgccaaccaagaccaaccttcccagagagcccctccctg

SEQ ID NO: 18167 - DNA, 1192 bp, Artificial sequence
  DNA replication origin
gagccctggttagggaagggagtgtaggggggcagcaggcgcgtgggagagctctccccaggaagttctggtgtttgggtcacagctgccatgtgactgcagctggagcagctgcctctggagaggagcggctggggctggcaggagcacagccctcttctcccgagtgaaaagagttaactgctcttagaagaacgaaaataattctccgtggtggctcttctcatgcaggcatggcaaccgtactgctttcttgttcatccattcctttgttctttcatctaataaagtttttggaagcacttggtgtgtgacgtctgtcagcaattacagagaaaaggcagcacctgacaaggagcccatatggtgcctgtatggattcagggaagccatgtgcatgtgtgtgcatgtgtgtgcatgtatgtgtgtgcccatgtgcatgtgtgcctgcaggtgtgcatgtgtgtgtctctgtgtgtgcacgtgatatgtgcgtgtgtgcacgtttgtgtgtgcctgtaggtgtgcatgtgtgtgcatgtatgtgtgtgcctgcaggtgtgtgtgtgtgcatgtatatctgtgtgtgcattgtgttcgtttgtgcaggtgtgtatgtctgcgtgcatatgatgtgtacatgtgtgtgcctgcaggtgtacgtgtgttttcgtgcatgtggtgtgtgtgtgcatgtatgtgtgtgcctgtaggtgtgtgtttgtatgtgtgtgtgcatgggtgtgtacgtgtgtgcatgtgtgcctgtgcatgtgtgtgcgtgtggtgtgtgtacatgtatgtgtgtgcacgtgtgtgtgcctgcaggtgtgcgtgtgtgtgcatgtgtgtgcgtgtgtacctgtgtgtgcactgtgttcatgtttgtgcaggtctgtgtgtgcatgcatgtgtgtgtacgtgtgtgtgcctgcaggtgtgcatgtgtgtgtgtgtgagatatgagggatgacatctgggaggggaggggcttcctgctctatatctggtcaaggtgccccgagagtgaagcaagctgaaaggtctgtgaaggctccagggcccatccactggcaggcagatcccggcctccattccccacacagccccagggttgtctcactggagagtcacaggcttggacttggacgtcaggccgtcccgggcccatcctcctccacttgtcctccaa

SEQ ID NO: 18168 - DNA, 1986 bp, Artificial sequence
  DNA replication origin
aatagcagctcaggcccgtggtacgtgcaggcggtcagggcccggccgtgccccgatcgcagccagtgtggccttggagcgctcgcggggtgcccgtctccgcctcgtgggaagggctaggaccccccaggcctcaggatgcgctgaggctgggggtcctcagccttggcccgtccactgcaggcaccattgtgttctggggcccgcagatgggtcgtgtgggaggtcacggctttgcgccttgccttgaccccacctcctagccttcctctggctcatcagcaatccccgagcaaggccctgggacccaggctgtgtggccagccacccccttgagtccctgctgccccatccaggccaagcccaggcctcccacctgtcccagcctatgcaaggcctggctcagcacgggggggcttgtctgccaggccaggcccctcggcctgagggccacgtggctgaacacgggaaggccctgcactccggcctcagtgaccaggtgctggtgcaaaagggtggtagccccctcacccgccgtgctgcctggcccctcccaggccctgagtaatctgccgcctttgtgtttgccaggcagccacgctgggcgcgacgttgaagctgcagtcggagcttggcgttgaaaaggtgaacgtctttctcatgtaaattgtttaggttcaaacttggataacgcccaggtctctataaacagtgtttgttggaggtcgggagtccaccaagccacagtgggggacagcagggccatcgggggccggcgagggcctccagagccccctaaaccaccatcctcctcatgggctgaccccaaatcagacgcagccgcacgtacacgaaccccgtgtccagctgtcccctgaagccctgagtgtgctccgtgcagcagctggggccaccccttccctggagtgggcaccagctgcctcgaggacacgcagcccatgtgcttctgggaccctcctctgctgcacgcctccaccgtgcagtgggctgggggaagcagtcacctaactgtgaatttccggacagatgacacagtcctcgaacccacagtgtctgcagggatggcagatccaagcttctacaatgggacttcgtgcacatcacagggacacaaggggaacctgctggttaagcaggggcagggtgggggagtgagcacccctcgggcagagccaggtggggacgggacgcatcctggtctccctaaagagggaggggtgtctacacagcctgcagggctgtgctccgggcgatgggtgcagactccaggtctacaagagctggggccagagagggctcttggggcttcgcgttctgcccgaggactgtcccccaaggcactgctgggcaggtgggccccatgcagtcggcgccaggcagcctcacctgtggggcagaggaggtgggggaagggaggtgaggagtcttcttcgaggggcgttgtctacgggaattcgttcttgctgagggaatggctggtgtgccccaaggcccagcgccacagccagggactccctcagggcctcttggaggcaccgacagcgtgtgggtcttgcagacctgctcgggaggcagtgctggtaccatgtgccacgagaaggcatttccggactaccagggctactgccagtggtttgtcttggtcctgcctccccacatttggtgacaaatgagcttccccagggtcccccttgcctcttagggcctccaggccttcatcatggagatggggatggccacagagcccagcaggagccttgggcgagtgtgtgtgagcgtgagcactggccgggcgagcactgctgggcctggacggcctctgggcccctttcgttctgacactttggccgctccctctgggttggaggtgagtcaggttttggctgaggtggcggaggctgtggcctgaccgtgtgtccccctgcagatgagcatcccactgctcctccaggacaaggtggccct

SEQ ID NO: 18169 - DNA, 2225 bp, Artificial sequence
  DNA replication origin
aaaggaccaaaatagcggcctgggaaagcctcgagccggcttccagccccggtgcgcagggtgggggcgcagggccgggggcctttccctgcgcagcgctgacccggcgcctctactgtctggccagggtccaagaggctaggcctccaccaggcccatggggcgcagggcccggggcgggggtctcagggccgtggggaggggcgaaggtccggggcggggccccagggctgtgggcaggggcgcctggcccgggaagggagtctcaggcccgtgaggaggggcacagggccgggggacggggtgcagtgcccggggcggggtgggggggcttctcagagccgtgtggggaggggcgcagggtcaggggaagggacgcaggacccggggagggggtctcagggccgtggggaggggcgcagggcccggggcgtgggagtctcggagtcgtggggaggggcgcagggccggggcggggcctcagggccgtgggaaggggcgcagggccggggaggggcacggggccaccacatggggaggggcgcagggcctgggaggtgggcttacggctgtgagcatgggcgcaggggccaccacatggggaccaccccagcagtgacacccgcagcttcacacaagggctctgatcccttctggatcagggaccccctgagaagctgccagagctccggaaggcaggggtgcagggccggacacctcaccccgttcagaaccgcagggtggtcacaacccgcccgccctctgctcctcctgccgcatgtggttattgtcaggtgcagggaagtggaggatggggctgcgcccggcacctccttgggaccaggccctgagcaggtgacgctgggaccagggaggctggggacacagcaaggggcaggtggccagggccttccctcaccgctgctgtccccagcctccctccgagggacagacttcaggctccagtcccagccctcggcgggccccacccaaccaggaacccctctgagcccaagaaggccgcctcaggcttgcagaggagcctgggtggggctgggtactggccgtgctccccaggtgggtggcttctgcctctgtgtcccgcacgctgcgaccccgtcagaggcagttcaaagtgcccagctcagcccttctcttcaccacggccattcagagcccagggctaacaggtgtctggacctttctttctaggcccacagaagctctctgggcacccggggcctcttgaggccaggtgggctttctggacatgcaggcgtcctggggcccccagcatctgtgtccacattttgtacccggagcccagtgggggctctgtggcctcgcagcttgggggacaggacgaggatggagctcccctagctccaccctggtaagggcagagcccaggcttgctcatgggcagccctggtgacaggggtggggggctggggggtggctagtagcagacccaccccttccaggaagctccctggcctgacccctgtctcaggctttgggggccctgctggccctttcactgtggtggtgcctggcttagaatcagcgtctggtcatttctgtctgaacttccctgagaggacggtgtacagctgcccactgtccatgcctggccacttgggaaactcagcaggcacaaaaaggtcacctggccccagagccaggcccagggagcagacagcagaaggtgaagagtcctggaccccgtgggaggaacgagcccggggctgggccatgaggacagatggggcaaactgggcccctctgcaccaggcagaccttcccgacctctgctgccagaggatgggaggcatccaccaggaagagagagacgaggctgtccagctggcggggtcggggtggggctgtagaaacctctagacaggcccaggagctgctgctttcaggaaaaaaaaaaaaaaaagaaaatcaggaggggctgtggtatcgaccatcgggaagggcattccccggctcccctgggccccccattctaaggggcaggaaggctgggcaggtgcccaggctcgaaggccgaggaccccagcgacagccctgcctcccacctctgcgtgggcctggagccaagagggccttttttttttttttttttttaaagcaaagctatctttttaccttgataagctgtttaaaaaatgtaaataaaataactcagcggacaaaagcaggcattcatcctgccc

SEQ ID NO: 18170 - DNA, 1282 bp, Artificial sequence
  DNA replication origin
tgggggctgtttggggcttctggtctacatggaggtatcaaggacccggccgtgggcagccatcagctgtgtgcggggtgccgggtcccaggagccctcaggctgcctgagccaacagagatgtcagggcacagcctggtcccaggcctgggtctccccctgccgaccctgtgtctcccagcatgcactgggccctcacactcacagggtcctaggtgggcctgggcctgagctttggtccagccacgccccaccatgtctgttagcctctgcgcctccggaaccttcacagaatcagccagtaggctgtcctttgtgggtgagtttgcctcctgggcactgggcactgactgagtccccggcacggcagtgagcgccctggaaggaaacgctcccagaggggccgagcagaagagctgtgggagcagctggtgccggccccgcctcccacagcacccccagagtggtgcccactcacagaagcccagagtgggcagtgccggcgcctgggacacaggacaaggttcagggccagggcaccagtcgcacctcggcacagtcgcccaggtgcgagatgcgtcggatcagtatccaacccttcactggctgctggcgggagaggtggcttcggtccctttcggtcccgggccaggtcttaagtggtgtcgcagaagtgtgggcttggcagctaaaggtgtctggatgagaattggtggagctgttggaatcacagtggtttgctgagtctcctttgtgaacaaggctgatttttaagcccagaaggttccaagaggaagaccaggtctagcatcacagccccgtcgtcctgagcctggccaagctgtgacttgggtttgtgtggaacagtagggagcagtggggcctgcagtgggtagggaggcggccgtcttgcgtggggtggctctgagctgttcctgcaggtgcaggggagcccccatgacttctcggtgccctgagattccagatcccagtgcagattctagggtgcagcacgaggtgcggcaaagaagcccgggggtgtcctgccaggggatgtcctgcttgggggtgctcggcccgggggtgcttggcccaggggtgtcctgcctgggggtgcccagccccgggggtgcctggcctgggggtgctcagctcagggtgcactgatcatgtatgaggaggccggcactcaggggcactggtccactccccgccccattagggcccccttacttcagggccgagcgtgaaggccaccaccccgctgcctgcccacgtggga

SEQ ID NO: 18171 - DNA, 1444 bp, Artificial sequence
  DNA replication origin
ctgctcggcccctctgggagcgtttccttccagggcgctcactgccgtgccggggactcagtcagtgcccagtgcccaggaggcaaactcacccacaaaggacagcctactggctgattctgtgaaggttccggaggcgcagaggctaacagacatggtggggcgtggctggaccaaagctcaggcccaggcccacctaggaccctgtgagtgtgagggcccagtgcatgctgggagacacagggtcggcagggggagacccaggcctgggaccaggctgtgccctgacatctctgttggctcaggcagcctgagggctcctgggacccggcaccccgcacacagctgatggctgcccacggccgggtccttgatacctccatgtagaccagaagccccaaacagcccccacacagaggcggccctgagccaggcgcgtccttgccccaccgcccgagaagccgtttccccatgagcccggccacgtgggccactcacttctctgaacctgccctcgtggtggaggcggtggacgtgtgccagcaggcagctcctgtctgcatcctgcagctggaagatgctggccagtggtgccgcaaggctgggggggctctcagtgaggactttgaccgctcgggcctgcagctgcttcagcctcaggctgtgctggaagagcagggacccagacttactggacgcagcacccagtggctgggccatggggccgattgaggcaggcctggcttaggaagcagcgcctgccactgtggccatgtgtgggcatcgggtggtctgcagggctggggcacgggaggggcgaggccggtctcagcacgtgactgtcagggggcagagggtgaagccacgggctgagtcttggccatagcccccagcatccccctccccttccctggcttgctgagcgggctgcaaaggcctgggcaggtggatgccgggtccactatgctgaggggcaggggcaggaagggaggtgactgtcacagaacccatgggctcacctgggccaggctcgggcatggctgtgcctgtagccagcactgcagctggtgggagatccaggccgccagggaggggccctctccccgctggccccggcagctctccagcatgtccagaagcccggccagggggtcgtccaaggcagcaaacccccgccaggcttcctcccggagctgtggagacacaaaaccacactggcactttgtcttgcactcaaagcctcctggcaaggcctccccaccgcagagaggttttttaaaatttaatccattcagaaggtagctgtggccattcagccgccatctgcgcctccgtgacttttcatgccgccgttctggtccgctgcaccccaggcccccaggggcggtggtcattgtctgcactaattatcccataaagacagagggcctgttctccaggcaga

SEQ ID NO: 18172 - DNA, 2432 bp, Artificial sequence
  DNA replication origin
cgatcttggctcactgcaatctctgcctcctcggtttaagtgattctcctgcctcagcctcccaggtagctgggattacaggtgcaggccaccacgcctggccaagtttttatatttttagtagagatagggtttcgctatgttggccagactggtctcaaactcctgacctcgtgattcgcctaccttggcctcccaaagtgctgggattacaggcatgagccactgcacttggctgaaatttttaataaaagtagtagtttgacagttcctcaaaaagataaacatgattaccacatgacccagcaattctattccaggcagtttcccaaagatttatttgtttatttatttttatttatttattatttgagatggagtctcactctgtcgtccaggctggagtgcagtggcatgatcttggctcactgcaacctccgcctctggggtttaagtgattctcctgcctcagcctcgcaaatagcagggactacaggtgcatgccaccacgctcggctaattgttgtattttttggtttagatggggtttcgccattgttggccaggctggtcttgaagtcctgacctcaggtgatcctatcacctcagcctcctaaagtgctgggattacagccgtgagccaccacacccgtcctccccaaagatttaaaaacaggggctcacgcagatgtttgtagatgaattttcagagaagtacttatttacaacggccagaggtggagatggcgcagatgaccctcagctgtctatgaagaaacagcatgtggcctggccacgtattactcagccacggaaaaggaggaagctgacacagacatccacatagacaagccttgatatcgtgctaaatgaagaagcaagtcacaaaagaccccatgttatgtgaccgcatgtgtgtgaactgtccagaagtggcaaatccagaggcagaaagcgggtgagcagtggctagggcctgtgtgacaaggggaatggggcgtctgtgtgaggggtacagggtttgtgggtgacggtgaccgttgcctggggccgaggggaatggggcatctgtgtgaggggtacggggtttgtgggtgacggtgaccattgcctggggccgaggggaatggggcatctgtgtgaggggtacaaggttcgtgggtgacggtgaccgttgcctggggccgaggggaatggggcgtctgtgtgaggggtacggggtttgtgggtgacggtgaccattgcctgtggccgaggggaatggggcatctgtgtgaggggtacagggtttgtgggtgacggtgaccgttgcctggggccgaggggaatgggggcgtctgtgtgaggggtacggggtttgtgggtgacggtgaccgttgcctggggccgaggggaatggggcgtctgtgtgaggggtacggggtttgtgggtgacggtgaccgttgcctggggccgaggggaatgggggcgtctgtgtgaggggtacagggtttgcgggtgacggtgaccgttgcctggggccgaggggaatgggggcgtctgtgtgaggggtacggggtttgtgggtgacggtgaccgttgcctggggctgaggggaatggggcgtctgtgtgaggggtacggggtttgcgggtgacggtgaccgttgcctggggccgaggggaatggggcgtctgtgtgaggggtacggggtttgcttctgaagcgatgaaccattctgaaaccagaagaggtgcacaggttgtgaagatgtagaaagattcacgaagcacgactgggcgctccaggccattgagtcactcattgtgaaacggctggttttatatgtcgtgcatcttaccccaataaagcattcgatgaagccgacgctccgtggctctgatttggggtgcgctctcgcccaggctggtttctgtcacccccggagttctgcagcacccgttctaaccacagcccgccttccctcactcctgcttcagtcccgtaaaccttctgcaaaatcctggccctccagaccccagctgggtcctcccctccaggcccccagtggcagctgtgccccttgtgtgcccacgtcggccagcgcaagccacacatggacccagtgcccactgcacccctgccagcctcagggtcccagcccgttgttccgggagacttcagtcctggcccaggcatctccttccagctcctgtccttatcttggtggcctcaatgaacgtgccaagacccttgggacccatggctctgagactgggctccccttgcgctgcctgcctccctcccggggtccctgtgaaggaagccgtcccacccaccctgccggtccctcctcccttcgagcccttcactggtcttcactcctcattcctggtcccctcagctacaaagagcctcctgctgtgcacggagaaaacaatgtgagctcccc

SEQ ID NO: 18173 - DNA, 1919 bp, Artificial sequence
  DNA replication origin
actcatgaggctgaggcaagagaatcacttgaatctgggaggcggaggttacagtgagtcgagatcatgccactgcactccagcctgggtgacagagcaagactctgtctcacacacacacacacacacacacacgaaaagcctgggtgcggtggctcacacctgtaatcccagcactttgggaggccgaggcgggcggattacctgaggtcaggagttcgagaacagcctggccaacatggtgaaactccgtctctactaaaaatacaaaaaaaaaattagtcgggcgtggtggcgcgcgcctgtaatcccagctactccggaggctgaggcaggagaatcccttgaacccgggaggcggagcttgcagtgagccgagattgcaccactgcactccagcctgggtgacagaacaagactccttctcaaaaaaaaaaaaaaaaaaaaaaaagacaggaacaccccaccacaggctgctgggcagtggggctgggaagggcccaatgaaccaggggagccccactctgggagtgcgcctactccaggccctcaccccgccccagccctgcctcctcctcctgcccgtctcccaggctgctctcacccgcccggtgtgctggctcctctctcacgttagaggaacacctaagccctcccagacggccaacagtcccattgccccctttatactgcagaccgccccaaggagttctccaaaatcctggtcttcatctccctcctctgggggcacccggcgtctgtgccaccatatgggggtccccaagacctccatgtgcagccggctctagggttgggcttctcctcagcacccaggacccccaaggaccccatcttcaaggctcctggcccacccagggccactgggcatgtggcattcgccagcttgctggaatccgggaatgtgatggaggcgcgaggaggaggtgagagcacgaggaggaggtgagggcgcagggaggaggtgggagcacgcagaggaggtgaggacgcggggaggaggtgaggacgcggggaggaggtgagggcgcggggaggaggtgagggcgcgcggaggaggtgagggcgcgcggtggaggtcagggcggcggtggaggtcagggcggcggtggaggtgagggcgcggggaggaggtgagggcgcggggaggaggtgggagcatgcggaggaggtgagggcgcgcggaggaggtgagggcacagacacaggcccaccccatgaagatgaaatgcctgacggcctcatggctgtcagcggagcccggagcagatctcagccctgtctgtgtataaacaagcgctgctccaaggagacgccaggacgaatgtcaggacatagggaggaaaggacagtggaatcccacaactcagacacgtggggggcggggggcagagggcgggacccggggaggctcacaccacacacgcaggtgccaaagagcgaggaagactgagcgtcacagacgaaggtccgacaagagagcctggaaatggaacggcagagggaaatctcaaaagcaaggacagagattcacaagctggaggcccaagaagccaccgagctgatggacaaacgaaagctggcagaggtgggtgcaggagagaggcagacacaggagcaggcagcgccagggctggggtcagagggcatcccccgggcctgcaggggtgacctcaggccagtggatgtggcactcagaggagctgggctggggttggagggcgtcccccggacctgcaggagcgacctcgggccagaggacgcggcactcaggacttggcagcttcctgtgcacaggccattgccactaaggagccggaatccgcgtctgcccccacagggggccggccctccctctgtagcctctcccctggcctctcccgcccagcctcctgccctgc

SEQ ID NO: 18174 - DNA, 956 bp, Artificial sequence
  DNA replication origin
cctgttaagtcagcctggctctctggggtgacccccgtcacacacgcttctctggcgtgtgtggcagaatccagctgctgaggtctgatctgatctcatgtgagtcctcagcctccctcgcagcaacacggggccttccctgttcccgtcctgccctgcaggggggcccagcagcttccacagccccccaggtccagggggagttcactgcggaatccacccaggctcctgtcctcaggcctcccctgtggagtccctgctggcacctgcccctccctggcctccgaccctgaccctaccacatgaccaggcctgagtgggtctccactcccctgcaccaccggcctccaagccaagccacgcagcccctgggttctgtctggaaacctccctcgggtctcgctctggtggccctgtccgtgtggggcagcgtctttggttggcacttttgctgcagtgaggtcgggggcctcccaggcggggctggagggagggggcggcgcgggagggccggggaccgaaacctaaagagggcaggggcttggggtcctcgtggtgccaggactgcggtgcagggtttgggtgagaagatgctgatgaggttgccgagggcgccaggcggagcaggtagaggctcaggcccacgagggctgctctgcacctgcagctgaaagatgaggcccagctcccagggctgagcgtggttgaagtgctgctgggcggactcagctggatgggcggccacgggccacagggaaggaacagggtgggtgctgccgcagctggcaggtgtgttgtgtgtgtgccagacagaggtgggggagggttcccggccccccgggtccagaggagccccaggcattgcgggtcagtgggagggacttcccggcgggctgtgcgatagcccctgcacctgcctctccctcccacggctgttatcttatctccacaggccg

SEQ ID NO: 18175 - DNA, 1402 bp, Artificial sequence
  DNA replication origin
gagtggggtgtgtcccccagggctctcccaggcaccctgtcctctcactgctgagccctggggctcacagagctcgcttgtcttcttcgttcagacagaagccgcccctggacatcctgtttttcttctgttgtatgaacaggaagccagcaattgtgtgggatgagtgtcagcatggccgtgtctgagcccggcacggcagacacttgtcccgccacacctgccatgggtccctccagctctggcccgagagactcagggctccccagggctccccagttgcgtgggctgtgagcaccatgtgtgcacggctggccctggaatggctggggcgggcaccgtggagtgtccatcgtgcaccggccatggcctggaaggagacccaggcggtcactgccctggggctcagcgttgaggccacagtgaagcgacaggggcagaagggcaggggccgggggccaggcagggagcgggggccgagggccaggcagggaacagaggcgctgagggaggcagacaaggagtaggggccgggggccaggcaggaagcaagggccgggggccaagcacggagcaggggtgctgagggaggcaggcagggagcaggggtgctgagggggccaggcagggagcgggggtgctgagggaggcaggcagggagcaggggtgctgagggaggcaggcagggagcaggggtgctgagggaggcaggcagggagcaggggtgctgagggggccaggcagggagcaggggtgctgagggggccaggcagggagcaggggtgctgagggaggcaggcagggagcaggtgtgctgagggggccaggcagggagcaggggtgctgagggaggcaggcagggagcaggggtgctgagggggcttccgggcaggctgctgggtgctcgagaagcagcctcaggcccaaggggcagggtccaggtacacggaggttggaggctgggaggatgtggtgggccctggctttgactctcaaggctgaggggccacggtggagtccataaagtggcctggcctgccccatatttctgtaggatgctagggctgtgccgtgttgcgcggctgggtgttgtctgagggcacagcgtcaaggcagggagtcccctgggaatctggagtggcccaggtcggtgggagggggcagaccctgcccacctggagggcagaaccagcaggacctgagcagggcaaagaccagcaacactgactggggagtaggagggccggcatcaccaacttcccacctggaaaggtggatctcgatttggagaacttaaaaagaataataaggacaccctgcttattgatggatggattgattgacaggttctcactctgtcccccaggctggagggcagtggcacaatcagggctcactgcag

SEQ ID NO: 18176 - DNA, 1144 bp, Artificial sequence
  DNA replication origin
ttgggcttaggctgggtcaggttctgtctccaaggccctcggcttcatggatgaggcaagtgagtaggactgagggtgaggggacccatgaccgatgagagacggtgctgtgctggggttgtgggccgctgtgttgatagagcaaggggctccgtgccagatgctggacctccgggagccccttcacctcactccccagacacgggcggtcctctgcggcgagccgaggtggagggcacacgctgtccgccgggcttggggtctcgttgccgcctctgtccttatcacgtcccccgccctgcctgcagctgagcacaggcagatgtgggtggaatctgagaccagagacggttgggctggagggggtggccccatctcagctgcccccggacgccagaaggccaccaggagacagactcgtggcagagggacggaggccccagtgcgtggtgggtgggcgtggcctctcaggacacgcctgcgggaggtgccatggggtctctgaggggagctgaggccgtgggctggccctttctgctgtccgtgggcggtcagaggactgacccaggcggggtgctgtgctgatagcaggtgcctggacccgtggacatgcaggtcaccacagcgcgtggggtctggtctgggcggccgggctcttctacactcactgccgcggggtctgatgctgctggcaggtgtgggacggccttggagacgggctgtgagctttgtgacccaggccccaagaggagagccagctgccggggagacccactcgggggctttgtgaagaccacgtcacagacttcctgcctggaggccgggtgtcccctgccagcatccgctgcctggtgtcctctgcctggcgcccgctgctggggtcggcctcagttcctggggcttctgtgcccccaaccctgtggataaaaagccccctgtgtttctcatccccgctttatggtagagtgtcgggaataacagagccttcggcgccacccactccacagcccacagtttcccgcgtgcgtctgtgtctcaaggtgaaggcagccccattagccgggtgtcgtttggaggaagtggcgtccctgtgttctgcccatcctgcgtccctgcaaccatccgtcctcccgtcggccggcgc

SEQ ID NO: 18177 - DNA, 811 bp, Artificial sequence
  DNA replication origin
cctgagaggccacgcccacccaccacgcactggggcctccgtccctctgccacgagtctgtctcctggtggccttctggcgtccgggggcagctgagatggggccaccccctccagcccaaccgtctctggtctcagattccacccacatctgcctgtgctcagctgcaggcagggcgggggacgtgataaggacagaggcggcaacgagaccccaagcccggcggacagcgtgtgccctccacctcggctcgccgcagaggaccgcccgtgtctggggagtgaggtgaaggggctcccggaggtccagcatctggcacggagccccttgctctatcaacacagcggcccacaaccccagcacagcaccgtctctcatcggtcatgggtcccctcaccctcagtcctactcacttgcctcatccatgaagccgagggccttggagacagaacctgacccagcctaagcccaagctgcctctgctgggaaagcgggatgagggggagagcccaccgttcgatgctgtggaccccacaaggaggcagagagggaaagggcggtaccagctcagggggcatgaggcggacgccactcagagacagtgagtacgtcgaggtgctgggacgctcggagcgagagggacagagagggacagtgagaccagcaaggagctgggacgctgggagccaggtggatgcatgcagagagggacagagagatccccaaatttcattctgcaaccgcaggtcagaaaatctgctgaagaaaagatcctacctacaacagaaatattggaagatgaaatgcctat

SEQ ID NO: 18178 - DNA, 1244 bp, Artificial sequence
  DNA replication origin
ctgagagggaggcgtctccaggaacccgcacgttcacggtgcattacgagagcggcatgcgctcatcacggagcttcgtaggaaaagtggcctctcctgcgggccctgccctgttcaccgccgtgtccacactgggcgggtgccgaggaacccgtctggagcgtggacgctggatgtgaggctggccacgtccccagccccaggcacctcagcaggcccaagctgtagggcatgggtctcctccgggaagccagggcagcctcagccttggaggctcccattgtccggagcccagcaagatggggaggagcggcggatgtggagggaaagggaacccaggccggcaggcttcctggagctgctgcatctgccagagggccggcctccccgccccaccccaccgcccgccggccctggtgattcctggagctgctgcctctgccagagggccggcctccctgccccgccccgccccgcctcgccgaccgccggccctggtgcccagctgcagtttaatgccgtctgtgggactctgaatttcccaaggaaggctcaagcgccgcctggaaaccccgaaccaggtggacgtgggcaacgtggactttctgacctcaactgcgcctgctcatgcaaaagctgaagttttttattttttttgagatggagtctcgctctgttccccaggctggagtgcaatgacacaacctcggataactgtaacctccgcctccagggttcaagcagttctactgcctccaagccattctcctgcctcagcctccccagtagctgggaatacaggcgcccgccaccatgtccagctaatttttgtatttttagtagagacggggtttcaccatgttggccaggatggtctcgatcttctgacctcgtgatcctcctgcctcggcctcccacagtactgggattacaggcgtgagccaccataatcctggccgtgagcctggccaaggctgaagttttaggaggaaaggaatctgtgagcgcagtggacattcggatgggaatgtttcttggcctcgggggagggagagaggaacaggagctcagcccccttctcctgtcccgatgatgcctcctgacccagcgcgggagggcctctctagaacacgccagaggtggccatgtggactctcctccaatgacctggaccaggcactctacctaaaaggacaaacccaggcctggctgtcgggggcagggtcccaggggccacagacgcg

SEQ ID NO: 18179 - DNA, 1192 bp, Artificial sequence
  DNA replication origin
ctcccacagtactgggattacaggcgtgagccaccataatcctggccgtgagcctggccaaggctgaagttttaggaggaaaggaatctgtgagcgcagtggacattcggatgggaatgtttcttggcctcgggggagggagagaggaacaggagctcagcccccttctcctgtcccgatgatgcctcctgacccagcgcgggagggcctctctagaacacgccagaggtggccatgtggactctcctccaatgacctggaccaggcactctacctaaaaggacaaacccaggcctggctgtcgggggcagggtcccaggggccacagacgcggatgtcctgctcagtgaccagggtggcacggacaggtgtccaggcagcgaggcggggccagcacaggggccaggacacctcctgggaagaagctgacccagagcctgagtaggggagcccactggggagggctgagctggggcctcttgtggagctggccttgttgacagagctggacacgaaccatgtaagggcagatgcctaaagcagcacagaaaggatggggggatgtggccattccaggaagcgccaggctgttccagggggtgctgtgtctgttctgggggggctgtgtctgttccaggagcaccaggctgttccagggggcaccgaggctgttccagggggcaccgaggctgttccagggggcatcgaggctgttctgtgggggggcgccgtgtctgttccagggagggccattagtgttccagggggcaccgaggctgttccagggaggaccattagtgttccagcgggcaccatgtctgttctggcggggggccgtatctgttccagggagggccattagtgttccagggggtgctgaggctgttccagggggcaccgaggctgttctcggtgggggtgccgtgtctgttccagggagggccattagtgttccagggggtgctgaggctgttccagggggcaccgaggctgttctcggtgggggtgccgtgtctgttccagggagggccattagtgttccagggggcgccgaggctgttccaggggccctgctagctggggtgttgcactttgaaaacatcccactctgcttaggtggagaagaggctgtagaagcctgtgggtgcctgtgcagggagagtcagctctgtgctgaggcgaacccagggtc

SEQ ID NO: 18180 - DNA, 1820 bp, Artificial sequence
  DNA replication origin
gagtctgagcctgatggtgccgagtctccctggggctgtggggggaggtgcgtgggtgtgcatggggggtggtggcgcccactgtgtactcagtgacgagggccaggctgctggcccctagctgcgggcctctctacagtgtccacggcttgggaccttgtgagtccggaggccccactgtggccttgttgtcctcgggggtcaggacaggccgcctccttgggccccagcgtgggtggcctggcgccgggcctgtgacaggatccgggggaggtggcggggacagtgcagctgctcagggctggccgcagaggtgggagctctggtcccctctgtccctcggggagccaggcggagggcccggaacacccttgggggcttagcgccgccactgggggctcagggaacccacagcctcttgggtctcgggcggttccagggtggcctccagggtccctagttttttaaactgaggcatttttcatcccttcgagttaagaagaacatctgccctcccagcagctttttcaggttaaaaaagagaaatgagaggcaccttccctgtgggcaaagccggggaggccgcatccccgctcgctcggctgccctgccagattcagtgctgaggataaacagcccgaggggaggtgcagcctctctccctcctgttcctacagatcgagaccctgcaagctgaagactgggccagggttagggaagcggaggctggaaggccgggattagggaagcggaggctgggaggccggggttagggaagcggaggctgggaggccggggttagggaagcggaggctgggaggccggggttagggaagcggaggctgggaggccgggcttagggaagcggaggctgggaggccggggttagggaagcggaggctgggaggccggggttagggaagcggaggctgggaggccggggttagggaagcggaggctgggaggccggggttagggaagcggaggctgggaggccggggttagggaagcggaggctgggaggccggggttagggaagcggaggctgggaggccggggttagggaagcggaggctgggaggccggggttagggaagcggaggctgggaggctggggttagggaagcagaggctgggaggccagggttagggaaatggaggctgggaggctggggttagggaagcggcggctgggaaggagtggagctgcctagtgccagaggggtcagcccgagcctcagctgctctctgtgccggggacgggctggggcgggaagcctcctggcaggggctcggccccagtgggagctgtccggggccatggctttgtgggcagagggtgagaagggggtgccggggccccttcacatccttcaccctgcagtccttgtaaacagcagtgagagctgtaaggccctggcccagccgcctcgccctgggctgcaggccctcagtttgttgtgggtttactgccttttcactcaccgccccctggcctttgcccagttccaccctacacatgccctgcctggcagcccctccatggggcagggccatggccctcccctctgtgaaagccctgctcccacatggcagcagctgaggctctctgcctcagtttccctatcccacgcagttgcctcctcgggccttggacccctccaggggcttcctctctgccttcctcttctgtgtcccagtgggtgctgagggctgtgggggcacctccgggcatgtcgccttccctgatgtagccaggtcagcgtgtgctcggggaggggccacctctgagctgggcggggcttggtgtggatgtggcc

SEQ ID NO: 18181 - DNA, 978 bp, Artificial sequence
  DNA replication origin
gggcaggcggacagaggtggaggggccgccccgtgttcgccgcggccgccgggctgggctctgcctgcagcgctggcctggtgggaaacggagacccagcctgggcgtgcgggtaggggaggcgcctgggaccgacgcggctgagacggaggaggcgctgccgggttccaccagcagaggggcccagagaccggcccggacgcgcggcggtcggcgtggggtgcccgggactggctgctccgcaggccgcccccgcccgcccgctccggtgcctctgtgaacgggcgggtttgctggcgagcgttctggcctccaccactccgggtgcagcagatgcggggccttcccggtcacaggaccctgggacgctgggaggcagtgttggctccgcacctctctcggagcctgacggcctggctggggctgccccgtcgggtccccgcagcgcgcaaggccgtccccagcctgctgaggggggacgggctgcactcctggaagggaggggtgggggctgaggagcggcctggggtgggggtcgggacacagacaccccagaggagggctggggagagggtctaccgcccactgaggctgtggccgggggagtactgagagcccagggaagtttccagaagccgctgggagtgcccgtgggaatggaggtggtggtgggggacctgctgcctttattcatttgctcatcagacaccatcagcgccactaatgccgctgccgtctgggggtcgaggggtgcgttggtgcaggaagccaagtccaccctccagacggccacggggcacgccaggggcaggagtgttggccaagagcagccgtcgcctctgccgtttgggacaagacaaacagaggtggagcggcctcctgtcagggcctccctgtgcgatgggggtgtcacgaggctcaccccgccctggctgcactcagcccccagctctcagctccagataacttgctgccagc

SEQ ID NO: 18182 - DNA, 2520 bp, Artificial sequence
  DNA replication origin
ccccacccctcccttccaggagtgcagcccgtcccccctcagcaggctggggacggccttgcgcgctgcggggacccgacggggcagccccagccaggccgtcaggctccgagagaggtgcggagccaacactgcctcccagcgtcccagggtcctgtgaccgggaaggccccgcatctgctgcacccggagtggtggaggccagaacgctcgccagcaaacccgcccgttcacagaggcaccggagcgggcgggcgggggcggcctgcggagcagccagtcccgggcaccccacgccgaccgccgcgcgtccgggccggtctctgggcccctctgctggtggaacccggcagcgcctcctccgtctcagccgcgtcggtcccaggcgcctcccctacccgcacgcccaggctgggtctccgtttcccaccaggccagcgctgcaggcagagcccagcccggcggccgcggcgaacacggggcggcccctccacctctgtccgcctgccctaaataccgcagaggtgactgctcccccgcgaagcccacccacctgaggtcctggcccccaaggggccatctgcccccggctcaccgcaggccctttcctgggggcctctgtgccgtgcaaagggcaggtctggccgctctcgggctctgccctgccagccccacaacccagaacccagcgtccccgcccccatctcccgggatcccttggctaagggagggtgactggtggcccgcaggcccttcagagggtccctgacagggaaggatggagacgcagctccagaccccagagtgcggccccccagacacacccacggccgtccaccatccaagcataaaccccaacgcagcggctcctggcctggttctgaagacggcccagctggagtgggagaagtgcccagtgcttccgtcactggagcccacgggtccacaggcattcgaggtcttggatgcgccggctggacccaaggacacacgcgggaggcgggaggcgggaggggcacagcaaagggtctggggggaggccggagggggctttccccttgggcaccatggacaccccaggccccgcagcacacaaatgcggagcctcaagcctccaggggttttccagcctcacgcctccgggggtctccccagcctcatgcctctggggatctcccaccctcatgcctcctgtggtctcccagcctcaggcctccaagggtctccctggcccaacctccttgctgtgtctccagaaagctctgaagcccagcccctcctcctcacgttcgactgcgctgcgtgggtgttttactaaaacccaacagtgactcttcctctgggcgcctggatgtgtctcctccaacatttggccggccctgcacgtgccccaaagctcccaaggggcttttaagagggctttggggtgggggggccgggcatggtcgctcacgcctgtaatcccagcactttgggaagctgaggcgggaggatcacgaggtcaggagatcgagaccatcctggttaacacggtgaaaccccgtctctactaaaaatataaaaatttgccgggcgtggtggcgggcgcctgtagtcccagctactccggaggctgaggcaggtgaatggcgtgaacccgggaggtggagcttgcagtgagccgagatcgcaccactacactccagcctgggcgatagagtgagactctgcctcaaaaaaaaaaaaaaaaaaagagggctctgggggagacagcagcccctacggcccccacacctccccccagctgctcagcaaggccctccagggacgtccagcacagctgaaccggcccctcagaccaatggtaaccccaaatctgagactgggggccttttatctgcgtcccttgagtgggctgtgagttccaagatcctctttaaaaaaggtggagcctcgagccaatcggaatggacagacccaccctgtacagggaagccaggccagcgggcgcacaggcccaggacccgggcgcagcttgtctctcaccatcaggctgggtcagcccctctccacaagtctgcagggctgtttttatccctgagctcaggatgaacttgtacaaggccccgatggcactcactttgctgatcagcctgggaagggggcagtcggcctgtcccttctgtgggagggcggctgctataatttaaagtgtgtccctctgaaacacgctggaattccatcaccatgctgcggcgtttcaaggtggggccttgggacgtgcccggggggtgaggatcctgccccactggagggattaatccattcatggattcctgggttatcacgggagtggaactggtggctttataagaggaggaggagaggcctgaggcctgagcccgcatgctgggccctcaccatggctgccccgagccgcctcaggacccttcggagtcccaccagcatgaatacctcctcattcagaatcccgccagcatgaacgcctcctcggatgctcccctcacccttagacttagc

SEQ ID NO: 18183 - DNA, 1105 bp, Artificial sequence
  DNA replication origin
ctgaggcaggatggggggcagccctgctcctcggtttcctgggaggcctggccagacacccggcggcctcccagggagcctccacaggaaggcgggaccggcgggaccaacaggatgtgcaggggcccctccctcgaagcttcgccctcaagtaggacccaaagctccctcaaacgacccctgaacaggccgaccttgaaggaccccacaagaacccaggttgctggcagaggctcagaggtggccatggcaggccagcggcggccgtcagtctctccatcggtgccacagcaccaccagccccgggacctggaaaaggagcggcaggcggaggcgggggtgggggaggttggggggagggggatgggtgggggagggggagggggtgggggagtgggagggagtcggggaggcggagggcttcctgtggccgcggtgcacaatggtgttttctgcacaccgcagtgagtcacccaagacggactggaagccgggccaccctgcattcttgtccgggcgccaggtcacgcttcctctgcggtttttctgtggtgtttccctgaggaccggtgggccctccaggtgggccttgtgccgccagcaggcgtggccaggagggcgggaggcggcaagagagtgggctgtgtgccccccaggtctccctggcaccccgatggggggctcccaggctcccccacccccacagagccggccttactgccctcttctgagagcgccaaccttgagggccctgcagccgccacccccaggatgcggcaaggacagggggctggaggccggcctgagacccagagcgagtgggcgggcaacactggcttcagagcccccagaagctgttgatcccaaaggaggcctccaaggcctgtcccctccccacctcatattgtctgacacagcagccacagctgaaagtgcaagacacgtgattagagaagggtcaatatctctgtgacagctttttatatcgactgcatgtggaaatggaaatattttgggcatactggagttaaataaaatatattattaaaataaattcacttgtttctcagtttttaaatgtgtctacaagaaaacttaaaagcct

SEQ ID NO: 18184 - DNA, 2635 bp, Artificial sequence
  DNA replication origin
ccgcctgttctgaggcccacagggaggccgaggagatcctaaggtggggtccccttggtcagaccctcccgtggagttgggcgtgttctggccgcgtctgtcgggaaacggggaggtgtcggggcttcctggcctcctgacggccgcaccgtcatcagtcccgagcccagctcagggagggcctgctcccttctgctccaggtgggagcggctcctgcccggggcgcctccaagagcacccctgcgagctcgcgacagccccaggctaggctgcgggacggcctaccgacccttggtgttgatccttgtgtcacggggaaccaggtcctggaaccgcctggtgccacctcggtgtgacctggatgtgtcccgtccccatcctcctcagagggtggccgcctggcgtggcgcaggatgatgctctgagccgggttgcccagcacgtgttagggtcctgggtggagaggacctttgggaagcagcagccgggctgacgagggtccggatgcctgcccggggaccagcgaggttccgggcgcctgcccgggggtcagctgggccggccggatgtttctggtggagacctgggaggtgaggcggtgggctgccggcggtccctccctggctgtgcagaagctgcggtggagtgtgagctggacctgggggtgcccggcctgatgggaaggtggcagaggctgtgtgacatggagataggtcgtgagggccccaagtccgcccctttgtccctgtgggtccctcactctgggaacctcgggctgctgaggactgagacgtgcagtgccctccccctggtggagcggccacccagccagccaccgcagaattcttggccctcaggcactgcagaagagcgaaagccctggctgtgggtcccaggtgtggctggcagtggccggcggcaggcagaggccctgtcaccatgggtgaggtgtggaggtgctaaggctaagatcccatcctagttttaaccttcaaaaatatcattcatggttttttctttgttcatgaatacaaaccagggtgtatacattgtgtagtattcagaaaatacaaaacagaaagcacagaggcaccgtcggcagagcagccaggccctcacacgtgcatctgcctggttttgagaagggaccttgcaccgtgcagcgtgatccccttagggcaacgcgactttatgctgctctgtgaaccctttcccatgccattaagtatttttataaaacatggtttttaaatgctgtttatcattcatcagattctaccttgtgtgatcagaactggggtccttgggaaagcccacccttgatgggggactgttggccccagccccgtctgtgatggtgaccccaacatgtgctgttggcacctcccagaaagggttccccagagcccatgggccacctgacccgtccttgcagctgtcccatggtacatccatgtgttgtgggcagtgagctgcagggaggtggggtgcacagagaagcttgccgcagagctaaaaccaacacggtgaacagggaaggtgtccttcaaaaccgcagcctgggcaggagcagtggctcctgcctgtaatcccagcactttaggagaccgaggcaggctgatcacctgaggtcaggaattcgagaccagcctggcgaacatggagagaccctgtctctactaaaattacaaaaattagctgtgcatgcctgtaatcccagccactcaggaggctgaggcaggaaaacggtttgaacccgggaggcggaggttgcagtcagctgagatcgccccactgcactccagcctgggcaacagagcaagactccatctcaaaaaacagaaaaaaaaaaaacaaacctgtgacaggcccagcgcagtggctcacgcctgtaatcccagcattttgagaggccgaggtgggcggattgcttgtggtcaggagttcaagaccatcctggccaacatgatgaaaccgcgtctctactaaaaatacaaaaattagctgggcgtggtggcaggcacctgtaatcccagctactcgggaggctgaggcaggagaatcacttgaaccctggaggcaaagcttgcagtgagccgagatcgcccccctgcactccagcttgggcgacaaagtgagattccgtctcagcctggacaacagagcgagactccatctcaaaaacataaaaacaaacatacaaagaaaccctgcgacctacgtggagcccacgggggccaaacatgccagcacccccctggagtggcggtgtgggaccccacacctgtcacacctgctggcctccttctccatctcctgtgcaatatccctggaaagttactttttgtgtttaaaattggtcatgttaattgttaaggaaaggaacaatccttaagttaaattggtaagtttaaaaaaacgaaagacagaccgcaacaggcgttggtgaggctgtggagaaatcagaaccctcgtgtgttatcgatgctagcgtaaaatggcacgtccactgtggaaacagtctggtagttcctcaaaaagctaaacatagaaacaccgagactcagcagctccagtcctaggaatgtgtgtccccagatcagtgaaaacacactccacacagaaacatgcaca

SEQ ID NO: 18185 - DNA, 909 bp, Artificial sequence
  DNA replication origin
ctgcggtcgggccaaggttccgcgccgggcgtggacggtgtggggcggtcccggccccgcaggtgagcgaccccgggccgcgcgggccaggtgggcggtctgggcgccgggggcagagcggggccgggccgggtgcgcgtcctgaggtgagggccgtagctgggagtgagccgggggcgggccgccggctctcccggggtggggaaactgaggccccgatggggcggggaaggtgcgttctcccgcagggccccgctccggaggccgccgagcagccggacgccgcggggagctgagccgaccccggcgaccccgccgccctgtcccgcagggcctgccctcctccgcgccttccgagcacggacatcacaggacccggaggcccttcgctccctcgccgaggaggaggcgctcccggtgggacgcgcgcgcgcccgccctgccctccccgggagaagggacgggcgcctccctgcaggggccctggcttcctgtccaccggcgctgagtcctgtattagttgtcaacctaaaataattaaaagggtcagaatgtggtgcccggtgggtttattcaggcacagaggtcgagggcggcctgggtcaccaggtgcaacggagaacaaaacagaggctcaggtttttaaagaaaacagagcccatcggagagcaggtggtttcgaacgttgcccaggagctcactggcttgtagaaatggcattggttcgcgattgaccacggcttggtgtcatcagtggatagttacttggctcgaggggtagtgaggggctgcggtttcatttgaaatgctttctggcacttaacatcaagctttctgggcccacagtttaaaagggctttacattcctcagataaatgatttttttctttctcatttgccccccttttg

SEQ ID NO: 18186 - DNA, 1872 bp, Artificial sequence
  DNA replication origin
ggggttgcacctggcgcttggcgcccgcacctctgcccgcctcggagaccccgcagccccgcgccgccgcctggccccggccccggcccctccgcgggatcctggcccctcctcgagcgccgccaccggccgccatggcctctctgggggacctggtgcgcgcctggcacctgggcgcgcaggctgtggatcgtggggactgggcccgcgccttgcacctcttctcgggcgtcccggcgccgcccgccaggctgtgcttcaacgcgggctgcgtgcacctgctggccggggaccccgaggccgcgctgcgggtgagcggggcgtggggaggccggtgcgggcgacgcctccgcctcgagcccctggggagggcccagcgcccctccccgaccgtcacggggtcgccctgccgcccccgacccagcgaacgccccggcaggtgggagccgagcaggggggccgcacctgagctaagcgaggccgcgctggggggcgcggcggtcaccgggagaggccggggcccgagggtgactcacaccgggaagggggaagctgctgggctgggtcaggcccgagggaccgccctgccctaaggggaaagcgttgcgcctgtggtcatggccgggagaccgggtcagtctcctcctcagagccctcagccctcccccagcccactccccgaaacagccaggagtccagggtgccagggtgcagcggccgaggccctgcacggagcccggtgcccttctcgtgccccctcgcgttccggggccgcctgttcctgcgcatcccaaacgccagcgctgcccacccccgctcagtcccaagcaccccgcagaagcaggcaggtgcccacggttactgaaggctcggtgacagcagtgatttaaaggagagggaactgcgcgctgtgggagggtctccacgcccctgactggcaaaatatcccccttggaggagactgggcaaagcgcatgagacccccctctcttgtgtcttaaagctgcgtacaaatttacaatcacctccataatgatttcatttttttgtttgtttcaaagatggagtctcgttctgtcacccaggctgaatggagtgccgtggcccaatcttggctcactgcaacctctgcctcccgggttcaagcaattctcctgcctcagcctccctagttgctgggagtacaggcgcccactaccacgcctggctaatttagtatttttagtagaaacgggtttcaccatgttggtcaggctggtcttgaactcctgacctcaggtgatccaccctcctcggccacccatagtggtgggattacacatgtgagccaccttgtccggcccacaatgatttcattttaaaatgttatccaagaaagggaatgtaatctttagacaccaggtggttcagcaacaaatcctatgtccggggctaacccagtcacttgtgctcttgtgcctggtttcactacagagaggggacgcagtgaaagtcatacgactaacccacagcatatgcatgttaggaatatgggaacttaggaaagcagatggaacagctatgattcataaagccgatcacgtgaggggcagcccagggtgcagagggtgtcgctggaactgctgtctcttgttaggagccttgcgtgacgtttggggcagacaggtgggttctgctggccctgagccgccaccccacatcagggctgcgtgcctgtgctcagccgccacacttcacacctgtgtgaacttggttcaacgacaagcccccactcagccagatttgtgaaagagaccgtagcacccttcctgtcacacacatttaactgatggccacggtccctgttcagaaccttctgtgtcctcctgagtc

SEQ ID NO: 18187 - DNA, 1076 bp, Artificial sequence
  DNA replication origin
ctctggggcagcctctccttcacatcggcgcgggaagcccgcctggaggagaggcctctccggcaggcgctggggagctcccagcaaggcttggaaggaggctcagagtttggagggggagcccccatggggtggggggcctgagaagcaggagggaaataaccagggctctctgcacggttcagaagagaggcttgggggcgggcaggggcccaggaagctgagtctgagctgggaaaatggtggagccccagcacacagtgacccccacacccactcagcacacatgtgcatggacccctggcccaccagacctgagtgtgcagacctaggcaccgcactgccctccctcaggtctccttggaaccaggtgttgggggcggctcgagcggggctggtgtgaaagctgcctaaccacagccccatctccgccctgtgctgctgaggggaccccggctgcccacaggttccaggaggctctgtctgacttctggctggccctggagcagctgaggggccacgctgccatcgactacacgcagctgggcctgcggttcaagctgcaagcctgggaggtgaggccgggcagggctcactgtgctgctggctgtggggtgtccacgggcggtggcactgtcacaggagggccctgtggactggggagcgcctctggccgaagctcttggtgccatggaataccctggccactccttgacccgcaggaggttctggtggcagtggaggtggagggaccattttgtgccatttcaggccaccaggggtggctccacccagaaggagggcagaggcgaaaggctgctgggtgggcagggagcaggcagggggttgtgcccaccctccactgtgcccccagccctttcctggctgcctggaacgtgttggcaccgaaggaggggtgctgagaggcccccccaccagaccccggaaatgcatcgccctgaagccttctgggaatagcattgtcttttaggacaaaaagatggaagggaaagcccactggtgtgggtctggagtcagggttaaagccaggtgggggcccgccagcccaggacaca

SEQ ID NO: 18188 - DNA, 1653 bp, Artificial sequence
  DNA replication origin
cagggccaggaggactgcgcctttgacggggtctaccagcccccgctgcggggccagttctatgtgagcacctacactgcccccaccaggggtccgggcttccttgtgaggcctcaggtgcctgtctgactccagcaggcccaggaggggcccaggctggctcttaggggctctgggagcccgggtggggtggatctggcccagcgtggccacagcgaaggcacagccacctcccctctcactcaggccttctccaacttctactacaccttccacttcctgaacctcacctccaggcagcccctgagcacggtcaacgccaccatctgggagttttgccagaggccctggaaactggtgggtgggccctgggctccctggctgcagcgagggtccctgagggtacagggctgcctcgggcaggatgctggagcctcattctgggcagcacggccagcagggccgggggaggcaagggcagaggacagctccaggccgtgccactccaggtaggaggctgtggccacggccgcagctgggcccagcctctggcccgccaagaaggggccgcaacccgcaccacgtaactggtcggtggggccagggaggggctctctaccactgcccggcaccctcttgttgtctgcgtgctcaggttggccaggacagatggggcggtccccgcatgactggggatcaggggccctcacctcgcctcttggtctcctgggccccaggtggaggccagctaccctgggcaggaccgctggctgcgggactactgtgcctcaggcctgtacatcctcaccctcctgcacgagggctacgggttcagcgaggagacctggcccagcctcgagttccgaaagcaggtgactgcctcccctgggcgtgggcggggcgtgggcgtgggcaggtcgtggtcctggggtagctgccccgcagccctgagcagccgtgtgtcccgcaggcgggcggtgtggacattggctggacactgggctacatgctgaacctgaccgggatgatcccggccgatgcgccggctcagtggcgggcagagagctacggcgtctgggtggccaaagtggtgttcatggtgctggccctggtggcggtggtgggggctgccttggtccagctcttctggttgcaggactagtgggaaggcggaggtgggcccccacagagcccacaggcagctgcgtcccggatgctggaggcttcctgagccctgagcgccgtggggccttgctctgtggctctgcccacggtcaggtgacagccacctccagggcaccgtcagggtggtgctggccacagaggctgcatgacctcccctcccggcgtccctcccccaacctccttccgcaactgggcttccagggccgtaggtgcctttctgcacacaggccgccaggactcgtggtgtctccaggctgtgtgactgcagggccacatgctgcctgcaaacagggcaagaccacggaggcacaggggtcctgctcctgatggggcctcaggaggggcggagaggggtggaagggagggagctgccccacctggacccccgctctccctgctgttgtctgagcagatggatggagtccaggcctgggggcttctgctgggccagcccggcctcccacaccc

SEQ ID NO: 18189 - DNA, 1411 bp, Artificial sequence
  DNA replication origin
gttgttaagaagcctcacactcggcttcctaggatggctggcctcaccctgggttcacccacagcccctcggcaacagtcccctcagggctccagagagaaacccccaccctaggagtgcctggggtgggggccgcagagaggaggcagagccctgggcccccagtgcaggctggagctgtggctgctcctggggagggtggcacgggagaggcaggaccgaggggtggggacacagggtggccccatcacatggtgggggcagctccgcgagtcccatccgagggggtccgagggggctacttggatcctgctggggctgtgtccccagacgaggcctctgctgccccccgcccccctcccacagggccctctgatgcccatggcacccctggcaggcgtggctcctggggagtggtccttggccacgggaggcgtctgagccccggggatgcctctatggccacgggagaccgtctgagccccggggatgcctctatggccacgggaggccgtctgagccccggggatgcctctatggccacgggaggccgtctgagccccggagatgcctctatggccacgggaggccgcctgagccccggagatgcctctaaggccacgggagaccgtctgagccccggggatgcctctatggccacgggaggcgtctgagccccggagatgcctctaaggcaagtggctgtccaggggtgcgtctccagggagacggggagcgaagcctctgcctctggagggcgggatggggacaccaagtgcagcctgggtgcccacggccgtccccccacaggaaccagtaccacctgcaccatggggctgtcccggaaggagcaggtcttcttggccctgctgggggcctcgggggtctcaggcctcacggcactcattctcctcctggtggaggccaccagcgtgctcctgcccacagacatcaaggtgcgtccccgccggcaggggaggccgggccgggtccacaggtgttgcctcccactcatcccactgtctccccagtttgggatcgtgtttgatgcgggctcctcccacacgtccctcttcctgtatcagtggctggcgaacaaggagaatggcacgggtgtggtcagccaggccctggcctgccaggtggaaggttagtgggctgttctgcagcccggtgctgggacctgcctgttgctgcctggctgggattcccagctgcacggaaagggtttggagaggttcagtgacttggctgagctcacacgccgggcatgggtgctgggccggagcctgcgttcacgcggtggcactctggggacctccctgcctgatcctggtgagcagtcagattctcatggcctggcctgggtctgcccagcatctgctgcctccagccctgaccctctctggcc

SEQ ID NO: 18190 - DNA, 871 bp, Artificial sequence
  DNA replication origin
ctggggggctctcctggtctgggggcactgtcctggtctcgggggggctgttctggtctggggggcgctttcctggtctgaggagctgttctgatctgggaggctgttctggtcttgggggtcttttgagtgtgggagaggttgccccaacctctttgcctacctggaggctcaggcctgggggtctcaggtggctacatcttctgggtgtggagtccctgtgttcctggcccctgtcacctgtttgtccctatgaggtggcctatggcctgggtgctggttggggacacaggctgggccctgtctgggctggaccggcctcctgtcctctctgagcctctgtcatctaccctccttaaaatgggcttatatcccccggacatacagaattgcgtgaggaccccacagcgtgtcccactttccacgtgcccaggagccccaggtcaggaccagggcagcacccgcgcctgccactcagtgtgggtgcaacgtttcccgggggaacacgataggacacggtcacatggggttcaggtgccgggaccttggcaggcagcctctggctttgaccactcctttggcagtggtacccgtgtgaagtggggctgtatggggcacagggtcggcctggggtagtttgagagctgagacccttgctgggcgtttgggcagaggaggaggtggacacctcggccacagggctagagaagcccaggcccctcagatggcatccctgggtccacctcccgaccaggcgccatctggcaccagctaagaaggtgcagagtcagattagggaagccttgggctggatttccagagaaaccgatgttgttaagaagcctcacactcggcttcctaggatggctgg

SEQ ID NO: 18191 - DNA, 991 bp, Artificial sequence
  DNA replication origin
gactgttctgtctgagggggtgtcctggcctggggggctctcctggtctgggggggggctgtcctggtctggggggctgtcctggtctggggggggctgtcctggtctgggggctgtcctggtctgggaatctgttctgtgtgagggggtgtcctggtctggggggctctcctggtctggggggggctgtcctggtctggcgggggctgtcctggtctggggggctgtcctggtctggggggctgtcctgatctgggagtctgttctgtgtgagggggtgtcctggtctgggggggctgtcctggtctcagggactgttctgtgtgaggggatgtcctggcctgggggactctcctggtctgggggggctgtcctggtctgggggggctgtcctggtctggggggctgtcctggtctgggggggctgtcctggtctgggggactgttctgtctgagggggtgtcctggtctggggggctctcctggtctggggggggctgtcctggtctggggggctgtcctggtctgggggactgttctgtctgagggggtgtcctggtctggggggctctcctggtctgggggcactgtcctggtctcgggggggctgttctggtctggggggcgctttcctggtctgaggagctgttctgatctgggaggctgttctggtcttgggggtcttttgagtgtgggagaggttgccccaacctctttgcctacctggaggctcaggcctgggggtctcaggtggctacatcttctgggtgtggagtccctgtgttcctggcccctgtcacctgtttgtccctatgaggtggcctatggcctgggtgctggttggggacacaggctgggccctgtctgggctggaccggcctcctgtcctctctgagcctctgtcatctaccctccttaaaatgggcttatatcccccggacatacagaattgcgtgaggaccccacagcgtgtcccactttccacgtgccc

SEQ ID NO: 18192 - DNA, 1192 bp, Artificial sequence
  DNA replication origin
tacagacattaaaaggataaccaggaagtactatgaataattgtagtcacataaatttagcaacttaggtgaaatggaccaattccttgaaagccacaaactaccaaaactcattaaatagacaacttgaacaatcctattaagtattaaagaaactgaatttgtactttaaaacttttctaaaaaggaaagtactggctcagatggttttaccaccaaattatacaaaatatttaaagaagaaatttaatacaaattcttcaaatcccttccacaaaataaaacaaggacagctggctgggcgcggtggctcacgcctgtaattccagcactttgggaggccgaggtgggcggatcacaaggtcaggagtttgagaccatcctggccaacatggtgaaaccccatctctactgaaaatacaaaaaattagccaggcatggtggcaggcacctgtaatcccagctactccggagactgaggcaggagaatcgcttgaacctgggaggtggaggttgcagtgagccaagtctgcaccattgcattctagcctgggtgacagagcgagactccatctcaaaaaaaaaaaaaaaaaaggacaacttcccagactcattttataagcccagcattatccccatacagaaaccaggactaaaaaagaaaactatgcaactttgttgaacacaactgcaaaaatcctcaacaaacacatttgactcttatgacccatggcagctagtgtataaagttgctgcaaacactgaattaaagaatatgctaaactattgctcctaagggaaatgcaaagttctgttcctgcaagcttctggtcacatttttgttaaatgatcaatatattaataaaaccttcttttatgtgtatttttgtttaagggcaccttacttaatatgtattgtatcactaacattgaactcatggccaacagcgctaactcttgcacgaatgaagcttatccaatgtgtgttttctctgtaaagtgcatctcagccttcttgcatttctgcactatgctgagacgccattataaacagtgaaatcaccaagaaaaagcacaaaaatgcacacacatgacaccaaatatgctaccagtaaagagagtcccgattgagaccccaagagggttcttggatctcacacagaaaggaattcaccgcccccccgcattcccc

SEQ ID NO: 18193 - DNA, 894 bp, Artificial sequence
  DNA replication origin
ggccacagggcgggatcctcccggcccccagggactgcagcctctgcggccacgggtgcagcgaggaccggaacccacagggggaacctgagcaacgtctgaggtgccctgaagtggctccaggcgagaccggagccacacagtcccggggagcacgaggcggcccagccccaggtcccggtgcagagggagtggcctgatggtgactgggcggaggcctctgcccctcacaggacgtcgtcaaagtccagcagcttcgagtgctggcggctcttccacaggcgatacaaccggaagtcaaagtacgtctcgatcatctgcttccctgggcggagcgggggcaggaggctcaggcctggccggccctggggatcccaccccaccgtggccccgcagtggctgcagagcttcggcccagcctgggtaactcaccttgggctgagagctccaggggtgactcgaaggtgaccctataaggagtcatgagggtcctgaggttctggaacagctggaggaagcggggtgccatgagtccgaggcagagagatggggaaggaggagcggggaggagatggggagcagggcccaccctcttttttcagaccccccaaacctggctgggctcaggcataaaggatttctaggggaatgcccgggggaaggaaaaaaaatgccaggaaacatggaaggctctgccctgtctgtccacgtcgggggtttccagaggtctggggtggggcttgggggtcactgtaccttctctccattggggttccccagaatgtagcagcccatgatgtggatgacgttcggctctgggttcactttgctcatcaggcggctcagccgcttccagaagctggtggagaggggtgggtcacccagtggcagggg

SEQ ID NO: 18194 - DNA, 2704 bp, Artificial sequence
  DNA replication origin
ccttgggctgcctggcagccagaaggtagcctcatgggggctcccacagccccttggcttttggatgggcctggggcccctgagcagctctttgtctccgcagctcatttcctccaaggtgcccaaggctgagtacatccccactatcatccgccgggatgacccctccatcatccccatcctctacgtgagtcccgccccgggcctgcccccaacagatgccctcttgcggccccaccctgggccagcgccggcaccccaggtccccagggtgctgtggcgctgctggctctgacgcagccttgatgtggccttgtggcctgtgtctgtccccaggaccatgagcacgcaaccttcgaggacatccttggtatgtgcctcattggccttctctctgctggttccaggcctgggaggggcagacacaggtgggggtgcccctggggctggggtgggggccgcagcactcacacccgctctcccacagaggagatagagaggaagctgaacgtctaccacaagggagccaagatctggaaaatgctgattttctgccaggtggggctcagtgctcgtctcctgaccaggagaagaatcgtggtggggcaggggaagaccaaggggaagaagtcaagttgggggagaccaaggggaagaggttggggtggggagaccaaggggaagaggtgtttgtgggggagaccaaggggaagaggcgtgggggtggagaccaaggggaagaggtgtggctgggggagaccaaggggaagaggctggggtgggaagaccaaggggaagaggtgtttgagggggagaccaaggggaagaggtgtggctgggggagaccaaggggaagaggctggggttggggaagaccaaggagaagaggcgtagatgttgagggggaaagatcaaggagaagaggcgtgtggcggggggaaacgaaggggaagaggcgtgtggctgggggagaccaaggggaagaggtgtggctgggggagaccaaggggaagaggctggggttggggaagaccaaggagaagaggtgtagacattgagggggaaagatcaaggagaagaggcgtgtggcgggggggaaatgaaggggaaggggcgtgtggctgggggagaccaaggggaagaggtgtttggggggtagatcaaggagaagagacgtggcgggggaagaccaaggggaagaggcgtgtggcgggggagatcaaggggaagagacgtggcgggggagatcaaggggaagagacgtggcgggggagatcaaggggaagagacgaggggcaggggaagatcaaggggaagaggcgtgtggagggggagatcaaggggaagaggcatggtggggagatcaaggggaagaggcgtgtggccaaggaagaccaaggggaagagacgtggcgggggagaccaaggggaagaggcgtgtggtggggaagaccaaggggaagaggcgtggagggcagaacaaggggaagaggcgtgtggcgcgggagatcaaggggaagagacgtggcgggggagatcaaggggaagagacgtggcgggggagatcaaggggaagagacgaggggcaggggaagatcaaggggaagaggcgtgtggagggggagatcaaggggaagaggcatggtggggagatcaaggggaagaggcgtgtggccaaggaagaccaaggggaagagacgtggcgggggagaccaaggggaagaggcgtgtggtggggaagaccaaggggaagaggcgtggagggcagaacaaggggaagaggcgtgtggcgcgggagatcaaggggaagagacgtgtggcaggggaagatcaaggggaagaggcgtgtggagggggagatcaaggggaagagacgtggaggggagatcaaggggaagagacgtggtgggggagatcaaggggaagagacgtggcaggggagatcaaggggaagagacgaggggcaggggaagatcaaggggaagaggcgtgtggagggggagatcaaggggaagaggcgtgggggggagatcaaggggaagaggtgtgggggggagatcaaaaggaagaggcgtggcgggcaggtcaaggggaagaggcattggggggagatcaaggagaagagcgtgtggtgggggagatcaaggggaagaggcattggggggaattaagaggaagaggcgagggggggagatcaagaggaagaggcgggggaagatcaaggggaagaggcgtgtggtgggggaaatcaaagggaagaggcgtgtggtgggggagatcaaagggaagaggcgtgtggtgggggagatcaaagggaagaggcgtgtggtgggggagatcaaggggaagaggcgtgtggtgggggagatcaaagggaagaggtgtgtggtgggggagatcaaagggaagaggcgtgtggtgggggagatcaaagggaagaggcatgtggtgggggagatcaaggggaagaggcgtgggggggagatcaaagggaagaggcgtgtggtgggggagatcaagggaaagacgtgtggtgggggagatcaaggggaagaagcgtggccgggggatgaagaccaaaactacctcccacgcatgtgcgtgggtgcatgtgtgtcggagagggggaggaaggaggagcagatgcctgaccacagcttcttacagggaggtcctggacacctctatctcctcaagaacaagg

SEQ ID NO: 18195 - DNA, 1032 bp, Artificial sequence
  DNA replication origin
agtgtcccagtccaggtcctcgaaggcctcgtccagcgtgcagtgggagctctgcaggtcactgcctgggaagcaagagggtcaccaggacagcaggcccggcagcacctcctatcctggccatggccccaaggcccacagggcccgaaagccccatcccggagggtcctccaagcaagtgggaggaccatacagaggtcgccgccagcccggcaggacaggcctgtggacaccactgggcagcggcctgatgtgggaagggagaccctggtgcgaggccggtggaaggcgcgtgcaggcatcagctccagccaagtccgccgggcgcctgggagggagtgggggcgggcaccgcagccccctgcccctgagggcctcttgcgagtggcggtgggcacggccctacaggcgcccccggccagcactgccgcggccgttgttagccccgcctttgcgatcggagatgctgagggcgtccccatctcacaaacaggtaaaccaagattcaggagtgcaaaagcgcagcccagcggccctggcaggggacccccagcaggggtctggggtctaggggaggctctggggaaggtgggcgggcctgtgcggggcacctactgtctcgggagtcgtgggaagtgtcggctttcatgggggtggggtcgctccaggaccggctgaagctccgctcgcgccgctcagcgaacgctgcagagagcaaaacccgcattagcgagcgggtggggcggggcctcgggagtctcagaccccaggcgaggggaccacaggggccctgggcagaggaggaagctaatgtgggtggggtctaaggcacatgaagcagacacggaccagaggctcggttggttcaggggcaggatctgagaacactggggcagggccagaggcggagtctgggaagggaggagcctgggccgggctgggggcgtggctgggaggggaggagcctgggccgggctgggggcgtggctgggaggggaggagcctgggccgggctgggggcgtggctgggag

SEQ ID NO: 18196 - DNA, 1049 bp, Artificial sequence
  DNA replication origin
cggggcacctactgtctcgggagtcgtgggaagtgtcggctttcatgggggtggggtcgctccaggaccggctgaagctccgctcgcgccgctcagcgaacgctgcagagagcaaaacccgcattagcgagcgggtggggcggggcctcgggagtctcagaccccaggcgaggggaccacaggggccctgggcagaggaggaagctaatgtgggtggggtctaaggcacatgaagcagacacggaccagaggctcggttggttcaggggcaggatctgagaacactggggcagggccagaggcggagtctgggaagggaggagcctgggccgggctgggggcgtggctgggaggggaggagcctgggccgggctgggggcgtggctgggaggggaggagcctgggccgggctgggggcgtggctgggaggggaggagcctgggccgggctgggggcgtggctgggaggggaggagcctgggccgggctgggggcgtggctgggaggggaggagcctgggccgggctggggaagtggctggaaggggaggagcctgaggcagggcccgattggggttggggcgggggtcgttcttatcgcagctagcagcaagcaaagccccaaccagccaagcgcaacgccgcccccccacccccgccgcacggggtcttactctgggccttcaccctccggctgccgaccatgcgcaggtgtttgcggaagttcctgggggaggaagccaggggctgaagagggccgtgagagggtgacggcagcccctgcccacctagcccccgtcgggtcatggctctactctcaccccttcggtgtgggaagccagtgctctccctggctcctggcaccacctcccacccaaaggcaaatcccacccagtgctcttcccgcgacagccttccagggctccccttcaactccagaacaaaggtgcagtgcctggcgctctggatcaagtctcctcccgagctgcattcccaggctctgaccttccgtcctcgcccgggacttacgccctgagcctccacgcccatg

SEQ ID NO: 18197 - DNA, 1677 bp, Artificial sequence
  DNA replication origin
cactgggtgttctctgccttcggcctgctatgaaaccggcagcggggggcccacacgcggcaggcaggctcactcagtgtctctcctagatcacctgctggctgatgcctactctggccacgacgggtcccccgagatgcagccggccccccagaacaagcgccgcctgtccctcgtctccaacggctgctacgagggcagcctctcagaggagcccagcattaggaagcccgcaggcgagggccctcagcctcgagtgtacaccatctctggggagcctgccctgctgcccagccctgaggcggaggccattgagctggcggtggtgaaggggcggcggcagcggcaccctcaccatcacagccagcccctgcgcgccagccctggtggcagccgggaggacgtcagcaggccctgccagagctgggcgggcagccgccagggctccaaggagtgccccggatgtgcccagctggctcctggccccacccctcgggcctttgggctggaccagccacctctgcctgagacctccggtcgccgcaagaagctggagaggatgtacagcgttgaccgtgtgtctggtgaggggtttgtgtcagggcatagacaggtttgggggtgcatgccgctgccagggtctgacagcagcagccactgtgaggcttggaacagagaacaggtgctcaggtcacagcatgccagcggactcaagattaaaaccggcaggcttctgctgcggcctccacaccctatgagctgtgagctccctcagctcctcagcaaaatctgccaggcctcacagtccgctttcgccctgctagcaccaggtcaatcaaggagtgcttcctggaggagggggcctgggaggatcttaagggatatgtagggaggaagcaccgcttaatcaggagactgggctgccctccgagagtcctggggagctgttggggcccagccaggcagtgggcatctttccccagggttgttgagttgtgtggtagcttgtccaccaggcagaaagtcactccactgtccccacacttgggcatcagggaaaggctgtgggggccctcggaaggggacagccctcagcaaggtggtctctagcctcggtgagggcctccagctagagcatgggggctgcagagaaggcctcagagcctcttctgcccaagggaaacagacgcattgttttcctgggcctcctggagacagactgtgctttcaaaggaatgtttctcaaactttgggtggccaaagggaaagttaagccaaaaaaatcaaagcgtcaagttaccaagagcgtggtcttggtgagtgagcagcagacattcgagcactgccctctgtgcccgtgtggggatgccaccctccccccacccgccctggctgccagcttctgctgacccctggacccagaagcatctgcttcccaacagggagggagaggcttcaggaacccctacttcacccagccaccgctcctttttgtctctcttagacgacatccctattcgtacctggttccccaaggaaaatcttttcagcttccagacagcaaccacaactatgcaagcgtgagtcttgtgcccacgacttggggtcagggttgggtggtctctttctgctgctcaggaaacagcactttttcccagtctctgggcctaccagggg

SEQ ID NO: 18198 - DNA, 1387 bp, Artificial sequence
  DNA replication origin
gcagaagcctgccggttttaatcttgagtccgctggcatgctgtgacctgagcacctgttctctgttccaagcctcacagtggctgctgctgtcagaccctggcagcggcatgcacccccaaacctgtctatgccctgacacaaacccctcaccagacacacggtcaacgctgtacatcctctccagcttcttgcggcgaccggaggtctcaggcagaggtggctggtccagcccaaaggcccgaggggtggggccaggagccagctgggcacatccggggcactccttggagccctggcggctgcccgcccagctctggcagggcctgctgacgtcctcccggctgccaccagggctggcgcgcaggggctggctgtgatggtgagggtgccgctgccgccgccccttcaccaccgccagctcaatggcctccgcctcagggctgggcagcagggcaggctccccagagatggtgtacactcgaggctgagggccctcgcctgcgggcttcctaatgctgggctcctctgagaggctgccctcgtagcagccgttggagacgagggacaggcggcgcttgttctggggggccggctgcatctcgggggacccgtcgtggccagagtaggcatcagccagcaggtgatctaggagagacactgagtgagcctgcctgccgcgtgtgggccccccgctgccggtttcatagcaggccgaaggcagagaacacccagtgggcacctggcctctgtgggggactagggctgcccaaaccctagtcactggcgtgtttctgagcccctcactcctatctgggcctgaagctctagcatgtgcgtgggggctgggtgacgctgtgctacctgtgtgcggtcctgccgggtaggaacacgcaggccatcccccagcctgcgatcgcaccgtttgcctggtgccaacttccccctccccccaccagctggcccccagaggcagtggtgccagccctgggggagccaggaggcctgttgccatgccaacggcccaggcggggtgggtgccatggtgacgagcggctgggaactgctcctggggctcgggcagggagggcaggggatgtaaggaagccaggccggcagggcgccgggcccacgcgcaaccaatgcccctcacgctccacccccggaggcagggatcagcatcccttgggctggggggtctgggcggccctggcacggcctcgcgtgcccctacctgcgccgttgcggttctcagggtgactctgggacaggtactctccaaacgctcgggctgctctgagggtggacagagggcacggtcagaggccacggcacgaccctcccaaacaccgggccgcgcaagagccgggggtccggtccccagcca

SEQ ID NO: 18199 - DNA, 1435 bp, Artificial sequence
  DNA replication origin
gcactttggccgccaccgaggacatggcctcgctcctcagcgccctcctcctggaggcggcggcgcccatggtcgaggcggcggcgcatcccccgggcctcagagcgcgccccgcgcccgccgcctccgccggggtagccgcgccgcaccgggggtcgcgctcgggctcgggctcggggtctcgctcgggctccggctcgggcttgggctcggggtcgggctcggggtcgggcccggtccccgcatggccgcacccggcgctccgcgcgtgccgccgctcccgggagagcgctgcccgaaccgagggccggccccgcccatcgtgacgtcagggcccgggcgggcccagaggggcggtcggccccacctaccgtgacgtcagggccccggagagctcggagaggacatgtggccccgcccaccgtgacgtccgggcccgggttgagttgggggcggggccgggcggcctggctccgcgccctctcgtccaggcctccagagcggggaaactgaggccagcggccccctggtcgcaaagtcctgggccctcggccctcacgatctgctgctcagacctgcaggatcacagggaggccggttctccctccccttacacaaaagggctccctgtgcagtttgggaactggaaaccgaaggggaagccagtttagggggcacccagtttgcacgaggccagagagagacagaggggcccgtcctggtcctggggggccacagctctatgcagactctggacgccctacctgcctggcctgcatttgccgccctagggctctcaggccccagcagtggggtcctttgaggaggactggggactgcccagcctcagggaccacccgcatcagggagaaccagtagtgtttctttgccacagggacctcggcccgggagacacgtccaacagtgagatccacctttattgaaacatcacacggcagcatcagggctcccacacctcacagggcagcaggcagttcacaggacagcaggcagttcacagggctttgggggcctcacagggcagcaggtggttcacagggcttcggggggcctcacagggcttcggggggcctcacagggctgcagggggttcacagagcttcaggggcctcacagagcttcaggggcctcacaggactgcaggggggctcacagggccctgtatgcagggctgctggtacaaagaagaggcccagagaaccctaacacagcctggggccccggggaagtcagggcttccagcagggcaggtacagaggcccctaggacttggcaggagcctcagccttggggacagtcccacggaagacgctgcatccgggctctttagcagaggcctctacccgtcctggtcagaggagccctcagacagttttgggaaagccagactggggtgtcgatgccgcagtgagga

SEQ ID NO: 18200 - DNA, 1914 bp, Artificial sequence
  DNA replication origin
ttgggggcctcacagggcagcaggtggttcacagggcttcggggggcctcacagggcttcggggggcctcacagggctgcagggggttcacagagcttcaggggcctcacagagcttcaggggcctcacaggactgcaggggggctcacagggccctgtatgcagggctgctggtacaaagaagaggcccagagaaccctaacacagcctggggccccggggaagtcagggcttccagcagggcaggtacagaggcccctaggacttggcaggagcctcagccttggggacagtcccacggaagacgctgcatccgggctctttagcagaggcctctacccgtcctggtcagaggagccctcagacagttttgggaaagccagactggggtgtcgatgccgcagtgaggactcgtcctcctgcaagcagaccgcatgttccaggtgaggaccaggcagggcaggggctctgcagcgctggtaacccggtgggaccacagggagggagtggccggcacagggccaggcaccaaggctcagctgtgggcaccaggtgggaccatgcccagctcctcaccaagtctgagccctgctgggctgaggtgctctggaagtctgcgtatgcatccctggggacgtccagcagctcctcctcgtactccgtctggtagtcagattcgtctggcaccgagggtagggctgcgtcagtcccctcccaaggaagggaccgtacccagcatagccacactcagaggcagaaccggccacagatgcccacccccgcctccaaggtggcccggggccctacacgcagccacctggtcccagggcagccctgcacaccacccctggttctgtctggctccagctttgccccagcacatcacttcgtgggtcttccacaaggacaaggagcgggcagacactcctccccttgtcagccaagcaccctgagggctccagcaccccagacctggcaactgtggataggggctgccttgcccagggccctctcggcctgcggcagccatgaagacgtctcccaggagaatgtccagttctgctgtgaggaggccactggctgaaggcccaagcgcagggccctggatggagcatggagggtagtggacccgcccttcttgtcctgcggcccctccaacaagcagccttcattcccatttcccactgggtggggtgggaggcaaaacgtggttctacttcaggcctgaggtgtggctgggagttgaggtgaatgaagggcaggggctgggtgacccggggtggtcacagtcccactgctgtgggaacacgtggtgcccgggacggaggagtgccaccaagcaccccagctgctggagcctgggcgtggacgtgggcgggaggggaggccgtgggcctctggggtgggggggttcaagcccaacacagcatcaggaggtcacgcacgtctccacggcttcgtcttgcgcctccactcaccatccaccatggcgggcttggcgggctcaatgcgagacacaatttcggcaaggtccgtgaaggaggcgttgggacaggtgaggacctaggggtggggtgaggacagcacgttgcctgtggacacccgcctgccagtccccagcctgcttcctgtggggaggccccacccaccctgcgccctctctgcagcctccgcctgccccccaagtaagggcagggaccggggagatgcgcagtcctgagcaatccttgtcctggccctggagtctttggccaggggggcagggcctgtggcctgaggagctgggcgtggcctgatgaactgggcgtgggcgtggcccgaagaactgggcgcggtccggggagctgggcgtggtccggacgcccgtactcaccgcactcgcgggcttcttgctcggcccctgctggtcgcgga

SEQ ID NO: 18201 - DNA, 736 bp, Artificial sequence
  DNA replication origin
aggctctgcccccgtcccctggctctgcatgcctgtccagggggtaaccagggctggcttctccctagcggatgtggcccggtccatgggggcaaaagtggtgatcgccattgacgtgggcagccgagatgagacggacctcaccaactatggggatgcgctgtctgggtggtggctgctgtggaaacgctggaaccccttggccacgaaagtcaaggtggggtgctaccgggcaggctgggctgtccctgctgctcctccctgcagctccacacctgtcctgcggcaggggagtgggggtcgctcctgggctctgaggccagcaggtctggggccacccctcaccacccctgcctgagcccaactcgggcgaaggaaggcacgaggccggacgggcctgaaggctgtggcagcccgcagggaggacccccggccgggtgctgctaccctctccccccagaacctacctaccccagaggatgggtccccagaacctgtcctgcgccacgggccaggctgggacggggtaggggccggggcaggagactcaggcggctgtgacggcagcaggtgttgaacatggcagagattcagacgcgcctggcctacgtgtgttgcgtgcggcagctggaggtggtgaagagcagtgactactgcgagtacctgcgcccccccatcgacagctacagcaccctggacttcggcaagttcaacgagatctgcgtgagtgccggcc

SEQ ID NO: 18202 - DNA, 889 bp, Artificial sequence
  DNA replication origin
catgtggaatttacagaaggcttccaccctccctgcgggctgccacagcagacacgtggcgtgctgagggcctctcatgaatggaacgggggtccagagtgtccttgggccccacccacggtcctgaggcttggcgccctggctggagcctcagagtgagcagaggctggtggtcgccccagggcctgaaagccaggacacagcccaccctcggtcccttcctgatccctaagccctcgctggccctaccctcgcaggctctgcagcgcccccatgcctggggcctcctcggctttgcctgctcagctctggggcaaggcctgcccatgcccgtggctggagggtcagcgaggaggagagctcggggcgggctgctgggcacatgaggttcctgggccagggggacacagtggattgctttcgggaaggtcagagccacccagccctggctcacatgccactgcggtactccatcaggggtcccggggaagccgggctctcttgggttccttctgggtgggcctggggcccatccttcctcagtgaggcaggcaggactcgagactgacctcaaactagcctcaatgcccagtgtggatggagaggaagggtcttccctgccatagtgagccagggctcaggggacggaggctgggagggaagcgcttggagtgtgggctggacgtgcttacaccgtgtgatgcaggcagtgagaacgcctcggccacaggcagaggagaccccggtccttccctgaggaagcccctgcccagtaccagaggggctcacagagataagccagaccacacgcccactgtcccctctcctcagcatgaggggcaggcacacagccccggcctcaccttgccccggccagttcccagggccc

SEQ ID NO: 18203 - DNA, 1795 bp, Artificial sequence
  DNA replication origin
tggtctcgaactcctggcctcaagtgatctgcccgccttggcctcccaaagtgctgagatgacaggcgtgagcccggaaagaggggttttaaactgcatctggagtccctctctgcgtcagcgtctctgcctgtggaggagttgggaactgaggatgagcacaaggcctctgcagggcgcagcctgggcctggtactcactccttgctctgtgtccctggctggtgtagaggctgtgcccaggtgggcgttctcaaggccttggcggagtgcggcatccctgtggacatggtgggaggcacgtccatcggggccttcgtgggtgccctgtactctgaggagcggaactacagccagatgcggatccgggccaagcagtgggccgaggtaagcaggcacccatcaccctcaccggagcacagcccccaggtccttgctggtgctgggggacgctggggccgttggcctctgcatgtggctctgcagggccctgccctcgaggaggctaccccctgaagcctcccagtgcagcttgtgaggcaaaggagcaccacagagaaggcacagatgcaggttggtggtgggaggcggtctgatctgtgcccaggtctgagttggtggagacggtggtgggaggtggtctgatctgtgcccgggtctgaggtgatggagacggtggtgggaggcggtctgatctgtgcacgggtctgagatggtggagacggtggtgggaggcggtctgatccgtgcccgggtctgagatggtggagacggtggtgggaggtggtctgatccgtgcccgggtctgagttggtggagacggtggtgggaggtggtctgatccgtgcccgggtctgaggtgatggagacggtggtgggaggtggtctgatccgtgcccgggtctgagttggtggagacggtggtgggaggcggtctgatccgtgcccgggtctgagttggtggagatggtggtgggaggtggtcagatccgtgcccgggtctgaggtgatggagatggtggtgggaggtggtcagatccgtgcccgggtctgaggtgatggagatggtggtaggaggtggtctgatccgtgcccaggtctgagttggtggaggtggtggtgggaagtggtctgatccgtgccggggtctgagatggtggagatggtggtgggaggtggtctgatctgtgcccgggtcttagatggtcgaggtggtggtgggaggtggtctgttctgtgcctgggtctgaggtggtggagacggtgttgggaggcggtttgatccgtgcccgggtctgagatggtggagatggtggtgggaagtggtctgatctgtgcccgggtctgagttggtggaggttgacgatgggaggcggtctgatccgtgcccgggtctgagatggtggaggtggctgcaggatgacatggatgccaggattgtggaaaagaagctgactgttacagcccctgggaataagaggcatggagcctccatgggggtttctgacccaacggccaggcagggcagcgtgagcagctgaggatgggctgactgagtccttcaggcacgctgggggccgtggggctgtccctggtgcatggcacccggcctgggttgatttagggcagggagatgttggcgtggggatgtgagatcaggtcagggcggctcagtgtcacgggggagatgtaaactactttggccactagtctggccttgtgataaatggattccagaatcagaataccaaatacagaatcaaagacaacagtgagaacaggctcccctcgggcag

SEQ ID NO: 18204 - DNA, 738 bp, Artificial sequence
  DNA replication origin
accgtccatccctggcttacctgctggggccaaccaagcactgggccctgtcggaagctggcaccgtgctcaggaagccagtcaggaaagaaccttctcctagagctgcagtcgagttgggtcagggatgaaattggaccaagaaggcaaaagagatggctcagaagggcggggggaggggcaggggcacgcaggtggtggggcagcgctccctgaggaggtcaggacccttggggccaggaagagagctgtgtggtgtgggggtcaccagcagctctcagggaccgcagatgggctgaggctgcagactctggcttgttctgagtggggaggggcaccaggggctttgagcaaaaaaggctccgggcagacttgggcgtcgaaggccagctccggccactgtgcacagagcgtcctctcaagcaggcggctgaagccaccccaaggctgggcggtggaggcccagggctcccggtgctgagttggactgagggcggggactgagctttggtgggtcgggtaggagcctggggccggaggtgggggccgagtccgagggaggatctggggctgtgtgagtcttggacactcattcgggatgtgggatgggcagcatcatttatctgtttctgcctgcatacaggtacgggtgtttttcttttgggaggccttgagtatttatttaataatggaatcacatttataaaccactctgcagctttcctgctcagcagcacg

SEQ ID NO: 18205 - DNA, 946 bp, Artificial sequence
  DNA replication origin
gtgacatgcggtcgtttttatctgtggattgtttttactcctctggttcagatcctccttgctcttggcatactgggtcaccatggatgtggcctggtcactgtggacccatcctggtcactgtggattttgtgtcctgatgttttgagtgttaggctatgagactctggttcccatttaagtcttcaattttcactgttagtgtgcttgtattcacagggcatgtcctggccaacgtttgtggagtgtggtttgaacgtgaactgaccctggtctgcctactaggtgctgcccaggcccagtgtgaaggctgcattctgcgccatcttcagctctcagacccgaacacctgaccctggcacaggctgcgtcttcattacagattcgaggctttcttgatctcctacctctagttggcaggaggtggggcctcctctgctttctctgcaggggtgcacagttggggggatgtctgctggtcagggggtgcacagttgggagggatgtctgctggtcagcgggtgcacagttggggggatgtctgctggtcagtgagtagacagttgggatgtctgctggttagggggtacacagttgggaggcatgtctgctggtcagagggtgcacagttggggggatgtctgctggtcagtgagtagacagttgggatgtctgctggttagggggtacacagttgggagggatgtctgctggtcagggggtgcacagttggagggatgtctgctggtgtgggcggtggacagttggtgaagaggtttcctgctgtgggtggtggacagttgggaggatgctggctggtcggggggtgcacagttggggggggatgtctgctggtgcttgcttggtgccagtcagtgtccctagaggcagctcccatggggagggagggacagacccctccgtctgtggcagccatgtggctggg

SEQ ID NO: 18206 - DNA, 1119 bp, Artificial sequence
  DNA replication origin
tctgaggtaggtgggaccatgggtgggcggggctccagcacaggggaggggcatgggcgggtgggtggggctccagcacagggcggggccatgggcgggtgggtggccggggctccagcacagggcagggccgtgggctgggtgggtggggccccaggatagggcagggcccatgagctgggtgggtgggactgcacgacagggcagggccatggtctgggtgggtgaggctccaggatggggtggggccatgggctgggtaggcagggctccagaacagagcagggctatgggctgggtgggccgggcttcatgacagggcagggccatgggctgggtgggcagggccatgggctgggtgggctacggctctgggactaggtggggccatgggctgggtgggcagggcttcatgacagggaagggccatggactgggtgggcagggctccaggacagggcggggccatgggctgggagggcggggccatgggctgggtgggcggggctccaggactgggtgagggctcccaggaggctctgggttgggagaggtgacccacctgtcacaggtccctgctggaggctgcccaggatcttctcacccaagagatgaatcagccgagtcaccacctgcgggcagacacaggagccaagagccacacgttttaaactgagaaacactgggaaccaaagacagtgatgctcaacaacagcgagactcagccaatggcgctggatctgcttttcaaaacctccatgaactgagttgcacatgactcacaagccacgtgctgggccatggctgtttaggccttgcagccttcttgatgcccaggtaagccatacggctgcctttctggttgccaggccagcaggtacaaggggtatgtcctctgtgaccgtgagcccaggccagcctctcactctcacttcagggcaggcagacaactccaagcaagccacccacgaccctgaaggcaggacaagggcaggctggcaggcttctctggaactgagggctcattgtggctgttgcttctgggtgccaagcctgcttcagggcacggttggggacatttgtcctgactggaccaaacggtccccacaccaggggttg

SEQ ID NO: 18207 - DNA, 1475 bp, Artificial sequence
  DNA replication origin
gaggtggagcttgcagtgagccgagatcgcaccactgcactccagcctgggtgacagaatgagactccgtctccaagaaaaaaaaaaaagaggtgttctccaaaggcatttatttcttcgggagagctgaggctgcccttgttccagcctgtggtgtccaatgcctgtgtctgcaatttgcctgggttgctagggggcacctttggcttctggcatgttccagtggttctgacagcgtcgcccgccagcactcactgactgcctccgccttgcggtgtggatggggtgtcatgtgtggctctggcaggcaccggaggctgtcagggacaggtccagctggctcggccctcccaagcccgcggccccagcagccggctcctgtcctcaggtggagacactgacccaccaggcccgggcgaccacggtgcatgccgttcgggactcagaattggccaagctgccggcaggagccctcacgtccatcaagcgcaggtacccacaggtgagcatggcgtgggtgaggatgcggagcggatgagggtgtggagtggatgagggcatggaacaggtgagggcggagcgggtgagggcacagagcaggtgagggcgcggagcaggtgagagcgcagagcaggtgaaggcgcggagtggatgaggtcacggagcaggtgagggcagggcgcaggtgagggtgcagagtggatgaggtcacggagcaggtgagggcagggcgcaggtgagggtgcggagtggatgaggtcacggagcaggtgagggcagggcgcaggtgagggtgcggagctggtgagggcgcagagcaggtgaaggcacagagtggatgaggtcatggagcaggtgagggcagggcacaggtgagggcgcggagcaggtgagggtgcggagtggatgaggtcacggagcaggtgagggcagggcgcaggtgagggtgcggagcaggtgagggcgcagagcaggtgagggcgcgggtgagggtggtgcgggtgagggtggcacaggccatgtcccaaactgtgccctgagttgtggtgatcattcggtctacctacacatggatggaaaacgacctggaggaggtgaagattagagcccagctgggtgggggcggtgacggtgagcaggaaacctggagaggcgcccaggctgcttcccaggacagtcgtgcagctgccttcttggtggcctctctactcatgagtgatgtgggtgtggcagaggaaagggaagtgactctcactctgagatctggagaaggacagggcgggctgctcggaagtgcagggtcagcggtgaggagagcgcccaggaaggaccggcagaggggcctgaagggcaggtctgcagttgttcatcagccagcacacggatcccaagaagtttttcattctagaacaaatggaaagggggtgcaggtgtggcccacagcatgttgcagggccttttacggccagtgcctc

SEQ ID NO: 18208 - DNA, 941 bp, Artificial sequence
  DNA replication origin
agagccccctcctggcaggcccgcgagtgccccttggacacgggccctgtgtcaggctgcggtcctggcaggggactgcacatgccgtcaggagctgcataatgcacactcgggccgtgggtgtggctggcagtgagtgccgtgaagggcaccagcaggcaaaggcagaggctgagagacccatggggcctggatagcacagggtctctcctgggtgggtggagggtggctggggcctctgacccggggaacactgttctctccccggtggtcgtgtgtggacagactgtcgagggtgagggctgcagcagggacgtgcccaggggctctgggcagtggcgaggtgggacgtggggcaacctgcaccaggtgtgagagtgacgccgggcgactccaggcctagcctgagccacaggcaggtggagctgccatttcctcagaaggcaaaagcaggaggaagagcaaacgtggaatcaggatctgctttgcacaggaggtgggggaagctggggagatggcaagacagtggctgggtgagggcgtgaagggcgtgagcgtggcacttagagccctgggggtggaggaggagccctgggatgctggctggggtgacggctgcaaggcacaccatgcacggacacacaggcagacacacagacacacacagacacacggagacagagacactcgcagacacacggacacacggagacacacggacacaggcagacacacaggcacaccgagacacacacagacacacagacacacacagacacaaggagacacacatggacacatgtagacacagagacagacacacggacacatgcagacacatggagacacacagagacacacgcagacacacgacacacgcagacacacagatagacacacagcacggggggactgagctgcattaaggctgagggccctga

SEQ ID NO: 18209 - DNA, 1075 bp, Artificial sequence
  DNA replication origin
acttcactggaaacatttcggcagcgtctacggtttcatgatttcacgagcagtcgtggaaaatctgggttctcaagggctccgtgcagcgagccgggcctcggacctgcacaccttccctcccggcacccgcatactgactgtccctggcaaatgcgcgtcagcccagcattcctgtgcacggggggtcccatgccgcctcgcctggggcctggcctctgaggggtgggctcctggcccctcccacactgagcccccggcacacgccacgcgttttggtcccacatctgcagatgtacccatgaaaccactccaaggccacttccactgatctgtatccactgtgacctcttatgacctcttcccaatctgcttgcccggcccactctcaggtgcgagcagaagggccagtgcagcaggggccaaaggtggacacagctctcagggctcagggctgcctgaggggaggggctctgccatggtgcccagaggggcagtggcccggtgctgggaggtccccagtcactggtgtccagtccaggccctcctctggtgctccacttggcactgggctatggcattgggtggtcccagtgcccccccccagacccccgctcacctggtctccctgccttgacaccaccgtgcctgcaggaacgtgcagaagcgccacccggccatccaacagagatgagtcctaaaaacagagcagacttcagggaacacgggcgggaagcataaatgaaggtccagagaacagaggctgcactgggctgttcaggggcaacgagcggtgaggccagaggccgggcaaggccctcctccgaggctgtcctccaacaagggcctgatggacactgggcaccctgcagagccaccgatgccaaaccagggcatcggcacagagacagacaccaaacagtggagcaaggcagaaaatgcagaaacagacactcgtatttttgtgaatttacgtaaaagagagaggatgtcattttagggagaaagggtgatttctttataagtggtgctggcatagccagcagtgggatgccttctccacaccacctacaga

SEQ ID NO: 18210 - DNA, 2788 bp, Artificial sequence
  DNA replication origin
cccaggtcccctcacgtgcctcaggtcccctcacacgtgccccaggtcacctcacatgccccccaggtctcatcagatggccccccaggtctcctcacgtgtccccatctcctcacatgcgggctggatgtcctcagacctccccaggtctcatcaggtgtgcccatctcctcacatgtgggctggatgtcctcaaacctccaacggtctcattacgtgtgcccgtctcctcacatgaggcccggatgtcctcagacaggcccaggacccttcaccctccattcttcagttgttcccagaattctccctgcgtgcttggcctgggccaggtgcctggtggggagtgggcctcccgcgatgggctctcacccgctgttctgagtgctaaccggggggcctgaatctgaggaggaagcggtcgggtgcggcgtgcactgcatgagtcaccccacgacgatctgtgtgatggagttaacagccaccctacagatgaggtgcgcgcttggttatttatagcccatcatgttcccaaaagaattgaagtgactaacaaaagtatgtgaaattaaatgaagcaatgctgatgagagtgaggagagaatggagtgagcagagtggagtgagtgagtgggggatggagtggacagagtggaatgagtgagtgtgggatggagtgagtagagtggagggagtgagtgggggatggagtggacagagtggagtgagtgagtgggggatggagtggatagggtggagtgagtgagtgaggatggagtggacagagtggagtgagtgagtgggggatggagtgagcagagtggagtgagtgagtgaggatggagtgagtagagtgaagtgagtgagtgggggatggagtgagtagagtggagtgagtgagtgggggatggagtggacagagtggagtgagtgagtgggggatggagtggacagagtggagtgagtgagtgggggatggagtggacagagtggagtgagtgagtgggggatggagtgagcagagtggagtgagtgagtgaggatggagtggacagagtggaatgagtgagtgggggatggagtgagcagagtggagtgagtgagtgggggatggagtggacagagtggagtgagtgagtgggggatggagtggacagagtggagcgagtgagtgggggatggagtgagcagagtggagtgagtgacgggggatggagtggacagagtggagtgagtgggggatggagtgagcagagtggagtgagtgagtgggggatggagtggagtcagtgagtgggggatggagtgagcagagtggagtgagtgagtgagggatggagtggacagagtggaatgagtgagtgggggatggagtgagcagagtggagtgagtgagtgggggatggagtggacagagtggagtcagtgagtgggggatggagtgagcagagtggagtgagtgaatgagggatggagtggacagagtggagtgagtgagtgggggatggagtgagcagagtggagtgagtgagtgggggatggagtggacagagtggagtgagtgcgtgagtgggggatggagtggacagagtggagtgagtgagtgagggatggagtggacagagtggagtgagtgacgggggatggagtggacagagtggagtgagtgagtgggggatggagtggacagagtcgagtgagtgagtgggggatggagtgagcagagtggagtgagtgagtgggggatggagtgagcagagtggagtgagtgagtggggatggagtggacagagtggagtgagtgacgggggatggagtggacagagtggagtgagtgagtgtgggatggagtggatagagtggagtgagtgagtgtgggatggagtggacagagtggagtgagtgacgggggatggagtggacagagtggagtgagtgagtgagggatggagtggacagagtggagtgagtgacgggggatggagtggatagagtggagtgagtgagtgggggatggagtggacagagtggagtgagtgagtgagggatggagtggacagagtggagtgagtgagtgtgggatggagtggacagagtggagtgagtgacgggggatggagtggacagagtggagtgagtgagtgagggatggagtggacagagtggagtgagtgagtgtgggatggagtggacagagtggagtgagtgagtgtgggatggagtggacagagtggagtgagtgacgggggatggagtggacagagtggagtgagtgagtgagggatggagtggacagagtggagtgagtgacgggggatggagtggacagagtggagtgagtgagtgggagatggagtggacagagtggagtgagtgagtgggggatggagtggacagagtggagtgagtgagtgtgggatggagtggacagagtggagtgagtgagtgagggatggagtggacagagtggagtgagtgagtgagggatggagtggacagagtggagtgagtgacgggggatggagtggacagagtggagtgagtgagtgggggatggagtgagcagagtggagtgagtgagtggggatggagtggacagagtggagtgagtgagtgagggatggagtggacagagtggagtgagtgagtgtgggatggagtggacagagtggagtgagtgacaggggatggagtggacagagtggagtgagtgggggatggagtggacagagttgagtgagtgaggatggagtgagcagagtggtgttactcctgcactcatgtgtgcttg

SEQ ID NO: 18211 - DNA, 1055 bp, Artificial sequence
  DNA replication origin
tggcgggcgcctgtaatcccaactactcgggaggctgaggcaggagaattgtttgagccaggacccaggaggcggaggttgtagtgagtcgagatcgtgccattgcactgcagcctgggcaacaagagcaaaactccatctcaaaaacaaacgaacaaacaaaaaacaaaaagaaaattgagaaactcaagaggggagggatgtgggtgtctgtgactcatctgttctcatccgcattaagtgctgtgaaagggcagatgagttagggctgctgtaggctgggtctgggacaggcttaggcggccgggacagggcgtagggtggtctggagcagagtggaggcggtctgttgagtgtcggccatcatccagtggccccacagaggacagggaagctgagggcctgggaggaaagccatgaggctgacagctctggaccgaggggcagcaggcagtggggcctgagtgaggtgaccctgccagcatgcagggtgtgacccaggccactgctattctgggcagtcaagcaggcactgcctgagaaaagggaggaagactgttccagatatgggacagagtgggcagtggccccaggtcagaggggaagttgggggggaaggtcggtggggacagtggtggatttttaaagggttgtagcaaagggttgtgttgaccagtatgagagccaaagatggagcgggtgtcagccttcggggcagcggggccagcaggcatgaagcctgggggctctggagggttggctgtttggggacagtgaggacgatcccaaggatgtgtggggctgtatcgctgccaacattccctcacaggccaggcagggtgggaaaatggcacagccagaccccaggagctgaagctgggactgtgggaggcccacaggcaggtcctgaggactgatccccatggcaaagagcttggaccttgcggcttgcagggtcagtggctggtctctcccttggctctgcaggtgaccacactccccaacacccttgtggagaacactgccctgccccggcagcgggccaggaagaggac

SEQ ID NO: 18212 - DNA, 1118 bp, Artificial sequence
  DNA replication origin
cgcgagccccgccccgcgagccccgcaccgccggccccgcaccgccagccccgcgagccccgccccgccccgcgcgctcctcgcattggccgagtccccgcggccacaccccctaccagattggggccgctattggacgcggcggccgcggccaatcggagccgctcttgctgcgacgcagcggtcggaagcggagcaaggtcgaggccgggttggcgccggagccggggccgcttggagctcgtgtggggtctccggtccaggtgagtctgtcggattggggcgggcgccgcgcgcggccaggggcggggctggccgggttcccggggccgcgactacccgctctctcctcccgcagggcgcggcatgggcgtcctggccgcagcggcgcgctgcctggtccggggtgcggaccgaatgagcaagtggacgagcaagcggggcccgcgcagcttcaggggccgcaagggccggggcgccaagggcatcggcttcctcacctcgggctggaggttcgtgcagatcaaggagatggtcccggagttcgtcgtcccggatctgaccggcttcaagctcaagccctacgtgagctacctcgcccctgagagcgaggagacgcccctgacggccgcgcagctcttcagcgaagccgtggcgcctgccatcgaaaaggacttcaaggacggtaccttcgaccctgacaacctggaaaagtacggcttcgagcccacacaggagggaaagctcttccagctctaccccaggaacttcctgcgctagctgggcgggggaggggcggcctgccctcatctcatttctattaaacgcctttgccagctatacggtgtttgttttttggcctcaggtcatggcaaagtgtgcagcatgacagatttcagtgcaggcacctaagccgagttctcatgcagactcggcgctgtgaacctctttggaggtcatcttccgagtccgaaggttctgggaacctgccaagggcaaacatcactcagcttgcaggagaaagaatttacaaggcagattgtgccggatgacagcactggtcagttcatcccccaaattattcacccagggaacaaagatacagagatgggggtctc

SEQ ID NO: 18213 - DNA, 1025 bp, Artificial sequence
  DNA replication origin
tggatggtggattgttggatggatggatggatggatggatggatggatggatcatgggtggatggatggatttttggatggtgggtggtgggtggtgggtcgtgggtggtggatggtggatggatggtggattgttggatggatggatggtgggtgagtggctggctggctggcttgatagacggggggtggatggatggatttttgggtggtgggtggtgggtggatggatggtagattgttggatggaaggtgggagggcgggtgggtcgatggatggtggattgttggatggatggatggatggatggtgggtgagtgactggctggctggatggatggatggtgggtggatggatggatttttggatggtgggtggtgggtggtgggtggtggatggatggtggattgttggatggatagtgggtagatggatggaaggtgggtggggggtgggtgggggcatgggtggatggatggtggaattttggatagggtgaggtcggggggtggatagatggtgagatggatggaaggtgggtgggtagtgggagctggatgatgcaggggtgggtgatgtggttaggcctagacgttttccttctgatcttcttcactctccctgtgggccctgctcttgagcttcccttccttcaggtgccaccattcaccccatgtctgcattgcttttcttggaagattggttgtggttcagtgcaccaactcctctcttctcccatccttttcgttcccctaaacaagtgctttaagatgacagagggcaccttcctttcaggtgcatggtgtggagtccttgtgcttgctgcctcctgtgtgcagtttctgttcagggctctgatctggcaactcttcttcttagaagccagggctttattcactggagcccttagcaaaggcagtttagcccctaggacctagtaacggcccctgtgaacaatggtcgcctgcacctgatggccttcagggccccttcagtttccatttcctcccttctgttcctgca

SEQ ID NO: 18214 - DNA, 1852 bp, Artificial sequence
  DNA replication origin
tggtctggtccggtccgaccctgtgttggtcccacaggttgctgctacactttcccttcttgaagctccactgccatgttccaggacaccctgtgtgttctcattgctgcccctggctgggctggcttttgtctgtaagcaaaacttccagtaccttttctggcagtaccctgggggctcctgaagaacaggactgctgaaaatgggtgatatcaacaaactccgcaggatttcctggagcttagagaactgcatgtgcccacatcaggccctgagaagcccccttagctgctgcaaaggttggggacattttttgctgagtaggtgaaagctgccagggagggggacatatgtgtccctagagatggcgggtcagcaggttggggtttggggcagtcttcaggcctggagccccgagtgccctcaggcagcctgctttcagatagagtctgaggatgagcacggagtgcaggggtcccctttacctgcatccaggggtgtggccatgttgcccctgaccagcagggctgctttgtttggcagtcattcatcagaaaagtgcactgaaagaagcgcccagggcctcccacctgtgagacaccacgctggggaagggggcggtgcaggttctaggtttgcatgtggcagctcctccaggcctcaccccagcaggtggcaccgtgagggtgggacgggccccaccactgcttccctctcacctgatacccaatcctctggtcatctttcccgttccgtggccccgacttcttggtcttcgtagccaggtatctaagacgtcctgtgaggacatccagatggctgcaatgtggggctgcttctaaagcttgtttggagtgtggtgtgttgggatgcgcacctggtcactctccctcccccgcagaggtgtgtggttgaggcccttttggaatgccctgctgccttcctggccagccttttctgcgcctctgtctctgtggtggtctgagctgttggctctctgccatgtctttagccacagccctgcttgaagccctgaggctgaatacccaggcacccgtatatttcagtcaagtccgccttagcttcctggagctgccgcaacaaagcagcgcgagctgtgcagcctgaagcagcgggaattcacagtctaggctctggaggccggagtctcagatgaaggcgcaggcaagggccctcaggtgcggacgcctcctccctgccaggtgccttgcctgcctccctgtgctctgcacagcaatggccctgcaagtcttctgcatcagctttctcttctgcggactcctgctcctctgggtcagggcccacgcctgctgcttctgagagcccctgtttgttaaggatgctctctgaggtgctggggtcttcagtccattgttttttggggggcacagttcaacctgtaacggcccaaggggttcttcctgcccgctgcacacattcagaccgtggattgcaataaagaaaaaaagtttagggccgggcgcagtggctcacacctgtaaccccagcactttgggaggccgaggcgggtggatcacgaggtcagaagatcgagaccatcctggctaacacggtgaaaccccgtctctactaaaaatacaaaaaattagctgggcgtggtgatgcgcgcctgtagtcccagctactggggaggctgaggcaggagaatggcttaaacccgggaggcggagcttgcagtgaactgagatcgcgccactgcactccagcctgggtgacagagcaagactccgtctcaaaaaaaaaaaacaaaaaaattaatagacacgggccggccaggccacatgtgagatggagttcgtcctcagatcat

SEQ ID NO: 18215 - DNA, 1809 bp, Artificial sequence
  DNA replication origin
cggctccggtcccgtcctgtcccggcgcgccgcggcctcgccccggcccccgctcggcgcctcccgagggagcggcgctgccggccgagagcgcaggcccggccatgaccgacttcaaattgggtatcgtgcggctcggccgggtggccgggaaggtgagcggcgcggagcccgcgacccggcccgtctcgcccgtccaggcctccgcgcggggccgggggcggttgtgcgggcggcggccggggcgggggcgcggagcccgggatgggccccagcggggcgggggacgctgcgcgggcccggctgctggccccgcgcgggtgcagcttcctctcgcaggccggcgggcacgcacccctcggctctggggtgcacctggccaccctcggccctgccctgccggaggtggaggccacggccctgtcccgagccgggtgcggagatgcgtggctcgagcccgagccgcgttctcccggagccctcccagtggtgtcggcgatccggggcctagcgcggcgtccgggctgccagtgcggccacacggtttaaacacagcgccctttccgaggcagcgccacttccacacctctcgccgaggcgggtctggtgtgggctcttctgtgcctcccagttctcagcagggcttcaggctcgttttaacgctgccaggggttggccacgttaggctgagcctcagactcggagcagagaggaagaagcctgggccctgatgctgcagactcagggccttcctcgacttctcttcttacttggcccccacgctccacgtttgaggctggggattccatggcacctgtgggcattgaggcttggcggtttctcggagccacctgtgcagctgcaccagccagggtccttacccggatgggagccctgttcccgtcaccagcggctgcggcttttggtgggagagaggagccgaggcagtgtcaggcggcgtcaggtaaaacaggttcagatcccagaagaaaaactgccaagagggagactggcccgttctgggacctgttcctgtttcctgcccctgctgcaagagcataggcagggcctgctggggaggaggcttttttccaccagggaagggtgggctctccagtcaggtcggagaccagagaccccttctaactccacccatgatggcattgtcatcccttacagcttttctttggaacatttcagatggacaaaaagctaaaaagggtaatcagtgagtagctcagcttaataaacacaccctaatcaaaaccttctggctcttctgcctcagccccggcccctccctcagctcagtgaaacagtctttgcctaggtttattggtgcgttgaatgttcagtgccactgttggggttagccctgcgaggatgaagcctgataccagctcctctggcgcagactaaagtgggcagctggcttttaacctgtctgcctgtgttttgtcgtagactgcaccaccccaaacggtggaatgaggcccccatgtgctgagctgtcttggtctgaagaggcctgtagttactttccacttcacaggaaaatgcaacaggctcctgcctgttctggttataaggttactgcacctcacgcagatcccaaatgtaatgatttgaaacatgtggttaacttccagaccaaatacacgctgatcgatgagcaggacatcccgctggtggagagctactcctttgaggtaagtaaggatggctgttccctcccctgatgctcgtggtcagtgcccaggagggtcacgaggaacgagctctctcccctgtgctgcaagagcaggcggc

SEQ ID NO: 18216 - DNA, 928 bp, Artificial sequence
  DNA replication origin
ctcttcctgatctgactctcacaccccaagccagcatttctcctgccctgcatcccccagggacagataccagacggctagagccccctgctgtgacctagagtctgctgacatgattcaagctatctaatcctaaacttgctcacacttacctaccctgccttgtccattttcaccctgaggaaaacacaaaaaaggctctgggtcatgctctctcctggctcctcctgaccctggtacttccccttctggccctgcgtggcatggcagggcccctcctcctgagaaccacgagtactaaatccttcctttgtggcacttgtcttctagtctgtcactttactatacctgattcaaacaaaacccaggtacttttaggatatagggcaggaggctggaaggattgcctgtgtggattcagaagcactgagtttccacacttggagatggagggaatgacagtgagttaggagctaaaatcaccaagaaatgaagatgccgaccagagcgaaggtggtgctggtgattctgagaccaggaagcttacacatggtagctcccagggtggagaatggcctggtagtgttaggaaggagccaggagggccccaaccccacctacagacccagaggtagagggatcctgcgaaaagatatctctacacccgaaagctccaggggaagccaggttttcatgagagtgcagctagaagtatgcttggagaagaagagtctaatgacagggcggttggtgctggtggtggtttctggaacacaggatgggtgggagatagggtcagaatcaaggatgtgcagagtcctgtggggcttagattgtggctgacctgggataaaggccacctgtgttctgtgtccattgtcttccatctcagtagcttgcaatacagtctgtctgtcccttgcttgaa

SEQ ID NO: 18217 - DNA, 1062 bp, Artificial sequence
  DNA replication origin
ctgggggcggggccgaggcgagctctgagactgggaaggtctccccgctgcactctgctgcgggcagaacccactcctccgcccccaccctccgcccgtcccgcccaggggtctccctcaccccgagtcgcggaaaaacgtcacggggccgcgcgggcgtcctgggcggggatgctccgccgcgtaggacctgccccgcctcaacccccacccccggctcctgccccgcacccccaaccttctccgcacctacctcgcgtcccagcacctgtcgcgcccctccggaacctgcccgccctcccgccttcccggtacctgcctacccccgcaactgtcccggcccccaacacctgcatcgcccaaccccttccccccccgccccctgccttccccgcacctgcccggagtcccagcacctgccccgccccccgctatccccctccttgctggcctgatggggtgtgggcccaagggagccacacttgggcggaggcccttgggcaggggtccgcagcagaagggtcgggggccaggtggggcgaggacttggatcacttgaaaccaggaggaacacactcccatttatcttttttaaagggtccctttgtagagagtgagccgcggggggtgggactcaaatacccaggggacctaaggcgggagagaccggttgggtagtcctggagagggaaggcgtcgctcgacaaggaccagctcaccacggagtgggtgtgcgggccccagtgctgcgagtttttctaggacagccggtgaagagggtggccttctctgatggggaggacggacctagatacacatggtttgggggtgggagggtcatcacatgcagagtctgaggtgccactgatccccaatggaccaagtacttccgtgcatgagcctgggagtcaagcactaaaatgttgccatccctagttggtagaaggtaacaggtcagggaggaggagtctggcaccccagcaaagagaaaggggctcacaggctggaggggcccccgggccaggctgggagaggccctgaagccccaggcccagctcactc

SEQ ID NO: 18218 - DNA, 2043 bp, Artificial sequence
  DNA replication origin
tgggcccgcggagtcgctgtcttcgccgcccgggactgctgggaagcgggctcggcggcgccggggaggtccgggcggcgccgcccttccgcgtctgcccttcctgccctctcgccgaggggcggcggggtcccggcggggcctgaagcgggtccactgtggaggacgccctgagcgcgggcgcacgcaggcctgcgaccctccccgtccgcgctcgcacctgctgggctccttcccgcaccctggctcccggcgcaggcgctcccgctgcagagccgctcctggcgcgggcgtgcggtcccggcggggtgcagacacctgctgcggctccctgcgccccctgccacccgccagcaggcctcgccggccccccgccgaggtggacgcctgggcctcggggactgggtatcgggttgctgcagtggccgctggcagggcgccctggaggtgagggccggcccgcgaggtgaggctgcctctgcccggcccttggctgtgagtgccgcgtccctgccggggacttctctaccttggcctcctgtgggaaccacctgggctgcttggcctgtgccacagcccctggacttgccgctggaccttgaccgctgggcccgcgcgtgggtaacagcaccgattttgtgcctgctgagaacccacagtctctgttctgtcctctcagcctcctgggacaggtgatggtgctgtggccctgaccctgcaccgcctgaggctgtggggcctcggaagaagccgggtggtaggtgcttctgtcaggctcctggccccactgggcctcctgggatgaccccacagcctcccttcctctgtcccaaccttgagtttggggtctgggtgggggcaggtgtggccgtggcagggcagagatagcacacacatctcttgggtacaggtgtggtgtgtggtgaggccggctggatcctggttgagggctgtgcaggaccctgtcgtccttcccctggcgtggcctggggtgagcaggccattgcttaccacagggaagggacggccccgcggtgcgtgactggcctgggtgtgcaggctcccctggcctccgggtggacgtggtgggtgggttgaatgctcacgcctgtaatcccagcactttgggcagctggcccaagagccgagggagcactggctgatggtcctacctcacagaggctggtctgaatgagggagaaaaaggagggtcgtgagctaaggagtaggagatgggccctgatgggccagagagcacatgattcaggctgctgcaagtgaggtgggagggtgtaccggggcccccgggggtttcccccagccctgcctgggatgggaacagaaggaccatggtttcttttcctcattcagaggatgcttgtcaatcctgctaggagccagtagggaggccctcagcccccaggaggacagcagccctgcctgggccccagagcttgctcacttactctgccgatgagtgtcggtgacagtcagcacccagccgtgaggacaccggctgtctaaagggctgacgcggagggaggcctgggagggagcagttttctggagctcaggctggcccagtccagggctggggttcaggcaggaccacttcttgttctgctgttactgggatgggcgaccagggccgacagtggttctcggagcactcatggtgggcccgatgcaattctctccacgtgccacgggccagcctcagttaaccctcagcgccctggcaagtggcacggttgttactctcatgatacagatttggaaacaggactgggggagtggcttacaggtcacagcttctgtggcaggcgtgagtcctttgggatgaggatgaggagtgggtgggtcttcatggtccaagtgcaggtggtgcaagggaggggctgctgaacaggtgggagccccagctggagaagaaagttccagtggtcacttgagaacgcagcccagtcatgatcttccttagagtcagagaggcctgcagcctccagcagcttgtccttgcttgtgcatctgaacacaggaaac

SEQ ID NO: 18219 - DNA, 1685 bp, Artificial sequence
  DNA replication origin
cccgcagcgtggccccgcccctcccgcgcgccatcgccccgcccgcgcctcgcggcccagagtcggggcggggccgatcgcctacgtctgcgcctgcgcctgcgcccgcgcctgcgcgttggagctcgaccggtgcggcgcctgcgcactggaaccaggcgtgcggcgccccaggcgccgggcctgcggcggccggaaccggaacgcgcgcccgcggggtaggagacctggagctggagaacccgcccgccagagtcgtagtagtggatggggagtagccgtcccattttcaacacatgtctcattctaaattgacgttttggtgggctggccgaagaaggagaaagacccgcggctccgacctctgacctctaaccccggacgcactttgatttcgccggcttgcgcggaaggctgactccctgggccgcggcctggcgcgggagccgcctgtggggtgtccccggcgcgggagggtgctctggttcaggcaggttcccgttgcggcggggttccctcggttgggaggaatgcccctgccgagggtatgctccggctggagggggtgtccctaacggcgggaatacctggactggctggggtgtcccactggggagggtttcccggtggggaggtgtctggcgggggagcggctccggctaagcatgggtgttctgctaggaggatgtgtctggctgggggcggtgtcccaatcgggagggttgccctgatgggggaggttctacagttgtggagatgccaacctggggggcgctccggttggggggtgtgccctctctggttaccccgctctcgctgccactcataggcccgctgcccaggtatgcacaagtcaaggccttttctgcagaccaagtagccttccctggagagcgcccccagcaccacggaaactacctacatgccccgcggtggtcagcccgccttatcccagccccgagacccaaaacaagaagcatggactgaatttgaggtttctggatggtcgtgtgaaccgaggggacgggtactggactgacaagaaatgagccttgaaggtcaatctgggtgacacccgagtctcctggtgagtcggactccggagaattatctcaagtccagcatagacagcgcacatagacagaaaaggaaacggacaatcccaagtgccaagggaaccttcccaggtttctttagggcagctaaactgctctgtcaaagcctaagtccatttatgacaggccgagcaccctgagccctcgcaggagacacgagcgccttcatggccctcctgccccgcacccacctctccgccacccctgctgtctgtcccttccctgaaacctttatttcgagtgtctttgtggcttccctctttaccatccttgagttgaaatatcacctcttaagggaagccttccctctcctccctagttaaaatgatactgcccccccatacctgtcttcgttgacttacttggctccatcacagtgtgtgtcatgtgactctcccacatcctgatttggaatattgtctccctactagaatgtaagtccatggtgcctagaacaatacctggtgtacaggagacaaaatatttgttgactgggccgggtgcggtggctcacgcctgtaatcccagcactttgggaggccgaggtgggcagatcatgaggtcaggaga

SEQ ID NO: 18220 - DNA, 2185 bp, Artificial sequence
  DNA replication origin
cgcgcaggcgcgggcgcaggcgcaggcgcagacgtaggcgatcggccccgccccgactctgggccgcgaggcgcgggcggggcgatggcgcgcgggaggggcggggccacgctgcgggcccgggccatggccgccgccgatgccgaggtgagcagcggggccggcggggggcggcgcgggggcggcgggcagcggcggaggcggcgcgggggcgaagaaccgggcggggcggcggcaggcggccggcgggcgggcggggccccgggtccccccgccgccgccgccgccgctgccgccgcctcaggccgaggccgggccgaggccgccgggcgtccggcccgcgctcccgccgggcgcgctttgtgcgcggcgcgggccgggcggcggctgggggagcgggcgggggcgcaggtgagggaggcgaccgcgtacctgtgcccgcgccccccacggaccccgtgccgccgccgccgcccgcaagccggatctgcggggagggcctcggccagggtgccggggaggtgcggaggacaaaaggaaaagtagcggggccggccaactttggagcgccggccgaggcgaggctgtccctcctctcggagctcttccttcgcttcgttgacctttcactttgttctgagtaggatggcaccatctttaacgaaaagttggccagtcccggcgtgtttctccccagacaatgctgctccagccctgctggctgtcagaagcaggaaagcacgctcggtgggaagcttgcggactcaagtttatttccaaaccagcagctttaaagggctctcgatgtaaaaagttcacattcttttgttaatggtctcggccttccccgtgctcattctcaaggatagtttgtttccttgcttaggaaaggaagcagcgtagagattaaagtcttgcgagtggaccactggcgtccctctgaaggaaaagcaagcaggaggtggtgtgtccgtggagatgcagaaatagtgtggtcctagggctgagataagggaccggtttggagaaaactgtcagcgtagaagtatttctttgaaattaactgtctagtaacagttgagacttctaaagcttagaaagttaaggtgtagtaagaagccgtacagtatcctggtgcatagacttaacactgtattttaactcaggtaatgtatggcctttttgtttatttttttcctgcatttttggggggtgttgaaataagtaaactgggaaggtgcaggggaattcttaaattcaatgcaaggagtttttgctgagtatctgcagcattcaaggaattaatattagtcactgagaacaaaaagcgaaattagaaaatttcaagtcacttctaggcttgtaggggagaagacgtgtagtgatgaattctatcatttatgaagtacccactggatcccacacactgtgcaagacctttagatcaggcgcctccctcggttttcttcaccctgtgcagcaggtgctgttatttccttttttaaattattatttattattattattttttgagacaggatctccctttgtcactcaggctggaatgcagaggcatgatcactgctcactgcagcttcgaccacccaggctcaaaggagtctcccacctcgggtgctgccacacctggccaatttttttgtatttttttggtagagaccggggtttcaccatgttgcccaggctggtcttgaacttttggactccagcgatctgcctgcctccgcctccctaagtgctaggattacagacatgagccattgtgcccgtcctgttgtttcctgtttagctgaggaggaagggttagataacttggccagtcggttgtaggaccagcactagtacagtgttgggcacgtagtaggtgtttaatacatgaccgatgagcaaatggctccagatgtctctggttccataggcagccttgaatagggctttacacacctgatgagaatgacagcctgtgttgactgagccctgacttgtgtccaaccctgccatagtgccagtgccttgcatgaattcaataatttgagcctagcagcaaccttaagaggtaggtactgttacctccccgtttataaatgagaagacaggcgcagtgaggcccaagattgaagagcttgtggccaagaagatggagttgcaggtggtttggccatagagc

SEQ ID NO: 18221 - DNA, 1454 bp, Artificial sequence
  DNA replication origin
cggtggcatctcaggcttgactgagctccgtgtgcacctagcgatgccatcgcaggcttcctgcctcagcctgtcctgagctgagtgtgtgtgtcaatctcgtgatgtaaaatagtgtctccttgactgccctggatatgatttcctggggttgtcatcggagagtgagcctctgtagggagtggagagcagaccacggatgtgctccaagtataagccctttttctgacccattttctctgttagttattgtgaagcctcttctgaagccttgttttctatctccaaataacactccatgttttattatagcagtgattccccaaacttaaccaactaacgttcaacgttaatgcttaagaaatgtttatgtttaatatgtttgaactgaaatgctggtttgctatgaaacaaaataattttctgtagacagttttatataagccagccaaagaaattgtgttggtggtggtgtcatagggggaggaaattgtgttggtgtcatggtggggggaggaaattgtggtgtcgtggtgggggaggaagttgtggtggtgtcatggtgggggaggaagttgtgttggtgtcatggtgggggaggaagttgtggtggtgtcatggtgggggaggaagttgtggtggtgtcatggtgggggaggaagttgtgttggtgtcatggtgggggaggaagttgtggtggtgtcatggtgggggaggaagttgtggtggtgtcatggtgggggaggaagttgtggtggtgtcatggtgggggaggaagttgtggtggtgtcatggtgggggaggaagttgtggtgtcatggtgggggaggaagttgtgttggtgtcatggtgggggaggaagttgtgttggtgtcatggtgggggaggaagttgtgttggtgtcatggtgggggaggaagttgtgttggtgtcatggtgggggaggaagttgtggtggtgtcatggtgggggaggaagttgtggtggtgtcatggtgggggaggaagtggtggtggtggtggtgccatggagagcgtggcctgcagtcagtgacactcgtttctttgttggcagagacacctatggctgccgatgaaggctcagcagagaaacaggcaggagaggcccacatggctgcggacggtgagaccaatgggtcttgtgaaaacagcgatgccagcagtcatgcaaatgctgcaaagcacactcaggacagcgcaagggtcaacccccaggatggcaccaacacactaactcggatagcggaaaatggggtttcagaaagagactcagaagcggcgaagcaaaaccacgtcactgccgacgactttgtgcagacttctgtcatcggcagcaacggatacatcttaaataagccggccctacaggcacagcccttgaggactaccagcactctggcctcttcgctgcctggccatgctgcaaaaaccctt

SEQ ID NO: 18222 - DNA, 1966 bp, Artificial sequence
  DNA replication origin
cgtggggcccacacacacagccctgccctggctcagtccaccccctccttctcctgcagactcccccaggagcacagcaagttctccagggtgcggagaggcagtggagagtcttcaggaaaccaggttccgaagcctcaaaacactcaagttctcttttcctacaacagaccagcctgtgaatgttcactaattttcaaccaaatgatgtgctgtaatcaattacactttaattactcaatccagaaaaaagcgatcacttaaataagcctcatggtcagagaattttctaaaaatttcaaattgctttttttccctaaaggaatgtaataggatgacaataaaagatcctcacgaataaaaatatatgagaataaaatcctggaagtaggactgtaataaaagcataacttcagagagacgaatgatgtacagtttctaacgtgagttttaaaactgtgactggggcgccatccacaggcaaaaataaattcaacctcagcccaagcctcagactttatacaaacattaactcaaaatggatcacagatttaaagttcacgtaagactgaaaaaaaaaaaaaattagagaaattgagatctagggctaggtgaagagttatcacacacaacaccaacagcacaatccacaggagaaaactgataaaccggacttcatcaaaatgaaacacctttgctctgtgaaagaccttttgagagaaagaagagaagcttcagaccagcagaaaatactggaaaccacatagctgacaaacactcatatacagaactctcaaagctaacaaaacaatgcaatcataaaacgagcagaagtctgaaagacatttcaccaaagatgacacaccgacagcaaagcaatgtgcaaggggatgagcgtgagaggcgtggagggaacaagagtgagaggcgtgggagaggatgagggtgagagatgtaggagagggtgacggtgagaggcgtgggagagggagaggatgagaggcgtgggagaaggtgagaggcgtgggagagggtgagaggcgtgggagagggtgagaggcgtgtgagaaggtgagaggcgtgggagagggtgagaggcgtgggagagggtgagaggcgtgggagagggtgagaggcgtgggagagggtgagaggcgtgggagggggtgagaggcgtgggagggggtgaggcgtgggagggggtgagaggggagggggtgagtgtgagaagtctgggaggggtgagtgtgagaagtctgggagggggtgagtgtgagaagtctgggaggggtgagtgtgagaagtctgggagggggcgagtgtgagaagtctgggaggggtgagtgtgagaagtctgggaggggtgagtgtgagaagtctgggagggggtgagtgtgagaagtctgggaggggtgagtgtgagaagtctgggagaggatgctccccatcagcagtcacagggatacgcacgctgaagcctcgaggaaacaccagcgcacccaacagaagcgctaaataaaaagtgggtaagagctaacgctggcgaggacgccggcgaggaggggagaaaggcggccactgcaacatcgccggtgggcgtgtgaaaggctgcagccactctggagtgtggttcagcaatttcctcgttcaatgaaacacccgaaggccatagaacccagtgattatgctcctgtgtgtttgacccacagaagtaaatcttacatccaaaacgtgtacgtaaatgccccgagcagctctaaagtaaaaatgcccagtgtccttcagcgggtgagtgccgacgtacaaggctgtccacaccccacagaacaccaaggcctcagcagagaacgggacgggctaatgacgtaacttggatgatcttaagagaactatgctgagtgacaaaagctactctcaaaaggttacatacattataattccatttatataaaatcagaaataggcc

SEQ ID NO: 18223 - DNA, 1916 bp, Artificial sequence
  DNA replication origin
gaaaatcgtgttgtgagaactggagaaatgggaacccttgtgcactgctggtaggaagtgaaacggtgcatccgctgtggaaaactcaaaaagctaagtgtggaactaccatgtgatccagcagttccactgctgggcacgtgccccagcagcactgaaagcagggtcttgaagagatgcttgtacacccacgttgatagcagcatcaaccacagcagccaaaagggggaagccacccgagggtcggctgtcgggcgaacggatcagcaaagtgtcgtgtgcaaaacgcagtgacgtgtgactcagcctgagaagcagcgaagctggggcccgcgctgcagcgtggatgagcctcggggacactgtgccgaatgaagtaagtcagccacaaaagaacaaacgttgtaccattccacttacaggaggtccctagagtcgtccaactgatggacacagaaagtagaatggtattgccagggactgggagagaggaatgggaagtcagtgtttaaaggagacagagcttcagtgtgggaagatgaagaggttccagagacggagggtggcgatggctgcacggcagcgtgaatgtgcttaatgccactgagctgtttacttaaaaatggttaagtttgatattatgtgttttaccacgcacatacgcacacacacacacacacacacgacaaggcacctgcatcaactatagtcaaggccagggagaagtaaccaaggtcataagtaactcaaagtgctcggtgggtccatgacatgggtgaacatgtggctgcagagacagctctgagggattcaggaggtgcttgtggaggttacaggtgaggcagggaggcagagcgagagttccaggcaagagcacacggaggagaacagggtagcacctggcttggctgggagatgagaggggtgtgccagggcgagctggaaggcacaggggagcgagtactcttggggctggctctcacggcctcacggtctccacctctctctgtctcacaggcgcactctgtctgtgtctgtttccctccctccttgcctctctgtctctcgagcgcatcttgctgccatgtggtccttgcaaagcttctcagtgagcccacactaaactgccagacaccccactgatgtccagaacagacatagaacgacctgggctccctactgcggaacctaccctggattcacattctagtggccacagctccctggagttttttgttgcttctccctgtggagacctgtccagctcagcaaccctgtgtgccacattcagtgattcctcttggaatgtacctccacctctgggatgcccttactttttccccgagggatgaatgctctccttcctccttcaaagcacagctcagacatgacagctcctcctgccatgtccactaatgaaggcacctcacacacggaacactgaaagccccacgaaggccacatgtctgccacacgaaggccacacgtctgcccaacgaatgccacacgaaggccacatgtctgccccacatctgccccacgaatgccacatacctgccccacgaaggccacacacctgccccacgtctgacatgcctgccacacgaatgccacacgcctgccacacacctgccacaagaatgccccatgaatgccacacgcctgccccaggaatgccacacgcctgcccatgaatgccacacaaatgccacacgcctgccccacgaatgccccacgaaggccacacgcctgccccatgtgacacgcctgccacactaatgccacacgtctgccacacgaatgccccatgaatgccacacgcctgccccacgaatgccacaagcctgccacacgaatgcccaacgaatgccacatctgtcccacgaatgccacacgtctgccccacgaatgccaca

SEQ ID NO: 18224 - DNA, 1382 bp, Artificial sequence
  DNA replication origin
ctggagcaggccggcggcgcccccgccccgcgagcgtctccggcgtgtgcggccagtgcccgtttcgaggtttgctttggatccgtcatctgccactaaaggatgtaattggtttctgttttctgtttgggttcccgcttcgactgtgtggctgatcagatggacggggagtccgaggaggagcaggagtccgtggacaccggggaggaggaggaaggcggtgacgagtctgacctggtaatgcccagcgcctcctcctgcgtctgtgctgatgtagaggagatgcaaagacaccagcgtccttcagttctttacccaacaacccttgttgcctgagcgctcacccatgtgcttggagctggtcatggtgatggccacagatgggtcctgtccctggcaaagcctcatgagaaagacaccgtgcagagttgcagcgcagggctgggcctggcacggggctgccccagctgcgtgctgggtggggtggagttgagtggcctgtggaggttctcagagggagagggtgtggtgggagccggcagcaaggacacctgtttgggattccgctgcatcggctgatgtgcgagaaggaagggctggatttgaaggtttccaggtagaacggcagagggagagggtgtggcgggagccggcagcaaggacagctgtttgggattccgctgcatcggctgacgtgcgagaaggaagggctggatttgagggtttccaggtagaatggacagaactttctggtggtgaggactggagggaagaggggttctgctccgtccctactgaagcctgttattccttgaggagggtccagatcggaattgtgcaccctggtctgcgggaattgggtgttggaaatgggtaagagcagcgagtccccaggatggagcctcaggaagcccccagcctgtgagggttccacaggggaggagaagttggctcctgcttctgaggaggagctgtctgtgccgtggggggaaagctcggcaagtttgggtcacatgaattgggaaatgctctgaaacaggagaagtggctcacggtgtgggctcattacaccagcgagtgggaggaggacacaggggccgagcagcgagtgggaggaggacacgggggccgtggtgttcggcgatgaaggggtctgtctttgggtggcagaggggcagctagatttccagcagcagcagctttgggtgtggcgcttgctgaaattcttcccaaaagttttgccgtgcggggagcacaggggagccggggctgtgtgtgctgcagacagggctcccggtaccgtcctcacgtgggacccaactcaggaagaaggctgcccagcaaaggccttgtgcagggacatgttcagttggtcagcgagg

SEQ ID NO: 18225 - DNA, 2111 bp, Artificial sequence
  DNA replication origin
ggggagatgtccgccgggccttccagccttcagcttcatgtgtgggatgcagagccccatgctgactgttgtcttgtgcttcccacagacccaagaagcttcgcttccacccaaagcagctgtacttctccgccaggcaaggggagcttcagaaggtgctcctcatgctgggtaagtgccttcctgcggcccgggcacatgcagccggccctgtggcactgaaagaagccgagagcagttgttactccttcctcaggaggctggtctcgttttggttttctgtttctgtgtctccgagttctctgatgagtgagaataggttgcccactggtgttgaggctttttatggtgttcatatccagttacgcaagatattagaactattctctacgaagttctaatttttaaaaaggaattggtatgtgattattaaatcaagcagaaatagagattaaggaaaagcaaaactagtgagttgtggccctgagatgtgtggtgatgacgctgagatgtgtggtgatgacgctgagatgtatggtgatgatgctgagatgtgatgacgctgggatgtgtggtgatgacgctgagatgtgtggtgatgacgctgagatgtgtggtgatgacggcatcactgagatgtgtggtgatgacgctgagatgtgtggtgatgacgctgagatgtgatgacgctgggatgtgtggtgatgacgctgggatgtgtggtgatgatgctgggatgtgtggtgatgacgctgagatgtgtggtgatgacggcatcactgagatgtgtggtgatgacgctgagacgtgtggtgatgacgctgagacgtgtgatgacgctgggatgtgtggtgatgacgctgggatgtgtggtgatgacgctgagatgtgtggtgatgacggcatcactgagatgtgtggtgatgacgctgagacgtgtggtgatgacgctgagacgtgtggtgatgacgctgggatgtgtggtgatgacgctgagatgtgtggtgatggcatcactgagatgtgtggtgatgacgctgggatgtgtggtgatgacgctgggatgtgtggtgatgacgctgagatgtgtggtgatgacggcatctcactgagatgtgtggtgatgacgccgagacgtgtggtgatgacgccgagacgtgtggtgatgacgccggtatgtgtggtgatgacactgggatgtgtggtgatgacgctgggatgtgtggtgatgacgctgagatgtgtggtgatgacggcatctcactgagatgtgtggtgatgacgccgagacgtgtggtgatgacgccgagacgtgtggtgatgacgccgggatgtgtggtgatgacgctgggatgtgtggtgatgacgctgagatgtgtggtgatgacggcatcactgagatgtgtggtgatgacgctgagacgtgtggtgatgacgctgggatgtgtggtgatgacgccgggatgtgtggtgatgacgccgagacgtgtggtgatgacgccgagacgtgtggtgatgacgccgggatgtgtggtgatgacgctgggatgtgtggtgatgacgctgagatgtgtggtgatgacggcatcactgagacgtgtggtgatgacgctgagacgtgtggtgatgacgctgggacgtgtggtgacgacgctgagacgtgtggtgacgacgctgggacgtgtggtgacgacgctgggacgtgtggtgacgacgctgggacgtgtggtgatgacgctgagatgtgtggtgatgacggcatcactgagatgtgtggtgatgacgctgagacgtgtggtgatgacgctgagacgtgtggtgatgacgctgggatgtgtggtgatgacgctgggatgtgtggtgatgatgctgagatgtgtggtgatgacgctgggatatgcggtgatgatgctgagatgtgtggtcatgacgctggaatgtgtggtgatgacggcagtcgatgtttcacctgtgctgatcgcagcagctgtggtgtggacaaagtaggcttcagctataggtattttataacaggcaaaccgattgcattagatttctaatacgcaaaagcatacttgttagagagccttcccagtgataatttggtctct

SEQ ID NO: 18226 - DNA, 982 bp, Artificial sequence
  DNA replication origin
ctcttaaaggcccagcctcaaaacctcattggggcccccagccccggtaaataaattgcattcagaccatagtgccagccttttgaagccaatacttttttggtcgttcgtgcatcttttgaattggttttatttcgattttgccgtttctcttctctctggaagttacagactttccactttttggtcgttcttgcgtcttttgaattggttttattttgattttgccatttctcttctctctgttagttacaaactttccagtttttgccccagtggttcctgtcagtctcacatgcagacttgacttaccaaggtcaagactgaatgagatgatgatgggggagccaagccctggcaggggggtgagggagggagcagctgagtgaactggggtccagtaagccaggggtttgtggggggctcctggaggctgagaggaaagtgtgccgtgagaagcgctgagccgaggtaggcactgggggcactgggggccagctccatgcaggaggagccacggaggctgctgggtatgtcagggagaagcagaaaaggattcagagacagtggggtggcctcaagacgagtcatgtgggctgtggttcatggtgagaccatgagggaagtggctgatctggtgggaacaggcttgtgggagggggtgaggtcagggagtggggggtggtcgtccagacacaggcagagctggagtgagggctgggctgttcagggcaggagtgatgccaggacgttcataggtggggctctgaggaagaggaagagcgtggtctggaagaggcaggagctggtgttgtggggctcgagagcagatgctggtggagggccaggcattcggctgggaggccctctcctctcctgggaggcctagtgaagggtgtggcatgattctgttctgttgcggatggacctgaatggggatgagtgtgcagagccacgtgggggaatggaccagacaggaaca

SEQ ID NO: 18227 - DNA, 841 bp, Artificial sequence
  DNA replication origin
gccctgggggccctcaggtttcaggggccaccccccagtaggcagagctggttgacggtggacattggggataggaggtgggtgggggtgccaagggcattaccacattgggagtgtagattggcaagtaggaggtgggcagctgcccccagagggaggccctgtgtcccccactggacagccccccaggaactgaggtgccctgcagtaagtggagaggccaggccctaggctccgggaagagggttgagggcctgatggctcccgctggcaaagtctccccctccactctcgtggggccaggaagggggcagaggggccacagaggcctctcagaggagggcaggggtggggtggtcactgccttctccccactgcaccccgtacctgcctgcagaagctgggctgctctgtggcaccagccctggccaggatgctcctccctggagtcccctagcagggactgcatgctgaagccattgctgggcggtggcagatgaccgagcggctggtaggactggcatgcagcactcagggggcccaggacgttggcgaaggctccacccgcaccgccttctgccagcgcctcagccggggtgacgctcacgcaggtgtaaggaggttgcaggtttagggatcttgtaggtgaaaggaggttgcaggcgtacggaggttgcaggtgtagggagattgcaggtgtagggaagttgcaggtgtaggggtccttgcaggtgcagggatcttgtaggtgaagggaggttgcaggtgtagggggccttgcgggcttagagggcctcacaggtgtaggggattgccgtgctgcaggtgtctcttgtcccct

SEQ ID NO: 18228 - DNA, 795 bp, Artificial sequence
  DNA replication origin
ctgtgcctgcacgtctgaccccccggcgcctctcttctcagtactgcgtgtgcatcgacgactgctcctccagcaactgcatgtgcggccagctcagcatgcgctgctggtacgacaaggtgagggcggcctcgtgtgcgtgggctcaggtggtaagtgccgctggtccgggtctgcaaaaacagtgcaggcgtctgtgaccccagcgctgtcgtggcagcgtcgggaaggagttggaggtgagctgggtgtgacaggcaggggaggcacagcgggcaccagcacccgagtcagggtcgtgagccgaggacatggctgcggattccctggggctggggtctgcatcctttgtggctgcctggatggtggcgggggtgggcagcgtcagcctggcttggccccaggaggaggtgctgcttatgttgtgtgtatctggtaagctgtgccttgtgcttgctgagtgtgaggggtgtgaagagggagggtgctgccgggctgggtacagggagcatcagtgtgggcgctgggcttgaggagacacaggattggaagtttctgttgggtgctggtcctcggaggagcccaggttggaggctgctgaggaggagacgggagtggggagtagccctggctagcaggggtgcaattcaggggagggatgtctaagcagaggcggagagttcctggtctcccgagttcagaggtcacggtgggggcggaagccagcatggcctgggtaaagagacgcgagcagggagaggcaacaggcgtcccctctggaagcagactttggag

SEQ ID NO: 18229 - DNA, 1038 bp, Artificial sequence
  DNA replication origin
gccgtgtaccgagaccgtagagaggccgattgaggggcgccgtgtaccgagaccgtagagaggccgattgaggggcgccgtgtaccgagaccgtagagaggccgattgaggggcgccgtgtaccgagaccgtagagaggccgattgaggggcgccgtgtaccgagaccgtagagaggccgactgaggggcgccgtgtaccgagaccgtagagaggccgactgaggggcgccgtgtaccgagaccgtagagaggccgactgaggggcgccgtgtaccgagaccgtagagaggccgactgaggggcgccgtgtaccgagaccgtagagaggccgactgaggggcgccgtgtaccgagaccgtagagaggccgactgaggggcgccatgtaccgagaccgtagagaggccgactgaggggcgccgtgtaccgagaccgtagagaggccgacttaggggcgccgtgtaccgagaccgtagagaggccgactgaggggcgccgtgtaccgagaccgtagagaggccgactgaggggcgccgtgtaccgagactgtagagaggccgattgaggggcgccgtgtaccgagactgtagagaggctgagggggggggcgccgtgtgccgagactgtaaagaggctgaggagcggctgtgtgttctcggtgactgagtgaagcagcagtgagcctcctggattgtgcacagaggccaacagacacgtcccttgtgtccccagcccacccaatccccactgcccaggcgctagaatcttgtgtgggagagagcaggggccactccgggagcctggttttgggagctttctgaggctagggcagtggtgattgacccatcccagccctcatgttccctttactgtagcctcgttcccatcattgctctggaattcatccattgtctattttaaaacctcttgaaacttgcagtaactccaagccagtggggaaataaaggtttttctcatctcaagcagcagccaccagaccacggaataaatcttatacctggagaatagggcaccagg

SEQ ID NO: 18230 - DNA, 857 bp, Artificial sequence
  DNA replication origin
gagcaaagtgcagtggccacgtgggaggcggggcctgtggagggagcccagccaattctaggacgggagcgaggtgcagaggccacgtggaaggcggggcctgtggagggagcccagccaattctaggacgggagcgaggtgcagaggccacgtgggaagcggggcctgaggagggagcccagccaatcctaggactggaatgaaggcacacaggccatgtaggaggtggggcctgtggagggagcctggccaatcctaggactggagggaaggcacaggggccacgtggggttggggggttctgcggagggagcccagccaatcctaggactggggcgaagtgcagcggccacgtaggaggcggagcctgtggagggagcccagccaatcctaggactggggcgaagtgcagcggccacgtaggaggcggagcctgtggagggagcccagccaatcctaggactggggcgaagtgcagcagccacgtaggaggcggagcctgtggagggagcccagccaatcctaggactgaggcgaaagcacagggaccactagagaggccgggcctgcagaaggggcccagccaatcgcactagggaaacaaggcccacgcagaagagaaaccagagtcctccccacatgttaacaggaacaactcaagggacctgacgcttgaaacactgaggaaacgaacacgtccgaaagaacactcaactgagtccagccttgagatgaaccagacactgggccaacagacacgtattttcaaggcagctcctaaggctgtcctcaatgaagaacaaagaaagatttcaaggcatgaaaatatcagagaaatgagaagtctcagcggaga

SEQ ID NO: 18231 - DNA, 2004 bp, Artificial sequence
  DNA replication origin
aaacccgagacaagcccaggaaagcaatgcgagccccgttcctaaaaccgtcccgccggcagcggagatggccaggggccggggcggtgcgtacccgagctgctcgccggcctcgatcaggcgggtgctgaagaaggcgatccgggggaaccgcaggtcctggtgggccatgaacacgcgcacgggcaccaggttgggctcgcagtggtggttgatgaaccggctgacgttcccgtagaaccgcgcgtcgatgcagtaaacctccccgtcctgcagggcgagaagccggcacgggctgcagttagcaaggccccgacacgccggcctcgccgggtacggccatgcatggcagtcccggagcctgcagttgggcgcaggcccgccatgcaggaggggccttctccagtgacctgtggcggcggtgcggagcctccgccagccttctcctcgctgtgtggccacccaccccgcaccctgccgtcctcgctgggcctccgtctgtggtggggtgggggtggtgcgggccgttcccttgacggcgtccccatggggcttccagcgcggtggaatgtggacagcgccatcccacccgaggacccatggggctgtctggcaccaataggagaaaggaggccggggctgcaagagccccgtgaggcagtggcaggggctgagggggtcgggagggatggagctggcatccgggacacactgtcttggtgacgaggaggcggagcagtccccagagggtctgggaagactcagtggcgaatggcaccagggaggaccgtcaggcggaggctgcccacagaaaacgacttctgctgcagcccttccgggtgctgatgtgactgtggaacacgaggccgaagagactgaggcgtcctcctcaccctggtgccttggagaggagcccaggattccgggtggccacatggccctgggccctggcccctggcactggcctgtgatgatggattctgaattgaccatagagagggggacgaggtgggtgggcctgacctaaccacgcaacccctttaaaagcaattctctctggagacccagggcttggagctgctggggcctggatggaggagctgcgtgggagtaaggtaggtggtcccggccggcagctagcaaggaacctagacgctgcccacgcaaccacagggacctgggctcagcagcaccctgcctgtgcagcccgaggcccggcacgcccaacccctgctgcgcacactgggccgagtgggtggccgccatggcgagctgcgggtgggtggcgtggtttgttacccagcgacgggaagaggcaacaccacagacgacagccaggcagacggggaaggaggcacctggggctttccaggaccgagttccgagagggcggggcctgccggcagagacacctggtccacaacctgccccagcatgaacattaaccagagagccagggacgctcagaggtcaagaggttaaaacccaaaccaacaagcgggtaaaggcgtggacgagagcagctctccgtcaaccttcacggcgcgggcagtgacaagacagtaaaccaggcgagcacggccgcaggacaggaccagccacagcccccaaagccaaaggcgcgggaagctgcctcctggtttaccccaaagaaacagagttcagagtggctcacctggcgtggactttggcctctgcttcggggtctgatggactaagaatctataggcgacccctcctcgtgcagaatgcaattccggaactagcaacggcgcacacacgaaggtcttgataagcagcaaaatggagagtgaggggcttccgactggaggggccaggcccagctttcaccaggggcagctcgtctggcagagcacacagcgctgctccgagcttctaagatgggtggggtgtcaaagtctgtgacacaaatctctgcccgaccagaaccagataaagacaacagtccagagaaggacggctggagtaaggcagataggcaac

SEQ ID NO: 18232 - DNA, 2792 bp, Artificial sequence
  DNA replication origin
tgggaggagcgagaggatcaggaaaaacaactaatgggtacttggcttagtacctgggtgatgaaataatctgtgcaacaaacccccatgacacgagtttccctgtttaacaaacctgcacgtgtgcccctgcaccaaaaagatttttttttttttttcgagacagagtctcactctgtcgctcaggctggagtgcagtggtgcgatctcggctcactgcaagctccgcctccccagttcaagccattctcctgcctcagcctcccgagtagctgggaatacaggcgcccaccaccacgcctggctaatttttttgtatttttagtagagacggggtttcaccgtgttagccaggatggtctcgatctcctgacctcgtgatctgcccgtctcagcctcccaaagtgctgggattacaggcatgagccactgcgcctggccaagatttttaaaaataaataaaatacatgttgggtcaaagaagccagaggcaatgaagtgcgcactccatggacccaattataggaaattccagaacagaaatgttaatctatactgacaggaacagattggtgtctggggttcaggagtggtggcatggatgacacagacggggatggtggtgtggaggataccggggggatggtggcgtggaggatatggagggggacggtggcgtggaggatatggggggatggtggcgtggaggatacagggggacggtggcgtggatgatacagaggggggacggtggtgtggaggatacgggggacggtggcgtggaggatatggggggatggtggcgtggaggatacagggggacggtggcgtggatgatacagaggggggatggtggtgtggaggatacgggggacggtggcgtggaggatatggggggatggtggcgtggaggatacagggggggatggtggcatggaggatacaggagggacggtggcgtggaggatacggaggggggacggtggtgtggaggatacagaggggcatggtggcgtgaagcatatgggggggatggtggcatggaggatactgggggggatggtggcatggaggatacaggagggacggtggcgtggaggatacggagggggacggtggcgtggaggatacggggggacggtggcatggaggatacggggggacggtggcgtggaggatacagggggacggtggcgtggaggatacaggagggacggtggcgtggaggatacggagggggacggtggcgtggaggatacggggggacggtggcatggaggatacagggggacggtggcatggaggatacggagggggacagtggcgtggaggatacagggggacggtggcatggaggatacaggagggacggtggcgtggaggatacggagggggacggtggcgtggaggatacagggggacggtggcgtggaggatacggagggggacggtggcgtggaggatacagggggacggtggcgtggaggatacagggggacggtggcatggaggatacggagggggacggtggcatggaggatacggagggggacggtggcgtggaggatacagggggacggtggcgtggaggatacggagggacggtggcatggaggatacggggggacggtggcgtggaggatacggggggacggtggcatggaggatacggggggacggtggcatggaggatacggagggggacggtggcgtggaggatacagggggacggtggcgtggaggatacagggggacggtggcgtggaggatacggagggacggtggcatggaggatacggggggacggtggcatggaggatacggggggacggtggcatggaggatacggggggacggtggcatggaggatacggggggacggtggcatggaggatacggagggggacggtggcgtggaggatacagggggacggtggcgtggaggatacggagggacggtggcatggaggatacggggggacggtggcatggaggatacggagggggacggtggcgtggaggatacagggggacggtggcgtggaggatacagggggacggtggcatggaggatacggagggggacggtggcgtggaggatacagggggacggtggcatggaggatacggagggggacggtggcgtggaggatacagggggacggtggcgtggaggatacggagggacggtggcgtggaggatacggggggacggtggcgtggacgatacggggggaaggtggcgtggacgatacgggcggaaggtggcgtggacgatacgggggaaggtggcgtggacgatacgagggggatgatgtcttcattgtggtagtcgttatagggtttacacatttgccaaacgcatcaaacacttatgaaaggtgccttcaataatccctaaatgatacctcgataaagttgactgaaaggttaaaaaaaatcctatctggctgttttgtagaaattaacatgccgattctaaaatttatataaagataggaaggacctagtgtagccaaatagccaaagagtcatctttaggaataaggacacggctggaggaccagtgccaccacaaatcattattttacacttggagatattggcctcaaggtcaacaacccaccagtagggagaaggcctgagatgcagcccacaggttcacaccgctgacattctgtgacggagccagtgccgttcacgggggaaaaggaaaagcctcttaagaaatcaacaaatcggccgaagacggtggctcacgcactttgggaggccgagacgggcggatcacg

SEQ ID NO: 18233 - DNA, 1933 bp, Artificial sequence
  DNA replication origin
gaagcggataatttagttaaaatgtctcagcctaataagtgaactgggcaggtggggataactaaaacagagtgcataaaagaatgttgtccaagttggcatcagagtgggggagttttaaggggtttagaagcctggccgtcaatacccacaacagttatggggcaaagaaacaggcccttgagaagaaggtaatgtggagtgggtaggccccgtatcaattaaacaggggatggacttaccctccaccataagagttacccgaagctcggcgtccgtgatgatccagggggcttcctaggggatgcgatcaggcagcgtcagtcttcagctgctaagccgaggagatctgggagggagtcggccaaagaacgttgggtttgggctccaggggctttaggagccgcgacgatgtgagtcggacaatgcaacctccagtgggggcgcgcacagacagggcacggcttaggaggattcctgggggacaatgcaacctccagtgggtgcgcgcacagacagggcacggcttaggaggaatcctgggggacaatgcaacctccagtgggggcgcgcacagacagggcacggcttaggaggaatcctgggggacaatgcaacctccagtgggggcgcgcacagacagggcacggcttaggaggaatcctgggggacaatgcaacctccagtgggggcgcgcacagacagggcacggcttaggaggaatcctgggggacaatgcaacctccagtgggggcgcgcacagacagggcacggcttaggaggaatcctgggggacaatgcaacctccagtgggggcgcgcacagacagggcacggcttaggaggcttaggaggaatcctgggggacaatgcaacctccagtgggggcgcgcacagacagggcacggcttaggaggaatcctgggggacaatgcaacctccagtgggggcgcgcacagacagggcacggcttaggaggaatcctgggggacaatgcaacctccagtgggggcgcgcacagacagggcacggcttaggaggaatcctgggggacaatgcaacctccagtgggggcgcgcacagacagggcacggcttaggaggaatcctgggggacaatgcaacctccagtgggggcgcgcacagacagggcacggcttaggaggaatcctgggggacaatgcaacctccagtgggggcgcgcacagacagggcacggcttaggaggaatcctgggggacaatgcaacctccagtgggggcgcgcacagacagggcacggcttaggaggaatcctgggggacaatgcaacctccagtgggggcgcgcacagacagggcacggcttaggaggaatcctgggggacaatgcaacctccagtgggggcgcgcacagacagggcacggcttaggaggaatcctgggggacaatgcaacctccagtgggggcgcgcacagacagggcacggcttaggaggaatcctgggggacaatgcaacctccagtgggggcccgcacagacagggcacggcttaggaggaatcctgggggacaatgcaacctccagtgggggcccgcacagacagggcacggcttaggaggaatcctgggggacaatgcaacctccagtgggggcccgcacagacagggcacggcttaggaggaatcctgggggacaatgcaacctccagtgggggcccgcacagacagggcacggcttaggaggaatcctgggggacaatgcaacctccagtgggggcccgcacagacagggcacggcttaggaggaatcctgggggacaatgcaacctccagtgggggcccgcacagacagggcacggcttaggaggaatcccgggctgcaggcattctgaggcccagtggccaggctttcggcctttgaagcaagatccacgaggatgttttgaaggagcccc

SEQ ID NO: 18234 - DNA, 1292 bp, Artificial sequence
  DNA replication origin
gcccctccggctgcgcctccctcgccccgcgcctcccaccccggggctgggccgggcccaggagcggacgagcctgtgggtcctcgacggccgctcagcgccagcccgggccgtccccggagcccactctgccggccgcaccgcccctgggtgccctcggctcctcaaactcggcccagacggacccctcgctccgcccggaggcgccaccagccctggggctgcagcccagagctgggcgccaggcctgggccggcccgccccgtccccgccgggtccccggccttcccaaccctccgggtgcgctcggctcgcggccttggtgccacgcggacgcttctgtcgggggcccccagcccgggtgcgggacctgctgtttccacgcacggggctggctccgggatctcagctcagagaagcctctgaccgccttgcaggccacgccccgttagggaacctgtcacggtcactgccattccccaggcctccttgagcgcccaccgcgggccgggcctgtcctgggctcccagctctgccctcacggagctgaccgttttgtacaaagcacagcaaccatttacacagcgctcacttcgtgcaggcccgtgggtcctcacaacctccaaaaaggcggccccggggtcggggagaccttcgggaacaagggaccctctcggacctgaagctcgctcgcaaggcgctgagtgcagagtgaggccgggtgcgggctgcgccttctgagagggaggcagtccgcacagttccgagcagaggcgcgtaggcctctgaagggtccctcgggctgccgtgtggagtgtggactgcaggaggctggggtgctgaatcacttaggatgcattcagaggcgaacaacccgcttcccagctagcagcagcttgcacgatgccattgtgatctcactgaatacgaagccaccatctctcctccctccaaaatccccacatacactttctgccttcctgcctgttgcctcatgccccagggtggctgtcatagcacagggcatcacaccgctacaccagcatctcaaacgggaaggaagtggcaggtgtacaaaggatgaccactttgtgaatcaggttacgattttcttttctaacaaaggaaaagcttctcagaggctccccctgcaagtgtctctttaaccccgttaggccatgggccatgtggccggccctgactttaacagggtgggaaagtgaacatgtgtcaaagtggaccaggatggccagcccccactaggcgagcacatagttgccccaaacaaaatc

SEQ ID NO: 18235 - DNA, 1742 bp, Artificial sequence
  DNA replication origin
ccgtgagtgcggcgggcgcggggcggagcccctctgctccggactcgtccctccgcacgccgggtcctggggatcctggtcggtgcacagtgcgcggctagcctggagggcaccgagggcgaagccgcgtccgtgcaggtgcgagcgctgtggggacgcggccgtgcgcgcgcctggctgcaggtgcctgcgtgtgcgggctgagctggagcctggcgctgcgcgtgcgtgcgctcgcgatgcgggctacatgcatgttcacgtgcctgtgtaggtacatgtggctgcgtgtctggagggagcagcgtgcgcctgcgcggggtctccctccagcctcgcctgggggcgctcggccccctcccctcggggccctggagtcgggcggagccgggccggaggcgctgtccgcggtgctgacggccgcccgggtgtgccgaggggctggcggcccagactgcggaggccccgcctcgcggccgcccctagggatgggggcagggagtgagggagaccaggccgcttccgccaggagaggggctccggacccagttgtctcagcccctccggagacggcctagcggtggctgctgcactgggctctgctggcgtcggcctcgtgtttccctccgtgcggcgtctgccggccagtccttaactcacgcactccattcgagtatatgatcctggccaccatcatcgccaactgcatcgtgctggccctggagcagcacctccctgatggggacaaaacgcccatgtccgagcggctggtgagtgcccggctgggcctgagggcagggtggtggggaggccgcgactccactttcctttatggtctgtgcctgagaacagcttcctcgggcagggtcgtctgggcagtgcccctcgcgtctgaaggaaaaggtaggcctggcagataacaccttcctcgagggccagggcagctggggtcaccggcttagccctgggcgtggccacgttagccctgggccagtctgccctgtgccacgagctactcctgcacctcaatggctgtcctggctttcggcgctagactttgatccagaaaaccatgttctaaacttggggtggggaaggggcattcatgtcttcgggaaggtcagctctgaatgccatgtgtgccctgctgggctgagatgggctttggcctggatgtgggaaccctgagcctcatcctccaagttgtcttgtgcgggcctgcttggaacctcttctccagtgggcctcaccatcctgtgggaagcattccttctcaaacattctgaatcatttttacctgtccccagattccagccaagaggcccccgtggtagcccccattggagcatagagtctgtgtgagtcagggtgccagggcaaggtctccgtggctcaacaggaggcaaggtggaaggccagccctgtggggtctctggaggggctgggtcagaggaagggcagcattttggaggtgagcagtttctgaggtcagagcatgtcccccagcccccactcttccctgatgcctggccccatgtctgggttccgagtgtgcctaaagactggagcctccaggtgagcagaaggcagagcaagtgggggcccagggggtgcggggccagaggcgtccaggagacggcctctctggggtgtcaggagctgctccctcttcccttaagcctggcttccgcccccactagcatcctgagacaagagctattcagactttagccctgaaactg

SEQ ID NO: 18236 - DNA, 1078 bp, Artificial sequence
  DNA replication origin
tctcaaacattctgaatcatttttacctgtccccagattccagccaagaggcccccgtggtagcccccattggagcatagagtctgtgtgagtcagggtgccagggcaaggtctccgtggctcaacaggaggcaaggtggaaggccagccctgtggggtctctggaggggctgggtcagaggaagggcagcattttggaggtgagcagtttctgaggtcagagcatgtcccccagcccccactcttccctgatgcctggccccatgtctgggttccgagtgtgcctaaagactggagcctccaggtgagcagaaggcagagcaagtgggggcccagggggtgcggggccagaggcgtccaggagacggcctctctggggtgtcaggagctgctccctcttcccttaagcctggcttccgcccccactagcatcctgagacaagagctattcagactttagccctgaaactgaactccctttgaacctgggccaccgcaggcccaggagtgcagaaggggagacagggagcctgtcctggaggtgaggcaccaggaggtgagttatgggtggccgaggtgaggaggtcttaatggagcacagtctggaatgcccagtggtctgggttacggccgggtgaggaggaggagcatggacagcccagccacaccatgaggcaggcgtgagtcatggtccctgtgggggacttgggcaggaccctggtggggcccattgctttctggaggctggagaagagggtgagcttgagaggaaacaggcagagagccttgaatgccaagtcacaggaaggagggcagggccagggtcagagggacgcaggcccaggagccaggccggggcgggggcagggaggatcaagctgtcttgccctgccaggcagtgggtgtccagccttgcaagttcctgcctcgcaggtgtgggagggtttactttgtggtcataggttggggaggacacttctaggagtggcgagctaacctgttgggaaaactgcagaacatgcccgccctgagccagcctagaggtctggggagctcttgaccagtcccagtcccatgt

SEQ ID NO: 18237 - DNA, 944 bp, Artificial sequence
  DNA replication origin
agcccagggctgcccttggataccgcagactttcccagggggacgggggacatgggtgggagataaggaagggaggtttcagctcaacccagagaaggactttcatcattcatgggggtctgggctgctgtcctcaggcaagtggggactggaccaggtggtctgtcctttactcatatgtccctgatatgggccaggtacttgctgggcacgatggagccagggcccttccccccagggtgcgtgttctgccaacggcaaagtccccatgccacaggatccactctgtgctccaggcctctcctctcgacggtgactgcaggccgggctccagggatgggcggttctgcaggtgtgcagagtcccccttacgcaggtgtgcacagagtcccccttacacgcctttctcttcaggggtcccaccaggagggtcagtcggaggcttgatttcctgccccagcagctggaggggtgggggtccagggagagtgtggtggggacagtgagcggcagagctggaggccgtgaggctggggtgagctgtgtgagaagccttgaaggtcacagtttggggagtctcagcccaggacccagctctgaggggacagttcgggagggatggggcaggtgggcagggcggcctgggggcctgggactggccatgctcgtctctctccgtggtgctgatctttccagctctgcctgtgggtgggggatggaagggagggacacagctgtgtggtgtcgggggcacacgcccactcctgggaccatggctggcctgtgcgtggccaggcaggttgggctctcagggcgcatggctactttaaattttgggtctgtggctgttgggctgatggagcacagccagggatctgagatgggctctaaacttgctgtcagtatttaagaaggaactttcacgcaaaaacctgtgttttcat

SEQ ID NO: 18238 - DNA, 1651 bp, Artificial sequence
  DNA replication origin
cctggctcagcgcagaccctctgaggggctggtccaggttgatggggcgtgggtagggctctgtgccacagggacggggtacaggggctggccagcgtgggccagatgcatggggacaagggagcatccatagtttctcatagaacataacagctctgagtccccagtcacctctgccagctcttggcattttcagaactggggggtcctgtggggtatggctgggctgtgaagtgtggaggtggctagaccaggcctgactggggtgtgccccagaagctcctcacagacggctgtggaaaggcagggtgcccccctggcccacgcggagggtgtgtgaggtgcccccctggtccaggtggagggcgtgtggctgggacctagagtctgggggatgtgaggtgagttttgggttagggttagggggcccagaagaagcctgcagcagtgtggttccagccttcctcccctctgtggggctgggagcactccccgaccttgggtgccagagtgagggcgggtctttacatgtgtgactgctgttgtgtctctgctgtgtgtgtctgcgccgtgtgtctctgtgtctgtgtatgtgtgtctctgtgtccgtgtctgtactgtgtgtctctgtgtctgtgtctgtgtgtctctgtgtccgtgtgtccatgtctgtgctgtgtgtctctgtgtctgtctatgtgtgtctctgtgtccgtgtgtccatgtctgtgccgtgtgtctctgtgtctgtgtatgtgtgtctctgtgtctgtgtgtctgtgctgtgtgtccctgtgtttgtgtatgtgtgtctctgtgttcgtgtctgtgctgtgtgtccctgtgtctgtgccgtgtgtctctgtgtctgtgctgtgtgtctctctgtccctgtgtctgtgtgtccctgtgtccttgtgtctgtgtgtgtaccgtgtgtccctgtgtctgtgtgtccttgtgtctgtgctgtgtgtccctgtgtctgtgtctgtgtgtccttgtgtccgtgtgtctgtgtgtgtaccgtgtgtccgtgtgtctgtgtctgtgccatggtgtgtctctgtctgtgccttgtgtctgtgtgtctgtgctgtgtgtctctgtgtctgtgtccctgtgtccgtgtctgtgctgtgtgtctctgtgtccgtgtgtccgtgtctgtgctgtgtgtccgtgtgtctgtgctgtgtgtctctctgtccctgtgtctgtgtctgtgtgtccttgtgtctgtgtgtctgtgtctgtgctgtgtgtctctgtgtccctgtgactgtgtttgtgtctgtgtgtctctgtgtccctgtgtcagtgtctgtactgtgtgtctctgtgtctgtgtccctgtgtctgtgtctgttctgtgtgtctctgtgttcctgtgtctgtgtctctgtgtctgtgtgtccgtgtctgtgccatgtgtcccatccctatgtctgtgccgtgtgtctctgtgttcctgtgtccgtgtgtctgtgtctatgcctgcgtgtctgtgtgtccctgtgtccatgtctgcaacctccaccgccctcccgggttcaagtgattttcctgcctcagcctcctaagtagctgggattacaggcgcataccaccaagcccagctgatttttgtatttttagtagcgatggggtt

SEQ ID NO: 18239 - DNA, 1372 bp, Artificial sequence
  DNA replication origin
tgcctggctaacgtttgtatttttagtagagacagggtttcgccatgttggccaggctggtctcgcactcctgacctcaggtgatctgcctgcctcggcctcccgaagtgctgggattacaggtgtgagccaccacgcctggccgtatttctttaaatactgtcagctttgtcctttttcacctgtctttagtgctctgatgacatgaatatcagatcatttgttatagtcccatgggtttttgaggttcacttttctctccttatcagaatggataattctatcgttctttgttttcttactgttcactgattccttccacatccccttcattctcttgttatgcattttcattgagattttcgactttttttttagctctaaattttccctttggttctgtaatccaaaaagttatcagagacaagtctcaatcaattcagaatttcattttggcaaggttaaggacatgcccagaataaaaaaaaaacactttggagaaaggtatttggtgtgtttgtggtgtgtgttgtgtctggtgtgtgtggtgtgcatgtgtgtgtgtctggtgtgtgtgtggtgtatgtggtgtgtgtagtgtgtgtggtgtatgtggtgtgtgcctgtatctggtgcatgtggtatgtgtgtggtgtgtgtgtgtgtggtgtgtgcatgtgtgtgtggtgtgtgcacttgtgtctagtgtgtgtatgtggtgtatttgtgtctagtgtgtgtggtgtgtgtgtctgatgtgtgtggtgtgcgtgtgtttgtggtgtctctgtggtgtgtttgtgtatggtctgtgtggcatgcatgtgtatggtgtgtgtctgttgtgtgtctggtgtttggtgtgtgtatgtgtgttttgtgtgtgtggtgtatacgtgtgtggtgtgtgtgtgggtgtgaagtatgtgtgtagtgtgtgtggtgtgtgtgtggtgtgtgcatgtttgtggtggctgtgtgtccagtgtgtgtgtgtgtggtgtatctgtgcatgtgtgtggtgtgtgcgcttgtgtgtccagtgtgtgtgtatggtgtatgtgtgtctggtatgtgtggtgtgagtgtgtgtgtggtgtatgcatgtgtgtggtgtgtggtgcgtgtgtgtgtctggtgtgtgtgtttgcgtgtcctttgtgtctggtgtgtgtggtgtacgtatggtgtgcgtgtaggtgtgtagtgtgtgtgtgtttggtgttggtgtgtgtggtgtgcatgtgtgtggtgtgtgcgcttgtgtgtccagtgtgtgtgtatggtgtatgtgtgtctggtttgtgtggggtgtgtgcgtgtgtgtgtgtggtgtatgcatgtgtgtgtcgtgtgtggtgcatgtgtgtga

SEQ ID NO: 18240 - DNA, 944 bp, Artificial sequence
  DNA replication origin
gagtgggatgtggtaggcgggcatggccaggtgggcctgtgggcacacagcccctcctgtcccaccctggggctgagagctgaagagatgccatgtatggggcctgactgggtttggtatttggggctcctgccctaccacagggcaaggagttgtgctaggaaggaggtggaaggcatcaggcctgcctggcttcctgctcccaccttggcctcagctccccagtgaggctggaggagtacatctcccctctgtcctcactatgatccctgctcaggcccacggctccgagccaggctggggatagagcctggtgaacctgggagttctgccacgctgagcaggacaggagcagccagagtggggatggctggagccgaagcctctgggctccagcaggagatcgtgcccttggttttggccctgtcctgtaaagggtgtgattgtcattagcaggcctctccaaaagcctccatgggaaccagcaagcgaccggctcacgggatggaaatagaactcctagcctggcggggtagctggcggaggcttgaggcttggaggaggcaccgggggagggacatctcagctgagaccccactgggggactaggaatgagccaggctaaggaaggaggagggtctttcaggcagagaacagctggggtggaggcacagtggacagaaggttgtggcctgtgtgttgcagagatgcttggagctggagtcagagggtgttgtggggagagggcacaggggctgtcagggggctggcagccaccaggcttgtgaggtgcctgggctgtgctgagggtgctgcctggtgccaaaggtgctgagaacgctgcctggtgggaagcctggcaggagcataggtgggttcaaggggaggcaggagagcagcctgctcagggcttccttctgcatccctctagggaatgtgcagaa

SEQ ID NO: 18241 - DNA, 2199 bp, Artificial sequence
  DNA replication origin
caggctggagtgcaatggtgcaatctcggctcactgcaacctctgtctcccaggttctagtgattctcctgcctcagcaacccgagtagctgggattataggcatgcaccaactgcccagctaattttttgtatttttagaagagacagggtttcaccgtgttggcctggctgttctcgaactcctgacctcaggtgatctacccaccttggcctcccaaagggctgggattacaggtgtgagccaccacacctggtccatcttataattttaaacaatttattatatgattgtggtagctaaatagtttccttctattgctattttatctagagtttttattctgattttgtaaaatgaattgaagagttaaaatgtcttcatctatggtttggaatcctttaaataacactggaattatctttttttatagatgagataaaactgtgaatctatataatccaaaaaagaaaaaaaaaaaggatttggaccagtgttgtgacttaggctttgttaggaaatcgccccgttctcagggtgttgggatccctttctgtggcgctgtgcaccggctctctggcgattctcttaacctcgcctgtgtcgagtgcttgtgcctcattcagcagatgtctatccagtgcccgccacgtgccagcaacggaggcatgggggccgcgacactggagaaactcctaataaaggcccttcatcattggagtttccgtccagtgggggcatcaaacaacaaataagatagtaaggaaaataggccgcatgccagagcccctgtccggaggaggaagaggtcaggaaggcaggagtggaagcgtgtggagggggggcggtgccagaagttcatggccatagaaggcctgaggaaaaagactgcctttgagtaaaagagttgcaggaagtgaggacgcctgagggacgccggggcgggggagaggggaggttggcctgagggaagccaggggaggggaggtcagcctgaggaactactctcaggccgacctggagagagaggggagcttggcctgaggaacgtgtgtggcggggagggaaagttggcctgagtgagggggagggggagggaaggtcggccggagggaagccgggagaggggagttaggcctgagggacacccggagagaagggaggtccggggagaggggaggtcggtctgagggacacggggcgtggggtggcgaggtaggggagcgggaaggggaggttggcctgagggacgcggcggtggggtgtgggggaggttggcctgactgggggggagggggaggggaggtcagcctgagagacggagggggaggggaggtcggcctgaatgaaggacacccaggagaggggagatgcgagacgccgccagggaggggaggtcagcctgagggatgcccaggggagagaggggaggtcaggggagaggtgaggtcggcctgagggacctctgggaaaggacattccaggcaacgagtgccaagaccctgaggcaaggctgtgcttggcacccaggtgtggagaacgtcttggaggccagcgcggctggagtgaggtgccatgggctgtcggtagcggtcgaggaaacctgagagtcagacaggctcacttccaaccgggaccccaggccgccctggtggtttgcagaggggtgacaccctctggcttctgtggtataagggtctctctggagactgtgtaaagtgttcctttttctccacaacctctccatcatgtttgttttgttttgtttactttttaataatagtcattctgattggggtgagatgatatctcattttggttttgatttgtatttctctaataatcagtaacgttggttttttttcatgtttgttggccacacgtatgtcttcttttgagaagtgtccgttcatggcctttgcctactttttaatggggttgtttgttctctcagcaccgtttattaagtagggtattctatttaataatagggaatacatcctagctttattcctaggtattttatttttatttttttgtggcaattgcaaatgggagttcatgcataatttggctctcagcttgcctgttgttggtatataagaatgctggcgatttttgaacattgattttgtatcctgagacttagctgaagttgtttatcagcttgagaatattttgggctcagatgatggcatc

SEQ ID NO: 18242 - DNA, 1106 bp, Artificial sequence
  DNA replication origin
caatggccagggtctggaggggcagacccaagtcacagtcggggtcctgactatgtttgtggtggttctgggaaactgtgcaggggcagggaggtgagagttcaggaaaaggctgcttccagtgatgggtgaagagttccttttgcaaagaaaaacaccgtgatgggacaaggacctggtcccgcgagctttgagaaggaggccgcacaccccaggcggtgcctgtgccggtacctgtggcaggtgcttccctttgggccttggtttcttcatttctaaaaggtggggcagcacctcacactgggtcctgggaggtcagttgaggcaaggtgcagtcccaggaaccagatcatgccatctgccgtctccacggcctgacgtgagtcctgcaatctacggagcggatgccgcaaagaagaggccccaggacaccatgcgggaaaaggaaatggaaaggaggggaaggtagcactaggtggcatctgtgggcctaggacttggggcccagcatgtgctggccacaggtgggtttgcaagctcgtggtttgtctgaggtggtctctgctcacaggacccagaaggcagtggagccccacctggagcctgtggagtaggagctgtttgtggggaggcttcttgtgctggccggggcttggggagttgggagcacagcaggcagaccatgggccctcgttaggaggcagaggcagatggctccagcacagcctctgagctttgctcctgcacagtcagcccgaaagagctgggttgggggaagaggctcaggtgggcattaggggaggctgggtgatgggaggctgagcaaaggagggattggcagagaggctggaggtgaggatggaacagggggctggagggcctagtggctgggctggagtgtgtctggggatggggccttggggagctggtaggtgccaagggaaggaggctggaggctggttgggatctggggagatgggggaagctgcagtgtgactggggccatgtggggcagaggttcccttcctcagctggacccaaccagacactctgctgaatgtctttctggccatcgctgtggacaacctggccaacgcccaagagct

SEQ ID NO: 18243 - DNA, 1402 bp, Artificial sequence
  DNA replication origin
ctcccgggcaccgggctccccgctctccgccttcggggcctctgctcggtcctggtcccccgccgcgggggtcttgtccttgtcgcggtgccggtggtgcctgcgcggagggtcgacgccctcgggggcctccgcagcctcaggtcgggctttgcctcccacgggcccccgcgcgccgtcgcggcccagctccaccaccagcggccggtccaggtgcgtcttcatgtcgggccgcaggtggcgcgtagtggcgaagcgcagccgctcctcggggtccatctcgctgtacagcgcctcgcagctggcccgcaggttctgcagccgtagctggctggcccgctgctcccacaccgagcgcgccttggccgagttctgctgcctgctgcggggagactggcggtgagcgcggccccgtctgccgcccgcccgccgctctccagggaggccacaatgcacacacagcaatggagtaatggcgcagggaggtgggaggcgtggccgcgggagcccccacacccctcgggggacgcggatcaggtggggaacgcccaagggaaccgaattcagccccgccgccccccccccccacggtgtcccacaggacccgcaaggtgaaagcaccagcctgtcaggaggaccctggggggctcaaggaggccgaggggtacaggacagtgggaatgcaccagacaggccaagcaggtgggtgggcggctggccaggaaggccaccgcgggagggaagggcatgttacaaagggcaggacggatggagaggcaggagccagggaggccctgtagcctccctgggagctggcccctgctgcagcaccagcacagctgctacaggaagggcgggacacgcggccccttctccagaggcacttccccatcgctgcctccaggaggcaggccaccagccaggtgaaaaggctgtttgccagggaacccagagggcagttgctgtggcagagcagacagcagccaagggagcacctggccctttcaggagcaaacgcagagcctctgccagtccccgaggtggtcagccgcagccccgcagctgccccctggctcagtgaccaggagcccagaagtcaggtctgaagctggaaatgccacctcccgtggccaccaatgccctcctctctcttgactccatggagagcccctccctctactgggagcagagccagaacatggtcctcggagccctccagcaccagggatggccagtggtccaggctcggccctcactgcatgggctaccgaaggccttgacccctactccaatgtcatgggcccaagcacctcctctattcacacatcacacatggggctccatagcccagagtgcacaggaagccctttgcattctgggccttctgctgagtaagaccacc

SEQ ID NO: 18244 - DNA, 946 bp, Artificial sequence
  DNA replication origin
cccccggaggcgcggagcgagcgcggccgaggcccaggccccgagggcggccggcggcaccaccggcgcggctccccggaggaggcggccgagcgggagccccgacgccaccgcgcgcaccggcaccaggatccgagcaaggagtgcgccggcgccaagggcgagcggcgcgcgcggcaccgcggcggcccccgagcggggccccgggaggcggagagcggggaggagccggcgcggcggcaccgggcccggcacaaggcgcagcctgctcacgaggctgtggagaaggagaccacggagaaggaggccacggagaaggaggctgagatagtggaagccgacaaggaaaaggagctccggaaccaccagccccggtgagtccgcggctgggcggggtcagggagggaagggttggccggggcggcgcgggccccagcggtggctgcggccatggggtccacggcggaggctgcagccccggccacgctgccatgtccagagccgtcggggctggggtctctgcatgccgttcacgtggggtggtgacaatcctgccttgcagggttgacctgtaaaaggcttggcagggcgtgtatgctccgtaaaaggcttggcagagtgtttgtgctccgtgaatgccagccgttatttaagaagggagggcttaagggggaattgttgcgactggcttggaaagaacaaagtggccctgggagaagagaaagttggggattgcagtggaggaaggagaggcagaagggcccaagggaagcctgagcaggccagtgggctgggcgcagagcggggtgtgggggccaggctgtgtgaccatgacagaaagaaccccagctagcccagcttgctccctggggcaggactcaccaaccccgtgagggcctggggtaacagtggtccagtggccaagaccagcagtcgccaggtaccc

SEQ ID NO: 18245 - DNA, 697 bp, Artificial sequence
  DNA replication origin
gcttggcagagtgtttgtgctccgtgaatgccagccgttatttaagaagggagggcttaagggggaattgttgcgactggcttggaaagaacaaagtggccctgggagaagagaaagttggggattgcagtggaggaaggagaggcagaagggcccaagggaagcctgagcaggccagtgggctgggcgcagagcggggtgtgggggccaggctgtgtgaccatgacagaaagaaccccagctagcccagcttgctccctggggcaggactcaccaaccccgtgagggcctggggtaacagtggtccagtggccaagaccagcagtcgccaggtacccactggccacaaaccaaccagaatacttgccgctggaggccccagcccagggtcaacccagccgccgccctgtctttgtgtgtgggtgggtcagccccatccctgcctttcggactaaagacacggaggtgtatagagtaatttaaaaaacgtacagaaggccagagtagcagagcaggtggttatggatttagttggtctgcatggaggcttaagggttttggttgataggattttgctgatgtgcattattattattattattggagacaggaccgcactgtcgcccagggtggagtgcagtggcgcaatcatggctcactgcagcctcaacttcccgggctgaagcgatcctcccac

SEQ ID NO: 18246 - DNA, 1248 bp, Artificial sequence
  DNA replication origin
ccagggtcaacccagccgccgccctgtctttgtgtgtgggtgggtcagccccatccctgcctttcggactaaagacacggaggtgtatagagtaatttaaaaaacgtacagaaggccagagtagcagagcaggtggttatggatttagttggtctgcatggaggcttaagggttttggttgataggattttgctgatgtgcattattattattattattggagacaggaccgcactgtcgcccagggtggagtgcagtggcgcaatcatggctcactgcagcctcaacttcccgggctgaagcgatcctcccacctcagccttcccagcctgaatagctgggactacatgcacgtgtcaccacgcccagctaattttttaatttttgtagagatggggtttcgccatattccccaggctggtcttgaactcctgggctcaagtgatcctcctgcctctgcctcccggtgccgggatcacaggtgtgagccactgcgccgaggcctgatgtacattcttgattgcagggagccacactgtgacctggagaccagtgggactgtgactgtgggtcccatgcacacactgcccagcacctgtctccagaaggtggaggaacagccagaggatgcagacaatcagcggaacgtcactcgcatgggcagtcagcccccagacccgaacactattgtacatatcccagtgatgctgacgggccctcttggggaagccacggtcgttcccagtgagtatctccctgtgccagtggggcagggcccatcttgtgcaggtccagcaacccccattccctcctgctccacagcagccactggggacccagcctacctctgtgaattgttctcctggctggagagagagtcctttgctgtcaacatctgtcccttgatgtcctgttgatttctagtgccccagagataactgaggttgagctccattctccttccttcccaaaatatttgcacgttgccaactaagtgccaggtgctgtgttagagtgctgagagcatagtaggagggagacagtcttgtcaggaagacagaccacaaaacaggcacaactcttgatggttgcacaaaagctgctggctgaggactctgtccacggccttgactggggctgagagcgaggggctgcagaggaggaggctctccactgcgtctgcccatttgttcatgggcctgtgccatccctgctctgaggctgtgctcccaggcctttatttgagct

SEQ ID NO: 18247 - DNA, 1465 bp, Artificial sequence
  DNA replication origin
ctctgaccctgttttggatccatgtcctttgatgaggctttgcctgggtccagcgtgcacaggccacgttggggctcttgtgcccaaaggagggctcaattcagtccagaacagggtggccaaaccccctgacctctgctgcatgtgttggagacgcctggcaggttgaagcaccaggctattggtaaggcacctgcagtctctgaccctacaggaatctgtttgtcttctctgccacagacaaaaccaagagagtggcatcaaagagtctgtctcctggggcactcaaaggacccaggatgcaccccatgaggccaggccacccctggagcgtggccactccacagagatccctgtggggcggtcaggagcactggtgagcactcccgggggctagtgagactgggttgggggatgtgtgaacagggatgggggatgtttgagactggggtgggggacgtgtgaacagggatgggggattttgagactggggtggggaacatgtgagacttgggtgggggacgtgtgagactggggtgggggatgtgtgagaccagggtgggggacgtgtgagactggggtgggggatgtgtgaacagggatggggggtgtgtgagactgggatgggggattttgagactggggtgggggacgtgtgagactggggtggggaacatgtgagactagggtgggggacatgtgagacttgggtgggggatgtgtgagaccagggtgggggacgtgtgagactggggtgggggatatgtgaacagggatggggggtgtgtgagactggggtgggggacgtgtgaacagcagtgggagttaggtgagactgagatggatttgggtgagaccccagtgcctcatggagtgagtccggggtgggatcagatgagtccgcggtgccttgtgtggtgggactaggtgagtgctgtatccacaggctgtggacgttcagatgcagagcataacccggaggggccctgatggggagccccagcctgggctggagagccagggtcgagcggcctccatgccccgccttgcggccgagactcaggtaggtggtctgggagggtccaggccctgggctgggcaagtggggggtggggaagtggggctgtggctctgggcctcctgcaggtgaggagagctggggtagagaggctggggtccatgtgtggagctctttgctgaggcaggagcaggcaccccgggcagtcctgtctgggcgccgacagaggtgcagcctggacgccttcagcccctgaggcttctccagagggtgggtcaggtccggtagaggacagctgtgcctgttctcagcctcctattaggggccatggggcataggggcccccactctggctcagccacgttctgttcctcctttccggggctctactccctgagacaacccccactctcatccagaaaatttcaccgacacctcagtcccctc

SEQ ID NO: 18248 - DNA, 1014 bp, Artificial sequence
  DNA replication origin
ggaggaggatgagggctgcctccgctcctgggaccggccccgctcctgccggcgctctcgttcccgccggcagcctgtaggcccctctcccgggggcagccccggccccacagcactgcttggtgctggccagggaagagaagaagttagcacggccaggcccaaggcagggacccctgacccccgggcccagcaggacagaattcaggtggtgccaggggaggctagggtgagggttagggcctgggcctcagtcccaccctgctctggctggttatggggtcacgaggcccacaaaggaagagggtcccccatgggccgcttggaccccctgactcgggccatagctccccgaaggactccccgggcccctccgcacgcaccgccatccatatcggcagacaggctgggccccttctccagggacctctgcttcctgtccctgcggcggtggcagcggtggtggtggtggtgcgacgacgcctggctagggggtgggcggtccggggtggtgctgcaaagatgagtcccacggggccgctgggccagcgtggagatggagcgcttcatggggctggcatctgtgacgggctgtgggcaaaggactgagagtgggcctaggggaggcaccagggtcagcgggaatgcaggcatggaagtgggtggtggagcaggccagacagcaggcccacacgccccccatcctggtctcacagtcagaaggacccaggcctgaaatggtagcccaggagggcaggctgggggcagacagtgcctgagtccccgccccatcccatgtgtcgtgccaggaagagagaggtggctggcttggttggaagaaccctgagtggaaaccagagacgcctctgctggctgcaatgggatcactctgcctggtgcgtctggggtggactggctcccgagctgcttccacggccagaatcaggacccgtgaagacacctgggacgggtaggccctcccaggtaaactcacccacagccgccaatgcatca

SEQ ID NO: 18249 - DNA, 895 bp, Artificial sequence
  DNA replication origin
gttgggcacgcggcggagagggtgagactgggaggtcagggaggacacgtaggaagtcctggaggagcggcccgagttggtggccacagcctcctcgaaagtgagagtgtcctcaggcagggcgtggacagaggcctcactgtccagacgctgccccaggtaagggtcagagccaattcgagagccaggggccaggggctggctgagggggtctctctgcagcagggcgttgtgttcggaaagcccacggctgagccggcctggggagaaggcagggaggctggtctgagccccggcgaagtggatgggtgaggagttggccgtcttgtaggtgatgctggggcggggagtcaggggcgtctgggggagctgcctccgcccaccgcggccgggggtgctagcaccagatgttgacagcaaggggctcccattcacggaaccactgccctacatgaaaatggaccagaacaaatcagaggtaaaaaaaaaaaaaaaaaagccgaaccaacagacagagcacatcacacacaggtgcctggggggatgggaggagagagggaggcaatgggggacaacgggctgcggtgaccagggaggcaacaggcacctgtgtgcgggggagggcgatggtcagggtcaggcccaggaatggggttggggagagcaggtgatgggaagggacaggctggggccagggaaaaggacagaacaaaagcccaacgaccacagtcagggaaggagagttaagtgaccgagagagaggtaagtatttgggggcccaggtccgaaagtggataggacgcagaaccactgtcccagggtgacccaggcaggagcttgatgagaacacagctggggtaggctgcagacgtgggctccgggacagggcacagag

SEQ ID NO: 18250 - DNA, 1176 bp, Artificial sequence
  DNA replication origin
ctccagtgcccccggccgccagcagggggcgcaaggccatgacaccgtgagcaagagggccctgcagtgcccccggccgccagcagggggcgcaaggccatgacaccgtgagcaagagggccctgcagtgccccggccgccagcagggggcgcaaggccatgacaccgtgagcaagagggccctgcagtgccccggccgccagcagggggcgcaaggccatgacaccgtgagcaagagggcactgcagtgccccggccgccagcagggggcgcaaggccatgacaccgtgagcaagagggccctgcagtgcccccggccgccagcagggggcgcaaggccatgacaccgtgagcaagagggccctgcagtgccccggccgccagcagggggcgcaaggccatgacaccgtgagcaagagggccctgcagtgcccccggccgccagcagggcgtccacaccgggccgaagcgagggtgaagcccgcgtcctcctcggcacagacccggggggcaccgcctcgctttgggacaactcgaggccatggtgagtaaaatccttcctgtttgcagccctgactactgagggttagagaccagtaagaggggtcggtgtgggaaactggaaaccaaaagcccctctgaatcctgagcactgaggttctccccacccaaggcgaggcgggcgcagtgcgaggtctacaccgcggccttggaacacaaatggagcgttcctaatgcagatatgcctcccgaaatacgaatgtgacactcgcagtgctcaggtaacaaacacctgtaatgctaatgcgctgcctcaatacaaaaatgttaatatgaaaccccgtgctccccacacggccccgcagtccccgctcataataatcaacactgacataatcaacacaaacgtagcctccagctgctcacagctgctgctgagctggagctgcctcgggcttggcctccacagtggagcttgttgtcgtatctgcttcacggacgtggaattgacacagttgttttaaaaagtagcttacttcccaataattccatactttcaggaaacttgcagcggtagtgtggagttttctttctcttttctctcagattcctcagcggttgttgctgagccagatctgcatctcacagaaaacaccccagtgtttttcacccaaa

SEQ ID NO: 18251 - DNA, 1050 bp, Artificial sequence
  DNA replication origin
gcttttcgagtctccaccctggtccagaagagggttctcaacttgccaggggagagcagggaaggggggtctgaggcagaggctgaagataagggcagcttggtcccgaccagtcccagagtcaccgagatcaagagcccggggtcctagtctcctgcctctggaggagcttggtttgttcatttgttcaatgttctacaaaaggacagttggggcatctggtgtacacaggaccctcttctcaccctggccgatgccttagagaacaagatggacaaggaccctccttaaataaaccatcacgcctcatgcaccacatgtcaggttacaagagggagtgcaggggccatgtcaggcggaggatgtgaggaagagggtgtggggagaggggtgttgggtggggctaagcgggagggtgcttggcttctccttggagcaaaggaaagtgtgaaactgtgtaatacgacctagtttatgttttgaggaatggattgctgggaaaggggacatgggggacctgctggaggccagtgggggccagtggggtgcccacagggagatgatttggcgtgagccagtgaaagaagtggagatagagcaaggtggagggaattgcagggtcttagggggagaaatagaggggacgtgtggctggatgagatacgagcggtgacccctgaggtggggaaatggggcacagccttgcggggaggttggcgaggtctatttgcacctcttgggttggagccccaggtgacatccttgtggaagggtcactggatccttggcagcaagtcaggtgctcagggagacactgggtggggtgggagccacagacgtgctgatggcaaagacagagttcctggaggtgcggctccctccgccggctgaggatctagctgacaactccccgttctgaacccgccatcgcagctcatgctgtaaaggacgcgcgcctcagtataagtcagttctatgcggccattaggcaaggaggcccagttgggtcctgccctgagagtgggttgggatgtgatgagatgggagaga

SEQ ID NO: 18252 - DNA, 1037 bp, Artificial sequence
  DNA replication origin
agggccgcgttcccaggagggcggtgggggaaggacgggggtcgcaccgctggcctcgtggtggtgcacattgggtgggggaaggacgggggtcgcaccgctggcctcgtggtggtgcacgttgatgcgctccagctgcaggtggctgtccccgtggtaggtgccagcggagtcgatagcatgttcatcagagatcacctcccagaactgcaagagacgggaggggccagacaggccggggctgagtcacggaggcaccccagccactctcccacccccacccgcacccccatccctaggccgccctgtccctggggtccaccccggccgcctcgccagccacccagttccaccgtccccggcagggagcccaggggccgcaatgcaggggcaccgccccgccactgctaacatcttccccggccacccggcaggcccgggctgggccctcagagccctggctgccaaccttggccccgatctggttcccgcactgcccgatctgcgtgagagcacaagctccctcgtggccaaggcaggattagggcggcaggagaagcgcgagaaggaggagcagacgcgcagcgacccagcccggcctccgccaacgcttaaacagccccgcgcccacctccctcagcctccgattgggctcccagaataagcaacagctttacttccacacaggtgcacccacctgtgaatcccttggcgttgaacgtctgttggagaactcaggtgtccttgcgtggtcccttccacgttggggaaagctgctcagctggagaacttcctcccacgtctttagtaagactaaatccctagctgagctgaaactgaattttcctcccatgtgggaggggaagactcttgtttccatatgcacggagtgcctttgcacctgtcccagattgatgacatatttttgtaattgatgagtcttttcatctattaggagatctgtcgttaggaaaggccttccacatgttaactcaacaggacttaattatacgttttactttggagcagttcaaacc

SEQ ID NO: 18253 - DNA, 1059 bp, Artificial sequence
  DNA replication origin
gatgctgggactttgaagtttcctctgctaaactggacagaggctcaaaagagctcttcctcaagctgatttaaccagtcactgggtggcacaggccatcagcactgaaggccgcagcagagagataaagggatgcagcatcacttatgcaaaagcagaataaggtattaccccttgcagatggcttctggcatttaccttgttggatctcatgttagcaacgaccgccaacacttctgaacggcaacacttaacgagagtctttccattctccatgaaaagagttgtcacagaaaaatttaaagggaaagtggctttaaactgcccatatcaagtaggagtctccggggcttggctgagccagcgttcctccttttaactcttccatgtcgttggagagccagagtttgaaagccctgggacagaagaggaggaagaaaaggaagacgaggaggacaagggggagggagaggacaaggaggaggcagaggaggagaattaggaagaggaggagggggatgaggaggcggagagggaggaggacaaggaggaggtgaaggaggaggagtcggggagaaggaggaggagtcggggagaaggaggaggaatcggggagaaggaggagaatgaggaggacaaggaagagaatgaggagggggagaaggaggaggagaaggaggactaggaggaagaggagaatgacaaggagggggataaggaggacaaggaggacaatggatgaggaggaggagggagaggaggaggaggggtgggagaaggagaagggggacaagggggagaaggagtgggggagatggaggggccagaggaggaggcagccgtggtggcttgggcgaggcgttggatccagggcgtgcttggctgttgcctccctctagacctcagtctcccgtcctgtgaaatgggcaggcactgaggaccctgtagcatccccagcccatgagtgctcacccccttgatgagcagcatcactagcatgtagaaatacgttggatttaagatatttccaagccatggtcctaagtggtggccacattc

SEQ ID NO: 18254 - DNA, 941 bp, Artificial sequence
  DNA replication origin
tgaggatgagggttaaggtttaagggttaagggttaggggttagggttaagggtcagggtcaggggttagggtcaagggttagggtcaagggttagggttaggggttaagagttaggggttagggattatggtttgggtgagggtgaggtgtgagggtgaggatgagggttagcgttttagggttatggttagggttaagggttagggctagcggttaggggttaagggttaggggtaggataagggtaaggattagggttagggtcagggtaagggtaagggtaaggattagggttaggattagggtaagggtaagggttatggttagggttttagggttagggttttagggttagggttaggggttaggggttagggttagggttagggttaggattagggttaggattaggggttagggttagggttagggtactgtaaataatttcacattattactaataataaattattatttgtattacactattacataatgtaaaggctattaagacatgtttgtcttcaaagaatggccttggtttctgtgggcagtgcctcctcatggaagggtaatgcattcctgctaaatcatggacaaaacgggcttccaggagctacaggctgcagcagcagctcctcctctaagtccttcactgcctcaaactcttgttgactttgtaagcttctttcagtctagttttttcaacagagctagtatttcatgaggttctactacataccaggttccagaaatctaaatgccttttgtttgttatttttcactaaatacaaatcacaactctctcctcattactcacacaacaaaatttagctgagggagattgagtgactttcctagggtcacatagctactaagagcagagccgtgtttagattcatgtgggaatattgaacacagaaatgaaccagtggaaac

SEQ ID NO: 18255 - DNA, 1940 bp, Artificial sequence
  DNA replication origin
catcccttctcccagtgactgaacagtcccagctccggctggagaagggcgtctgcagaccccgctgttgcctcccaggggagtctccaggcccagctctcgccccaccgcgacctcccaggcccaagtccctgcctacctcccagcagcccgagtgcgatcctgttcctccctcacggtggcctgttgaggcagggggtcacgctgacctctgtccgcgtgggaggggccggtgtgaggcaagggctcacactgacctctctcagcgtgggaggggccggtgtgaggcaaggggctcacgctgacctctctcagcgtgggaggggccggtgtgaggcaaggggctcacgctgacctctgtccgcgtgggaggggccggtgtgaggcaaggggctcacactgacctctctcagcgtgggaggggccggtgtgaggcaaggggctcacgctgacctctgtccgcgtgggaggggccagtgtgaggcaggggctcacgcctctgggcagggtgccagaggcatgagttgggcatcaacaggccaccgtgagggaggagctgggccgcacgcgggctgctgggaggcaggcagggacttggccccgggaggccgccgtgggggcaagagctgggcctggagaggcccctgggaggcaagggcggggcctgcagaggctgttctccaaccagtgctagaactgtacaggccaccaggaggcaggaggtgggccctcagagcttggctggagaaagttcggggcctacaaaggcggttgggagctgggcaggagttgagccaaaagagcttgcttacttgctgggaggcagggctgggagagcccgacttcaggacaacttgggcctgcggcagtcgccgggaggcccaaccttggcgtggaggagcccaccgaccggagaccatttggggcctggagatgccatcggagggcaggagctcatcctggagaggccaccgtgaggcctgacctgggcctggggagcttggcttgaggaagctgtgggccgaccaaggccgccaggagatgggtaggcactgagtccaaagaggttgttgagaggcaggaatcgggcctggagacccaaccaggaagaagagctgggcccggagagaacgcccggagggtgcaagtgggtctggagaggctgacttgaggaggttctgggcccggagaggccgccggaagggaaaaactgggcctggaaaggccgttgtcaggaatgagccccatgggcctgaagaggccactggcaggcgggagctgggtgtgtagaagctgctgaaaggttgggagcttggcttggggggtccacagtgaggtagatgctgggcgtgaagaatctgctgtgaggcagacgttgggactgtagaggctgacgggaggcagaggctgggcctggaggggccaccaagatgcaggagctgggcctggagaggctgcaaagaagcatgagctgggcctggtgaggtcgacttgagaaagttcagggcctggagagaaggctgggaggcaggagctgggtctaaagaggccattgtaacgatggagctgtgcctgtggaggctgttgtgaggcagtagcctcatctgcggaggctgccgtgacgtagggtatgggcctaaataggccattgtgagtcatgagcttggtctgtagaggctgactggagaaagttctgggcctggagaggctgccgggaggtaggagctgggccaaaagatgtaagcacatttgcatttattaggcactttatttccattattacactgtaatatataataaaataattatagaactcaccataatgtagaatcagtgggcgtgtcaagcttgttttcctgcaactggatggtcccacctgagcgtgatgggagaaagtgacagatcaataggtattagactctcataaggacagcgcaacc

SEQ ID NO: 18256 - DNA, 951 bp, Artificial sequence
  DNA replication origin
ccgaggccgggcccgtgcaggccttcgagaggcaggaggccgggcctgcaaaggccgactggagatcaagttctgcgcctgaagaggctgccaaaagtcaaaagcagggcctgcgaaggccgccgagagccatgagctgggctgggctgaaagaggccactgggaggcaggaggagctgggcctggagaggctgactcgaggaagttttgcacctggagaggccgtcgagaggacggagctgggcccagggaggccgacttgctgctcttccaggcccacttccaggccgacttgaggacgacttgggcctgcagaggccgccgggaggctggagctaagcctggagagactgacttcgggacgatttgggcctgcggaggccgccgggaggcccaagctgggcctagaggagcccaccgaccggaggccatttggggcctgcagatgtcatcggagggccaggagctgagcctggagaggccaccgcgaggcctgagctgggcctggggagcttggcttagggaagttgtgggcctaccagggccgctgggagctgggcaggagctgagtccaaagacgttgttgggacctggagtcgggccagagtccggcctggagatgcagccgggaggaagagctgggcccggagggggcgccgggaggctgcaagtgggtctgagaggccaacttgaggaggcctggcctctgcctcccgcattgcccagctgttcctcctggctgcatctcccacctcccagcaaacaagctcttttggctcagctcccgcctgcgtttgtagaccccgaagtttctgcaaccaagctcttcagacccacatcccttctcccagtgactgaacagtcccagctccggctggagaagggcgtctgcagaccccgctgttgcctcccaggggagtctccaggcccagctctcgccccaccgcgacc

SEQ ID NO: 18257 - DNA, 1008 bp, Artificial sequence
  DNA replication origin
accgcggctgggacaggctgctgcgccaggcggccctggaccgccgcttctgcccctaagccgccgtcgcagcccaggtgaccggtttgtcctacccggggagcatcgccctcctccgccgggcccgagcccggcgtgggggttgtaggccggcaccacagcgtgaggacaccgcgacctctgcccccgggagcgcgctgaatgccaggtggggctgctgtcgcaggccgtggagccgcagccccgctgaatggcagggtcaggctgggcgtcggggtcctggcagagaccgcggcgagggccagagcaggtgcactggccgctgcacacgcgccgctaggctcccggacaccgctggcgcgccccctggtggcagccggctcaggagccgcgggagggcggtgcccagtccccagccaagcggcagcgcgaagctccttccccgcttgggggagtgggcgtggcccaggggcccgactgccttactagtgaaaaagctggggttggagctgccacggggggaggtggggggcctaggaggctctctctggaccttctgggtgtcctcctgcgacctcaggttcttcacctgtctcagaggactgatgggctggtatggcaaggttgtttggaggattaagccagatagtcgcagtaaagccccattagcccgtctggcctctggatttttttttaaattatttttctggctttcttaggaaactttccagaatgtgtccaggtgttgaagcgggaaggctggacaccctcccttggcgttgcggttccttccagacgccccctcttcttaggctcttttcaagcgcacgcccagcaacgtgtgctctacccaagagcgcgtcacagatcttcctgtgggtctaaaaccagaaggctttcttccatgacccctgccctcatatcaccgcaacgccatgtctcttggcagagccggctacagaatcgagtgtcagtttaatgcttgttccctaaggtctccctagggct

SEQ ID NO: 18258 - DNA, 1626 bp, Artificial sequence
  DNA replication origin
cagccccacctggcattcagcgcgctcccgggggcagaggtcgcggtgtcctcacgctgtggtgccggcctacaacccccacgccgggctcgggcccggcggaggagggcgatgctccccgggtaggacaaaccggtcacctgggctgcgacggcggcttaggggcagaagcggcggtccagggccgcctggcgcagcagcctgtcccagccgcggtccctgcagtccctccctggcggctgcgcagccgtcccacgacaggggccataaactctccagagcggaaagccgcaccctggtggcccggccccgcgcccagacctggcggccgctggcacctgacccgctgcatgggtctccagggagctcgctgcccacccggcgctgcaggctcggctccctcgtacactctctggtaggtgctagggacgaccctatgggccagcttgccatgcccagtccccaggccgcacccaccctggctccctgggctaggggactggctcctcctgtgagtcgtgggtctgggaggcaggggcgttaggggagagtgagggaccgagggcagcccctgctgtgtgcacagcgaggtcgtgcacaggcgtctgttgcagagcgtgcagcttcagatgagactggattgcaggtggagatgactgtgggtgcgcacacctggaggtgaaggggaggcagcctgtctacctgacccatgaaatacaggagactgtaccccagaagcagcgggttcactgctccattgattaagcaagtctgggacacacatgtagctaagctgtgagttctgtaccagcgatcccaacacccacgccctcagaaagacactggtgtggggcctgggtgcttgtcaggcctgaaagtggagagcacgggccagagacactgagtagggggaacccaccctagggctctgagggacgacgatgtggggagctggtgacagagcctgagctggcccaatgttgcacggtggggacagattcgaggtacagtggggactggtgacctcagttcccagtgtcccagcctggcctcccagtccacccagcaattagtgggtgctgccctgcaaagactctgggggtgcctcagccctcctcatcacacgtgactggtgacttctgtgtccacccgcacaataagagggatcttctctcactttcaggcaagcccaagaaagtcaggggcctatgtgagccaaagaggagagaaggtgatgcctcagcccagtgtttctgccccacctcgcttgtggccttcggaacttgatttgcaccgcaggaaaatgggcaatgaaaacccctccctaactggcttctcagtccactctgaccagcccactgcacagcgcccaccctgcagctccaggtacagaggctgggatggctctgggctgacctaagggccttctgatggctccaaccctcgggatgcctcatgctcaccctttggcacccacctgacagctcagcatctctgctctctgccatcctcaatgcctgctctagacaagcccaagtcccccaggagtggcagagggaactgagccgaaaactaagtctcggctcactgaaccccaagtgggctgtccagcctcgcccttcagtt

SEQ ID NO: 18259 - DNA, 1017 bp, Artificial sequence
  DNA replication origin
agtctccaccctggtccagaagagggttctcaagttgccaggggagagcagggaaggggggtctgaggcagaggctgaagataagggcagcttggtcctgaccagacccagagtcaccgagatcaagagccggaggtcctagtctcctgcctctggaggagcttggtgtgttcttttgttcacacgttatatgaaaggtcagttggggcatctggtatgcacaggaccctgttctcaccctggccgatgccttagagaacaagatggacaagggccctccttaaataaaccatcacgcctcatgcaccacatgtcaggttacaagagggagtgcaggggccatgtcaggccgaggatgtgaggaagagggtgtggggagaggggtgttgggtggggctaagcgggagggtgcttggcttctccttggagcaaaggaaagtgtgaaactgtaacgcgacctagtttatgttttgaggaatggattgctggagtaaggggacatgggggacctgctgtgggccattgggggccagtggggtgcccacagggagatgatttggcatgagccagtgaaagaagtggagatagagcaaggtggagggaattgcagggtcttagggggagaatagaggggacgtgtgactggatgagatttgagtggtgacccctgaggtggggaaatgggggacatccttgcggggaggttggcaaggtctatttgcacctgttgggttggagccccaggtgacatccttgtgggagggtcagtggatcttcggcagcaagtctggtgctcaaggagacactgggtggggtggcagccacagaacttctgctgatgtcaaagacaaggttcctggaggtgctggctccctctgcgggctgaggacccggctggtaactccccattctgaacccaccattggaggtcatgctgtaaaggacgcctgccttagtataaatcagttctgtgcggccgttaggcaaggaggcccagttgggtcctgccctgagagt

SEQ ID NO: 18260 - DNA, 1000 bp, Artificial sequence
  DNA replication origin
ctttgtggatggcggggcgggccgggccggcggggcctgcgagggcggcggcggggcctgcggaggctgccggcccgcgcccactcgccttgggcggccgcggaagaggccccgggatgaggccccggaggaccgcgcggggcctgctcgggccgggaagccgcggagtcgcgtgagcaccgcccgccgggccctgtgccccgctttcggtcaggcctcctgggcccgtgcgcagtccgggccggcggggaacgcggctccgggcgtgtggcgggcggagaggaagcgtttgtcggcgcggcacgtcgtgtgctagcccgggagcggcgggcagggctggccccgaggcccggggcggagattcgtcggtcccccggggctgtgagcgaccccggcagcgaggccgccgcctcaacaggtcctcgcggacctccgggacagtcctgtggggtccgccgccctcctcccacccagagctccggggagaagctgctgaggacgcggctgggacgagggggggcgccgggacccggactttcacttgcagtctctcctcgcgcttttctcccgagccgggaggaggaggagctggcgatgtgtgcgccgtgcccggtgtcttttgcagagtgaccgccgtacctgttttattcgtgtgtaccagtgctcgttgtgcagtgcggtgtcctatgcggtgggtacgcagtaccggggattatatatggtgtgtactctgtgtcatatgcagtgtgctcgaagtacccggtgtcgtaccggctatcatacacggtgtgtacatgtatcttcctcgcttaggctgtgcactcagcccccggtattgtgtgcagtaggtgcctggtaccctgctgccatatgagctgtgcgtgtggtactccatgttatatacgagtgtatgtagtatctggatagtattgaatatatttaccttacctgttgtcacatacagtgtgtatgtagtacctggtgtcatatatgcggtgtg

SEQ ID NO: 18261 - DNA, 1087 bp, Artificial sequence
  DNA replication origin
gtgttgttagaacagtcagtcgggggtgcggggctccggcgagagaccggcgctgttagaacagtcagtcgggggtgcgggggtccggcgagagaccggcgctgttagaacagtcagtcgggggtgcggggctccggcgagagaccagtgttgttagaacagtcagtcgggggtgcggggctccggcgagagaccggcgctgttagaacagtccgtcgggggtgcggggctccggcgagagaccggcgctgttagaacagtcagtcgggggtgcggggctccggcgagagaccagtgttgttagaacagtcagtcgggggtgcggggctccagcgagagaccggcgctgttagaacagtcagtcgggggtgcggggctccggcgagagaccagtgttgttagaacagtcagtcgggggtgcggggctccggcgagagaccggcgctgttagaacagtcagtcgggggtgcggggctccggcgagagaccggcgctgttagaacagtcagtcgggggtgcggggctccggcgagagaccagtgttgttagaacagtcagtcgggggtgcggggctccagtgagagaccggcgctgttagaacagtcagtcgggggtgcggggctccggcgagagaccagtgttgttagaacagtcagtcgggggtgcggggctccggcgagagaccggcgctgttagaacagtcagtcgggggtgcggggctccggcgagagaccggcgctgttagaacagtcagtcgggggtgcggggctccagtgagagaccagtgttgttagaacagtcagtcgggggtgcgggggtccggcgagagaccggcgttgttagaacagtcagtcgggggtgcggggctccggcgagagaccggcgttgttagaacagtcagtcgggggtgcggggctccagcgagagaccggcgctgttagaacagtcagtcgggggtgcggggctccagcgagagaccggcgctgttagaacagtcagtcgggggtgcggggctccggcgagagaccggcgctgttagaacagtcagtcgggggtgcggggctccagcgagagaccagcgttgtta

SEQ ID NO: 18262 - DNA, 981 bp, Artificial sequence
  DNA replication origin
ggacttgcttttaaaaaacaaaaaaagcacttgggtcctagatccacaatgactaatacataagttaaaaataataatgacttccctttcccatgcagttcagcaggtctgggaagagaatcaggcagaagaggccctgggggtgtaaatttgaggacgcctcgacctcaggctgtgctcctaagagtgtagcagggtggggagtgtgtcttggtgggggcagccgcgcagggtgcccaagcccacgtcggaggaggggagtccacagaggggtgtcctggcgtgggctgtgggagccaggcagggtgcattgtgggagccaggcagggtgcagggtgcaggtggcgtgggctgtgggagccaggcagggtgcagggtgcaggtggggtgggctgtgggagccaggcagggtgcagcgtgcagcgtgcaggtggcgtgggctgtgggagccaggcagggtgcagcgtgcaggtggcgtgggcagtgccagccaggcagggtgcagcgtgggggagtcagagcttgttctaagaatcggcagcagccgagggagatcggctccgtgtggggaattagaaatcagtgcggccaggcgttagtcatgggggtacgttccaaatgggcgatttcattatgtaaacatggagtttgcttgcacagacttggctggtacagcctgacacacccagtccgcagtcctgtgcagcgtgttagtgcactgaatgctgtgggcagcggtaacgtgatggtaagtggtcgtgtgtcgagacatatttaaacacagaaaaggtacagtaaaaagatggtatagaaggtgggaaaaaaaaaaaaaaactgtgtagggcatttcccatgactggagctggcaggagtggaggttgcccaggtgagttggcgagttggtgagtaagcggcacctgaacgtgaggccaggacacgactgcacactattgtggcctctgtaaataccagacactttgg

SEQ ID NO: 18263 - DNA, 2005 bp, Artificial sequence
  DNA replication origin
gttcccgggagaactatgcgtgatgtgtctgggttgggtgcgtgtggggtttccgggagaactatgcacgatgtgtctgggttgggtgcgtgtggggtttccgggagaactatgcgcgatgtgtccgggtgagtgtggggtttccgggagaactatgcgcgatgtgtccgggtgagtgtggggtttccgggagaactatgcgcgatgtgtccgggtgagtgtggggtttccgggagaactatgcgcgatgtgtccgggtgcgtgtgacgtttccgggagaactacgcgcgatgtgtccgggtgcgtgtgacgtttccgggagaactacgcgcgatgtgtccgggtgcgtgtgacgtttccgggagaactacgcgcgatgtgtccgggtgcgtgtgacgtttccgggagaactacgcgtgatgtgtctgggtgcgtgtgacgtttccgggagaactacgcgcgatgtgtccgggtgcgtgtgacgtttccgggagaactacgcgcgatgtgtccgggtgcgtgtgacgtttccgggagaactatgcgtgatgtgtctgggtgtgtgtgacgtttccgggagaactatgcgcggtgtgtctgggttgggtgtgtgtgacgtttccgggagaactatacgcgatatgtctgggttgggtgagtgtggggttcccgggagaactatgcgcggtgtgtctgggttgggtgagtgtggggtttccaggagaactatgcgcgatgtgtctgggttgggtgagtgtggggtttccgggagaactatgcgcgatgtgtctgggtgcgtgtggggtttccgggagaactatgcgcgatgtgtctgggttgggtgtgtgtgacgtttccgggagaactatacgcgatatgtctgggttgggtgtgtgtgacgtttccgggagaactatacgcgatatgtctgggttgggtgagtgtggggtttccgggagaactatgcgcgatgtgtctgggtgtgtgtgacgtttccgggagaactatgcgcgatgtgtctgggttgggtgtgtgtgacgtttccaggagaactatacgcgatatgtctgggttgggtgagtgtggggttcccgggagaactatgcgcggtgtgtctgggttgggtgagtgtggggttcctgggagaactatgcgcggtgtgtctgggtgagtgtgacgtttccgggagaactatacgtgatgtgtctgggttgggtgtatgtagggttcccgggagaactatgcgcgatgtgtctgggttgggtgagtgtggggtttccgggagaactatgcgtggtgtgtctgggtgagtgtgacgtttccgggagaactatacgtgatgtgtctgggttgggtgtatgtagggttcccgggagaactatgcgcgatgtgtctgggttgggtgagtgtggggtttccgggagaactatgcgcggtgtgtctgggtgagtgtgacgtttccgggagaactatacgtgatgtgtctgggttgggtgtatgtagggttcccgggagaactatgcgcgatgtgtctgggttgggtgagtgtggggtttccgggagaactatgcgcggtgtgtctgggtgagtgtgacgtttccgggagaactatacgtgatgtgtctgggttgggtgtatgtagggttcccgggagaactatgcgcgatgtgtctgggttgggtgagtgtggggtttccgggagaactatgcgcagtgtgtctgggttgggggtgtggggggtttccgggagaactatgcgcggtgtgtctgggatgggtgtttgtggggtttccgggagaactgtgcgcgatgtgcctgggtgtgtgtgacgtttccgggagaactgtgcgcgatgtgtctgggtgtgtgtgtgtggggtttccaggagaacagatctaatggtgtgagcagtgagctcttttctgcacatgtcacaacgctgtggatgcactgggcccaggaagtgcagatgcagcagcttcaggccgcatgccctgcccccgtg

SEQ ID NO: 18264 - DNA, 1390 bp, Artificial sequence
  DNA replication origin
aaacagacagtggacatttcacatacagatgtcgtggggtggagtcagagagtgatactgtggacgggacaggatagagtcgcttctcggtatgttatactgactgaaaaggtcttaggttctgtcaggcccacagtgaggtgtggaagaataaaccaagggctgtcataaagtcatcgcttatccatgagcgatgagatgactaccaactggggaaagtggggaagaagggggggtgggaggtgggggacgggggtgggaggtgggggacgggggatgggaggtgggggacgggggtgggaggtgggggacgggggatgggaggtgggggacgggggatgggaggtgggggacgggggtgggaggtgggggacgggggatgggggatgggaggtgggggacgggggtgggaggtgggggacgggggtgggaggtgggggacgggggattggagggggcagagggatgggggatgggcagggggaggagcagaggaagcagggagagtaaaagaatgtttaccaaaagaattgcaggtaaaataacaatgatatgatcaatttatgcctaatccttggtttgaaggctactattaaatcaaattcttaaattcccgataaaggtcaagtaacaggtttctaagccaggccacatgctgcattagttactgcacaagcagggctatggctaagcaggttgctcatagccgtgtcaaaaacagacacacgtgcccagatgcagctgacggggcagtggcacagaacaaggcttcggatgagcccatcaccatgacaaccgatgtccctcggcttcccaaaaagctcacggaaatggtggcaccagaacaaggcagtcagggcctgacgtcctctagccggcccccagggagagcagggccaccggctctctacagatgcacggccatccttttcaaatgcaggctgccagaaacgattccacttatcacagctgcgcaggagaaggcacggcacttcagccaggattgaaatctggaggagaacggtctatgagcagatgtctgggctgctgcctgccggtgccttgggttctaggcgacgtgtaggagcctcgagtctggactctgtgtaacagtaagatgcctcctacactcggcaaatcatttttgaattttcacgtcgtagttgtgaacagactgaatttcttttcttagttcttaatgaagtatggaagaggaatagccttttcacatttagcaaaagaatttgtcaggctctggaaggaagggagctgccccgtggtgggaacaattgcccctctgtgatctccaaacacctgggagcccctgcacgatctcagaacacaacacccgggagaccctcattcacccgctgcgcatcctctatctcta

SEQ ID NO: 18265 - DNA, 759 bp, Artificial sequence
  DNA replication origin
cagggggcagtgcgtccccaggtgtgaaaactccatggccaaacatcagaatacccacgagacacacacgctgtttttaaaagggagattatgaggatgggcagataataaaaatagtagaaaaagaaaagtgtttcattccacagcggagcggcagatgccaccacggcttcgtgaagttccagaaagagacgccaggcaggggtgcacgccgcagcggtgccctgtcaggagcctggtcaaggggatgtcagggagcctcagggggtctccggagggggtctcaaggggccttggggcatcctaagggatctcagggacatgggggggttctctggagtctcaaggggcctcggggcatcccaagggatctcagggccacggggattctctgggggttctctggggtctcaaggggcctcgggccatcccaagggatctcaggggcatgggggttctctgggggttctctgaggtctcaaggggccttggggcatcccaagggatctcaggggcatgggggttctctggggtctcaaagggcctcagggcatcccaagggatctcaggggcatgggggttctcaaggggtctcaaagggcctcagggtacatcacaacgtctcagaacatctcaggaggtttcaggggatatcagcaggactcaggccaccaatggggggagtctctggggtccccggggtcgcaccctcccctctctgtgccatttcagtgtggttgccacagttccctccactca

SEQ ID NO: 18266 - DNA, 1272 bp, Artificial sequence
  DNA replication origin
acatggaggaaacttaaattgacttctttcacttagcaatatgcaatctgaaaaggttgctgtatgattttagctatgtgacgtcctgggaaaggcaagactatggagacagtaaaaagatcagtggttgccagggtccagggggaggcagccagggtctgtgggggaggcagccagggtccggggggaggcagccagggtccggggggaggcagccagggtccggggggaggcagccagggtccggggggaggcagccagggtccggggggaggcagccagggtccggggggggaggcagccagggtccgggggggaggcagccagggtccgggggggaggcagccagggtccgggggtgaggcagccagggtccgggggggaggcagccagggtccgggggggaggcagccagggtccgggggggaggcagccagggtccgggggggaggcagccagggtccgggggggaggcagccagggtccggggggaggcagggatgaataggcaaagcaggaggattttttagtagcatgtgatctctgtatgatactgtgatggtggatacatgttatacatttgtccagacccatatattgtacgacaccaagaatgaaccctgatgtgaacgatggagtttgggtgataatgatgtttcagtgtagaagcatcagttgtgacaagtataccactctggtaggcaatgttgatgataggggacgctgtgcacatgtggagttggaaaggataagtgagacatcactataaagctggaaaatatgatagaagaaattttgctggtgggtttaacaggttggagaaggaagatgaagtctgtgagcttgaagagggatgaaaagaaattaaccaaagtgaagaccagagaaaccaaaattaaatgcgaacagaacctcaagctcctgtgacacaatgttaatatccttgtaatataagaaggaaaagagaaaagagcaggagcctttgaagaaatgagtcaaaatttactcagattgatgtcaaacacctgtgtccagccccgagaagttcagtgaactccaagcagaacaagtataaaaagaatcacatccaggttcatgatagtcaaagtgcaggattaagaggagatcctgaaaggactccgaagaaaaagacacgttacactccagagaagcatttgaacaatgcatgacttctgtgaagatacaatggagaccagaagaccatggaaagacattttttaaagtactaaaaggagaagaaagggctgtcaa

SEQ ID NO: 18267 - DNA, 1157 bp, Artificial sequence
  DNA replication origin
aggaaagaaaagagaaggaagggaacagaaagtagaagagaagatagaagaggaaaaaagaggggaggggaggggaggggaggggaaaaggagagaggggaagggaggggaggggaaaagaagggaggggaggggaggggaggggagaagaagggaggggaggggagaagaagggaggggaggggagaagaggggaggggaggggagaagaagggaggggaggggaggggaggggagaagaagggaggggagaagaagggaggagaggggaggggaggggagaagaagggaagggaggggaggggaggggagaagaagggaagggaggggaggggaggggagaagaagggaggggaggggaggggagaagaagggaggggaggggagaagaagggaggggaggggaggggagaagaagggaggggaggggagggggggaggggaggggcagacggggagggcatgctgggggtacagacacaccccaattcccatctttttctcactcatctcatgtccgggcatgccgggggtgcagatgcacccaaattcccatcttattctcactcatccagtgtccaggcatgctgggggtgtagacacatccaaattcctgtcttattcccactcatcccgtgtccgggcgtgctggggctgcagacacatccaaattcccatcttattctcaactcatcccgtgtctgggcatgctaggggtgtagacacatccaagttcccgtcttattctcactcatctcgtgtccgggcgtgctgggggtgtagacacatccaaattcccgtcttattctcactcatcgcgtgtccaggcgtgcagatacatccaaattcccatcttattctcactcatcgcgtgtccgggcgtgctgggggtgcagatagcaacgtctctatggctcaccttagctcccagagaagatagggggaggaagagaggggtagggagggaggaggagaggagggccaagaggctctcctgccctccttccccagcacccaggggcaagcgctctgggctccacagaggcctccacaggagtgtcctgcaggagaagcctgctctgggcccttagtgaaactgccggggatttttctgtattttcaggtctgtcccagagcagtttctaaatccagtccca

SEQ ID NO: 18268 - DNA, 1464 bp, Artificial sequence
  DNA replication origin
gggaggggaaagggggggaagggaggggaaagggggggaagggaggggaaaggggggaagggaggggaaagggggggaagggaggggaaagggggggaagggaggggaaaggggggaagggaggggaaagggggggaagggaggggaaagggggggaagggaggggaaagggggggaagggaggggaaagggggggaagggaggggaaaggggggaagggaggggaaagggggggaagggaggggaaagggggggaagggaggggaaagggggggaagggaggggaaagggggagggggtggggggggacagggggtagggtggggggggacagggggttgggggggacggggtagggtgggggggggacagggggtagggtgggaggggggacagggggatgggggagggggatgcgcaggtgcctgctgtgcatggaacccaagcccctcgcagagctcaggatgaacccagtttccaggcccggggccatcatcagccaggagaggcatccgcggcacttcccagcaatggccacaggaagtaccaactcaggcccatcaggggcttcctcactgtgggggtttttaaaagtagagcacagaggttcaggtctagtggcacagtcaaacgttgacagactccatggaaacacggacttggcccctccatcccaccagcctgcatggccgcccctctccgctcccatcatacacatccccatccagccaagccccttctccttttcccttctccatttctccactggattcatcaaatcaaaccttgctgtccttggcaaatgtaccatgaatttacttactgcccagaacaaaagcacacttccagttaacatgacacccccactatggtagaacacagccctaattcagacattaggtgaaggaacaagggaggggagtcgagggcagtcctgagtcagcagctgttttctggggaaagcctctggcccacccaagcccgacgctccgccccacactgtcctggtgtctgaaagctccatgaagacagggtcactctgaccccttcacacccacaacgccgaagaggagcaggtgtttgggaaaagcctcctgctggcggtgaaggcaagaataattcctcatgatacccagaatgtcagaagaaaagaaggcaccatatggacgccttccaagtgaattttggaatgattctaccgaatgccattcatcctttttcagaacaaaatcaataccagaaacgtgtcaccagcagaaagatggtccctttgattgacggcttacaaacacaagtatgttacactgaatttatctcaagccaccctctctgtgataatataaaaggtctctttattaacaaccagtagcctttctcatctggtgctttttaacaagagggtcctgtaaccctcaggcattgtctaaacgtcaaatggaagcctaggatcctcttctgtgcagt

SEQ ID NO: 18269 - DNA, 1307 bp, Artificial sequence
  DNA replication origin
cgttcctttctgaagcttgttttccccagtgttggaagtagcagcactggaggaatggccttcttcctacagcaaagctctgccaggagaggaggagaagacatagagcatctgttgagggacatgacgttctgggcactgcaccatgctttctgcttctcagcagtgcctcctggttgatgttaccgtcacctggcatcgcccaggaggtaactcgcagaggcaggcagggagcagaaggagctcaggagggagtgagccgtcacagggtgggggaggttcaggagccagcaggcaagtgggatgtggcctcaaggtgttgctgggttggtgaggggtcttctgggacttttctgagagtgcagtcagttgtaggggtgggtgccggctcccgcagatagaagagccaagtgtgcaggagaccaacgtgtgcactgggagtccccaggggcgtgtcctggcacgcggcccagaggcccctgacaaggctcagtgcaccaggcacacagcggattgttggtgcttgacccgacgagaaggtgaggaagtgaggtgaggggggccgagagacaggtgcagggatgcactagacagggtgcagtcaggtggagggtcatgctgtggggtctaggagagacaggtgtggtcaggtgaagggtcacgctgtggggtccaggagagatgggtgtggtcagtgtggagggtcatgctgtgggatccaggagagatgggggtggtcaggtggagggtcactcttggggttccaggagagacgggtgtggtcgggtggagggtcacgctgtggggtccaggagagatgggtgtggtcatgtggagggtcacgctgtgggatccaggagagatgggggtgttcaggtggagggtcacactgtggggtcgaggagagatgggtgtggtcagtgtggagggtcatgctgtgggatccaggagagatatgggggtggagggtcactcgggggggtccaggagagacgggtgtggtcgggtggagggtcacgatgtggggtgcaggagagatgggtgtggtcaggtggaaggtcaagctgtggtgtctgggaaatgtgtttttgcttttggctgagcagctggacctgagcatgtctgtgctttgacatttaacctgtgcactgtcctcggcagggtgtgtgtgtctgtgacagaggacacctcagccagagtggatgtcggcggtggtggccggactcagggtccatgaatgttgcgtggtagaacgtgtttggtacattctcagctcctgcccaggtgcctcccaagcatcgggtgtt

SEQ ID NO: 18270 - DNA, 1641 bp, Artificial sequence
  DNA replication origin
attccagcagaatatcctgaaatggaagtgtggacaggatgcagggccaggccccagtgggcagggtggcaacattgtggagggaaaggggtttgtttcatgtgtctatagcagatggtgacacgttggagtgactgggtctgtgagggaggagctgtgttcagtctaaggctgttgagtttgctgaggaacctccaaaatgtcctggtagagtcaggtggccgctgccagggcgtgtggatccccctcttgggaaggtgtgggtggctgcgtgatgacactctgaggtccgagtgtcagagatggtggtgtgcgcagcggggcccaggacaagcctgggatccggctgtgggaggggtgggtgggtgccgtcctgggatccggctgtgggagggggtgggtgggtgccgtcctgggatccggctgtgggaggggtgggtgccgtcctgggatccggctgtgggaggggtgggtgggtgccgtcctgggatccggctgtgggaggggtgggtgggtgctgtcctgggatccggctgtgggaggggtgggtgccgtcctcggatccggctgtggaagggggtgggtggttgctgtccggggatccggctatggaagggggggtgggtgggtgctgtcctgggatccgattgtgggagaggtgggtgctgtgagggagtctgctgcgactggactgtaacaggatttccttgagaatttgaggtgtgttgggggcagggtcaggagcaaaggcttgtttcccctactcagcggctgctgctgcagggccgggcaacagtggaggtcatgcaggaagggtgttcgctgaagaccgtgttctgtgacttgaagatgggtgttcctcccgtgggggtggaacggagactggacgccgtgtggcttgagagtggcatcctgcgtgaccttgcgtgtagtgggcttacagcagagctagtccttcctctatagattcttttcatagtttgcctgcctttagattctctgattaacgcatctgaggtgggtcccaggagtctgccacctgccaggccaggaggttcccctcacgtggctggtccccagataccctgagagacacggctcaacaggatcacctgagtttcctaaatatgagtcacctgccttctcttctgtttgctttcatgcctcccccagggtgggccagtcctgtcagccacagagatacccgcatgctggggttccaaggagattgggggtgtgcctggtcacccagggagattcggcgactgaggatgctctgtcatagtagccagcgtgtccttactctttcaccgttaatgaagttcggttattaggttttccgacgcacgatgttgtccttatgaaaaattggtgatgaaggaagcaaacgtgtgggaaaatgatcctgcccttaaaactgaaaaacaataaaacagcaaagagcccagaagagcccgtgaacctcctcatggggcagtgaggagagacctcagtaatggcttgggaaaaaaaaaaaataatactgaagaaaacataaactaaattttgggtctcatatgggtaaagagattgtggtttacattttataggcatgcatttttacacttatttttctttgttggaattagaattagttgtgat

SEQ ID NO: 18271 - DNA, 932 bp, Artificial sequence
  DNA replication origin
tgtctcatctgttcccacgacatcacgtttctcaaagccaaaggctgccaggacccccttttcttcacaaagtcgttacaagctcacaataccaagtgaaaaacaacaatctgtaaaatgcaacatatgacccaatacagggtggtgagtgcacaggcacatacacatgtgggggtgggggtgggggtgggggtgggggcgggggaggggatgggcagggcaggggaggggaagggggagaggatgggtgggaagggggagggggaggatgggcggggagggggcgggggcaggggcaggcaggcaggcagggggagggggcaggaaggcaggcaggcaggcaggaagggggagggggcaggggcaggcaggcaggcagggggagggggcaggggcaggcggggaagggggcggggaagggggaaaccccagagggcgaaaccctggagggctggaggcaggagggatgctccctggcaacctcacagggtgccgtcacatgacagggcggacacatgacagaattataataaaatgcttaagaagagtaagcaacagcatcttcagattagggtagtgtcctggtttcacgcttgcctcatatgacattctataaattggaaagataacgcattgtcttaccagccacgctgttccccaaatactaactatgataaagactagacagcatctgagtactgagcatgcgtcaagcccagtgaggtaggaatccttactttgctagagaaagaaacaggttctgagagaaccttcctgaggccacacagctgtctccaaacccacctcccgcttcctgaccctgaaccaggatgggaggactcgagtcatgtgtgtgaataatttacctggatgcatctcacggattgagattcgacccccagacctaatcatctctattcagaaatgcgtaa

SEQ ID NO: 18272 - DNA, 1379 bp, Artificial sequence
  DNA replication origin
gaacatgggggctcttgtcagtggctggggtgagagtaccagcctggcaggctggggtagcctgtggggcagttcaggcaccaccctccccgcctgcgggacggcagctggaggagctcgaaggctgcctgcctcacgactgtcagcacagcagcccctcttggccctggagcaagctttgggtccacgagcctctgcgcttggacttgcctcctgggacctctgccgggacctctgttactgtcctgatagggccctggtgtcactttcccggcagggacccaagccgcaggcagctgcgacctcagattcggttgaactttccctgacctctcattccagcatgagtgctcacctcacccagtgcggagcctcaggttcccttgagacccccggagatggaatctcccaatttaacaagacagttgatgacaagatttgagcagcactgatttgactcagcttccagagtttaagttcccaggacacagtcctggtccttccctgccctcctgtggctggtgtggatgtggggtttccggagggtcagggctgaagcagtggctggtgtggatgtggggtttccgcagggtcagggctgaggcagtggctggtgtggatgtggggtttccgcagggtcagggctgaggcagtgcctggtgtggatgtggggtttccgcagggtcagggctgaggcagtggctggtgtggatgtggggtttcaggagggtgagggctgaggcagtgcctggtgtggatgtggggtttccgcagggtcagggctgaggcagtggctggtgtggatgtggggtttccgcagggtcagggctgaggcagtgcctggtgtggatgtggggtttccgcagggtcagggctgaggcagtggctggtgtggatgtggggtttcaggagggtgagggctgaggcagtgcctggtgtggatgtggggtttccgcagggtcagggctgaggcagtggctggtgtggatgtggggtttcaggagggtgagggctgaggcagcgcctggtgtggatgtggggtttccgcagggtcagggctgaggcagtggctggtgtggatgtggggtttcaggagggtcagggctgaggcagtgcctggtgtggatgtggggtttccgcagggtcagggctgaggcagtggctggtgtggatgtggggtttcaggagggtcagggctgaggcagtgcctggtgtggatgtggggtttcaggagggtcagggctgaagcgacttgttattgatcaatgtcttgaggatagctgggattaatgacctttataggactgtaggtttggggtatttttatttcattttattaaatgacctggatttcacatggggtgacctatggcagtgtg

SEQ ID NO: 18273 - DNA, 1184 bp, Artificial sequence
  DNA replication origin
cttgtttcacttgagggtttttagcattttatgtgcagaccaaatgccaatagcattctgaaagagtattttggaattttaaacacacaatcacagagtgggacagtactgggtcctgggatgctggtgaggtggacgtgacctcaagctcttggagctcacaagcaagcaggattcctaaattgtcacacctgcagtgcagggaagtcaaagtggatttctgtaaacgaggtattagtgcaataaggaacagatgagtgcccttggagggcagtttttgagcctcccagacacctggggctgggggggcggttacccaccagagcctggatggtggagctgggtttgctggttgccctgtgtggcaggtcattacgtgcaacaaggagcaggtgagcgcccttgagggtggtttctcagcctccttcggaaccgcaagtggaagacgccccaagcaggggtgggggtgggggggtggtatccacaggagcctggacagtggggctgggtttgctggtggccgctacgtggcaggtcactgcgtggagcaatgggaggtgggtggagtgggaatagaggacacaccctccacagctactgttgggagttggccctggtggcagagggtgcatagaaggattcccatcaagggcaacacggctagggtcccacgtgtgctggatgccgtgatatggccatgtgtggtctcagtctccacagccaccctgggaagtgggttcagttaccattcccatctcacatttgagaaatctcaggggctcacatcacagctgagtggggtggaactagtgtctcagccaggacgttggccctagagcccagctcttaccccgctgctatttgcagtcccccaagtttgtagagaggcatgtgcggtagtggggggcggaggtcgtgtatttcagggggcggctgagataccaacacagtaggggcggggggcaggaaataagtcaggcgggaggcacagaggcagtgcctgggaggtctgcatggggtctgggtgtgggggcacctctgggcctgtgaaccccgttgtgtgctcctggcttgcctaaccttggcccttagccatgtgctacgcattttatgtgaaatctcagtccctccctggctttctttccttaaatcacggagtctcagtggggatggggggtggttgg

SEQ ID NO: 18274 - DNA, 938 bp, Artificial sequence
  DNA replication origin
catagttgatatcagggacctggacctaaagcaccatgccttgccctttcgccgatgggccaatgcctctctatgcttgagtccatttgactaaatacccgatattgacttggaattatgacgtgtaggataccccttaccacagtaacgtcaaactcacgttcttcacgttctaaatgtaacttgctcagggactggcttctaactccaggtgggaatgttaagctcagtccagttcaattcaataagcatttatcaagaaactactagatcaagagctgtgttagacactgggtatggggtgatggggatacaaagatgtggaattagagctcgagaagctcaaatgctctcatttaattccctaatgcaattacccagcttcagcctgatggctgtaatgtctaaattcactttttctttattccaattctacagcgcaaagcataaatcatcacagaggaatgattctgtgttggaatattcagtgcacagagaggtgcattctgacaggcgtgagacattgtcacccttcccagggagccagtgaggtggctgcacggagcacgcgtgtgaagattcaggagcacgagcatcaggtgacaggagggggcacggaggcagcaccagatggatgtgtgccgaggggatgctgcagccgggctggcgagggaggtcacaggaacgggcgcaggcatctccctccagccgcacttgacaggagggggcacagaggcagcaccagacggatgcctgccaaggggacgctgcagccgtgctggcgagggaggtcacgggaatgggcacaggcgtctccctccagccgcacttaggttttcatgaggacgggtgcagagaaggggatgaaaccgaaatgctgtggggctgaggggaggaggggagggatgcagggctgagggctgaggggaggaggggag

SEQ ID NO: 18275 - DNA, 1296 bp, Artificial sequence
  DNA replication origin
aaggcatcatcctttccaggacaggctctaattccgcctccgggcccttttgcaaaaagccatttctacaaacccacggccaccaggaggaaacacacaaaagaccccactgccctcctggcttcccagaaggcctcagaaggacgagacacggagcccgcacacaatcctggaccctcctccttgcattcagtttgatgcatgtcacctgcctgcatgatggaggtcccacaatgggcacaaggggacccgtcaggtcgggaggatgctgcccggctcacagtccacacatggggacgcgtcaggtcgggagggtgctgcccggctcccggtccacacatgtggacgcgtcaggccatcagggtgctgcccggctcacggtccacacatggggacgcgtcaggtcggggggtgctgcccggctcacggtccacacgtggggacgcgtcaggtcgggagggtgctgcccggctcacggtccacacgtggggatgtgtcaggtcgggagggtgctgcccggctcacggtccacacatggggatgtgtcaggtcgggagagtgctgtccggctcacggtccacacatggggacgcgtcaggttgggagggtgctgcccggctcacggtccacacatggggatgtgtcaggctgtcagggtgctgcccggctctcagtatcagccgcatatgcacattctccactgaagccactgcatgaagccacgctggaagcactttctggcaggtttaggaagctcacgtccaaggtcattaaacgcatggcaagctcgccttggaggcattttactttgctaatgacaacgaagcattctcattgcactgaatagtttagagcagtctttcatgtccactgcctctttgaaataggcatattgtgcctgttttacagattacatcaaggccctaatatatttagttccttgtcccaggtacacacaaatcagcgacatcactagaacgtgttttggaccacgaaaagaaggaaaatcacagcattatccattgatgctgcttaaagcgtatttccagatgtccctcccccgcccggcctgtatccaaggcttccgctgaccacgcggcatctgctgggcactctgcgcgctttctcccacacccgccacgcctgtgggcctgtgcatgtccctccacgcatccccacgcggctaaatctcccacacccgccacgcatgtgggcctgtgcatgtccctccacgcatctccacgcggctaaatctcccatacccgccacgcctgtgggcctgtgcctgtccctcca

SEQ ID NO: 18276 - DNA, 1672 bp, Artificial sequence
  DNA replication origin
acagctttaccatgcaaatcacagctgtgaaaatgaagcatgtttttgagactatgtcttcctcaaatattcttcatggaattttgtaccagtaatggctggtaattaattgttataccaggtggaaaagtatatcattcagggtatatgaagtaaacatgtagagagaaatgaccacacacacctgaaaccaggtctcatttcaaaaccgtttcctaccttggatttgcttaatttacttcatgaggtgcctccaggagaggaagcagagctgggatctgccccgaggccgcttcaggaagagctgggtgggcaccaagcccctcagaccgagggctccgctacgtggctatgaccccatccctgcggctccccgagcgtgtgtccctgtgtgtcacgcaaacccctgccacacaggggacacatgccacacgcctgacacaggctcagcacacagcgatcagtaagtggtgactagagagaagcgacggcctccagcgtggacggagaaaacaggccacaggctcacagacagaggaaacaccacagatccacagacggaggaaacgccacagacgcacggacggaggaaacgccacagacgcacggacggaggaaacaggccacagacgcacggacggaggaaacgtcacagacgcacggacggaggaaacgtcacagacgcacggacggaggaaacagaccacaggcgcacggacggaggaaacgccacagacgcacggacggaggaaacaggccacagacgcacggacggaggaaacaggccacagacgcacggacggaggaaacgtcacagacgcacggacggaggaaacgtcacagacgcaccgacggaggaaacgccacagacgcacggacggaggaaacgtcacagacgcacggacggaggaaacgtcacagacgcaccgacggaggaaacgccacagacgcacggacggaggaaacgccacagacgcacggacggaggaaacgtcacagacgcacggacggaggaaacgccacagacgcacggacggaggaaacaggccacagacgcacggacggaggaaacgccacagacgcacggaaggaggaaacaggccacagacacacggaaggaggaaacaggccatagacacacggacggaggaaaagccacagacgcacggaaggaggaaacaggccacagacacacggaaggaggaaacaggccacagacacacggaaggaggaaacaggccatagacgcacggacggaggaaaagccacagacgcacggaaggaggaaacaggccacagacacacagacggaggaaacgccacagacgcacggacggagtaaacaggccacagacgcacggagggaggaaacgtcatagacacatggacggaggaaacaggccacagacgcatggacggaggaaacaccacagacacacggacgaaagaaacaccaccgacgcagggacggaagaaacaccacagatgcacggatggaggaaacgcgccacagaggcacgcacggagaaaacaggccacacacgcacgcatggagaaaacgccacagacccacggacgaaggaaacaggccagagacgcgcacacgccagtgtggaacatcggacaggaacgtcccggccatgcactgtccactcccactagggactccccg

SEQ ID NO: 18277 - DNA, 4552 bp, Artificial sequence
  DNA replication origin
gattttgagcacttggggctcccctggggttcactggtgttgcaaggtcagggctggggatcttctgctggagaggccccagtgtgcccagcgcagggtcctgagtgcgttgctgcaggaagaagccctggcctttgtcctccagcggccgttgctctgggaagagctggttgctccaggaatgaggtctatgctctgaagcccatggtcagcagaccagcaaaggtcagcacagaagaccttattatgtgaatcattcatttaacaagcattcatggaatacacactccatgcagttggaacttagagtggaaggccatcagctcactgttgcctgagcagaggcttggtctctgggtccctgttgcagcctctgctcctaggagatacacggtgagtgttggggggccctccacaggcacagttgccgaacagggacctctcccaagggccttagccctgggccctgagctctgaagaggaggaaggcgttcctggggccaacttcccttctggatgctgagctctgcacagagagaaactcttccacaatcactgcagtgaagttcataaaacaaataacactttagagactggggtctgcattccctggaatttccgtggccgtagatggtggctgtaccatgtgactgagggtctgtgttccctggaatttccgtggccatagatggtggctgtaccatgtgactaagggtctgtgttccctggaatttccgtggccataggtggtggctgtaccatgtaactgaggggctgcattccctggaatttctgtggccgcaggtggtggctgcaccatgggactggggtctatgttccctggaatttctgtggccatagatggtggctgcaccatgtgactgagggtctgcattcctcggaatttctgtggccatagatggtggctgtaccatgtgactgagggtctgcattccctggaatttctgtggccacaggcggtggccataccatgtgactgagggtctgtgttccctggaatttccatggccataggtggtggctgcaccatgtgactgcggtctgtgtttcccaatatccgtggccatagatggtggctgtaccatgtagctgaggggctgcattccctggaatttctgtggccacaggtggtggctgcaccatgggactgagggtctgcattcctcggaatttctgtggccatagatggtggctgtaccatgcaactggggcctgcattccctggaatttccgtggccacaggcggtagctgtaccatgcaactggggcctgcattccttggaatttccgtggccgcaggcggtggctgcaccatgcaactggggtctgcattccctggaatttccgtggccacaggcggtggctgcaccaggcaactggggtctgcattccctggaatttccgtggccacaggcggtggctgcaccatgtgtcaggtcctctgtctcaggagttggtgccattgtctctattactccctcgcctgacacagagcggcagttcttgactttaccactcccaggaagcacacaggcaaaacaattcagaacaatctgttttgaatccttgttttatttccccattccctttctcatcgcatggaaattcacatccctgtaaagctgaaaatggtgtggatctcccctgatggtctttccaaggaattatcagcaggtaaactagaccgtgtgggccagtttacctgaaatgaaaacagaaacgtcactgggctttgctgggagattcagcgtctttgtcagtgatagaatcatcctaagcaggttgtttgttgtgctgcagatccacacggttagctgtgtcaggattaaaattacccagtgcggacagtgtagcttaatcctcatggaagggtgtcaagtacattgaagagcagctgccgagcctgccattgttgggagaggggcaggtgcatctctcgcttggcccagtgctgcaggaggccgggctcatgtcaggccgtgcgtgtgagcgggttggatttttagcatgctgggacggtaaagcacaaacatctatttttaacttgtgggtgaccttcttctgtgctgcttgagtctctgtgggcctttctctgcttccttcctgaggagtctgtgccagggtcccaagcgttctctgggctgcacttctgtgcctgcctgctcaggagcctcctcctggtggctgtgggaccgggctgggcccacactgtcagcatcgtccagggtaagcaagcccatccctccccacctcagtgtccccagctgttgaatggggctaataaaccgactgtcaggattaatgtggatcagatgcgctcatctcacagccctgcttggtaaatagccgcttccactctgtcctccaatgtggtcctccatttattttctttacctccatttatccaggcgattccaggtgacagtgactatcaagaagggcgtacagaggaaatctgtggaagggagctcgaggagcagatatgggcgcagggaacgcagtgcggggagcacgggtgcggggatcatgggcatggggagcacagatgggcgtggggaggacggatgcagggagcatgggcatggggagcacagatatgtgtggggagcatgggtatggggaggacgagtgcggggagcacgggtgtggggagcatgggcatagggagcacagatgggtgcagggagcacaggtgtggggagcatgggtggggggaggatgggtgcggggaggatgggtgcggggagcatgggcgtggggagcatgggcgtggggagcacgggtgtggggagcaggggtgtggggagcaggggtgtggggaggacgggtgcagggagcctgggtgtggggagtacagatgggcgcggggagcctgggtgtggggagcatgggcgcggggaggacggatgcggggagcatgggcgcgaagaggatgggtgtggggagcatgggcgcagggaggatgggtgcggggagcctgggcgtggggagcagagatgggcacagggagcacgggtgcggggagcaggggtgtggggaggacgggcgcggggagcctgggtgtggggagtagagatgggcgcggggagcctgggtgtggggagcatgggcgcggggaggacggatgcggggagcatgggcgcagggaggatgggtgcggggagcatgggcgtggggagcagagatgggtgcggggagcacgggtgtggggagcatgggcgcggggaggacgggtgtggggagcatgggcgcggggaggacaggtgcggggagcatggacatggggagcagagatgggcgcggggagcacgggtgtgaggagcatgggcgcggggaggacgggtgtggggagcatgggtgcggggagcatgggcgcggggagcatgggtggggggaggatgggtgcggggagcatgggcgtggggagcagagatgggtgcggggagcacgggtgtggggagcatgggcgcggggagcatgggcgtggggagcatgggcgcagggaggacaggtgcggggagcatggacatggggagcagagatgggcgcggggagcacgggtgtggggagcatgggcgtggggagaacgggtgtggggagcatgggcgtggggagctgggcacagggaggacaggtgcggggagcatggacatggggagcagagatgggcacggggatcacgagtgtggggagcatggctgcagggaggacgggcgtggggagcatgggcatggggagcagagatgggcgcggggagcacgggtgtggggagcttgggtgcggggaggacgggtgctgggagcacagggtatggagagtgcgtgtgtgcttcctctgctctgacagatgctgccgaacacgtactctgtgctcagatgggtcagagcctcagtgcctcttttttaaaaaattctttctttttttaaagataggacttctctcttcctggtggccccttttagtcgatactcttttaagcctgcttttccagaggaaagctgggaaggatggcctatataggttccagtctgggcatatctggaagaatggcctgttttaggtttgagtctggtgtatctggggacatctttaaacttccactcagagttccagagccacctgtagggactccccaaatgtctgctgggactttccccactgctcggggatgatgaagagcaggacctcaccctgccacgacctctgaggtcctccttcctggagggcagtgccttggtggccagtgtgtgcaggaggctgggctggcaccttcgggctatgctctgcagcgggggctcatgacatgggcattcttgtgctctgcactgggactggtgacgtggggcatcctcatgcactggaccacgccgggtgcacatgagccagacagctcctggaattcggagcctggctctgtctcaggccacccacctgtctgtggcacttctgggggattgtggggactgtatgagtctgggtctccaccctcactggctggacacctggccaggctggggctttatgtttcacc

SEQ ID NO: 18278 - DNA, 843 bp, Artificial sequence
  DNA replication origin
attcccctgaggttcctgtgtgggctgccagcctgcgtgggttacgcattgtgtgggtttctagaccctggtccagttctgctgtgcccgcctgctgggcgccattacatgcactgctggtgtcctgctttgcagggctgcaggggcacttcctgctgcggggccgagggctccatccttcttccactgcctgtccctgtcccgtgccctgtgccccctcacaggggaaggtgaggccagctcacaccacagagcatgcggccagcaaaacacaagggctctctgtggggagaagtgctgggcagccctcttgtgggagctgatggcctcgaatccatgtggggatacattcaggttgtgtggccaggggggtcatctcctcacatacttgggtctgagtgtgagccagggaggaggccatgcaggtaaggaggccacacggtcaggaggctgtgtgggtggggaggttgtgcgggtggggaggctgtgtgggtgcggaggctgtgcaggtggggaggccatgagggtgcggaggcccctcgggtgaggaggctgtgcaggtggggagaccacgtggggggaaggctgtgctagtggagaggccccgcaggtggagaggccgtgagggtgcggaggccctgtggctgaggaggccctgcaggtgaggaggccatgagggtggggaggcctccaggtgatctggagctccattctggggagggtcaaggaatgagagggctgtggcggctgctttctcatactcctttccccagaatattttcttctcccttctcttccctacatttttgccctttataattgggtattcttttttgtggcttt

SEQ ID NO: 18279 - DNA, 1367 bp, Artificial sequence
  DNA replication origin
gtcccccggacccccagaccccgcgccctagggacgtttgtgaggccgcgatcccccgcgctctggggacgtttgtggggccgcgattccccgcgccctgggggtgtctgtggggcctgggatcccctcgcgctctgggggtgtttgtggggccgcgatcccccgcgccctgggatgtttgtggggccgcgatccccccgcgccctgggggtgtctgtggggcctgggcgccgcgcggggacgcaggatgcagcgggcccggcgggatcggccttcccgtgcgctctgcgctggagccgcggcgtccttggtgcagcagcgcggtgcgcgccacctcctcgctggcgggttcggcctggaacgcccggccagatttcaatgcgaaacttgtcgttggaccccgggttcgatctctggtggctcaggccgtgcagcggtcctggcgcggcccgggggatcccacccccattgttcgcgggcgctgcgcggggagggctgggcggaatcgtcaacctccccccgggccgggctccggccttgccgtcctggtcctctcgtaggagggtttgtggcagatcagccaccgcggtcttatggagggttgtgtacgcctcttatttgctcttcatggcggagatcatgtgctcaactgtcataagtttcagatcgggctttgccaggtcttttccccaaaaccactgaagttcccaaatctgaaatgtttgatgtgcatttagccgtctctgggctcatcctggtcaggccattcctgtaacgtggggtggggtgggggtgggccggcgcgtctcacatttatatttggagcagtttagcatggtgaactttttttgggtaacggttttgtgagggccggcagccagaaagtaaactcattcgtgccaattttcaccggcagggaggagctggtgttgactttatgttttcctttttaacactttcagggcaaagaagggagtgagcaggggccatggtgtgcagccaactgcctttccagacttctggggacgggaaatggtactgtttttcagtttcagatgtggggttccgcgaggtgtgtcagtgtcctgtaacgtgacacagttggcggggggcagagtcttccaggcctgtgggcttggctgctgccctcctgaggagctgaggatgaggagggcatggctaggaggcgggagctgccgtgtgcagggttcggatgtaaactggtaagtagattgtgcagtgcagacagctcgtttggtgggtaaggagtgtatcatttgcaaaaggcccaccctggttatctgattgtgtcagccttgggtaggtttcccggcttgcgtctcggcccaggtgcacccctgcctgca

SEQ ID NO: 18280 - DNA, 978 bp, Artificial sequence
  DNA replication origin
acacacctctggcggttgccaccactgctagatccatgggaagggcaaaggtgggtgaggcatgggctctgtcctccaggcgcttacactcacaaagaatacagagaagataaaaaaggtcaaacgtgatgagggcgggaagtggccggtgcaggaagagaaaggagagagattgttctggacctggggtcagggatggctgtgggtggcaggggcagagaaggggcaggctctccggggtggaggccgggagcagaggtgctgcgggtcagccgcgttgtttgcaggagccggagtgtggaggccgcaaggctgccgtgcaggtgggtcccggctggtgggggctccggtcgaagcggggtgggggggtggtggggggtaggggtaggggggtgaggtgggggacctgtgttcctgcggcccactctgaaaggggagtgagtgcagctgggcctccgggagccagcgctggccaatgtcccgtggaggacggggaggcgaggaggtctttaggaagctctgggcctaagggaggggccgggctgggaagagggggtacaaggatgaaaaggaggccaggtcgtcggggctttgtgcaacagactggggaggatgtgtggagacagaggaaggtgatgatgaagacaacgggggcggttctgagaagcagaacttccagtgactaagagtcactggaagcagctggcttcatttagggtttgtggcgtttggggtgtctaggggcttccagggaagtttgctcagtggacggttggagatgcgagggcctccccagatggtcaggactagaggcacagacggggcttcagcctcgccgaggtggcactgaggctgggagctgatggccccacaaggagaaggacggtgggaaccctggggcctgcagcctgttccgggagggctggagccaggcttttcgggcccacctggcatttggagattaggtgacccaacctt

SEQ ID NO: 18281 - DNA, 1077 bp, Artificial sequence
  DNA replication origin
caaccaacatcagtcataggatcatatgcaaatgattaaggcccatcaaaaagaatatatatatatatatatatatatatatatatgtatttttttttttgagactgaatctcgctctgtcacccaggctggagtgcagtggtgcgatctcggttcactgtaacctccacctcccgggttcaagtgatcctcctgcctcagcctcctgagtagctgggactacaggtgtgtgccaccatgcccagctaattttttgtagtttttagtagagatggggtttcaccatattgactaggctggtcttgaactcctgacctcatgatccacctgccttggcctcccaaagtgttgggattacaggtgtgagccaccgtgcctggcccgcgaatatatattttttattccgacattataccgccctaaatggacttgacaccatttattgcttggaatgcacagtgcatctttgctgtaatgaaatgaactcagggctttgctttggagactggggtttgaatcctggttctgctcccctttctgtctctaaggacttttatctgtgacgtgtaggggctgtgtgggatcttccccacggcccctgcattgctggtcggtctctttatcatgcaaaggggagagatgatggtggggccacatgcttgtgccacccgtatctgttgcattgaacgcagtctggagcgaaggacgaacccacggcgcacaccaggcggaggcacacggctcggcgcaggaagcacacgggtttggggttcctgtttcccagctcatcgtcgaatgtcattctcacaattccccactgaaaggaccgatccttacaggaaatgcacacacctctggcggttgccaccactgctagatccatgggaagggcaaaggtgggtgaggcatgggctctgtcctccaggcgcttacactcacaaagaatacagagaagataaaaaaggtcaaacgtgatgagggcgggaagtggccggtgcaggaagagaaaggagagagattgttctggacctggggtcagggatggctgtgggtggcaggggcagagaaggggcaggc

SEQ ID NO: 18282 - DNA, 1268 bp, Artificial sequence
  DNA replication origin
attgatatggatgtggctttgtggttggctgcctgcccagctcccaggggcgaggggctcctcctgccccagccctgcctgtcagtgcccccgcctgtggccccaccgaccgtcccatccaccccatctgtccacatggagttcacacgtgtctgagcccttcttgttcttcaggtcagtccggatgcctcaaataacgtctctatcatttctgtagctctggtgtgggaagaatgaacatgagggcatgctcaggccagcaccttcatgctttaaccgtggtgcaggtgtgtgcctcgtgcttcaggaacaccgtgacatctaccacccaggtccacgcagacacgtgttgtcctgcgaggcctgagaggcagatgtacacagtggacagagggagcctggcctggccctccagcctcccccagcactgcccctggccagcatgggctggccccgggtgaccgtccagcgaaggtcatcgagccacagcaagggtgagagtgggaccgagtctccagagtacgcgcctccagcgtccactccacgccatctgcacggtggtggttggttagtggatgggtaagctgaagggtgcgtgaatgatacggtgcttggtgagtggatgagtgagctgatgggtgcgtgaatgatacggtgcttgtgagtggatgggtgagctgatgggtgcgtgaatgatatggtgcttggtgaatggatgggtgagccgacgggtgtgtgaaccatacggtgcttgtgagtggatgggtgagccgatgggtgcctgaacgatacggtgcttggtgaatggacgggtgagccgacgggtgcgtgaacgatacggtgcttggtgagtggacgggtgagccgacgggtgcgtgaaccatacggtgcttgtgagtggacgggtgagccgacgggtgcgtgaacaatacggtgcttgtgagtggacgggtgagccgacgggtgcgtgaacgatacggtgcttgtgagtggacgggtgagccgacgggtgcgtgaacgatacggtgcttgtgagtggacgggtgagccgacgggtgcgtgaacgatacggtgcttgtgagtggacgggtgagccgacaggtgcgtgaaccatacggtgcttgtgagtggacgggtgagccgacgggtgcatgaatgaatatgggagaacacagggtggccgtcgtcatggggctgggtgaggctcgtctcagggtaagcagcttcaccagggagggttgtggtcttgctcagtcctggaggtggct

SEQ ID NO: 18283 - DNA, 1107 bp, Artificial sequence
  DNA replication origin
ggcacacagtggcatcaggaatgttttctgcttgccatcagctggtggatgtgcaaagcaatcagaagttctcactggcagcctcagagctggcttaggagtgtctgacttgctgatttttagggttttccgcagagacacaggcactataggagctcttcccaggacggcccacagaaccaggtgcacagcagagcagccagatgaccggcaggtgtgccctgcagctgcgtctgtcctggtcctgccactcacgctgcagaaatcatagcctgagacatgttttatgacaagttctggaaaattgcagtgaagcattttgttctagtcagggcagcgtatcacaacccctctgtgtgcagtggagatggcgtcttcaggaagggcacggcagcatggggagggctggggcgggcacagtagcacagggagggtgggggagagcatggtggcacggggagggctggggagggcacggctgcagggggagggtcagggagggcatggcggcacggggagggcatggcagcacagagagggtgggggagcgcatggtgcagggggaggattggggagggcatggtggcacaggaagggcatggcagcacagagagggtgggggaaggcatggtgtcttggggagggtcgggaagagcatggtggtacaggaagggcacggcaacacagggagggtgggggagggcatggtggcacaggaagggcatgacagcacagagaggttaggggagggcatggtggcttggggagggtcaggaagggcacggtggtacaggaagggcacagcagcacagggagtgtcagggagggtatggtggcacagggagggccagtggggagctgctctcccaggcccagtgggtgacacgcccaggccacagcagcaaatgggccttctggagtccaggcctggtggaggagccgggctagaattctgcaggctcatggctcacccgacagccagactaactccagacacacgaaccaggccacggggaccaaccagccacacctgtgccccagaggtctgaagggcacaagtgaccagcagaactgctcagcagcctggagcagctcaaacgccaacca

SEQ ID NO: 18284 - DNA, 1263 bp, Artificial sequence
  DNA replication origin
atctcttgtttgctgctattgaataaaagagagggaggaaaaaatactgatagtaaggccgccactcctactattctacttgcgaataaagaaagaataggccaggcatggtggctcacgcctgtaatcccagcactttgggaggctgaggcgggcggatcacgaggtcaggagattgagaacatcctggccaacatggtgaaaccccatctctactaaaaatacaaaaattagccgggcgtggtggcacacacctgtagtcccagctactcaggaggctgagacaggagaatcgcttgaacccgggaggtggagcttgcagtgagcaaagatcgcgccactgcactccagcctggcgacagagcaagactccgtctcaaaataaataaataaataaaaaagaatattttacccaggagttttatttgacttcggaaaaggagaacatgcaaacacagccttgagtgtcactcagctgccaggtttctcaggatcaaatacagaaggtcaggcggggggtagtgcctggtgtcaacgctcatgcagtcatgatggacggcagaggggactccagaagacgctggcaaggacgggagagggcacgtcagcaatgcagccaccccgcccgactctaagaaaaagctgttgctgaagctcagggcagagggtcccgtgaggcgtgcgtgccctcactgatgctgcagccccagaaggcatggtcacgttgtctcggtctggcagccgctctggcctgcagcagcccccacagtgtgatctgctagaggtccgcaatcgtcccaggtgttagcttcaaaccccagacaggtggaagctccttgctgagggggcctggtttccacagcccctgtgcactgtacagccctccctcgggtcgtcgggcacacagtggcatcaggaatgttttctgcttgccatcagctggtggatgtgcaaagcaatcagaagttctcactggcagcctcagagctggcttaggagtgtctgacttgctgatttttagggttttccgcagagacacaggcactataggagctcttcccaggacggcccacagaaccaggtgcacagcagagcagccagatgaccggcaggtgtgccctgcagctgcgtctgtcctggtcctgccactcacgctgcagaaatcatagcctgagacatgttttatgacaagttctggaaaattgcagtgaagcattttgttctagtcagggcagcgtatcacaacccctctgtgtgcagtgg

SEQ ID NO: 18285 - DNA, 1142 bp, Artificial sequence
  DNA replication origin
ggaaactgaggtgtgtctccacccagcccagtgcctccacccagcccagtgtccccacccagcccagtgcccccacccagcccagtgtccccacccagcccagtgcccccacccagcccagtgcccccacccagcccagtgtccccacccagcccagtgtccccacccagcccagtgcctccacccagcccagtgcccccacccagcccagtgtctccacccagcccagtgcctccacccaacccagtgcccccacccagcccagtgcccccacccagcccagtgtccctacccagcccagggcccccacccagcccactgtccccacccagcccagggcccccacccagcccagtgtctccacccagcccagtgtctccacccagcccagtgtccctacccagcccagtgccaccacccagcccagtgcccccacccagcccagtgccaccacccagcccagtgccatggctcctccacgtggagaggaaggtctggctgcccaccagtttaagctcctgtgggtgggtccttctggctgttgttgccactgctgccaccacagaattacttagggattaggacgtgagcgaatatatacatatatacatatttgtaatgggaaatttctgagtgttaggagacccctttctaatgactcaacccaaaacttgagggcatctgtggctgtctgtatccataccctgtagtctagattttaggctgtattgagtctaggctggatgacgctgaaggaaaacatggtaaactcactgcccgttcatgatatttaaaattctgttcttcttcccaatgtgcctgttactatttactgttcagagacttccattcgctgctccatacgtcatattcaggttgtttaatagctgctgcatttagtgggaaagacaggaaggagagttcctttagaacaggaaccgggattcgacacccttcactctcacatccaatcacagctgccgttttaatacgtcacatgaaatgtggaaactccacagtcacataggtcagtatttctcccgcccacattctttatggtatcgttgttagacgtattttatttacacctattatgaactccacaaggtaatgttgtagtatttgctttaaacagtcacatg

SEQ ID NO: 18286 - DNA, 1134 bp, Artificial sequence
  DNA replication origin
agtgagtttaccatgttttccttcagcgtcatccagcctagactcaatacagcctaaaatctagactacagggtatggatacagacagccacagatgccctcaagttttgggttgagtcattagaaaggggtctcctaacactcagaaatttcccattacaaatatgtatatatgtatatattcgctcacgtcctaatccctaagtaattctgtggtggcagcagtggcaacaacagccagaaggacccacccacaggagcttaaactggtgggcagccagaccttcctctccacgtggaggagccatggcactgggctgggtggtggcactgggctgggtgggggcactgggctgggtggtggcactgggctgggtagggacactgggctgggtggagacactgggctgggtggagacactgggctgggtgggggccctgggctgggtggggacagtgggctgggtgggggccctgggctgggtagggacactgggctgggtgggggcactgggctgggtgggggcactgggttgggtggaggcactgggctgggtggagacactgggctgggtgggggcactgggctgggtggaggcactgggctgggtggggacactgggctgggtggggacactgggctgggtgggggcactgggctgggtgggggcactgggctgggtggggacactgggctgggtgggggcactgggctgggtggggacactgggctgggtggaggcactgggctgggtggagacacacctcagtttcctttcttctcttctctggttggctggccctggatgcaggagcagtggcatgaggtggacagcaggacaaggtgaagaaagttccagttttctgactggaggattgaaatggggagctccagcacatttgaaaagtgccaggacatcatggaggaaaaggagctcagaacaccaggacattgtggaggaaaaggagctcagaacaccaggacatcgtggaggaaaaggagctcagaacaccaaatccatgaagctgtttatgaacgtctgggctcacctctgaactatgcatgcatagatctgacttgaaacatatgtacaattttcataagacttaaacaagacctcaaatactgtacca

SEQ ID NO: 18287 - DNA, 1338 bp, Artificial sequence
  DNA replication origin
cagccccagggcaggcccttggcttttcttcccatcctggcaacaagaaggggatgtggctgaaaacaccccacaccaccatcaacctcacgtcgacttggaaaatgccggcgactgcagggattggtatcagagcccacgccagggggaggcctgtggggtcggggtttccttggtgtcacagcccacgccggggggaggcctgtggggtcggggtttccttggtgtcacagcccacgccggggggaggcctgtggggtcggggtttccttggtgtcacagcccacgccggggggaggcctgtggggtcggggtttccttggtgtcacagcccacgccggggggaggcctgtggggtcggggtttccttggtgtcacagcccacgccggggggaggcctgtggggtcggggtttccttggtgtcacagcccacgccggggggaggcctgtggggtcggggtttccttggtgtcacagcccacgccggggggaggcctgtggggtcggggtttccttggtgtcacagcccacgccggggaaggaggcctgtggggtcggggtttccttggggtcacagcccacgccggggggaggcctgtggggtcggggtttccttgggatcacagcccacgccaggggaggcctgtggggtcggggtttccttggggtcacagcccacgccggggggaggcctgtggggtcggggtttccttggggtcacagcccacgccgggggaggcctgtagggtcggggtttccttgggatcacagcacacgctggggaaggaggcctgtggggttggggtttccttggtgtcacagcacacgctggggaaggaggcacctggggttggggtttcccactgacacgtttctgtgtcacagatttgcacacacgggaatgctgggcgttccggttctgcagagcacgcagtgggcacagcctgaaaatcacctttctaaaacgggcatggttttcctgacctcccacgtcctctgcagcggcaggtaggggacagcgggtctctgagtgcatccctggctgccggccaggcctcgcaaggggcgtagatggcttagattggctggactggacctgacttataaataatccaggagctgtgtgatgcctcccgggccggggctgccatgggccttgcctagggaagatctgcgggaggcttggccgagtgagtttgctttgatttctcagagagtcagatgggcctcttgggcttcaggacgcctggtgacagctcgtgccggtgtcctgaactgaccgctcctgcctcggaatcaaatcgggggcagaaaagccaaatccaggccaggggtga

SEQ ID NO: 18288 - DNA, 1415 bp, Artificial sequence
  DNA replication origin
actgagcgagaatttagagaaggcctcatttccagcaggcggaacgtggagggacgcagcctgtgtggtgagaccaaggcctcccacacaggcctgtgggcaaacagccctacaacaggacaggatcctcaactagggccccagcccatgggtggctccacagggaacagggcgcaggtgtacaatagagaggctatggggtcaggacccaggtctatagtgcaaggtctatggggtcaggacccaggtctacagtgcggggtctatggggtcaggacccaggtctacagtgcggggtctatggggtcaggacccaggtctacagtgcggggtctatggggtcaggacccaggtctacagtgcggggtctatggggtcaggacccaggtctacagtgcggggtctatggggtcaggacccaggtctacagtgcggggtctatggggtcaggacccaggtctacagtgcggggtctatggggtcgggacccaggtctacagtgcggggtctatggggttgggacccaggtctacagtgcggggtctatggggacgggacccaggtctacagtgcggggtctatggggaggggacccgggtctacactgcagggtaatgtctacagtgcagggtctatggggacgggacccaggtctacagtgcggggtctatggggaggggacccgggtctacactgcagggtaatgaggacgggaatcaggtctacagtgcagggtctgcggggacgggaatcaggtctacagtgcagggtctatggggaggggaatcatgtctacagtgcagggtaatgaggacgggaatcatgtctacactgcagggtaatgaggacgggaatcaggtctacagtgcagggtctgtggggacgggaatcaggtctacagtgcagggtctgtggggacgggacctaggtctacagtgcagggtctatggggaggggaatcatgtctacagtgcagggtctgtggggacgggacctgggtcttcagtgcagggtctgtggggacaggacccaggtctatagtgcaggatctatgaggacaggacccgggtctacagtgcagggtctgtagggacaggaatcaggtctacagtgcagggtctgtggggatgggacccaggtctacactgcagggtaatgaggacgggaatcaggtctacagagcagggtctgcggggacaggaatcaggtctacagtgcagggtctatggggaggggaatcatgtctacagtgcagggtaatgaggacgggaatcatgtctacactgcagggtaatgaggacaggaatcaggtctacagtgcagggtctgtggggacgggaatcaggtctacagtgcaggctctgtggggacgagacccaggtctatagtgcaggatctatgaggacaggacccgg

SEQ ID NO: 18289 - DNA, 995 bp, Artificial sequence
  DNA replication origin
cttccgggtccattcctcgcccggtgtccagacgctgtggacaggtgccagaggcagctccgcagagggcgctccgcagaggccgccaggccgcgtccacagctcagccagtgcaggttcaagtcccggcttgcgcgcccctcccatccctgcgtggggcggcctcaccacgcacacctgccgccgtctgtgtcggcctctccctccatccctgcttgcgccctggatccccgtccgcctttttccgcgcagcagcccgggggtcctttgcatccccgctcaaaagcagggaggcacccacgcacctcgctcagagcagagaccagaatccaggcggctggccggaggttgggccccgcgccctcggcgtcccctgcaccctccaggccccccacgcgccctcgacctccagccgcccctccgaggctctggagctgcctcataggaagtaaacctagagggaaaggtcaggagggatgggaagagcccccggccacctgggagacgggggagggcgggaaagaaaccatcaacatagagcaagcccagggtggagctcacgtgggttcgtggtgttgacactgcaagctggagaggcggggagagaggagcccgggagaggagaggcagggttcctcttttagccagaggagcccaaagtgacaggaggacgtggccgcagccagggttcaggggctccagccacgccgcacgccggggatgtcaccaacacccacttaggccatgggaagccatcagcttccagattctgaacacagagttttatggtacccttgacaagagcagttgtaaagaagcatttaagtaagcattttccccgggtgaggagaatcggcacagcttgaggtgtgagacactggtacttctgtgcaaaacccgccctgtggacagtgggtttgtggtatcctaaggctgggaaggcatctcggaggttttctccttgctgcaaaaacgcctgtcactgcccaggatac

SEQ ID NO: 18290 - DNA, 1240 bp, Artificial sequence
  DNA replication origin
tccagagcctcggaggggcggctggaggtcgagggcgcgtggggggcctggagggtgcaggggacgccgagggcgcggggcccaacctccggccagccgcctggattctggtctctgctctgagcgaggtgcgtgggtgcctccctgcttttgagcggggatgcaaaggacccccgggctgctgcgcggaaaaaggcggacggggatccagggcgcaagcagggatggagggagaggccgacacagacggcggcaggtgtgcgtggtgaggccgccccacgcagggatgggaggggcgcgcaagccgggacttgaacctgcactggctgagctgtggacgcggcctggcggcctctgcggagcgccctctgcggagctgcctctggcacctgtccacagcgtctggacaccgggcgaggaatggacccggaagcgtcccctgcccagggggtgctgcaggtacccaggggaagagcattcacgggtgccaggcccaaggggctcacgccagaagtagaccaattagacgactacaaacggtgctcagtgctgcagaagcagccggggacaggcggctgtcggagagggcgccaggcatctctgggaagggagaaacaaattccacgggaaggggccagcaggtcccaggcagcatgggcagagagtgtggggtcagggatgaagttgcaggtgggttggggagtgacttgcaggcgcgcgtctaaaccttatttcttcctgcaggaaaccattggagcgtttaaagcaagggaacagggcgcgctcactaccacaaaagaaccctcgggctaggtggagaacggggcagggagactggcgacgagatggccgggctggactctcggaaggatctggggaagaaccaagactggcccaggatttgggcttgcctgtctgcgtcggggctgcccgtggagatggggttccggtgaggagcaggaggatccaggccggagggtgggtggtcccatctgaaatgtggactgactgcaggtggccacgccaaggacacagtgagacatgggctggaggctgagcaggctggggctgaggagctcgaatgtactgagtggacgtattagttaccccttctttcttaatggccccaattttgttcagggacccctctctccagtcaccatgcaccttgggggaggtggccccactcctgagcccaggatggacctcactgacctgaaagccccttccccgtgacggc

SEQ ID NO: 18291 - DNA, 1277 bp, Artificial sequence
  DNA replication origin
cgcctgtcactgcgccgccatcttcccggaggacgcggccgcggcgggcagggccgggcctgggccggggccggggccggggcaggggaaggccggggccgggttgaggaggaccggggctagggcacgggaagggccagggctgaggaggaccggggtcagggccaggaaaaagccggggctgaggaggaccggggccggggcaggggaaaactggggctgaggatggccgaggccggggcaggggaaggccggggccggggcttaggaggacccgttgaggcgaggcgggagtcgacggagctgggtgcccggaagaccgggccggggtcagggtcgggaggccggggttgggcgaaggccggcgaggacgggggtcgggcagggcctgggcggggccggggtcgcgggccgcgagcgcccccaggccgggcgggcgccggcacccgcagtgcggcgccagccttgccactcgctcctcggtcccgccggagcccggataggcggccgtgcgggtgcggggcgggacgggtcatcagggcatcgcattcctttagaaccaggaagttgggatcctgttgctcggtgtgtgtttggaacgctcctgttttcctgttgatagacttgagcagaggtggatctgaaggagttaaaaaaataaagtcagatgtgaagattgcctgtgttggtcttggggctgggatacatgggcggcagagaagccatcggaaagctgctgcacctgcctctcagggtgcgcttgggaacgtgaagagtctttccgtttcagtgccgttgtgcgtcgaaacttcatgcgaatgtaattttgcttttccccttatttttacgtaaaacgttcttaaaacttggctgagatgaaacttgagaaacctagctgtagaaaactacctcctatctggctttcgtttgagattctctaagtggatgcccaataacttgtcttaatagtaaattggaagtttgaagttttggataactgagaaaacaggaaggttttccttgacagggcagtggagtttgtaagtataaacagtatgcgtgaggcctttttctagagatgagagcaactccaaggtgaacattgaaggggacagacaagttattttccctttcgaaagtttttttctcttagtttcagttgtttgaatatttaaatgcacttgaaataggtgctgagttgtagtttgtgaagaccacagtggggaagagtggtgtcctcttttttcttggtggtcaggtggtgtgtgcagtgtgca

SEQ ID NO: 18292 - DNA, 1744 bp, Artificial sequence
  DNA replication origin
gaggtaggggagagggcgggcgcgagctggcggcggcggcggcggcggattcttcccctttcgggcccgaaaatgtctcaaccccgggactccagatccccaacgctccttcccgttcgcatgagaacacacagctcccacttccggggccctgcggaagtcccgcccccgcgcggacccgcgcctcgcgccctgaactcgcgcactcacccgccggtcccgcggactggcgctcagccccgggagagcctcacgtcatggtgttgcggcgcgctgattgggcgcacccgacgctcggcccgccccgccgccttcttggcctctccgcgcgtacaccctgctcgcggccttgcgattggcgcgtgcgcgcacatcgccccgccccgcgcacgccgcacgtccgccccgcccgccccgcccgccccgcccgccgtccccggcgcgaccggagcgcctgacgctggggggccgtgtgggccctgacttccggagggctgggccctggtcctccgccaccgcgtgcgccccttaaagacccctgcccgccgcccaggacggatggcgaccccggccctagcctgtccccagaccctggaccaaggccccggccctgccccgaacccctcatcccacccccaggacccaggccccgaccctggccacccaggacacgccctggcccttccccgaactcccaccccacagctgggatcaaggtcccggccctgcccggaacacctcaccccacacccgggacccaggccccggccctgccccgaactcccaccccacacccgggaccaaggccccggccctgccccgaacccctcaccccacccccgggaccaaggccccggccctgcccagaactcccaccccacacccgggaccaaggccccggccctgcccagaactcccaccccacacccgggaccaaggccccggccctgccccgaaggccccaccggggacccaggccccggccctgccccaaactcccaccccacacccgggaccaaggccccggccctgccccgaacgccccacccgggacccaggccccggccctgccccaaactcccaccccacacccgggaccaaggccccggcactgccccgaacgccccaccagggacccaggccccagccctgtcccgaactcccgccccacacctgagacgaaggtcccggccccgaagtcccaaccccacacccgggaccaaggccccggcactgccccgaacccccgccccacacccctaaccaaggcctcggctcagccccggaatccccaaccccacacctgggatcaaggccccggcccttccccaaacccccaacccacacccgggaccaaaaggccccggccccacgtttcctagaggcgctgggttcgggcccacgttgcaacgagtcagatgctcttggtagctcagggaggtgttcacactcctgccgtttccgtgaggatggtgacgactccgaactatagcagcatactctacctacccctgatcagtttatggaagaaaaggaaaccaaacaaagtatgttgcgtttcccttaagcttgctgcctgattttctggtttctgctctgattggctacatatacacatattatcaattattccaaattttaggtttgttcccccattaaaacggcttttcagggataccatattcatggttaaccgtgtacctgtgcttacaactgcttttttaattttgttttttgatacagg

SEQ ID NO: 18293 - DNA, 1785 bp, Artificial sequence
  DNA replication origin
ctgttgtacatcctatgggtttggacaaatgtatgatgacatggattcaccactgcagtatcctacagaatcattttactggcctagtaatcctctgtgctccccctctcatccctccccctctgtcaacccctggcaatcactcatcttattactgatcttattatccccagttccgccttttccaaaacgttctgtcgttggactcgtagagaatgtggccttttcagattggcttcttccgcttagtgacatgcattcaaggttcctccatgccttttcatggcttgatcgctcattctttctattgttgaacaatcttgtttccaacaactgcaagacatttcacaatgaagaatgcccatgtgtgggtgattcatgaggggacacgaggaggtgggattgacgaggaggtgggattgacgaggaggtgggattgaggaggaggtgggattgaggaggaggtggattgacgaggaggtggattgacgaggaggtggattgacgaggaggtgggaatgacgaggaggtgggaatgacgaggaggtgggaatgacgaggaggtgggaatgacgaggaggtgggaatgacggggaggtggattgacggggaggtggattgacggggaggtgggattgacggggaggtggattgacggggaggtgggattgacggggaggtggattgacggggaggtggattgacggggaggtggattgacggggaggtgggattgacggggaggtggattgacggggaggtggattgacgggggggaggtgggattgacggggaggtggattgacggggaggtgggattgacggggaggtggattgacggggaggtggattgacggggaggtggattgacggggaggtggttgacggggaggtggattgatggggaggtggattgatggggaggtggattgacggggaggtggattgatggggaggtggattgatgaggaggtgggattgatgaggaggtgggattgacggggaggtgggattgatgaggaggtgggattgctgaaccagcaggaatgcctgctttacacctttcaccaacaaatgctgccaaatttcccttcccagcagttgcatcactaggggagaatacgcatatttccacacccctgcagcccagtacatctcacattttcaggaataaattttccaaacttctctgaaggtgtcctgggaccacaaactctatatccaaactcagccagcacccactgtcaaccacacctagtccacctgccctgccctgccatctccagggactcggcaaccaccagcccagggccgttgcctgtggggacctcaggcggagcgtccttcctctgcccagagactccactcttccaaatgccactccatcctggctgaagttgctcctcctgggctctttgtccttctggtctaatgcgttttgtttctttctgttctttcagaattaatgtttcatgttcaacctgaagtctctgataagtactttaagtccaagctggcatagtgggtgatgtgggcagcaggcctgtgactccacgtggacccccatgaacgttgtcagtgtgtctacgcgaagctgtaccatttacaggagaaacactgggtggtgagacttggatgaggtcagcagagaaagcggctaaacggattcacccgtcccttcaggtgactgtggagctatgaagacctgaggcaggtacttttgtgctaacaaagaaggatgtttatgacataattttaggggaagatataaatcagaggtgtggg

SEQ ID NO: 18294 - DNA, 2247 bp, Artificial sequence
  DNA replication origin
tcccggcagacacacacaaggaactcagtcctgagacactgatttcgtgccacatcccacgtgtccgttctaatgtcaccccaaatacaacctcactggctacaaataagacaaaaatgaaaactaaaacacacacgtttatcaccccccaatgaggcaacccggccaggagcccagcaggcagatgtgcctgtacgagatgctggccagcagtgcagagggtgagacgggggccaggcctcgtggaaggggatggcacgggcacagctgtgcggaggagggaagtctcaaggcttcttgcgcccaagagcgcgcactgcagaggggaagaggctgggaaggcaggcggccaccgcggggacagtgagggcacgggctggactggggccccagcagaggtgacagcagatgccctgaggccactcctccagcaccaacgaaattgagattgttgcccccagaatctgctatcccagaatctgctatggaggcacagggagcacagagaccacgagactgaaaatgtgaactcaatgacggagggcctgtgggaaccaaggagtggcaacatgggacatgcagatggcaagtattgtataaaaagaatgttccagagagctcagctgagagaagaaggcaggacagcaagtattgtataaaaagcatgttccagagagctcagctgagagcagaaggcaggacagcaagtattgtataagcatgttagcatgtttcagacagctcagctgagagaagaaggcaggatagcaactaatggaggacacggtctaaggatgttttcgttttttaaaaagatgagtaaaacttgtggacttttatatgctaagaaaaagcaagtagggaggggattgaggcaggaaaaagatgtgacacagcggagcccccaaggaagagggtccagcacagcagagtccattaagggcctggcggagatacagggtggggaaggtggtgcagggggcacagtcaggatggagggatgcaggagaatgaaggggcccagcatctccaccagagtctcggggtggggggaagaggtgcaggaggcacagtcaggatggagggatgcaggagaatgaagggcccagcacagcagagcccatccagggcctggcggagacacagggtgggggggaaggtggtgcaggaggcacagtcaggatggaggggtgcaggagaatgaagaggcccagcatctccaccagagtctcggggtggggaaggtggtgtagggggcagagtcaggatggagggatgcaggagaatgaaggggcccagcatctccaccagtgtcgggacagggaagaggtgcaggaggcagagtcaggatggaggggtgcaggataacgaaggggcccagcatctccaccagagtgtccggggtgggtgggtggaggcggcgggaagggggcaggccagcatagcagagcccagccagggccagtatctccaccagagtctcagggtggggaagtggtacagggggcagagtcaggatggaggggtgcagaatgaagcggacaggcccagctgagccgaagccatgctgctatcttccagcaatactactataataaaaaggaaaacaatccgcaatttaaaaagtgacacaaaccttcatgatggctggatcaatataatcagctatattatggccttcccagatttctggtatcttatcatgtttttcagacaaattcattaaatcccagtactctaaagttaaaaaaaaggtggttacgtttacagcagtttttaatatcttcaagtactacgtgcgcaaaatgagttgtgactgacggcaaatcaacgactccactgcagaagagagcacgacgtgcaattccacatgcagcagcatcaacacatcagcctcattcaacacccacacgtggagaaagctacagaaatcaccccaccatcccaaaacaacaggaaacaacacatcagcctcattcaacacccacacgtggagaaagctacagaaatcaccccaccatcccaaaacaacaggaaacaacacatcagcctcattcaacacccacacgtggagaaagctacagaaatcaccccaccatcccaaaacaacaggaaacaatggaagaacccccactgagtgctatcagcatgcacctttctttgagacagagtctcactctgtcgtccaggctggagggcagaggtacaatttctgcccactgcagccttgtcctcctagggtcaagt

SEQ ID NO: 18295 - DNA, 979 bp, Artificial sequence
  DNA replication origin
tgacccccttaaaggcgccagagcccgcggtcacggctcaggttcccggtgcttcgcgcgtctgccgttgtcacaggccagggaggtggcaccaccaggcgaagcttggcgagattgtgtcgtcaagcgcgtacgggcgccaattggccgggcgatgtggcgtggactggcgctggcgcgagcgattggctgcgcggcccgggggcggggccagtgggcggtgcgcgccgcagactgtgctcaaagcgggcgccatccgggaccggcggttgtctgtggccggaggctgatcaggtactgtggacgggcggcggagttcgggagacaggggcagggcggcatcggggagctgcgggacggggcggggaggaggcccgaggtctgagccacccgtgaggtctcggcgcggaggcctggacagctgggggtggcggcgttggtctcccgaactggagggaggccgggccttcccgggctgtggtgggcgcccgcgccccgtggaaggcggaggcgtgagtcggggcgtcagagacgttgccattctttgtcagcggaaaagatcgtcgtctgcgcacagtcacctgaggtttaggaactcgtggaactggaaaccgagtcgcaggagactaagagttgcgagtctccccttagagaattcagaaacaagcgtagacagcatcgtcagaaacacgagcgtgacgacaccggcctccccgtgccgagtccacgcgtgtgacgcgggtgcatacacctgcgtccgtgcaagagggtgacagcaacacactcaaggcgcttctcctgggaatggagcaggagaagagatggggagcatcgcatagatggaactagacctttttcttgggttggatgatgtgttcccgcgtctactacatggtattctttaaacgcataaatagacgtattcattttatcttgtgattatgcagcttagctttaaaatctgaattctgaaaatcct

SEQ ID NO: 18296 - DNA, 1935 bp, Artificial sequence
  DNA replication origin
ctagattctaagaaaaaagcggcccaagtcccacctttcgcagggaacagctgattctgtttttccttcccagccaatggtgatcaaaagcttcaggacgctggtgagtcactgcggaggagccgaacactgaccgcgccgtccccgccaggctcccgcgcggccggcaccgcggccctgagcgcaggcggccccgggtctcaggcctcaggcggaccgcgccccgggctcgcagccctcccgccccggctgccgggctacggggcagatggactcggagcgccccgccggtgagtagctacgacccccgaggccacctcccgcgaaccgctcggcggcaggagtacgtgaccaagggtgggggcgttggcccagcagccgaaggggtcttcagcgcgcccagacccctcggggctgcggggcggaagccggggcgtgacttccggcgccgccgggtgtggggcggaggtgtggggcggcttccggagaacccagcggcgcgggactggggcgggacttccggcgacaccggaagtgcattagcgccaggttggggttgtggggtcgcgtcagtgcggagacagcggtgtcctgcgcgtcttcgggtcagtacggggggccgcgtcgtagggactcactggcggtgcgcgacctgggctggctccgggggtggcgggcgcagctgctgtgacaggtgagtgccgccatcttcctacctgtcaggcgccgagtcgttccccggatgccccgaagaggagtcgggacactgcagggctcaagggggtgcaggggcagtcggggcatagtggcggatggggtgcaggtgggcttggaatgcagagggtccgtggtggtgcaggaggggtcgggtccctggaggacccgtggcggtgcaggaagggccgtggtgcagaagggttcagggtgcaagagaagtcggggcgcaggagtagtccgtggcggtgccagagggaccagggtgcgggagggatgggggcccggggcggtgcagaagatgtcggagtccaggaagagtcggggcgctggaggggttgggggcagaagggttcggcccggggtctctccccgccccctttgcttcggcctgggcatcccggggaagtgcgtctccagggaagcacttgggaggcccttcagagaggagaatggcctttcttctctccaaagagtggggatggtcggcttcaagaagggtggtgagtgtggagtgacggatgctgaagtgattaacacagcgccatgatattgttccccttttgaagacttccttttccttcccttccccctgaaagcagccaccgctggagggaaacattttaagacagctgttcaccggaataacacaagagcaacaataataatgtactcatttactaaaccaagttgaataaatacatttttccaggttgtgagtgaaaatagcttaaggtctgccaggtttttagagattttgtcatttaacttaaacgctaaaacattcgtcccttgaagcggataccattatagaaaagtgttaattgcttggaagtttcatttattgaagttcaagtgtttttctcttaaattcagtatgttggcctgtgagttacggtcataaaagtattgcaggaattatttacctctgaatgagaaagctcaagatagttatatctccaggaactttcttcgtcttctgaacttcccccaaccccagcagacacacacactgttctggttactttcctgatcaaattcgagtctttcaaaatagcttttgatatgtcccaggagttaaacacggtatgtaaatatgaactcaccaatgtggaacaaatggagtgatctgttatcccctgggtttagacgctgcctttctattaatactgctcacaggagacagagtagggactcgtgtgcactggccacgtctcaaca

SEQ ID NO: 18297 - DNA, 1244 bp, Artificial sequence
  DNA replication origin
acaggtcaggccaaggggaagggagcccagtgcacacccccaggctctgcggtccgaatgcttgtgttcccaaaaattcacatggaatcctcacctcccagagtgctccccagccccttccaccatgggaggacgcggcacagggtgccgttaccacctgggaagcacagcctcaccagacgcggaaactgctggagcagagaccttggcttccagcctccagcgccaagaggagcggattcctgtcgtgggccagcgtgttctgcgtggtggccgggatggaccgagactgggtagatgccatcctgactgctgacgtttgggacgtgagacatctgggggcatggggcagcccgctgcggccaggtggggtcatggggcagcccactggggtcaggtggaggtcacggggcagcccgctggggtcaggtggggtcacggggcagcccgttggggtcaggtgggtgtcacggggcagcccgctggggtcaggtggttcacggggcagctgggctcaggtggggtgggtgggatattcagccgcttccgattattttcagtaaattacttccaggccacacatatctcatttctcttctgaaaaacccgtctcaaaaactccctttctcttgatatttctctggccaagtctaccctgcaacacgctggtaaaatgtaaaattccttcgcacgagagtgaagaggatgatccccaggtgcgtctctccattcccgggtcctaacgattcctccttaagccggctacctgcgcgggggccacgctctcccactgggaggatggtttctgggacatgcggcgtctcctccttgtgcctgtgcgtctgagagaactggggcgtctccttgaactgggacgtctcctcctcgtgcctgtgtggtctgagagaactggggcgtctcctccaactggggcgtctcctcctcgtgcctgtgcgtctgagagaactgcggggtctcctcctcgtgcctgtgtggtctgagagaactgcggggtctcctcctcgtgcctgtgcggtctgagagaactgcggtggccccttgtgggcctcttggttctggggacagaggacacttttcactcagcccggggacctttggttctttctgtgaagatggcgcccatgagatgacgccttgtgactcaggtacctcagccctgcgcctccgtctctgcgtctctgtattgggttggtggcgtccacactgtctgcgtcgttgctgag

SEQ ID NO: 18298 - DNA, 793 bp, Artificial sequence
  DNA replication origin
gggtaaacaccgaagaaggaaatgcaggcatgttcgttcagcgcccactccgatggggcagaggtggggctgctcagctccagcttcacagctggtgggagttttgcaacaggcaaatcattcaccatcagagaggctgggaactctcccgccccacctgggtcatggctggatgcagaaggaaagccgtttcgccacggttctccactcccacctgtgctggtgacggagcccaggccttcctacagctcttttcctccttttaatcacacacaagctgcccactcaggctacgtcaaacccacagtccactgtgaggtatggccatgagcagcactggcaaatccacagaatcacaggtgtgtagacagatagatgtgggcgaacagcagtgggaaaaattggcttgttaaaagatcatggtggggcccagtgtggtggctctcgcctgtaatcccagctctttggggggcccaggcgggtggatcacctgaaagcaggggagtaacaccaggacacagggagtaaacaccgggaggcagaggggagtaaacaccgggagggagaggggagtaaacaccgggaggcagaggggagtaaacaccgggaggcagaggggagtaaacaccgggaggcagaggggagtaaacaccgggaggcaggggggagtaaacaccgggagggagaggggagtaaacaccgggaggcagaggggagtaaacaccgggagggagaggggagtaaacaccgggagacagagggtaaacaccgaagaaggaaatgcaggcatgtt

SEQ ID NO: 18299 - DNA, 778 bp, Artificial sequence
  DNA replication origin
gaggggagtaaacaccgggaggcaggggggagtaaacaccgggagggagaggggagtaaacaccgggaggcagaggggagtaaacaccgggagggagaggggagtaaacaccgggagggagaggggagtaaacaccgggaggcagggggggagtaaacaccgggaggcagaggggagtaaacaccgggaggcagaggggagtaaacaccgggagggagaggggagtaaacaccgggagggagaggggagtaaacaccgggagggagaggggagtaaacaccgggaggcagaggggagtaaacaccgggagggagaggggagtaaacaccgggagacagagggtaaacaccgaagaaggaaatgcaggcatgttcgttcagcgcccactccgatggggcagaggtggggctgctcagctccagcttcacagctggtgggagttttgcaacaggcaaatcattcaccatcagagaggctgggaactctcccgccccacctgggtcatggctggaggcaggggggagtaaacaccgggaggcagagggggagtaaacaccgggaggcagaggggagtgaacaccgggaggcaggggggagtgaacaccgggaggcagaggggagtaaacaccgggagggagaggggagtaaacaccgggaggcagaggggagtaaacaccgggagggagaggggagtaaacaccgggagacagagggtaaacaccgaagaaggaaatgcaggcatgttcgttcagcgcccactccgatggggcagaggtgg

SEQ ID NO: 18300 - DNA, 1032 bp, Artificial sequence
  DNA replication origin
accgggaggcagaggggagtaaacaccgggaggcaggggggagtgaacaccgggaggcagaggggagtaaacaccgggaggcagaggggagtaaacaccgggaggcagaggggagtgaacaccgggaggcagaggggagtaaacaccgggagggagaggggagtaaacaccgggagggagaggggagtaaacaccgggaggcagaggggagtaaacaccgggagggagaggggagtaaacaccgggaggcaggggggagtaaacaccgggagggagaggggagtaaacaccgggaggcaggggggagtaaacaccgggagggcagaggggagtaaacaccgggaggcagaggggagtaaacaccggagggagaggggagttaacacccggaggcaggggggagttaacacccggagggagaggggagttaacacccggaggcaggggggagttaacaaccggaggcaggggggagttaaccaccggaggcaagagggaattaaccaccggaggcagaggggagtaaacaccgggaggcagaggggagtgaacaccgggaggcagaggggagtaaacaccgggaggcagaggggagtaaacaccgggagggagaggggagtaaacaccgggaggcagaggggagtaaacaccgggaggcaggggggagtaaacaccgggagggagaggggagtaaacaccgggaggcagaggggagtaaacaccgggagggagaggggagtaaacaccgggagggagaggggagtaaacaccgggaggcagggggggagtaaacaccgggaggcagaggggagtaaacaccgggaggcagaggggagtaaacaccgggagggagaggggagtaaacaccgggagggagaggggagtaaacaccgggagggagaggggagtaaacaccgggaggcagaggggagtaaacaccgggagggagaggggagtaaacaccgggagacagagggtaaacaccgaagaaggaaatgcaggcatgttcgttcagcgcccactccgatgggg

SEQ ID NO: 18301 - DNA, 3866 bp, Artificial sequence
  DNA replication origin
cgttgtcaaactcctaacctcaagtggtcaccctatctcggcctcccaaagtgctgagattacaggcatgagccactgtgctcagcccacactcagctcattcttatctgagcctctgagcagggagccacaggttgaacccatccctcagttccctgaggcctgcggggtgcagcaggagttggatatgggggaacagaaatatctcagaatgtagggaaggatttctcctaaatgtccacctgctcaactgggactatcaccaagatccctcactcttgtttgtgtcagagaaggcaactggaccaatatttaccaggagctggttacatgcttggtgctgtgccaccagctgggggggtccacagacaggtgcacccgacgcctgccctgcatggggaaccagcacaggggagggggagtccagggcagccacgtggctgacaggccctgtgccggggcccaggcttgggatacatttgccaagggtcctgggggaggcagccggggcagtgggggatggtggctgtgggcagagtgcaggcacagaggcaggaagactgctggatgccgcaaggacttcctgtggagaaaatgtctgttctgttgcctgtgtgatctcagggccccacagaacacaatccatcacccatggggcagaacgtgtgaaaacagcaagaccggcagaaggtagatggccaggaagcaggggagtaaacaccaggacacagggagtaaacaccgggaggcagaggggagtaaacaccgggagggagaggggagtaaacaccgggaggcagaggggagtaaacaccgggaggcagaggggagtaaacaccgggaggcagaggggagtaaacaccgggagggaggggggagtaaacaccgggaggcagaggggagtaaacaccgggaggcagagggggagtaaacaccgggagggagaggggagtaaacaccgggaggcagaggggagtaaacaccgggaggcagagggggagtaaacaccgggaggcagaggggagtaaacaccgggagggaggggggagtaaacaccgggaggcagaggggagtaaacaccgggaggcagaggggagtgaacaccgggaggcagaggggagtaaacaccgggaggcagaggggagtgaacaccgggagggagaggggagtgaacaccgggagggagaggggagtaaacaccgggagggagaggggagtaaacaccgggaggcaggggggagtaaacaccgggagggagaggggagtaaacaccgggaggcagaggggagtaaacaccgggagggaggggggagtaaacaccgggaggcagaggggagtgaacaccgggagggaggggggagtaaacaccgggaggcagaggggagtaagcaccgggaggcagaggggagtaaacaccgggagggagaggggagtaaacaccgggagggagaggggagtaaacaccgggaggcagaggggagtaaacaccgggagggaggggggagtaaacaccgggaggcagaggggagtgaacaccgggaggcagaggggagtaaacaccgggaggcagaggggagtgaacaccgggaggcagaggggagtaaacaccgggaggcagaggggagtgaacaccgggaggcagaggggagtaaacaccgggagggagaggggagtaaacaccgggaggcaggggggagtaaacaccgggagggagagggggagtaaacaccgggaggcagaggggagtaaacaccgggagggagaggggagtaaacaccgggaggcagaggggagtaaacaccgggagggagaggggagtaaacaccgggaggcaggggggagtaaacaccgggagggagagggagaggggagtaaactccgggaggcaggggggagtaaacaccgggagggagaggggagtaaacaccgggagggagaggggagtaaacaccgggaggcagaggggagtaaacaccgggaggcagaggggagtaaacaccgggaggcagaggggagtgaacaccgggaggcagaggggagtaaacaccgggagggagaggggagtgaacaccgggaggcagaggggagtaaacaccgggaggaagaggggagtaaacaccgggagggagaggggagtatcgccagagggagggagaggggagtaaacaccgggatgcagggagtaaacaccgggaggcagaggggagtaaacaccgggagggagaggggagtaaacaccgggaggcaggggggagtaaacaccgggagggagaggggagtaaacaccgggagggagaggggagtaaacaccgggaggcagaggggagtaaacaccgggaggcagaggggagtaaacaccgggatgcagggagtaaacaccgggaggcaggggggagtaaacaccgggagggagaggggagtaaacaccgggagacagaggggagtgaacaccgggaggcagaggggagtaaacaccgggaggcagaggggagtgaacaccgggagggagaggggagtgaacaccgggagggaggggggagtgaacaccgggaggcagaggggagtaaacaccgggagggagagggggagtgaacaccgggaggcagaggggagtaaacaccgggaggaagaggggagtaaacaccgggagggagaggggagtaaacaccgggagggagaggggagtaaacaccgggatgcagggagtaaacaccgggaggcagaggggagtaaacaccgggagggagaggggagtaaacaccgggaggcaggggggagtaaacaccgggagggagaggggagtaaacaccgggagggagaggggagtaaacaccgggaggcagaggggagtaaacaccgggaggcagaggggagtaaacaccgggatgcagggagtaaacaccgggaggcagaggggagtaaacaccgggagggagaggggagtaaacaccgggagggaggggggagtaaacaccgggagggagaggggagtaaacaccgggatgcagggagtaaacaccgggaggcagaggggagtaaacaccgggagggagaggggagtaaacaccgggaggcagggggggagtaaacaccgggaggcagaggggagtaaacaccgggaggcagaggggagtaaacaccgggagggagaggggagtaaacaccgggagggagaggggagtaaacaccgggagggagaggggagtaaacaccgggaggcagaggggagtaaacaccgggagggagaggggagtaaacaccgggaggcaggggggagtaaacaccgggagggagaggggagtaaacaccgggagggagaggggagtaaacaccgggaggcagaggggagtgaacaccgggagggagaggggagtaaacaccgggaggcaggggggagtaaacaccgggaggcaggggggagtaaacaccgggaggcagaggggagtaaacaccgggagggagatgggagtaaacaccgggaggcaggggggagtaaacaccgggaggcagaggggagtaaacaccgggaggcaggggggagtgaacaccgggaggcagaggggagtaaacaccgggaggcagaggggagtaaacaccgggaggcagaggggagtgaacaccgggaggcagaggggagtaaacaccgggagggagaggggagtaaacaccgggagggagaggggagtaaacaccgggaggcagaggggagtaaacaccgggagggagaggggagtaaacaccgggaggcaggggggagtaaacaccgggagggagaggggagtaaacaccgggaggcaggggggagtaaacaccgggagggcagaggggagtaaacaccgggaggcagaggggagtaaacaccggag

SEQ ID NO: 18302 - DNA, 862 bp, Artificial sequence
  DNA replication origin
tggcctgaggacaccccaacggggaacagaggtcgaatgacgtgtggctgctcggagcctgttctccagagaaagctccttgttcgaggaaggtttctgacaccagaaatcattctggtttcttgtcagtaactggaggggaaaatccaaagcctttgttgctaagatacataacatccttccatggagagagggaaggagagagagggagagggagggaaggagagagagagggagagggagggaaggagagagggaggggagagagagggacacaggaagagatgcagagggagggagggaaaggggggagaggagggagagaaagggaggaaaggagggaaggggggagagagaaagagaaagggacatagggaaggaaagagagagggagagggagggtaagaaggggggagagggggagagaaagacaggaatagaaaaaagagggagggagggagagagggacggggagggagagagggacggggggagagggacagagggagggaaggagggagggaaagagcagggagagaagggggaagagagaggggagggaggtgggggaagagggcagagagggagaaagagaagggagggaggaagggaaggagagagagatttcaaagcagttttactcttcatgtggtctgttttagccccgtcctcctctgcctttcttcttgtgtgtgtttaaaagctattaatcagttttagaaagcaaatctctgcctctgttgtgagcatctcgatttttcttttgcattttcagggcattctcgctggaaaggctcagtcatgctggacaaactattataccagtggaagtctgtccagtttctgataaaaccaaaactaa

SEQ ID NO: 18303 - DNA, 867 bp, Artificial sequence
  DNA replication origin
aggcgctgggcagtgaggaggtgctgtgccgtggggaggcgctgaactgtgaggaggcgctgtgccttggggaggcgctgaactgtgggcaggcactaaactgtgacgaggcactgtgcagtgaggaggcgctgtgcagtgaggcgctgtgccgtggggaggcgctgtgcagtgaggaggcgctgtgcagtggggaggcgctgggcagtggggaggcgctgggcagtggggaggcgctgtgccgtggggaggcgctgggcagtggggaggcgctgggccgtggggaggcgctgggccgtggggaggcgctgtgccgtggggaggcgctgggcagtggggaggcgctgggcagtggggaggcgctgggcagtggggaggcgctgtgccgtggggaggcgctgggcagtggggaggcgctgggccgtggggaggcgctgggccgtggggaggcgctgggccgtggggaggcgctgggcagtgaggaggggctgtgctaccagaggcgccgtgccgtcgggaggcgccgtgccatggggaggcgctgtgaggagacgctgagctgtgaggaggcactgtgttgtgggaaggagccctatgggtttaacattcttgtgcttcctgtttttcttctttttcttctgctcatttcctcctccatcttcctcggcttttataaaaatagtcaaatttcatgttgggatccagagaaaagttactttcccaagttcatataaaaacagtgacagaaatggttacttttcagagttcatagaaagacagtgacagaaacggaattagcacagggtcatctccctcgtggggtctcgcctttcctgccagatcacccttctcagtttgcccacgtca

SEQ ID NO: 18304 - DNA, 2336 bp, Artificial sequence
  DNA replication origin
atggtagttgggcagaggcctcagagtcaaggccctgttggtgtcagtcctggttctgtggggccatgtgtgtgtttgagggacttgcctcagccttctccatggcatggggaagctgaggaagggggtctatcacagggtggttttaatgataaaatgggacatccaggcagagggttaaaaattcatgaaaagctggatttgactctcactgtcttcactgtaactgcccatctttgagagtgagcaggaggttgggacaccccaagatgtgggcactgccagccaaccacacattcctgcacagctgcagcatagttctgactaaattccagacaaaacctggctgaaagaaaatgtagcaataccatgatcaatgagcctggggtgcacacatcagaaagaagagtgagagggtgaaagtggctcaggaaaaagttatcacaaaagagccccattccgcctgaaggaaatcgccactgcggggcactttgttctctggtggatgctggttatcgctgctgtggggcagttggttctctggtggatgctggttatcactgctttggggcacgtggttctctggctgatgctgattatcaccactgagggacactttgttctctggtggatgctggttatcgccgctgtggggcacgtggttccctggtggatgctggttatccccgctgtggggcatgtggttctctagctgatgctgattatcgccgttgcagggcacgttgttctctggtggatgctggttattgccgctgtggggcgcgtggttctctggtggatgctggttattgccactgtggggcacgtggttctctggtggatgcttgttattgccgctgtggggcatgtggttctctggtggatgctggttattgccactgtggggcacgtggttctctggtggatgccggttattgccgctgtggggtgcgtcgttctctggtggatgctggttattgccgctgtggggcatgtggttctctggctgatgctgattatcgccgttgcagggcacgttgttctctggtggatgctggttattgccactgtggggcacgtggttctctggtggatgctggttattgccgctgtggggcatgtggttctctggtggatgctggttattgccactgtggggcacgtggttctctggtggatgctggttattgccgctgtggggcacatggttctctggtggatgctggttatcactgctttggggcatgtggttctctgcctgatgatgattatcaccactgtaggacactttgttctgtggtggatgccagttatcgccgctgtggggcacgtggttctctggtggatgctggttattgccgatgtggggcacagggttctctggtggatgctggttatcactgctttggggcatgtggttctctgcctgatgctgattatcaccactgcgggacactttgttctctggtggatgctggttattgccgctgtggggcgcgtggttctctggtggatgctggttattgccactgtggggtgtgtggttctctggtggatgctggttattgccgctgtggggcgcgtggttctctggtggatgctggttatcgccgctgtggggcacgtggttctctggtggatgctggttattgccgctgtggggcgcgtggttctctggtggatgccggttattgccactgtggggcacgtggttctctggtggatgccggttattgccgctgtggggtgtgtggttctctggtggatgccggttattgccgctgtggggcacgtggttctctggtggatgccggttattgccgctgtggggcgtgtggttctctggtggatgccggttattgccgctgtggggcacgtggttctctggtggatgccggttattgccgctgtggggcgtgtggttctctggtggatgccggttattgccgctgtggggcacgtggttctctggtggatgccggttattgccactgtggggcgtgtggttctctggtggatgccggttattgccgctgtggggcgcgtggttctctggtggatgccggttattgccgctgtggggtgtgtggttctctggtggatgccggttattgccgctgtggggtgtgtggttctctggtggatgctggttattgccgctgtggggcgcgtggttctctggtggatgccggttattgccgctgtggggtgtgtggttctctggtggatgctggttattgccactgtggggcgcgtggttctctggtggatgccggttattgccgctgtggggcacgtggttctctggtgggtgctgattcaattccggacccacg

SEQ ID NO: 18305 - DNA, 1403 bp, Artificial sequence
  DNA replication origin
ccattgtcacatcccctgaggctcctcttttcatgcacgtacctgtgaagggacaccaaacaggctttgtgtgagcaacaaggccgtttatttcacctgggtgcaggtgggctgagtccaaaaagagaatcagcgaagggagatgggggtggggccgttttataggatttgggtaggtaaaggaaaaaggggggctgttctctggtgggcaggggtgggggtcacaaggtgctcagcaggggagcttttgagccaggatgagccaggagaaggaatttcacaaagtaatgtcatcagttaaggcagaaaccggccagatggatgtgtacctgcaggtcacagcgaatatgatggcttagcttgggctcagaggcctgacattcctgtcttcttatattaataagaaaaatagaacgaaatagtggtaaagtattggggcggcgaaaatttttgggggtggtatggagagataatgggcgatgtttctcagggctgcttcaagcaggattaggggtggcgtggaaacctagagtgggagagattaagctgaaggatgattttgtggtaaggggtgatattgtggaatagtcctgtagaattattggtgatggcctggatacggttttgttcgagtgtctacgagcaacctctgttatttacggggctgtgtataagtaaacaagaagagggcatgggaggagagtctgatgagcaaggggaaggtagccaaggatggagtgaaatacagggtgtcttcctagcaataactactggtttttaagtgtgccagtattgatagagggcttgtctgttatacggaactggaaggctctaattgtttctgtgatgtgtgtagttgggctttggagatgaggaggaaaggaacatcgagaaggtgaaaggttacccaggggaattccagtgggtctttgctgagagatacataacggagtggccacaggaatagtagtttgtgtcgtgagaggtccaaatatgggcggagtagagttgatataatgagaagggttttttaagtaagtgcggaggagggcggtggcttgctgatgtgaaatgtctggggaggtcttgctggacctgtctagaaagtaaatgagttcttcaggagggtaaaggtgagggctgttaaaggaagttcagaagtgtagggagacaagagatgttgcccggtctgcatgtaagcgggtacagctgtgtaggcgctggaagaaagggaaatgcaaagccagcggatgttcgctaaggagggattagaagcggctaggagagaatgggtaaggttgatagtgtggtggagatagctggggagaggtagagggtgccctaagaatgggaaagaatagaacttcatcagggtgaaagtattgaagggtcttctgccagca

SEQ ID NO: 18306 - DNA, 1403 bp, Artificial sequence
  DNA replication origin
gggggcccgggccccggcacggacttcacctccgaccaggccgatttccccgacacgctcttccaggagttcgagcccccggcgccgcgccccggactcgcgggaggccgccccggggacgccgcgcttctgtccgcggcctacgggcgacggcggctgctgtgccgcgcgctggacctggtgggcccgacccccgccacccccgcggccccgggcgagcgcaaccccgtggtgctgctgaaccgcctgcgcgccgggctgcgctacgtgtgtctggcagaaccggccgagcggcgcgcgcggagcttcgtgatggccgtgagcgtggacggcaggacgttcgagggctcggggcgcagcaagaagctggcccggggtcaggccgcgcaggccgcactgcaggagctgttcgacatccagatgcccggccacgcgcccggcagggccaggaggacgccaatgccgcaggtgaggggcgcggcgggtgcagggggaacgggcggcgctgggggcgcgggggagaccccgacctttccctgttgggagtggcgtccaggcttctcggagaaggagaggccgcgtggagcgggaggggaaagaatgtctcccggcctggtgaggtgattgatgggagaacaggtgctgccggcggttttgagggtgacaatgcggctgcccgggaggagacagcgaggccgggtggggagcggccagggcgcctctgtctgcagggggagggacgggtcccccgtgccaggtttcgtccgtgactgggtctccacgcgtagggtcggatggtcgtgccgggtaaaattggggtcaagttttccaccagggaggcgccctgtgcctgggagcagccggagaggccgccagcccggcaggatccagacggggtccctggtccaagggagaatcgcgctgggaggccgaggaggccggagcgagagtggggagctgggcctcactctgcccggcaggacccctccggttccttcctgcgcagctgtgggtccgccttctaacctgcgattaccttcactcactccagacatgttctcaactgtctgggcgttaccggttggaggtgtccaggttcttggcgccttgagcaaagaactggacaaaacccacacagcaaggaaagaacgaagcaacaaaagcagatatttctgggaaatgaaagcacactccacggggtgggagcacctgagcacaggggcccaagagcccgttactgaagtttctggggtttaaataccctctagagatttccattggttactcggcgtaggccctgtgtaaatggagaggacatttcctgtcatcgctgaagtatttccatttgattcagctctaggaagtcagtgtgcaccggccttatgttcctgcctccagaccct

SEQ ID NO: 18307 - DNA, 748 bp, Artificial sequence
  DNA replication origin
ttggtggggcctgtgccctcgaacgtgagcccgttcacctccaccgctaccgcgaagaccggggcatgcaccgggcccgtctgcgacactgtccggtactgcaggcccggcctcagctcgtgcagctgcaccagcgcgttcttgggcgccaccgaccacgacagcttcttccagaccagctgcagtttgcacaagtggcccccattcccctcctccagcggccgcttcctcttcgcgccgggcgcgccgccccgggcccggtccccggagggcggtggccgcgcggccaggttgcccacgttgcggttctccttcacctccgcgctgctggtacctggaggggagaacagaccagtcaggagcctgggcgggcgccggcaggtcgatgggcacagcaggcactccctgagggtccccgtcccagcgacctcgccgcccgcgcccccaggtcaggcctgagaaatgactgtggccgccagagagagggagcccctgggagcctatggcccatgcggggaagtagcgtccttggtcccttgctgagggcctgtggctaggagctgtcgtcttctgggctggctcctgttttaagtgaggctgtgtctcacaaacagacaagcgcccctgactttgtacaagttttgggcaatgtcaaaggtcagagaggcctttcccggggtggtgtggtctagtgtcccccttcccacctgctacagggacctccaggcccggtgcccaatgccccccc

SEQ ID NO: 18308 - DNA, 1111 bp, Artificial sequence
  DNA replication origin
agagcctgaaaggcttccagaaagtccagaaagtcttggcctcatcaggccctctcctctcctcactgcccagtgtgggggttcttatgggagggcagggggaaggagaagctcctacgtggggtgggcacgtccctctctcaggaatctcacgggcagagcagtaactttcccatgtagtcaggtggtttatttctccaggtcttggcctctagttgctacagaaaggcggctgctgcacctctgtaagtttgaaaccattcgctccgcaccccaaatgtcctctggcccttgctgaagcttcatttctttttctcctgagggagaccagctccagccgggatcccagcagctccaggtgtggaagaggaggaaacagtgaacttccccttcccacgtgtttccaggtccacacgtcaggctcagctttggtggggcaggggggtgggtggggggggttgtgtgctcctggggtgtgtgtgtgcgcatgtgcttgtgtgctcctggggtgtgtgtgcgctcctggggtgtgtttgtgtgcacccctggggtgtgtgtgtgtggtgcgtccctggggtgtgtgtgtttgtgtgtgctcctggggtgtgtgtgtgcgcatgtgcttgtgtgctcctggggtgtgtgtgcgctcctggggtgtgtgtgtttgtgtgcacccctgggatgtgtgtgtgcggtgcgtccctggggtgtgtgtgtttgtgtgtgctcctggggtgtgtgtgtgcgcctctggggtgtgtgctcctggggtgtgtgcgtttgtgtgcgcccctggggtgtgtttgtgtgcgcccctggggtgtgtgtgtttgtgtgtgcccctggggtgtgtgtatgtgcgtgtgctcctggggtgtgtgtgcacacatgcacatgcctggtgtgtgctcctggggtgtgtgtgtttgtgctcctggggtgtgtgtgcacatgtgcatgtgcgctcctgggttgtgtgtgcacacatgcacatgcctggtgtatgctcctggggtgtgcatatgtgtgtgtgtgctcctggggtgtgtgtgcgcatgtgtgtgtgcgctcctggggtgtgtgtttgtgtgtgctcctggggtgtgtg

SEQ ID NO: 18309 - DNA, 3151 bp, Artificial sequence
  DNA replication origin
actcttagaagtccctggaaggctcttcggtggttctctggcaaaccactctacccatcaagaccccaaagacagagcggtctgtttcccccagcaacctcgtgcaggctgcgctgctgctgcggagggagaaaatctcttcttcccaaatgtgaacctggcctctcaggtaaacgggcacgccaatccacgcagagccgagagctgggtaatttgagggtcagaggcacgaaagtctcttctccatctatgctgatacctgaaattccaccgttaaaactttatttatattgatcaattgttccttagcctattacagatttctcaaagaaagaaacggcaaatacacgtttttgagttgtcttacctccgcaccagaactgggttctgacagttttaggaaaaacagaaggtttatctggaactggggttaggggctcctggagaggggtcttcactggagctccacagggagaggaggggccctgaaaaacaggagcgagtgggaggaccaaggaagaaacccgtctccctcccaaccatgcacaggtgaaaggccagatgtcccgaggagcgctcatggtctttcaccccgtgtcagtgccactgcctgtgctgggcagcttcctgcgccctggacacaattgcaggaagcaggcgaagccctgccccaggaagcctgcactcgggaggggagagacggacggtgacccaggaagcctgcactcgggaggggagagactgatggtgacccaggaagcctgcactcgggacgggagaggaggacggtgacccaggaagcctgcactcgggaggggagagactgatggtgacccaggaagcctgcactcgggaggggagaggagggcggtgacccaggaagcctgcactcgggaggggagaggaggacggtgacccaggaagcctgcactcgggaggggagaggaggacggtgacccaggaagcctgcactcgggaggggagagacggacggtgacccaggaagcctgcactcgggaggggagaggaggacggtgacccaggaagcctccactcgggaggggagaggaggacggtgacccaggaagcctccactcgggaggggagaggctgatggtgacccaggaagcctgcgctcgggaggggagagacggacggtgacccaggaagcctccactcgggaggggagagacggacggtgacccaggaagcctccactcgggaggggagaggaggacggtgacccaggaagcctccactcgggaggggagaggctgatggtgacccaggaagcctgcgctcgggagggaagagacggacggtgacccaggaagcctccactcgggaggggagaggctgatggtgacccaggaagcctgcgctcgggaggggagagacggacggtgacccaggaagcctccactcgggaggggagaggaggacggtgacccaggaagcctccactcgggaggggagaggctgatggtgacccaggaagcctgcgctcgggaggggagagacggacggtgacccaggaagcctccactcgggaggggagaggctgatggtgacccaggaagcctccactcgggaggggagaggctgatggtgacccaggaagcctccactcgggaggggagagactgatggtgacccaggaagcctgcactcgggaggggagaggctgatggtgacccaggaagcctgcgctcgggaggggagagacggacggtgacccaggaagcctccactcgggaggggagagactgatggtgacccaggaagcctgcgctcgggaggggagagacggacggtgacccaggaagcctccactcgggaggggagaggctgatggtgacccaggaagcctgcgctcgggaggggagagacggacggtgacccaggaagcctccactcgggaggggagaggctgatggtgacccaggaagcctccactcgggaggggagaggctgatggtgacccaggaagcctccactcgggaggggagagacggacggtgacccaggaagcctgcactcgggaggggagagacggacggtgacccaggaagcctgcactcgggaggggagaggctgatggtgacccaggaagcctccactcgggaggggagaggaggacggtgacccaggaagcctccactcgggaggggagaggaggacagtgacccaggaagcctgcactcgggaggggagaggaggacggtgacccaggaagcctccgctcgggaggggagagacggacggtgacccaggaagcctgcactcgggaggggagaggaggacagtgacccaggaagcctgcactcgggaggggagaggaggacggtgacccaggaagcctgcactcgggaggggagaggcgggcggttagtaggcgtcacagggacactgcaggcggggatggcagggaggaaatggagcaggacaggagctcagggccggattcttcgatcctgggacacagcacgtgcctggcaactttttgttgaacaaatgaatgatggaagtaatgaatgacaggcttttctatcctttgttcaaatagcccaaactcaccagagacgggcgtgaaggctgcgtcggccgaggcgtgggcgcccacccgtgcagctgcgatgggtcaccgagggggtggggacagggatgggaagttcagtccggcagcactctcaaggctggagagagtcgcacgaggagaagagtcgggaggctcaaaataataaaacccatcccgtgtaccagccaggagctcagtgctgaggaaataattagatttagacttgcaagctcagctattaactctttgacctgctctctaaacaaattacttacgcgatcattgctcgctttccagttaactagaatgtctaatgcgtagaaaaggtgagaaatggcccgcatttggaccagtgctgaagaaacatggactcagagcagacaatgtggctcagtccggtcagcggaggacagggcaccctgctaggagggttcacgatgccgcacttccagattcaaagaagctcagtagaaaataaagcaaagtgctggtcatgactggcttcagaagggcaagcgtcagcaaggcctggggaagccgggggcgctgaaggcagccgctatgagacacagt

SEQ ID NO: 18310 - DNA, 1019 bp, Artificial sequence
  DNA replication origin
acaggtaccagcactggcagaagcagtggataggcgcccatggtggcatgaggtagtggacaggtgcccacattgacagggacagttgacgggtgcccacagtggcaggagcagtggatgggtgcccacagtggcaggggcagtgaatgggtccctgcagtggcagggttcagtggatgggtgtccgtggtggcagggggcagtggacgtgtgcccgcagtcacaggggagcagagagcggcttcccagccatgcactggtggtggagataccctgtcctttgccctgcgcgtgcccctgaactctgccctctacatgcagcagcactgcccgcaagtctcacaaccaatagtttctgctgacatcattctgtctcctggggaagcctccccctcccgtggaagctactgagttgcaggggcagaggggctccaacaagggctattttttaaatgggggagatttgaaaatgtttagaatctggtgataagggtgtcggtgaggggaaaactatggaaggggtcacaggagaggtgacgttgcatcggaagagtggaagggtgtggggcccagggccaaggatggccatagctactgtgcaggggcggattcaggcagatgtctcgtgggtgctgatgaccccagggagtcagatttctcaggtcctcgccttccctaatcttccccctcaatctgtgggggactcgcagtgttgggcatggtgcatggactgattggaggatttgtgttggggatggtgcatggacttattggaggatttgtgttggggatggtgcatggactgattggaggattggtgttgggcatggtgcgtggactgattggaggatttgtgttggggatggtgcgtggactgattggaggattggtgttgggcatggtgcgtggactgattggaggatttgtgttggggatggtgcgtggactgattggaggatttgtgttggggatggtgcgtggactgattggaggattggtgttgggcatggtgggtggac

SEQ ID NO: 18311 - DNA, 1640 bp, Artificial sequence
  DNA replication origin
tttgcagaaaggccacgtcccggctggaggatggtaatgatgtttaggagatcacagctgggcaaagggtgaaaacaacgctgggaggtcgaaaggctgcagaacccattacccatctcccgatagccattccgatggaaggccctgacaaacgactccctgcaaagccggataagccctctgcatccatcggctaatgccaggcaaggcgggaatgcgatgagggctggctggaggcagggctgccaggaagggagggtctgtgaagtgcgaacacactcactggttttggggaaagggtgaacaacccagtgagcactgcatgttaggaacaggtcagtaaacacagcctggcaggagcagacagaagccattcgtcgagagcgggacgcgggtgggaggccttggctacacagacacaggacctgaagataagatactgtggcctgtcggtcaccactctgtgtgcatagcagtgcaggtgacatcattacctttggggaaactgggagagatgctgcgcaggtgtatacactgtggggagggggagagaggctgtgcaagtctatgcactgtgttgggggcagaggctgcactggcgtatgcactgtggggagggggagagaggctgtgcaaatctatgtactgtgttgggggagagagaggctgtgcaggtgtatacactgtggggagggagagaggctgtgcaggtctatgtactgtgttggggggagaggctgcactggcgtatgcactatggggagggggagagaggctgtgcaagtctatgcactgtgttggggggagaggctgcactggcgtatgcactgtggggagggggagagaggctgtgcaagtctatgtactgtgttgtgggggagtggctgcactggtgtatacactgtggggagggggagagaggctgtgcaagtctatgcactgtgttgaggggagaggctgcactggcgtatgcactgtggggagggggagagaggctgtgcaagtctatgcactgtgttgggggcagaggctgcactggcgtatgcactgtggggagggggagagaggctgtgcaagtctacgcactgtgttggggggagaggctgcactggtgtatacactgtggggagggggcaagaggctgcacaggtgtatacactgtggggagggggagataggcattggtttgtcattgcaggactgatctgaaggccagagccaagactcagggcagggctgttgggaggcccctgacaggcctgggaaggccttgcctggtcacagtgttttgtgggcctgaggattcaggacacgtggtacttgcttgaccatatagtttattttaataatggaattatagagaatttctgttttccctctgggaggctggagtctgagctgctgtggtctgtcacacagacactgcctccctaagtgactgaccctcaataaaaaccttggacgccgaagctcaggtgaactttcccagctgaaccttggacccggaggctcaggtgagttttccagctggtgtcattgcacacattatcaccatcatttctgggggaactaagcccattcccgcaactcactgggcaaggatgtctggaggcaaatgcctggattctccttgttgtcac

SEQ ID NO: 18312 - DNA, 1022 bp, Artificial sequence
  DNA replication origin
acttgcttgaccatatagtttattttaataatggaattatagagaatttctgttttccctctgggaggctggagtctgagctgctgtggtctgtcacacagacactgcctccctaagtgactgaccctcaataaaaaccttggacgccgaagctcaggtgaactttcccagctgaaccttggacccggaggctcaggtgagttttccagctggtgtcattgcacacattatcaccatcatttctgggggaactaagcccattcccgcaactcactgggcaaggatgtctggaggcaaatgcctggattctccttgttgtcacccaggctcccctcccttcgctggtgacaatttgtggactttcacaatgttaaacaatggctgctggtgcgccagccctacccagtgagtaccagtgagtacagagcctgaggggggtttcggggacccccggcatagccaaagaccccttcactgacatggtgaatacactgtgtaggtccagagacagtgatgacaaactaagtttcacagactttgaatttgggaaggccagtgagatatcgcagccaagataccccagaggcagtggagcagggtgaataaagtctcactagagggtcagatttggcaaatgcgtgggttgcagttgaagccacagatgtgaattgccgtccagtaagtgtagggggagtaaagatctaggataaggagagaaagagaaactggcactgacagaaagaaacaggaagagaaaaagctgacagaaactacatggaacctaccacactcaagggaggttggctaatggtgtcacgtgatgccaggacacctggcgagttaggaacctgggaagagttattttgtgacctgggctgacagttttattaaaagggacaagtgagtggccagagtgtgaggggccgaggcaggcctggcaggaatgagggtgggctgttaaggtgatctggctgggccacaggggcgggggagagaggcgttggtttgtcattgttcttgaa

SEQ ID NO: 18313 - DNA, 1437 bp, Artificial sequence
  DNA replication origin
agagtcctgggtggggagaagcaagtatctggcatttatcttggaaaccacatcattctctcttgagcttggatttgacaggccctgcagctgaagtgcatcagtgtcttaaagcctcatgtggatgtgtacgtggactgtctcagcactggggatgcgattgagagactttatccgcctttcccaagcctcaaaagcagtgccagacacagacaccagatgtacatgtgccaggctttgagtccaaacgtgaacaaaccagcccactgttggttctcatggaacataaacatccacgcataaaacagaaacacatgcatgttatgctgggaagtggtcatggctctgaagaaaaataaggcaagctgagcacccatggaggggcgcagaggtgggattcgagtttagatggagcatgcgggggctgagcacccacggagtggggcggaggtgggattcgagtttagatggagcatgcgggggctgagcacccacagaagggggcagaggtgggatgtggatttagatggggcatgggggtgctgagcacccacggaggggggcagaggtgggattcgagtttagatggagcatgcaggggctgagcacccacagaaggggacagaggtgggatgcagatttagatggggtgcgtgggggctgagcacccacagaaggggacagaggtgggatgcagatttagatggggtgtgtgggggctgagcacccacggaggggggcagaggtgggatgtggatttagatggggcatgggggtgctgagcacccacggaggggggcagaggtgggattcgagtttagatggagcatgcgggggctgagcacccacagaatgggacagaggtgggatgcggatttagatggggtgcgtgggggctgagcacccacggaggggggacagaggtgggatgtggatttagatggagcatgcggggtctgagcacccatggaggggggcagaggtgggatgaagatttagatggggcacgcggggtctctccggggagacggtgcccaggcacagcctgggggtgggaaggatggagacgtgagggttccagagtcacggggtccaggaagctcctttcttctttgctccatgaaaagcatggaagccacgctcactgctgggcctggggtgatgccactgaggctgggaactcagctgcttgcagctgctttaaaaggagggcagggaatgtggcagccacagatgctggaagaacatggattttgttttgttttgttttgtttttagatagggtctccctctgctgtgcaggctggagtgcagtggcgcaacctcagctcaccgcaacctcagctcaccgcaacctccgcctcccgggttcaaacgattctcatgtctcaggctccagagtacctgggattacagatgcccaccactacccccagc

SEQ ID NO: 18314 - DNA, 1199 bp, Artificial sequence
  DNA replication origin
caccctctctctccctcagtcctcagcctcctccccacctgctcctgcgcctctctggccctggggtggaggagggtgggaggttcagctgggggactctgtgggatccccctgtggtcaagctccatggtttccagatggggtcacagagaccgagagagcctggcggtttggctctggccttggggcagtgccagggtcgtttctgaatcagctcaacccagtccacctgcatccctcctccactgcacattgctcaggaaacccttcctgtcagagagcccatgaagcccctcaagtcagagaggggcacctatagctgcagagcacaaagcgcatgggaggggtactccggggccatgggagggggctcagggtcactaaagggaagttcaggatccatgggagggggcccagggccactcggcgggggggtcagggtcacaggagggggcccagggtcacaggagggggctcagggccacgggagggggctcagagtcacaggagggggcccagggtcacaagaggggggtccacggtcacaggaggggggttcagggtcacaggacaggtctcagggtcactggaggagctcagggtcacaggacaggtctcagggtcacaggaggtggcttagggtcactgtagggctcagggtcaaaggagggggctcaggatcactggaggggctcagggtcacaggatgggtctcagggtcacaggatgggtctcagggtcacaggaagtggcttagggtcacaggagggggctcagagtcacaggagggggctcaggatcactggaggggctcaggggccattgcaggagggctctccctgctggacttcctgcaaatacggtagcagcagttcatgctatggttctgtggtgctggcaggagccgagaggactgagggtcccgtgaactgcaggtgggaccccagggataagcagtgctaggtctgtgtctccatccagcgatcttcggtctcaagtgggtgaggggcactgtgcaacccccgtttggagacaggtgatcatcagtctgtagtgagcggaggggcgctgtgcaccctccagttggagatggagcagctgtgtttcctgaagctttgagccctgaaacccacatccccagggtctctcaaggaaaggcccttggggacaatggctgcaaaacacattgaaggtggagg

SEQ ID NO: 18315 - DNA, 1056 bp, Artificial sequence
  DNA replication origin
atattaggttggtgcaaaagtaactgtggtttttgcattttttaaatatatagtaaactatatataatacaacatgtaacaatcgggccacttcagaccgtgcgggttgctttgtgcgtggctgttaacaggtggtgagcgacaagccgggacgtgtgtagccaccttccctctgcccatggccctggcaagtcattcacgttcttccatgtcgagtgtgggggcagcccggaaatatcactgaggacaggccgtcgtgggagtttgagaggagccagtctgcctcacggatggcctgggaactcccatgacacgtgcaggggagttcacagccacgggaggagggccaggcagcacctgcggaaaagacctcggctgctgagcagaggaagccccggagttcaagaggtgcctgaggcgtgggcagacgtggggttagcgtccgagatccagtggaggcctgtgtccatgcaggagagagcgtgggcagacatggggttagcatccgaggtccagtggaggcctgtgtccatgcaggagagagcatgggcagacgtggggttagcgtccgaggtccagtggaggcctgtgtccatgcaggagagagcatgggcagatgtggggttagcgtctgaggtccagtggaggcctgtgtccatgcaggagcgagcgtgggcagatgtggggttagcgtccgaggtccagtggaggcctgtgtccatgcaggagagagcatgggcagacgtggggttagtgtctgaggtccagtggaggcctgtgtctatgcaagagagagcgtgggcagatgtggggttagtgtccgaggtccagtggaggcctgtgtccatgcaggagctgaggtccagtggaggcctgtgtccatgctggagcgagcgtgggcagacgtggggttagcatccgaggtccactggaggcctgtgtccatgcaggagagagcgcagggtcaggcagaggcgtgagaagtggggcagccaggcaggtgcacacagagggcaggagcaggaggcatggctgtgctgggtgatgaggacatgg

SEQ ID NO: 18316 - DNA, 908 bp, Artificial sequence
  DNA replication origin
ggaaaacagcccctggagaggcgggcagccaaggccgctgtgccctgaggctctggtcagcctgagggaagaggtgaaaggcagggctgagaatgggagacggtgctgacaacgggctcacaggtctggaagcccatatagcaggacctcaagaactgaggagaatggccaggcgcagtggctcacacgtgtaatcccaaccaaaacttcgggcaactgaggcaggcggatcacctgcggtcaggagttcgagaccagcctggccaacatggtgaaaccctgcctctattaaaaatacaaaaattagctgggtgtggtagagtgcgcctgtaatcccagctgaacccagaaggctgaggtgggagaatcgcttgaaccaaggaggtggaggttgcagtgagccgagatcgtgccgttgcactccagcctgggtgacacagcaagactccgtctcaaaaataaaaaataaaaaaaatgaggagaaatgtgaatggaacaaagtggtggagtgatgggggcgtggagagaaggccccgctgcagggtcctgggcatgtagcctgaaggacctctgatgacagggtgcttgctgagagttggtcaatatcgttgtgtattgcatctctgtggtgtgtctgttgcagaactctcattgctttgtctatatcccttctcaccagaaatcgaagccctttccttcttttgttttcaccttctgcaaagacatgtccactctccctcgctaaaggggcccctctcccatgtgcctgccaccctccttccctctttacctctcatcccctctgctgcctcccctcctccatgtgtgtgggtctattctaagggttggcatgcttcagggagcgtgccacagtgtactttctataggaagtgttccttggggtgatt

SEQ ID NO: 18317 - DNA, 819 bp, Artificial sequence
  DNA replication origin
gagggaggaggagaaagagagagagaaagaagagagagggaggacagagagagagactggggcataaagaaggagagaaggagggagggagagggggagaagagagagggaggaggagtggaagagagagagagaaagagaaagagagagaaagagggaggtagagagcaagagagggtagagagaggaggagggagggaaggagagacacatagggagagagagaaggagctagggagagtgggggaaagagggggagggaagaagaaggagaataggagaagtaaaaattaaccagggaaatgaaatcacatttgtttttaaagaagggaagaatagcaacatttttaaagtggatggaattaaacctggaaaatgaaactgaataatattagaagagttggtggggtaggggaaccagaggcccgccgggtaacgccctctagaaggctaagggcttttctggagaagcagggccagcccctccctgctgcctgggaaggtggaactcggggtgctggggaaggctgaggcctggaagtgctgctggtctgggcgatgtctcatctgactactgcaaagggaagcaggaacaccgcagctacgggggaagatgcgctggggctgtagtgagtgcagagacggggtactgggtgaaatgatgggctagggatggcggccctgagtgcacccggaacgtctggcgactgcgcagatccactcggggctgggggggttctcaccgttgcagtaaatggctgtgcattccccccatttttaattacagagaaaggaagtgttactttgcagcagacttgc

SEQ ID NO: 18318 - DNA, 1679 bp, Artificial sequence
  DNA replication origin
acgctgtcctttttacaggaatgtcagtcaaaccccagtagagttttcttcatttttcttattttttgcgtacttacagatttcttcaaccctttttggaattgtttggggtatttcctttctctccattcactcacgtcttcatttaacaaatgaagctcgaatataggatgacagcgtaattggccacaggaaaaagttaggtgggtttttaaaatgcagataatccagtatcaacgcggggcggactggagacccaggaaacgcctgaaaggagggccgtgcaggacgaagcccccaggacacgcgaggagacccggccgcgcgccgcgtggggcttgggagcctccgaggggccatgcccagcctggaataaccatttcggtttttgctagatggctgcggagacaatggatgaatgacagaaataaaacaagtaaaggaaaacccagccatgcgagaggctgctgtcggaacctggcgagcaggacgtggctgctgctggagaggagccgagggtgacggctcggtgtggggtggacactggtccagggccagctcctgaagtgcagcaaagtctaaggctccttaaggatgaagagggcacccaccggacagaaagatgggttcaggggagtagatctttaatgagcgctggacgtgcggtggggaatgctgggttccttagagctgcagggcctgcgtgtcagcgggagctctgcaaagaactcacaggtggtgttgggagccaaggaagcactctcctccctctaaggtccacggatgtaggcctgggagacagcaagcatgaagactgaaatgcgctttgggggaagacgtgtgtatactccgggggaaagagttcaagttaaggaacaaaatagagaaaatattttgttaaaaaaataagattgtaggaatttttagggtttccaaagctgcaaaaacacaggatggaaggtccatcaagaagaaacctaaaacagcacagagaggaatgcaggaggcttcagaatgcccgtggggtaaatggaaagagtgagtgtgtatgtatgtctgtgtgcatacgtgtgtgcatatgtgtgcgtgtgtgtgcatacatgtgtacatatgtgtgcacttagtgaacacagcatggataggaagcttggagaaattctttgaaatttgggcacagtataggagacaggactcattctgcctgcttcctggatgaatctgaacagttttggggataattctctggaagaggtcaatcaaggatgttggtgttttggaagacattcagctcccttgtcattggcttgagggttgttgatgctccttctaacagctcctgagcaaaggtgctggggcgcatggtggaggacgcagcacagcgaagaaactcactttactcagggtcggagcccctggcgctgttcccagggatctgtgaggtgctgagagcagaggaatctacttctaggtcagcagagaggagttaaagtgacgaccttaagtagcaagggctcacagtgaagaatagagctaaaatccagttgcctctttcagcatttcatttagaaacattccccccaaaatagtgtttattctctcctgttgtcatatagtgagaagcagatgtctgggaaaatggaatgcaaggaaattagctttgatataggaaaagaggagtt

SEQ ID NO: 18319 - DNA, 1662 bp, Artificial sequence
  DNA replication origin
tatttatagagtttctaacggtaatgatttcttaaaagaaagatatactatggcaaggagatagacaatcggtgcaaaaaattcaatttttgtgtgtgtgatggataaggaacactcactgataaaatcttggtaaaaatagagattgtgagcaaaatatgaagacttgtggggcaagagtatcccaggcagaggaaagacatagagagtaagcatgttttgctttgtgttaaggtgaaggaaggaaggaaggaaggaaggaaggaaggaaggaaggaaggggaaagggaggggaggggagggaggaaggaaaggaaggaaggaaggaaaggaaggaaggaaggaaaggaaggaagggaggattgaaggaaggaggaaggtgagggagggaaggaaggaaggaaggaaagggaaggagggaggaaggaaggaaagaaggaagggagggagggaaggggaggaagagagggaggaaaagaggaaggaaaggaggaagggagggagggagggatggagaaaggaaggaaggagagaagaagagaggaaaggaggattgaaggaaggaggaagcgaagggagggagggaaggaaggagggaaggaaggaaggaaggagggaaggaaggaaggaaggagaagtgggaagaaaagcagagggcagggactgccggaaccttgtgtgaatcacccagggcagaggactccatctttcgctctgtatttgcatctcccgaggagcttttaaaaatatcagtgtccaggtgccatgactcggggttctgattgaattcattcgtgcttggtaattagcatctatatttttcacaggcttccctagactgattctaaattgtggctggggtgagattcatgaatcactgccgcttaggctgtagtatttcatttttattctgcgtgtgatgggaacctccagattaggagctgaggaatgacatagtctgacttgcctttaaaagcaccctagagagaactgactggggaataaggttagaggttaggacagtgtggcagtcagagaggctgggtgctggtttgaattgggtggtcctggagcagtcatgagaatggttagggatctggatggcttcttaccacagagtcgctctgctatgcactcggtggaccggaggcttttcttcctgccaagtctgtgtgttgaatcctaatccccgatacgatggcattttggagatggagactttgtggggtaacgaggattagatgaggttgtgattgcagaaaactcaagggattggtgcctccatgaaaagatgccccagagagttctctcccctattctgccatgtgagggacacagggagaaggtgccatccatgaaccaagaagccagccctgcacggaccctgaatccgcctgcatcttgatcttggacctccagcctccagagctgtgaacaacaggcctctgctgttgtagcttcccgtctgcgatactcggttctagcatctcaacagaccaagacacgctccaatttgccaatgtttgaagcagggtatgtgagaaaaagggcatgaacctccgccattctctgaacaacaacgtttttgccatttcctaagacacaggagagctagggagaagaaagttggtgcctgggatcaatactttagttttggacatg

SEQ ID NO: 18320 - DNA, 1583 bp, Artificial sequence
  DNA replication origin
gccataaatatatatgacacagtttgattctgtgtccccaccgaaatcccatgttgaatatgctatatatatgctatatatacttgtagtatacctatatatgctataatatgctatatatacttgtagtatacttatatactatgttaatatattaatatataagtactaatatgcttatataagtactatattaatacataagcttattagtacttatatattgatatagtacttattactatatatgtatatctgtatattgtaatcaaaggagcttaaatttgaagactgcagttaatttattttccctgctgcattatatttcattacatacacataccagaaaatgtcatccattcttgagttgataaaaattgggtaattaaaaacacacaacacagtagaagcctcgaacagcagtttgttttgtttgtatgtttttttccttcagaagagtgtaagaataatgatttactactaggtgggttccatcctggacaatttccactgcactctcagtcccgatgcatatgaggtgtgactgtgtaaacgaggccaacagtcaggtttcaggagggcccaggatggttggaaagagtggtcatgcaggtaggatggggggactgtgggactgaatggggtggttggaaagagtggtcatgcaggtaggatggggggactgtgggactgaatggggtggttgggaagagtggtcatgcaggtaggatgggggaactgtgggactgaatggggtggttggaaagagtggtcatgcaggtaggatggggggaccgtgggactgaatggggtggttggaaagagtggtcatgcaggtaggatggggggaccgtgggactgaatggggtggttggaaagagtggtcatgcaggtaggatggggggaccgtgagattgaatggggtggttggaaagagtggtcatgcaggtaggatggggggaccgtgggactgaatggggtggttggaaagagtggtcgtgcgggtaggatggggggaccgtgagattgaatggggtggttggaaagagtggtcatgcaggtaggatggggggactgtgggactgaatggggtggttggaaagagtggtcatgcaggtaggatggggggaccgtgggactgaatggggtggttggaaagagtggtcatgcaggtaggatggggggaccgtgagattgaatggggtggttggaaagagtggtcatgcaggtaggatggggggaccgtgggactgaatggggtggttggaaagagtggtcgtgcgggtaggatggggggaccgtgagattgaatggggtggttggaaagagtggtcgtgcgggtaggatggggggaccgtgagattgaatggggtggttggaaagagtggtcgtgcgggtaggatgaggggaccgtgggattgcatggggtggttggaaagactggtcgtgcaggtaggatggggggaccgtgagattgaatggcgtggttggaaagagtggtcatgcttgaagattagagtggttactgtatgtaccatggacagcacccacttcgaaaagatcagcctgtaatttaggaagat

SEQ ID NO: 18321 - DNA, 1298 bp, Artificial sequence
  DNA replication origin
atgatatttcatccaaagcgattacagtctttctttattgtgattagagaagtagataaaagtatttcaaattatagacaagaaaaaatgcaattactaataaacttctaaaactcaaaattgtactttcttcagccagaaaaataaccctaaagccagaattggtcatgagaatcaggagtttctaaatagagttattatgtcagaatttaaagtgagaggatttggatcatgggctttctttcaaaatgcagacaagaggcaatttctgtttattacctctattctgcggttgcagctccaagtatgaaaatatatggtgtagagattggaaaaggcctagacccgttcctttgagttgtcaaggtcactgggtgaggaggggacgggggtgtgtttagatcagctgacaggtgaggagggggggggggtgtttagatccgctgacaggtgaggaggggagacaggtgtgtttagatcagctgacaggtgaggaaggggaggggggtgtgtttagatcagctgaccggtgaggaggagaggtgggtgtgtttagaccagctgacaggtgaggaggggaggggtgtctgtgtgtttagatcagctgacaggtgaggaggggaggggtgtctgtgtgtttagaccagctgacaggtgaggaggggaggggtgtctgtgtgtttagatcagttgacaggtgaggagggaagacaggtgtgtttagaccagctgacagatgatgaggggagggaggtgtgtttaggtcagctgacaggtgaggaggggagaggtgtgtgtttagaccagcactgcagtccttcgttccacctcaacctagattggtgggaggtacctttccaagcatcctctgtgtgtgctgcaggtgggaaggctgtgggggcagcagcctgtacccactgttgtcctgctggaggctacaagcttccaggggagccctgcctctggacattcgcaaaatagcacggggcaaaaatgtggggtcatcggtagagggcagggagagatagagattcagatggcccttgtatgtcccgatcgcttccctctgtgcttagattctgaagatggatctgttatagataatttgagaatcaatagcatcagggcctccaccccctctctaaataggactctgacattacccagctggctaacacttaccacttggggattcaccatttcatatgtaggcaggaaaagttcctgagtgcagcactccttggctccccttctgtgtgggctagaaggaactcagagatgagtgtgtgtacctcaag

SEQ ID NO: 18322 - DNA, 988 bp, Artificial sequence
  DNA replication origin
atatcgtcaccctgactttaaagggtagaatagtgagctctcacctcttattactttgggtagctgtaggagaccttgagtcttctaaatcaatgttataaagaagggttcagagattaaataggtttctagaagactgaatcacagagctttaaaacttgggggacataattctcagagctgttattatgctagtggttgtgtgtggagttgtcagaggagtttgttcaaagaaagctattctttagggtcattttccattttcttgtccatggagtgcttttagcagaaaatgcttgattgtctagtgttttttataatagacacatctagaattttgtattaatggggcatgtctccctaggaaatattatgtaagtttgtaactgtctgagtctagaactagagatatttcaggccaaaggtggcctggttatctgggtgagggcatggtggcctggttacctgagtgagggcgaggtggcctggttatctgggtgagggcgaggtgggccagttagctgggtgagggcgaggtggcctggttagctgggcaagggcgaggagggccagttagctgggtgagggagagttggcctggttagctgggtgagggtgaggttgactggttagctgggagagggagagttgggccggttagctgggtgagggagagttgggccggttagctgggtgagggcaaggtgggctgataagctgggtgagggcaaggtgggctggttagctgggtgagggcgaggtgggctggttagctgggtgagggcgaggtgggctggttagctgggtgagggcgaggtgggctggttagctgggtgagggagaattgggctggttggctgggtgagggagagttgggctggttagttgggtgagggtgaggtaggttggttatctgggtgagggtgaggtgccctggttatctgggtgagggtgaggtgacctggttagctgggtgagagcaaggtgg

SEQ ID NO: 18323 - DNA, 1108 bp, Artificial sequence
  DNA replication origin
gtcgcctggataaggtgtgggtgtgggtgtcgcctggataaggtgtgggtgtgggtgtcgcctggataaggagtggacgtgggtgtcgcctggataaggtgtggacgtgggtgtcgcctggataaggtgtgggtgtgggtgtcgcctggataaggtgtgggtgtcgcctggataaggtgtgggtgtcgcctggataaggtgtgggtgtgggtgtcacctggataaggtgtgggtgtcacccggataaggtgtgggcgtgggtgtcgcccggataaggtgtgggtgtcgcccggataaggtgtgggtgtcgcccggataaggtgtgggtgcaaggtgtgggtgtcacccggataaggtgtgggcgtgggtgtcgcccggataaggtgtgggtgtcgcccggataaggtgtgggtgtgggtgtcgcccggataaggtgtgggtgtgggtgtcgcccggataaggtgtgggtgtgggtgtcgcccggataaggtgtgggtgtgggtgtcgcccggataaggtgtgggtgtgggtgtcgcccggataaggtgtgggtgtgggtgtcgcctggataaggtgtgggtgtcacccggataaggtgtgggtgtcacccggataaggtgtgggcgtgggtgtcgcctgtataaggtgtgggtgtgggtgtcgcctggataaggtgtgggtgtcacctggataaggtgtgggtgtgggtgtcgcctgtataaggtgtggtgtgggtgtcacctggataaggtgtgggtgtgggtgtcgcctgtataaggtgtgggtgtgggtgtcacctgtataaggtgtgggtgtgggtgtcacctggatatggtgtggatgtgggtgtctcctgtataaggtgtgggtgtgggtgtcacctggataaggtgtggatgtgggtgtctcctggataaggtgtggatgtgggtgtctcctggataaggtgtggatgtgggtatcacctgtataaggtgtgggtgtgggtgtcacctggataaggtgtggatgtgggtgttggggagtacaggtggggttctgcatccccctttagtgctaattctgcctccagtttcccctgcgcttgggcatcccgggcagttcccta

SEQ ID NO: 18324 - DNA, 1378 bp, Artificial sequence
  DNA replication origin
actatctttcatctttctaattaccgccattctaacaggtgggaggcaatatttcattttggttttgatttgcattttcctgatgagaatgagtttcagaaacttttcatacacatcatggctatttgtatgtcttcttttgaaaatctctgttcagatcctttgcccattttaaaattttgttattattgttatctctctattgggttgcatgtgtttcttatttatatattggatattaaaattccttaccagataaatggtttgcaaatattttttccactctgtagtttgtcttttgactcagtctattgactgttctctctgatgtgcaaaagctttttattttgacgcaatcccatttgtttatttttgctttttcttggtgtcatatgcagaaaaataatgacccacctctccctctccctctccctctccctctccccctccccctccccctccccctccccctccctctccctccacggtctccttccacggtctccctctgatgccgagccgaagctggactgtactgctgccatctcggctcactgcaacctccctgcctgattctcctgcctcagcctgccgagtgcctgcgattgcaggcacgcgccgccacgcctgactggttttcgtttttttttggtggagacggggttttgctgtgttggccgggctggtctccagctcctaaacgcgagtgatccgccagcctcggcctcccgaggtgccgggattgcagacggagtctcgttcactcagtgctcaatggtgcccaggctggagtgcagtggcgtgatctcagctcgctacaacctccacctcccagccgcctgccttggcctcccaaagtgccgagattgcagcctctgcccggccgccgccccgtctgggaagtgaggagcgtctctgcctggccacccatcgtctgggatgtgaggagcccctctgcccggccacgaccccgtctgggaggtgtgcccagcggctcattggggatgggccatgatgacaatggcggttttgtggaatagaaaggcgggaagggtggggaaaaaattgagaaatcggatggttgccgggtctgtgtggatagaagtagacatgggagacttttcattttgttctgtactaagaaaaattcttctgccttgggatcctgttgatctgtgaccttatccccaaccctgtgctctctgaaacatgtgctgtgtccactcagggttaaatggattaagggcagtgcaagatgtgctttgttaaacagatgcttgaaggcagcatgctcgttaagagtcatcaccactccctaatcttaagtacccagggacacaaacactgcggaaggccgcagggtcctctgcctaggaaa

SEQ ID NO: 18325 - DNA, 1143 bp, Artificial sequence
  DNA replication origin
ttctctgtgggttgagggagccatcttctctggaacctgcagccttgtttacaggggctggtgtgtgtgtgtgtgagtgtgagtgtgtgcacgtgcatacattcacatacacacacacactcacttaggaggttaaggaaacctcattagtattcctgtctttcaaaccacagcaggaaggcgaagccctgggcaacacgctggcctcccggttcagtgactccaggttcccagccccggagacaggccccgcctcatggacttacccctagcatctctctgcctcaaaggatgctggccagctctgtggtgggagcagcctgaaagtccctgggatctgggaacttttatcgttctgaggaacaagaaaaacagagacacctggaaaagctttgcaggaggagtggccacaggtcacctggtagcatgtacatgtctgcagggcccagctgagttctgggggatggaaggtggctccaggaaatggtgacctgaggaacaggtaggggctgagaacgtggggcctcctctgggaagaccatcgaggaagcaggacatgagtggggaggggcagtgttgtgtgagggagctgggcagcaccgggcagtgtccaagaagggtgtgggggagatggatgggtgggggcagccagagcagagaacaggtgtagacagcaggtgagagagcaggtggggggagcaggtgtagacaacaggtgagagagcaggtggggggagcaggtgtagacagcaggtgagagagcaggtgggaggagcgggtggaagaggaaggtgagagagcaggtggggggaatgagtgtagacagcaggtgagagggcaggttgggggagcaggtggaggaacaggctgacagctgggcaggtgcctcttcagcaggtctctgtgagtttctactgtggactttgcagtgaggtcagtgggaaccacggagggtgtgagagagagtgtgtgtcctaatgctgggaagctggggtttctccactgaggcacgcattgctgggaaggccaggccagatctccctgcccctgggagcccccgggaggccaggacagatgggctatctctgtgtagaactagagcttagggcctgatgtcagtgcaaggctgtgcctccacctcca

SEQ ID NO: 18326 - DNA, 1543 bp, Artificial sequence
  DNA replication origin
aggagcatctacgcgggggtcgtcgtaggtgggggccgcgctagcggtgcgggaggcggcagaggcaggggtagcgccacaggtgggcgggtccctgctagtggggccgcatcgcaggtgcgcgagcctcgcgggtgggctggaggactctggttgggggctctagagatgacgggagcgccacaggtggggcaggggcagcgtccggaggaggggagaccgcagggggccggggtcacatcgtttgcggggcgcgccagggcggggcgggatagaacgccgggagcatctcccgggggggcgagggagaccgtgagtgggcgcgagcgccggggcgggtggaaaccccgcagttgcggggagcgccgatggcggggaggggtggaatgggggcgcggagaccccacctggacgcggaggctcgcggcaggcccggccgctcgggccgttgtgggggccgagcccggccgcgcgcacagcttctagtggcccgcaagattcctcctggggcggcgctgggagcctcggggctcggcttcctcgacccccgcccccaggtttcctctgcagcctgaggtcgggaaggacggacggagagtggatcctccaggtggtgggaaaaggtgagcgtggcgggctgggccatgacgaagctgccatttcccgggcccatgggggctgtggtgctcctgggcccccagccccgcccttggggggaagaagccgtggggtggaggaaggtatcggggcgcgaccctcagagacgccctggcggcgccccggcctgggcgctggaaagtcagagtggggcaggaggaggcgcaacaggactggcctggcggggaggcggggaggcgggaggaccctccctccccacggacacgcgcgctgctgtacgctctgcctgacctcggccggctccactggccagctccacgtactgaaatactcacatccaatgcactgtgcggttgcccatccacagcttaacagcctggtgccagttaccctgcgatgggagagggggcagcccccatagaagcacgggcttatgggacccgggttccttcagtgctcacccacgaagaagggctcccaaacggccccactcgacggctcaccggaggatggtcctgcgcagtgggtgtttgttgaacagataagagacaacaaaacagactaagaagaggcctgttctatgaaccggggaaagtgaaggaatcacaaagagcggctcgccttagggcaatcctggggaaaagatggagaggcatggatttttcttggatgtgtgcctcatcctggggctcatccctctgagcatcaaatattcattgcaaaagagggggaaaaactctgctgcggacaatgctggatggtctgatctctcccttggccagaattaacggggcaattcctaacccctgttggtcctcagaatcacctggcctatgcacactcccgctaaaccactgaagtccaatttctgggagctcagccagggaatgtgtatttttaaacaagccccctaggttactctgat

SEQ ID NO: 18327 - DNA, 1137 bp, Artificial sequence
  DNA replication origin
tttactctgcacaggagtctcctggggtcaccttgtgtatcatgtccagctttttttttctgagacagagtctcgctctgtcgcccaggctggagtgcagtggcatgatctcagctcactgcaagctccacctcccgggttcacgccattctcctgcctcagcctcccgagtagctgggactacaggtgcccgccaccacgcctggctaattttttgtatttttagtagagacggggtttcaccatgttagccaggatggtctcgatctcctgacctcgtgatctgcccacctaggcctcccaaagcactgggattacaggcgtgagccaccgtgcccagcctcatgtccagcttttaagaattttattccttcttctatgtctttccacttaacatttcctaaaatccccgagttcttcatcattcctttatgaaagaccggtgggaacgaggtcttcagagagcggggtggggggggggggaagaggagcaggggtgaggggccgccattgggtcttagttgtgctcctgcatcacctgcttcctagtgttggcacgggctgtgtttgatgggtaattcatccattagagtgaccatagcgtaaggtcctggaaccagagctgtgcgtccacccttcgagttgaagagtccaggcactgctgagcccagccatgggagagatgagcgaggaccttccacaggtgtgaggccaagggggcgggaggctctgtcctgccaggaataaatggaatcaggtgggaggctctgtcctgccacgaataaatggaatcaggtgggaggcaagccaggcccttttcctgggaggtgccagagccgaggaggagttggaggaggaagagcgtccgagcaagagcactggtgggactgctaccaaggttcaggaacaggagcctccgagtgctgccagacaggtgggaggtccctggggcatggccgggagctcaggggaacttgggttttcttccagtagccctgggaacctggaggaacgcggtcatattcgtgctttagaagagaacattgccgggtgcagtggctcaagcctgtaatctcagcactttgggaggctgaggcggatggatcacaaggtcaggagatggagaccatcctggct

SEQ ID NO: 18328 - DNA, 1703 bp, Artificial sequence
  DNA replication origin
ggagtggagtgggggactgtgctgaggagggggtggaggactgtgctggagagtggagtgggggactgtgctggagagtggagtgggggactgtgctggagagtggagtgggggactgtgctggggaaggggtgggggactgtgctggggaaggggtgggggactgtgctggggaaggggtgggggactgtgctggggaaggggtgggggactgtgctggggaaggggtgggggactgtgctggggagggagtgggggactgtgctggggagggagtgggggactgtgctggagagtggagtgggggactgtgctggggaggggttgggggactgtgctggggaggggttgggggactgtgctggggaggggttgggggactgtgctggggaggggttgggggactgtgctggagagtggagtgggggactgtgctggagagtggagtgggggactgtgctggagagtggagtgggggactgtgctggagagtggagtgggggactgtgctggagagtggagtgggggactgtgctggggagggggtgggggactgtgctggggagggggtgggggactgtgctggggagggggtgagggactgtgctggtgagcgggtgagggactgtgctggagagtggagtgggggactgtgctggggagggagtgggggactgtgctggagagtggagtggcggaccgtgctggggagggagtgggggaccgtgctggggagggagtgggggaccgtgctggggagggagtgggggaccgtgctggggagggagtgggggaccgtgctggggagggagtgggggaccgtgctggggagggagtgggggaccgtgctggggagggaatgggggaccgtgctggggagggaatgggggaccgtgctggagagtggagtgggggaccgtgctggagagtggagtgggggaccgtgctggggagggggtggaggactgtgcttgggacgaggtggaagactgtactggggaggagatggaggactctcctggggagggggtggaggactctcctggggaggggctggaggactctcctggggaggggctggaggactctcctggggaggggctggaggactgtgctggagaccgcgtctactgtgctcattccacatccctgagcaaggggcagctgccaccagggccagggtccaggcagggaaactcaggagggcaatctgaccttaaaaacacccaaatataaaatgataaaaacaacagcctgggaatgctacagctagaccctccgttaaaattgcccaaatcgcataaatacaaacaataaccacgtaaccagtttaattgaataaaagcaaacaacaatgacacgaacaaaaaaacctctttccagcaaatgataaacaaatggatacacagataaatgagcaaagaataatagtagcaaccatttcaccaaagggaaacatggcttagaaagcagacaggggaaacctgccagtgctcagaaggccgccgcacacagcggcacacagcatcatcatgggagctagagcaccgccttccctgcgcggggctgggacgaggctggacaggtttcaggaattacttaggcaagaggcatcccaagccatcatgatgactgtcccttttagctcagtcggtgcctgatattaggaccaaggtattaaataatacaaaacatcaaatcgc

SEQ ID NO: 18329 - DNA, 909 bp, Artificial sequence
  DNA replication origin
aaaagattctccctttctcccctagggctaccagggcatggtggacggaggctcaaacatcgcagaggccgactgggagagtgtctccagcatcctgcaagtggtaggtactgggctgcgtccacagggttctctgagttagagactcttttatgtctagtaaattcccagaacacttgagctcagatcagttgcgaaatagagattatgtggacagaacagactttgtgagcagctctttacttgtggtttgatttttagaaatgcatgtgttaatctgtgagtcactttgagtacttgttaatagaaataatccaaatcggtgcctccccgctgaagacgctcatggggcccacaccttcgtgctggtccaggctctctctgcattgggcgcctcctgagctccgacacatcagaagagaggtggagggaattttgacaaccacggaagttaggtggagcaacgtttgcaaaacatcaggagagtgtgggctgaattcacacaggggagcgtttccattctgcggtcgtgattgacggaggaagataagatgtgaacggagagttgaagtgcgtatgtgtatcagtgagtctgtgtttctgtgtgtggtgtatgtggtgtgtgaatctcggtgtgtgtgtaactgtgtgagtctggtgtgtgtctgtatgtaggtgtgtgagtctgagtgtgtatgtgtggtgtgcccgtgtgtatgtgttaactgtgtgaatttctggctagcgaatgtgtatctgtgtgtggggtgtgtgtatatgtggtgtccttgtatgtgtaggtgtgtggtgtgtgtgtgtgtgtgtgtgtgtgtgtgaaagagagtgagtgagagaatgggaatggcacccactcctctgcagcccagttatcctggtttcgttcctgag

SEQ ID NO: 18330 - DNA, 1671 bp, Artificial sequence
  DNA replication origin
gcaacaaaaccacagaagtctgtctcaaactgaactggcctctttctgggcaggaatctttgcctaacttcctaagagctgcttcccaatgacatcagaaggtggtgaaaggtgtgctgggtgacagcagggagggacaggggtgagaggaggggcaggggcgaggagaggggcaggggtgaaggggcaggggcagggtgaggagaggggcaggggtgaaggggcagtgcaggggagaggagaggggcaggggcgaaggggcaggggcgaggagggggcaggggtgaaggggcagggcaggggcgaggagaggggcaggggtgaaggggcaggggcgaggagaggggcaggggtgaaggggcaggggcgaggagaggggcaggggtgaaggggcaggggcgaggagaggggcaggggtgaaggggcaggggcaggggtgaggagaggggcaggggtgaggacaggggtaggggtgaggacaggggcaggggtgaggagaggggcaggggtgaggagaggggcaggggtgaaggggcagtggcaggggtgaggagaggggcaggggtgaaggagcagggcggctgtggctcactggaagagagctctttgggactgggagctcacatcaccaccgcagatagaaatgtggcccccagtcagccccaggtggagggtgctggtgtgattgacaggggttcccatggggaaggacacacaggtggacgccccacaggcgccccgtgcacgccatgctttctgcctcccatggggaaggacacacaggtggacgccccacaggcgccccgtgcacgccatgctttctgcctcccatggggaaggacacacaggtggacgccccacaggcgccccgtgcacgccatgctttctgcctcccatggggaaggacacacaggtggacgccccacaggcgccccgtgcacgccatgctttctgcctccctccagagtttcctgccatctccctgtgaaccactcctccccggccctcccaggggaggccccgaagcctggccactgggatgaggttgtattgcacacaggctccagcagcagagagtcgggagagagaaaacggcgtgagcggacacagggcccagacagtgggtttctggcagctgcagctgcacccgaaaggcctcacactgctgggccaccgtggctgctgtccccgtcgtccttcctatgctcacggcagtcacgtgagcctaaagaggtcatgaaaggaacatagcgaccactccatgatgtggattaactcatcctcaatggactcgctttctattaagccccaaattaaagacccacccatagaaaatgataggggtggctgtgtggagcctggagccaacagtgcctgaagtctgcctgccggagttaggcacgcatggggcattctaaccaggctcactctgtctcagcctcaggtcttaaatgaaacctcttctgccttgagtctcagccttcatagaggaaaacatgccccacgctcacagtccatagagtgaaatacaaagtgtgacaaactggagacagagaaattttttcacttgcttaaaatgccgtcccacttgggatcctgattaaagcaatgcagccagcatcgcccgctatcaacggccacgggacccgcattacctccgagagtttgaca

SEQ ID NO: 18331 - DNA, 1291 bp, Artificial sequence
  DNA replication origin
agaggccactgactgtctctggaactcagcttattcctctgtaaggacagtggggctgggctacgtaaattccttggttccttctcggtccattgtcctataatttaattacagttaagcgggaaataaaatctttgcctggactttatggatgaccacttataaatattggcagatgtctttcccaggtgtccatcactgttttcatatccagagatatgctttgctccttaactgaccataacaaagcacaataaagaagccgacttgcaaagccaggtggggacgtcttctgccccgtggctgctggagccacagcccatccccagccccggcagcctgcagccccgtctacagcaggggcacagcccatggtatcagagtcctctccagacaggcaggcactggcctgagcaagtcccagggcacgaagcctgccaaagcctgccaaagcctgttcccaggcagggccacgaggacacagtggctttgtaagaatgtgctcagctgatgctctgggttatgggagggcacagggaatagcaagacgccgccttttcccactgtggcaaacagaagcccgggtcggctgccaagtggtcagtcctcattctcagagcagctcatgtttaagagccggaacattctaatccaaagaacacgcgtggccactcgagctgaccccctctgtctgctggggagtcccggaacctctacgggctcggcaagaggtgacgtaagcggaatgggctcccaggagcgggagctgcgtgtttcccctgccgtccaacttctgagtcattatgaaaatgttttaaatatcaaggataaaaagttaataattcaatgttctaaaccaagcctgcccatgacgctagcctcccctgcttccaggcagaaaccgagagaaagtgagcagctacacacactcacctctttgattttctcagaggtgatgggtttattttgggtatcaattgctccttcagccacaataataatattcagcctttttttccgggcacggttctgtggagacagaaaattaaagctctcaaattcctaatcctgttcttagcaacaaatgcaacaaaaccacagaagtctgtctcaaactgaactggcctctttctgggcaggaatctttgcctaacttcctaagagctgcttcccaatgacatcagaaggtggtgaaaggtgtgctgggtgacagcagggagggacaggggtgagaggaggggcaggggcgaggagaggggcaggggtgaaggggcaggggcagggtgaggag

SEQ ID NO: 18332 - DNA, 1410 bp, Artificial sequence
  DNA replication origin
ctgggagtaggaaggagctccgaggtcctccggcctcggagcctcggatgcgggagctccaggaagggctcggggtgcgggacgcccacagcttggggagctgccagccccgggcgcagggacgaggacccctacgcctccggcctgccctggaccctcccctcccgggtaccagcgcgccgagcgcctcccgtcgcagcgtctcacccgccgctcagccgcctcagcacacacaggccctgccgcccgccgcagcgccacattgcgcatgacgagcacctggctggcgaggaaccccctcttaacccgacgcagggcgcggggcggggcttgccgtgacagctaccactcctattggtcaacgcgaacagcgacgtcctctgcgataggctgtaggtgaaaagggtaggcctccactgctctgggacgggcgggagggcggtgcggacggagatgggcgggaggggcggggccgacgtgccgaaggaggcgggcaaggcgaggggcgtggtacgggtagaaaggggcggggccgtcttgccgaaaggggcggggttcggccagcagcaggatgtggacagatgataggagggggaagtgggcaggcgagaagtggggcgtggcgagaggcgtgtgtatgcagatgaagtggggcctggtgaagggcggggctgcgctggtgaaaagaggggctcctggaatggcgtgctgtgttgggtggggctgtgcaagtgatgggaggggcttagcgaggggtggctctttgcaggtgaggagtggagaccagtgggagaggggattgcaagtgagctgagccttgggggcggggcttgcaggtgacagggtggagcctagtgggcggggatgcaagtgagctgggccttggggatggggcttgcaggcgatggggtggagcctggtggggcggggctgcaggtgagctgggccttgggggcggggcttgcatgcgagaggtgggtccttgtgggggcagggctggcagaagtgggtggggcttggtgatggaccgcggtgttcaggtgagggtagtggcctggttgggggctgccggaagctgggccaggtgaaacttggtagccctctctggccttggtgtgggcgttggtcctgtttgtagggctgagctgagctccaaaggcgttctgctgccccgccaggcctgaaccttggggtctgggggcttcttggatgagatctcaaggctgcatggcaggtcccagggccagggccccacggtgtcacacgtatcacggatggccgccagcgaagcacagcacagctccgagctgctgcatgggagcctgtggcccccgctgctgcctccgctttcctcttcgtttcgtgtctaggaagatgcacctgagccccctgacattgcccaagtgccca

SEQ ID NO: 18333 - DNA, 908 bp, Artificial sequence
  DNA replication origin
gggggcggggcttgcatgcgagaggtgggtccttgtgggggcagggctggcagaagtgggtggggcttggtgatggaccgcggtgttcaggtgagggtagtggcctggttgggggctgccggaagctgggccaggtgaaacttggtagccctctctggccttggtgtgggcgttggtcctgtttgtagggctgagctgagctccaaaggcgttctgctgccccgccaggcctgaaccttggggtctgggggcttcttggatgagatctcaaggctgcatggcaggtcccagggccagggccccacggtgtcacacgtatcacggatggccgccagcgaagcacagcacagctccgagctgctgcatgggagcctgtggcccccgctgctgcctccgctttcctcttcgtttcgtgtctaggaagatgcacctgagccccctgacattgcccaagtgcccaagggcccttctgggaacccccagagaggctgaaggaggcccccgtaggagtgggtggttctgcactgtgggccagaaggggccctgggattagccacgcttggagagggtggggtagcccttggaggaagtccgcaccaagtctgaccttccgggtttctcagagcctctcttccttcctcccttcaccttctccctctttttttccccttgtatcacgaatacaaacaggctcaaatctccctctgtctcctaatgggctctgaaaaaaaaaattaaaaattaaatggtaagtagatggctgcagtcggcttgaacaagctaaaactttggaagcaatgtggaaggtaatactgtgggaaaaagtcccaacgtgtctaccctaaactctccatagggcagccagttctgggctgcaggtaaacacgtacctccttattgaagagccc

SEQ ID NO: 18334 - DNA, 1102 bp, Artificial sequence
  DNA replication origin
ggcaggctgtagtgatgatcgacatctgtgtttgcaagagccaaagggtgccgctcttttacgggtcttggaaataaatcttcggtatgtagatagctaagagctgaccattgtgtctccatttcaaattgtgtccttttaatgtggaagaggatttatgaactttattatcaacatgtagcttgttgaaaatcaaatttttgtttatttcaggaaagcagaagtactcaaattattttattagacttgatgaaaaatgggctggttgtgctcagagactttgattctgattctagctctctaaccttcagcacttctctgctatttctcttttaggttatatttttaaatgaaaaaataagcaaaatcctctgcagtgttgaaaaaaagttgaagagcttggtccatgggtagattaatagataggaagatgatggaccaacagatggatgagtgggtgggtgggtgagtggaggggcggatgggggaataggtggatggttggataggtgggtagatggggggatggattgatagatggataggtggatgggagggtaggtgtgtggataagtgggtggatgagtggaggggtggatgggggaataggtggatggttggataggtgggtaggtgggtggatggaatgatagatggataggtggatgggtgggtagatgtgtggatgagtgggtggatgagtggaggggcggatgggggaatagatggatggttggataggtgcgcagatgggtggatggattgatagatggataggtggatgggtgggtaagtgtgtagatgagtgggtggatgagtggaggggtggatgggggaataggtggatggttggataggtgggtagatgagtggatggattgatagatggataggtagatgggtgggtaggtgtgtggatgagtgggtggatgagtggaggggcggatgggggaatagatggatggttggataggtgggtagatgggtggacggattgatagatggataggtggatgggtgggtagatgtctggatgagtgggtggatgagtggaggggcggatttacccctaccattcactctcactctacagcatgatgtt

SEQ ID NO: 18335 - DNA, 2051 bp, Artificial sequence
  DNA replication origin
gcttgccactcaagtgtggctgtgtgttagtttaccattaagaagttaaaatatcttgtaaatatacaaataagtgattgaagaaataaataaatgaggagagtagacaagccttccttccaaataacaattccaatttcttccaaataagaattccaaataacaaatgtggaaggaatgaaggaaatgggaaaatcaccttcagacctgcatagtaatgatgtcatgggccagaaaccctgaagaataataaattcatggcaaagctttaaggaggagctgggtacttacatagccccaagcaactcctccaaatacttaaacagtactgggatggtttccacagggccccacactcctggtacgccttccatcagagagtggagctcagtctccccatactgagacctgagtgtgagctgaactgggtgactctgtggacagcgacttcccagaatgaagaaaggagaatggtgactcagcagagttagggaaggggagggtgactcagcagagtgaggaaagggggcagtgacttcacagagtgagggaaggggacagtgacttcacagagtgagggaagggggcagtgacttcacagagggaagaggagggtgacttcacagagtgagggaagggggcagtgacttcacagagtgagggaaggggacagtgacttcacagagtgaggaaagggacagtgacttcacagagtgagggaagggggcagtgacttcacagagtgagggaagggggcagtgacttcacagagtgagggaagaggagggtgacttcacagagtgagggaaggggacagtgacttcaaagagtgagggaagaggagggtgacttcacagagtgagggaagaggagggtgacttcaaagagtgagggaagggatggtgactcacagagtgagggaaggggacagtgacttcacagagtgaggaaagggacagtgacttcacagagtgagggaaggggacagtgacttcacagagtgagggaagggggcagtgacttcacagagtgagggaagggggcagtgacttcacagagtgagggaagaggagggtgacttcacagagtgagggaaggggacagtgacttcacagagggaagaggagggtgacttcacagagtgagggaagggggcagtgacttcacagagtgagggaaggggacagtgacttcaaagagtgagggaagaggagggtgacttcacagagtgagggaagggggcagtgacttcacagagtgagggaagaggagggtgacttcaaagagtgagggaaggggagggtgacttcacagagtgagggaagggacagtgacttcagagtgagggaaggggagggtgactcacagagagagggaagggacagtgacttcacagagtgagggaagggacagtgacttcacagagtgagggaagaggacggtgacttcacagagtgagggaagggacggtgacttcacagagtgagggaagggacggtgacttcacagagtgagggaaggggacggtgacttcacagagtgagggaaggggacggtgacttcacagagtgagggaaggggacggtgacttcacagagtgagggaaggggacggtgacttcacagagtgagggaaggggacggtgacttcacagagtgagggaagggacggtgacttcacagagtgagggaaggggacggtgacttcacagagtgagggaagggacggtgacttcacagagtgagggaagggtagcatgacttcacagagtgagggaagactgaacaggacagaagagccggggtgatggatttagatgtgggatccttgattggtctctgagacataagaaggacgttagtgaaaaaacagataaaatcctcaagtctgcagtttggggcatgtggaaatgtcagtttctcaggtttgataaagggaccctggttacgtcagtgttaatatcagggaatcctggggtatcagcataaccagctctgtcctatgatttttattattattattttttcagaaggagtcttgctctgttgccc

SEQ ID NO: 18336 - DNA, 1010 bp, Artificial sequence
  DNA replication origin
ggagttggggggagactcaggcatggcaggctgcaggtccccagccctgccccacggggaggcagtcaaggcctggagagaaatggagcccagcgccagtgggctagcactgctgggggacccggcgcaccctctgcacctgctggcctgggtgctaagcccctcactgccctgggcaggcagggccggccggccggccagccgctcagagtgtgggcccgccaagcccacgcccacccagaactcgagctggcccgcaagcgccacatgcagccctggttactgcccatgcctctccctccacacctcccggcaagccgagggagccggctccggcctcggccagcccagagaagggctcccacggtgcggcggcgggctgaagggctcctcaagcgcggccagaatgggtgccaacaccgaagaggcaccgagagcgagcgagggctgccagcatgctgtcacctctcaacaccaggcagttgctgaggcgggagggaaacttctatgcacgttctctcaggctctgtcctttccagggcacaaagcacccggagtggagcgggaggtggttaagcgagagagtcctgcagcaacgtggtcaggcttctctttccagactgtggggtccaaggagctgtctgtggaattagggtgggctcaggaggcttcaggaagctgcgcaaagaggatcgggtgcccaaggtggagtcacgggagtcaaagatctgtggggtcaatagtgccctcgaccttgtgtggttccaaggagcaatcttctacattacaacgcggtcatttaatatgtactaaactcaacacacagctggcgggctgcctggtcagagatgacttttcccgtgtctggcggtgggctgtacatgaagggcactgtcatttctcagggaaggatgttctgatgaatctcttgggcaggctgcgattccccaggtacccccgacttctgcagtggaagtggcgcttggtgatgcacatgacctttggggaca

SEQ ID NO: 18337 - DNA, 1809 bp, Artificial sequence
  DNA replication origin
caaacctccaggagcctcttctctcccagactttcggggaagagcagcttctgggctcatgtagggccctgcactttcattctgggggcactgacaaatacaaacagaattcaggtgagtgatacaaaggaaatggataaagcatttggtggggagagaggtgtggaggctcctttggtttgaaagattaagactcaatctcacgtctccaaggaggagaaattctacatgagaagtaaacattgggagcgccaggcatgggaggcctgtggcaagggctgggggcaggggaagctggcgccagagggggccagagggcacctggtgtgtttcagggcagttgaaggcgtaaggtcaggatgggcagggcatgggcagaggggaggggtgacggggggcatgggcagaggggaggggtgggggggcatgggcagaggggagggtgggggggcatgggcagaggggaggggtgagggaggccagaaccgggcagggcccagcctctgcttgggtgttcatgggttcttttgtctgcagagcattaggaagacaagcagggccttcagtaggcataaggtgatgaggttcatgccgttggatcccacgggtgccctggggaagagatggttgggaagtctgagaggaagcaggagagctttcggagcacatggatgccgtccagaatggagatggttgtggctcggaagaaaaagaaatcacccagctcggagtcaggatacatttggaggtccaggccgccgagtttgctggtggggaagataggcaccagaaaggaaagaggacatccagggcaatttcttctgccccccagccaatccgtacattgtccagaggtaggaagaagtagcctcattttatggtcaggatccttggggctcagatgcgttaagtaattggtcaaaatcttgcacaaatcctgcaagtacagaggtagaaaatgaatccaggtctttgattcccaaacgtaagctctttcgctgtgtcacttctcctcttcgttttcatgccagttccaagaattaacactgcagttagctttctgtttcctttcccaagatgtactatgtaacaatgaagaaaccttaagaaaaggatagcaatgtctaacatggatgcagggccagcctcattctctgtcaaagcgactagttcctacactctgggttccaatacaaagaatgcacatttatgcagcaggaatggcccaaggaccacacattgcacagctcttgggagcagagcagaaagctgcgccaggcctatctgatcagtcttcatggaaagggtcgcagatcccattcggcttggagattttgatgaattttcctttctgtgggttggatttaaaatgtaatattcttcccccagttgaaagtttaggactaaaagatgggaaatcttttacaagctacacttcttccccacccttacttcccctggagtttccatcagcaatcatctgagtgccccattaactccccaaaacccaaggtctgttggtggtggaatattgagctgaagagcagactgttgtagaagtcatcagttctctctgatcatagtgtccaaacaaaaacattatgggggaaactggccccatcacttaattatctcccaacaggtccttctcaaaacacatgggaattatgggagctacaattcaagatgatatttgggtgaggacacggccaaactgtatcaagtccccaattgagggcacctgctccctgtagataatggcatttcagatctacaatgtggcatttccagacaactcactcatttacg

SEQ ID NO: 18338 - DNA, 1593 bp, Artificial sequence
  DNA replication origin
gcgccgccaaggcctcccctcggcatccccgctccagttctgagtaacttcaagggctccgcctctccacagagcagccccgcccaacgccgcggccgcagccccagagtctgaggcttggctgccgaggttcccgcttctcccagagagcgcctcggcgggcagcaccgactccgttttaggaaaggccgggccgggctgcttgtgggcggtgggcggccacctcagcagcgcctttcccgggcgtcggccaggcggaggggaggccgccgcacttctccccagccccggcctgggtcccatcgggcgcccccaagtcccgcgctcccctaggtcaggcgcgcctccctgcccgcgaccgcgtcaccttccaggagctgaggcccacggctgggatatctcccatggccgccgccggccgccccgccgccccgccgccccgcacgcgactaccgacaggcaccgcgcgagctactgcggcgctggcgacccgccgttgcgactggctggaagtgccttgtgacggctgacactccgacaatggctggaagcatgaacgcagggcttcctgactggctgctggtgtcgcgcgccgggcactgactggctggttgtattaaggacgggcaccccgattggctggaggcgcagagccagctggagtcccaaatggctggaagcaccgcgctctggacatcctgattggctggcggcatagacgacggaattttcgattggcttgcagagccacgcaggagcagggaaggttttacaatcggctggcattgccgctcacgcccccaccttaggtgtgacctcctggttgccttctccctcgcaccgggtgcatatgcgactgagggtagggcagaggtgctaggttgatgggcagagagtcttcaccgttccagggcctcgccatggccgggccatcctagggcaagctctagggtcagggtgcagagtcctgcgtcccctggggcacagggtgcgcgggagtgggtccccgctctcttgtaccaaggatggccattctcaggtgccccgaggcccccagtctgggagaagcgtgcctggccttggttccccgtcagggagccactgtgcccttggaaaatgccttccactccctgggtcctggcccagagcggctggggcttgcaggacagcgggggtcctgggtggtgcaggggaggccgagccctgcatgtagaggggagcgtccttgcttgcagcctcgggcccccgtttggaagtggatggggtggactggacaccccccttatgagtggactgggctcccccagggccagtggagggaaagaggggtcaagggagccttccgacgcccctcttatctctcctggagcttacagctcccccttcattgcccccctcagccctgggagtcctactgccttgaggacacccacacccagatgagggctttgtttctaggttccttgcctgggtcttcagtgctggccatcaggggaggcgctgcccattctgctcaatggggcggctgcagccagagaaactcccagggtcactctgggtgtccccctgcctcccacccaacttgcatctcct

SEQ ID NO: 18339 - DNA, 1310 bp, Artificial sequence
  DNA replication origin
cagccgtcacaaggcacttccagccagtcgcaacggcgggtcgccagcgccgcagtagctcgcgcggtgcctgtcggtagtcgcgtgcggggcggcggggcggcggggcggccggcggcggccatgggagatatcccagccgtgggcctcagctcctggaaggtgacgcggtcgcgggcagggaggcgcgcctgacctaggggagcgcgggacttgggggcgcccgatgggacccaggccggggctggggagaagtgcggcggcctcccctccgcctggccgacgcccgggaaaggcgctgctgaggtggccgcccaccgcccacaagcagcccggcccggcctttcctaaaacggagtcggtgctgcccgccgaggcgctctctgggagaagcgggaacctcggcagccaagcctcagactctggggctgcggccgcggcgttgggcggggctgctctgtggagaggcggagcccttgaagttactcagaactggagcggggatgccgaggggaggccttggcggcgctggactcggccggaacagggaacctcgaagcctcctctccagcaaagagagaaagaaaagttggggccgggcgtggggtgcgggcttgtaatcccagcactttgggaggccgaggcagtaggatcgcctgagctcaggagttcaagaccagccaggtcaacatggcgaaaccctgtttctacaaaaaatgaacaaatcagctgggcttgggggtgcgcgcctgtggtcccagctactcaggaggctgaggtgggaggatcactggagaccaggaagtcgatgctgcagtgagctttgatggcgccactgcactccagccttggggacagagccagaccttgctggaaaaaaaaaaaaaaaaaagaaaaaaggaaaattggaattgctgattaggctttaaaagaaactttgggatctcatgttgttccctgtttagaagcaacctgccctgatgcctgagacatataatcgctctgtgcatttatggggtgcagcgtaatgttttgagccgtgtatacaattgcaatgtggttaaatcaagctaattaacatatctatcacctctctcagttattattgtttgtggtaagatgtttgaaatgtcttgttattttgaaatacacatgtgtagtaaattattgttgactgttggcatcctagtgcgcagtaagtcttaaaagctgtgtctcctgtgtgtttgaaactttgtaccctttgatcagcaactccccattccctccttcctcacctcccccagcccccagcgtcttataaccaccat

SEQ ID NO: 18340 - DNA, 949 bp, Artificial sequence
  DNA replication origin
gcactcaccctcctctgtgctttgtttcctcactggtccccccaaccagtctgtgacctccttgagggcaagaatggccctgttcatcctcatgtgctctgcactttgcacacttccaggcacattagaggccttcgatccaaggctggtggatggatggatggatgagtaaacaacaaatgagcaaaacggctcttttgaaaagtgcagcccctagatgatgggttgattgacaggtgcggcacaccaccatggcacacatatacctatgtggcaaacctgcacattctgcactcgtatcccaaaacttaaagtaaaaaagaaaagaaaagagaaaagggaaaaaggaaaggaaaggaaaggaaaggaaaggaaagggaggggaggggaggggaggggaggggaagggaggggaggggagggtaaagggcaagcagccattgaagtaggaagaggatgatagaaaaacaacggaagcaaacctcagggccccagggttttctgattgcttgattgggatggaagacttgcttgtggccacccactgagggcagaaagactgagggggtgggagcctggggccctggaggggtgagagcttggggccatggaggggttggagcgcaggggcggatgccattcactgcacaggaagaacaaaggggtaagagggggtgacaggttgatcaaggctgtgccagtttgggtccatcgcagcaggagaagaggcaggaggctgaggagctcactggcttcccagggcagtggccgtgctaccgtctgctggtgcaggacagatggggactccttattcatcacctctcctggttagctgtgccctcccacactggggttctcagacccccaagtcatttaccagccttggctcccagcccttgtcctttgggcaccttgaaaatgtgccttgtctagagaatcaggttgacag

SEQ ID NO: 18341 - DNA, 1768 bp, Artificial sequence
  DNA replication origin
agcactttgggaggtggatgcgtgaagattgcttgagcccaggagtttgagaccagcctgagcaacatagtgggaccctgtctccatttttattttttaaaaagtattgtttctagcattggagaaagaaaaatgggtttgcttgctagtgtgaatgatgcagagggggaggtggcatcaaagatgtgggaggaagacagaaaggttgttggatccatgtcttaagtgggtgagaggggatgggaacttagagtgtgacacagaggttgtccctacacagatgcacggacaattcaactaactcaataggaaggaaggcagagtgtgtgagtacaggtgctctccgggcgaagacacggtggtgaggtttctgtgaaatcgtgcttctgaaacaccccattttcttaatgaaaagggagtaaagtcagcagctgaggttggaaagggaaggatatactagaggtctgcggagagaagaaaatgagtgaaagtctaagaagtaggggcaggagtggtgaaggaagcgtggtgtaaacgctgggccatctgaagagcccatctgaggagtccagtgaggattctaaggagagatcagtctgtgtgtgtgtgtgtgtgtgtgtgtgtgtgtgtgttgtgtgtatggtgtggtatgtgtatgtctgtgatatatgtggatgtgtggtatgtgtgtgtggtgtgtgtggtgtgtggtgtgtgtggtgtgtgtgtgtggtgtggtgtgtgtggtgtgtggttggtgtgtggtgtgtgtgtggggtgtgtgtgtggtgggtgtgtgtggtgtgtgtggggtgtgtggggtgtgtggtgtgtatgcgtggggtgtgtgtgtggtgtgtgtggtgtgtgtgtggggtgtgtggtgtgtggtgtgtgtgtgtggtgtgtgtggggtgtgtgtggggtgtgtgtggggtgtgtggtgtgtgtggggtgtgtggtgtggtgtgtggtgtgtgtggtgtgtgtggggtgtgtggtgtagtgtgtgcgtggggggtgtgtgtgtggtgtggggggtgtgtgtgtgtggtgtgtggtgtgttgtgtgttgtgtgcatgtgtgtggtgtgtgtgtgtgggttttaagctgtgttaagcttcagggttcaagggcagaataatggcgtgtttgaatgaataaaacaaggcaaatgtggaacgagggaatctcaggtgtgcacagtgagggatgataaaatccactctggcatttagacgggcaaggagggaagagaggtcgggacgtggcgggagggatggtggatggtgaaaaggtagcaggatccgtggattattggcttcggggaggttgggagatggttggagttgctgtcctaggaagggtgagctggaaagacaggacatggtggtcagaaagtttgtgacttgtaatgacaaagtcatgggagcgagtggtgaggcaggaggcaggtcagggtcatgggagtggaaatgtttaaggagctgagaggccaggtgtgggagaggtcatctacacgtgtactgagattaccacagattaagacaggagccccgtgagcgagattgacgagccaagagctaaagtgacagagacatgaggtgctgtgggagaccgaggtgggtggagacatgaggtgctgtgggagaccgaggtgggtggagacatgaggtgctgtgggagaccgaggtgggtggagacatgaggtgctgtgggagaccgaggtgggtggatcacttgagcccaggagctcaagaccagcct

SEQ ID NO: 18342 - DNA, 1771 bp, Artificial sequence
  DNA replication origin
gggcatcgtgcccgtccctgccggtctcccgggcacccggccaccgccccaccccctcctccgtgccatggagcccgagctggcggctcagaagcagcctcgaccgcggaggcgaagccgccgggcctctgggctcagcacggagggagcgacggggccttcggccgacacctccgggtcggagctggacgggaggtgagtgtgggggaggggagggccgaacgggaggtgagtgtaggggagcggagggccgaacgggaggtgagtgttggagaggcaagggccggggggaggggagggctggccgggagttggatgtggggggcggcgagtgggggtgttggtgagggccagggggaggcgagggccgctgggaggtgagtggggggtgggggaggtgaccgcggggttggggggggggacgggggccgctggaagtgagggtggcacaggctggagtgacagtgtgcctggccttggaccgaggtcggtcctgagaccccaaactgcgattttccctgcctgtggcaaaggggcgggtttattgagtctcctcgcctcctgactgtttctcaggggagacttaggaaaaaccacaatggttttgttctgcacacccaactggctgtaggctggcgttcccaaatgcctttgctcagaccgaaactgtcatggtgagcaccacgagaatgggcttccatgtcctgagaaagaaaagactaagggataagttgacttcgggatatgttatgagatgcctattagagagttcatcacaaccattttcgtgttttttctttttactttttgtggaagtatacattgaaatgagagtgtatgactcgtgtttggctcagtgaaatttcacaaagcgaagctcaggggatagctagtgaattaggaggaagggaaccaagtgagaacagtatccaggaggccaaatgaagaaagaatttcaagaagaggacgtggcgagctatgtcagatgttattgataggtcaaataaaatgaggattaagtaaaataagatgaggattaagctagatgaggaatgaaaattaaatttggtaatgagaagagagtattgatcttagatggtttccaagaatggttacaatatcgaacttagagtgttttgcaacaggttgagaagagaatgtgcgatttgttcagaaaataatgtgagtgccaacactaggaatatggaaatggaaaaatactcttgttactatttaagatttataatctagtggggaagaaagataagtaggttaataattattataatatgtgataaaagttattatagtgatatacacagaatgccgtagattaaaaggaacacttaatcctgactggagagaataggaaatgatttcctattgtaatccctgagtctttaaggaccagtttagagagcagatgtaaatggatgatttcaggcagagaagcatgtagaaaggccctgaagcaaatgagtctgatgagttctgggtatatattctattttattactatattaacagtgatatttgtatagaggagaggaaaccaatatggggagaaggaggaggtagtcatgagagatgatgctaaagaggtaagcgccacatcatgaagagaccttgtatgccttgacagagtttgggttttatcttcatggtaatggggaaatactgaaagactttaaatgagccaatggcatgacatatttgcattttaaaagatcagtttgccttccatgagaaaaataagcaacattttggagtc

SEQ ID NO: 18343 - DNA, 1691 bp, Artificial sequence
  DNA replication origin
tttagcaaagaaggggtttcatcatgttggccaggctggtctcaaactcctggcctcaagtgatccaccgccttggcctcccaaagtattgggattacaggcgtgagccactgcgccaagcctgtatatcttctttggtgagatgtctgttcaggtcttttgtgagttttttaattgggtcattttcttattgttgagttttaagagttctttgcatattgtggataactgcccttcatctggtgtgtcttttgcaaatattttcttataatccgtggcttgtgttctcattctcttgaagtaacttctttttcatactttcctgaattttcctaattttccatgataaaaatgtataattttagcatcagaagaaatatgtttaaagctctaatattttactaaatcgatattttatcattatctaatttttgctttagaaagatcatttggctgctatatggaggatggattgaagaatggtgagagtttggggacccgtgaaaggctaatgctgtacttcaggcaagagctttctgcagctaatagtgtttggaacaatgaaggcagtgggaagtggtagaattctgaatgcatcacggagctgacacagcctatggatggagtggtcagggagcatgagtaaagtagaggaatcaagaatgggtggagagtggcgccgtttactaagatgtggaagactgggggtgcagaggattcaggatggaaaagctagagtcctctcgggttctgttaagcatgaagcacatcagacttgaagaggacatgtcaagtaggatctgggtagcaagtcaggagctcagaggggtggtcagaactggagatgtaaatctggaagttgtcaggtgttggtggttaaagccatgggatggatcaaactccccagtagataaaacaagatgtctgggaactaagccatggctttccaacatttacaggtctggaagaacagaggtccaaagggagaagaggcgagggcggtaggagatgaggagagtgtgctggtacccaagagcggaggaggtgttccaggtgctgccgaggttgaatctgatgaattactcctggaagctgccggctgctggagatgggagctggggttgagggtggcttagaggaaggtgggggtgggggtggcctagagaaagctggggagtcagcgtgcaaagggagcagggacgtctgggcacgagtgcagttgtgtgagctgatgatggagggggaaggggtgcaggtttaggaggccgaccctggatactggtacttgggggagaatcggaggtggggagcatgcatggtaaagagctgctttgccctgggagggcaccactgagcccagcatttagagcatggcctgggagtttggggtagggtagaatggggcagggggaccacatctcaggctggagggagggcaggctggacgggagaggaaaagccggtgcctggtgggacaaggtgaaggagggaaggaagaacaacaaatacaggggcactcagatgcatttaatctcagctttgccacaagccagctgcctgatcttgggcaattcacttgatgtttgtagatttcaggttcctcagctggcaaaggggatcagactaagtgatccatgtgggtttccaggtctaacttgatagatctgtccctgcttgtcctgcccagtgaa

SEQ ID NO: 18344 - DNA, 893 bp, Artificial sequence
  DNA replication origin
tcatgaggtcaggagatcgagaccatggtgaaaccccatctctactaaaaatacaaaaaaattagccgggcgtggtggcgggtgcctgtagtcccagctacttggagaggctgaggcaggagaatggcgtgaacccgggaggcggagcttgcagtgagccgagactgcgccactgcactccagcctgggtgatagagcgagactccgtatcaaaaaaaaaaaaaaaaaaaaaaaaaaaagagaataagacggccttctgacctttcagggtctagggctgtaaagcgtctcagggttgttgccaaatgagccatgaactgggctgggttttttatatttgatgaaaaagagcctaaacactaactgatttgggagaggtcggataaagaaaaaggagcattaaccttgactatgcctttagctccagccacctttttaagaggaaattgctgggcaggtgggggagggctagtcacggaaagaaactgtaagtcagaccgggtgtgaggaggggaggtgataaaaggattatcgggcggaggagcggaggctgaggaagaattgggacctagcttgccctggctaggaggagagaggtcagatgggtctgtagaaaaggaagattagaaagactcagcaatgcttggggttgggactgaggggagaggcgggaaggaaagaaggaagatttgggaccagttgcgttgggaacagaggctagggagggactgatgtgtaaaagaatgcctggacgtcaggcacctcagaccatttgctcattttacgacaagaattatttagactttgtaggatggaaaaaatgaaagtgccgttttctggctattcagagccattgtcaagtttgtattggggctaagcagtgttgtagaaga

SEQ ID NO: 18345 - DNA, 1295 bp, Artificial sequence
  DNA replication origin
gtggcaggcacctataatccaaacgactcaggaggctgaggcagttgaattgcttaaacctgggaggcggagcttgcagtgagccgagatcgcaccactgtactccagcctgggcggcagagcaagactccgtctcaaacaaaaacaaaaacaaaacaaacaaaaacaaatctcagtgcttttgatgaacagtattttcctgcaccgggagccttgtggtcgtggcttcatggaggaggtgttggtgactttcattcactcactcactattctacaagtgtttccttgggtgcttctccttactgtgagtctgcagggacttggagggagacgctgcgccggcctctgggcccaggagatgtaacataaatggccatgcaaagacagtgggtcaggtccctcgtcagtggattcccattcgaggaggtgctcagagaaggggacagacttccaggaagtggcactgaggcgggggcagatttcaacaggggtggggcgttcttggtgaggaaactgcatgagtgacggtttggaagtgggagcgtcagtgtcttttggggagcccgcgctgcctgggaggtaagggagaggtccgaatgccgtcgcagacagcctgatggtttgctgaaggagtctggatccttttcaagtcccagtgaagcctggtgatatggccttgggcaagtcagtggctctctctgcctcagtctcctcaactgtagctgggggtaacagtgagacccgcctcaacgtggttgtgaggagggtggggggtgggggatgtggagaaagtgctaagaacagcgtctgtggggccgcagaagtgttttgcataatgtcaccaagattagtgctatttcttccccagaagatcagatggagactcacggaaggtttttaacctgtggggacgtgcggccaaattgtgctttaggaagcttatgctggcagtgatgtgtggtatgaaggagggcaagggagatgggccctgtaggaggcagattcggccacctaagcctgagctgattaggacaggagggaaggtggaggcagtcagcagagaaaggaagggacgtggggaggggaagcagagaggaaggcgttggagggacagggcctgacttagtaaccccggggccttgagcagttctggacgaggtgggaggggagtgagcaggggacgggagagactccagccccaccaggctgagccgtgtccacaccctgccgggtcagagttactgctggtaccatcgggagggtgggccaaccaggcccatctggcctcttgcctg

SEQ ID NO: 18346 - DNA, 1748 bp, Artificial sequence
  DNA replication origin
tgccctgcagtggaatgagggcccctcagccccgcattgatctaaataaaggactgccgagttccatgtgtgcttggtgtttgtggggcggctgcctccgagggcccccacctgcttccagggttccttccagcccacccctctcacctgcggtggcagaactgcctggagcaggccccaggggcagctcctgcctcccctgacgcggagcagagggcaggtgggcagaggatgtgtgaggatggtgctgggcggtgtctgtggctccaggttctgcctgagctgctggtgaggacctgggcacgtgtcccgcacaaacaggagcgggcgcctcgcatggacagacggagcccagctgccagcctctgcacgcagcctgcctctcttcggctgcaaataatatacgtgtacgtctgtgtgtgcatctgtgtgtgtgtctgtgtgtctgtatgcgtgtctctgtatgtgtgcatctgtgtgtaagtctctgtatgtttgtgtgtctgtgtgtccttgtgtgcatctgcatgtgtatgtgtgtatctgtgtgtgtgtctgagtgtgtctctgtgtctatgtgtctgtgtgtgtccatttgtgtgtgtgtcttatctgtgtgtctgtgtctgtgtgtggctttgtgtgtgtatctgtgtgtgtgtgtctctgtgtctatgtgtctgtgtgtgtttatctgtgtgtgtctgtgtctgtgtgtgtgtctgtgtatgtgtttgtgtgtgtctgtgtgcctatctgtgtgtgtgtgtctctgtgtctatgtgtctgtgtgtgtttatctgtgtgtgtctgtgtgtgtctgtgtatgtgtttgtgtgtgtctgtgtgcctatctgtgtgtctgtgtgtctgtgtgttgtgtgtgtctgtgtctgtatatgtgtttatgtctgtgcatatgtgtctgtgtctgtgtatgtgtatatgtgtgtctgtgtgtggctctgtgtgtgtatctgtgtgtctaggtatgtctgtgtgttcgtgtatgtgcctgtgtatgtatctgtgtgtatctgtgtgtctgtatatctgtgtctgtgtgtgtgtgtctaggtatgtctttgtctgtgtgtctatctatccgtgtgtctgtgtgtctatgtgtgtgtgtgtctgtctgtgtctgtgtctgtgtatctgtgtgtctgtctgtgtctatctgtgggtctgcgtgaatgtctgtgtccatgtgtgtctgtatgtgtctgtgtgtctgtgtgtctttgtgtgtgtctgtgtgtgtgtcactgtctatgtgtgtgtgtctgtctgtatccgtgagtctgtgtgtgtctgtgtgtgcatgtatgtgtctctgtgtctgtgtgtgtgtgtctttgtgtctatgtgtccgtgagtctgtgtgtgtctgtgtgtgcatctgtgcgtctgtgtctgtgtgtgtctctgtgtgtgtgtgtgtgtgcgtctgtgtggttagggttgggggaggtggggaaagggcagagcaagggggagaaggacggggctgagcaggcagggccctccaccctgacagggcacagccctgtatggacttgggttgtgttggtgccgtgaggtttagaaacgagacccaggctcgctcatcacagcctggcgttcccagggctccctttgtcctgggtctcagatggtcggacccaggcaccttgcttggcagatgtggaaactgaagccccaggtgggtacaggagcagcccaggccaacttatggtagcatt

SEQ ID NO: 18347 - DNA, 1812 bp, Artificial sequence
  DNA replication origin
cggctgccccagccccgccatggcccgcctgagctcgtccacggtgatgtggccgtcgccatcctggtcgaaggcgcggaaggcgacctgcaggtcctccaggccggccctggccttcttcgccgccgtcaggaactcctggaagctgatttcgccgtcgccgtcgctgtcaacctcggagatgagtttccttagctgggcctccgagaggttcttgcccgtggccttcagcgccgcgcccagctcctgggcattgatggtgccgtttccatccgtgtcaaccgcggagaaagcctttttgtactgggcctcctcctcaggagtcagctcaccggccatgcctgcgtctcctgcacctcgcggagcctccgagctgctgcccaccggccctcaacctgctgctctcagagctcgtggtccagagtgcaggcagccgcagggatccgggcagcgtctgtcccagacagttctgccttggcatgggaaccccctccttttctgcaatcggaacaaagggaggagggaggctccccaccctccaaatgccctggggtgagagcctcctcccagggagggccagatcagctgcagacaggaaatgcaggaatgggagttgggagagctgtcaggtgccaggtgggaactgccatggggtcggggtatcggatggctagcctgccaaccccgcctggccttgatagcaaccacctccctccaggaacattctgcccaagggatagtttcccctgcagctgattctcggagatcctgaccaagccaaggggttcaagacagcttctgcaacttcacaaagactgagactggagggggaggtggcttgaagagggctccctcaagggcacagcaggccccagtgtttggtgtttccgtacccctctctccagtgctactgcctagctcttgccctgaggctggggctggtggaagggaagtgggtggtagtgttgattctgccagggcacaactgtgggtatcatgagattcccaggccagggtctagagacagaggatggggctcactgcctataacttcaaggaagcaagggaccagggctgccttcagagccatagctggtgctgagatggtgtttatcaagtgaacatgtgacgtgcagtttcagaggagagggaaagactttttgtctccccagaatactcccttctagctcagggattcctacaattcaattccatcgccaagtccaaggttccctgtgcagacaccctgggagctcagtggcaggcgttccattcacagggcgtcaaacagttacagctggagttttgctgcagcgagacacgggggacctcagtgcccagcataccccaaaggtgcaggcagaggtgcaggaggatgcagaacaggtggctgccatcaaacttggccctccttgtggttttactaagcatcagccctaagcacagagacccatctgggagcctactggggtcctcaatctgatctgttctctggaaggaaacccccagggccacttgccttgaccaacttttagagcaacagctaagctttcgggggaccatccccaagtccttccactgatgtgatctacagttgtgaggggacatttgccttggagtccccaaaatgcctttcccaagcaagtcccctctgatctccatagattcccattcttctccccagcccctgcccgtacacagggaacaaactcctttattcccctgggaaagtttatacattccacctccctcctgttcagcccatcaaatagaccaagtgccctctccttccctaaagtgcagccagacaaa

SEQ ID NO: 18348 - DNA, 773 bp, Artificial sequence
  DNA replication origin
tttcccgctcccccgtataggaattcattgcattttcaaaaagcacaaaaatggagattcctgcctcgtttcaaccctgaatttaacaaggatcatttccatggaaaccaaaaaaaaaaaggaaatgaaataaggacgaatatctcatttatttccctgcagctctcatcccctgctcatccaagcctccctccttccagatgaataggaacaggttacagctgacccagtttcactcccagcttcagaagatgaatcacggtgggttggcggacaaggaatggggcaagctggggcagcgcggaaggcagtgctgttttcaggaggcctgacctctgtggccagagtccccgtcagcaccgcttactgcaggccaagatgcctcccaccctccagaatccgaccgcggagggagcttccagtccaggagcctgcgggaatcctggcgggggctgagggctgcagcccccctggcctgggcattgggtgcctcttagggatcttgcctgggtgccctaaggggtcacccggtgtccgtcctggagggccgcagagtcagcgcaacctgccctggtgctcggtcctaaggtcagctctgcttctcccgagtggggagggcgtcacggtttgcctgcagtgggagcgttccgtgtcattcagacgagcaggtgggaaggtcggcaggagtgcagagaagagacgcgggaagcgggatgcagagaggtgggctgaatcaaccaggcgcaggaggaagccacagtgcccaggggagg

SEQ ID NO: 18349 - DNA, 2374 bp, Artificial sequence
  DNA replication origin
gagtaggtttgcttttctcagtggtaggggttaacaattctgaaaccattttctgtttaccagaggtttaagcaagtgagaaaacgtaataaaatgggaggcagccttctggctgggaaggggcagagtatctgtgaccttctgctggttcccgataatggccttggggtccgtctcccaagcacctctgctggggctgcccctcagccctcccgcgtgttggggcggtggtggggacagttcccatgtgtgttcgtgaagcccgcccagaacttcagcaccttgggccgggcacggtggctcacacgtgtaatcccagcactttgggaggctgaggcgggcagatcatgaggtcaggagttcaagaccagcctgaacaacttggtgaaaccctgtctctactaaaaattacaaaaattagccgactaaaaattacaaaaattagccgggcgtggtggtgcgtgcctgtaatcccagctactcaggaggctgaggcagaagaattgctcgaacctgagaggcggagattgcagtgatcggagatcgtgccattgcactccagcctgggcgacagagtgagacgccatttcaaaaaaaaacgaagaacttcagcacctttaacattgggcacacgctgagctgtaagtaggggacggaggtgccagaggagggacaaaggataaccaaggcctcctaacacctgggccatgggggtttaggcatgcatcgtttttagcttcttgtcgtggagatcacgctgtgtatttcattatacatactttgcattcatttaggttgcttgcttggttcatatacacaccctttacctctatggggatgatgtgctgaggaacaaggcgtgtgtggggtgtgtgtgtgtggggtgtggctgtggtgtgtgtgcggggtgtgcgtgtgtgtgggggtgtgtgtgcggggtgtgtgtgtgggggtgtgtgtgcggggtgtgtgtgtgggggtgtgtgtgtgcggggtgtgtgtgtgtgtgggtgtgtgcagggtgtgcgtgtgcagggtgtgtgtgtgcggggtgtgtgtgtgcggggtgtgtgtgtgcggggtgtgtgggtgcggggtgtgtgtgtgcagggtgtgtgggtgcggggtgtgtgtgtgcggggtgtgtgtgtgtgcgcggtgtgtgtgtgtgcggggtgtgcgtgtgcggggtgtgtgggtgcggggtgtgtgtgcggggcatgtgtgtggggtgtgtgtgtgcggggtgtgtgtgtggggtgtgtgtgtgggggtgtgtgtgcggggcatgtgtgtggggcgtgtgtgcggggtgtgtgtgtgggtgtgtgtgcggggtgtgcgtgtgcagggtgtgcgtgtgcggggtgtgcgtgcgcgggttgtgtgtgtgcggggtgtgtgtgtgcggggtgtgtgtgtggggtgtgtgtgtggggtatgtgtgtgcggggtgtgtgtgtgtggggggtgtgtgtgcggggcatgtgtgtggggtgtgtgtgtgtgcgtgcggggtgtgtgtgtgcggggtgtgtgtgcgcggggtgtgtgggtgcggggtgtgcgtgtgcggggtgtgtgtgtgcgcgcggtgtgtgtgtgcagggtgtgtgtgcgcatgtgcatgtgtgtctgagtgtgtcagcatgtgcctgtgagcgtatacatgtgcaggcgtgtgcaggctcgggtgtcagcatctgagcatgtgcacactcgcaggggagctctggggcccagggctgccttctgtttccctgagtacaaggtcctgagctcagggactaggccctgaggaaacaggagcccagctcttggaacgtcccaggaacccctactagaaacacgtgcgtttcaaggaaaaactgaaggtttttctttggtgtctggcatctgcgtctttccctctctttagcccctgactgctcctccttgtccccactgagagggagtggcagcaaaggtctggggggaccaagggcagagaagctgtgtgtgtgcagggagtaggggctgtggcctcttcacaggagtgagagacggagacagagacaaagagaaagacagagagagacagggagagacacagagagacagtgagagagagtgacagagacacagaaagagacacagagacagagaccgaaagatggagacagagacagagagagacagagagaatgaaagagagtgacagagagacacagaaagagacacagagacagagacagatggagacagagacagggagacagagacagatagagacagagagagacagagacagagagacaacgagagtgagaatgacagagagatacacagaaagagacacagagacagagggagagtgagacagagagagagagac

SEQ ID NO: 18350 - DNA, 1401 bp, Artificial sequence
  DNA replication origin
cagaaagtcaccccaacaatgggtgatgccagagtgtcctcaagcttcaagggtccgtaaaaacacttgactcccccaggacaaaaatgactgggggaaacatgcagttcttcaaagagaacggtttcattctgtaccaaagggtgtcttaatttgccttggcaagagaggcagcaccgtgttgtgggtggacagcactcggggggtggacggcactcggggggtgggcggcactcgggggggtgggcggcactcgggggggtgggcggcactcggggggtgggcggcactcgggggggtgggcggcactcggggggtgggcggcactcggggggtgggcggcactcgggggggtggacggcactcggctgggtgggcggcactcggggggtgggcggcactcgggggggtggacggcactcggctgggtgggcggcactcggcggggtgggtggcactcagggggatgggcggcactcagcgaggcgggcggcactccggggggtggacggcactcagggcatcggcggcactcggggagccgaccacccacatgttggagcctcttctctgccacaagccctttgccagacactgaccattgacacaaggtgcgtcagagctgggccttagcaagcaggggcagagttgtgcttatgataggggctaaatgaagtcctggagttggtgcagaagaagagagtctaggggtcccggaaggctttgtggagctgccgtgctagctgccatccagggtgccagctatgggcaggcactgtgctgagtgacccctggacatcagctcacttaatctctgtaacaacccggagtctgctcagagcatggcccattggctacctaagtgcggtgccaggcacgggccatggacgttccctgggtgaatggctgaccatgatacccactgcaaaacaaggaggctgaaaccctggaagaaaagaagctcatcagcagtccctgagtccgggagtcagatgacaaacccaggaccccaggggttaagagtccaagcctggacaccagagaggccaggctggatggggctgggcctgtgaatgcatgggtttggatatggagataaaaatatttcagaggctgttgggagaatgaaataaaatataaacttgctcagcacaggcctggcctgcagtcaccgtggaataaattaccattcacagagctgcgctctgatgctgggtctgtgggtgcctgctgcggtcatggtgtgctttccctgggcgctttccagcatcctccctgagagctgcttcttcctaaagctttgggctaggtttacacatcctcctgtgtcaatacaacgtgacgtgtacaggaacctaactacggcttttcagtgaagatgttcatgtttctgagaaaaac

SEQ ID NO: 18351 - DNA, 863 bp, Artificial sequence
  DNA replication origin
gtgtgttttgtgttttgtttttatgcatttcctcactctgtctggatatggggatctggggagggagagagaaggtaggctttcttcacaggggatgcttacctactggcgagcacagcgatctgagctttgggggcctccgtcggccctcagtgatgtgtggtttccctcattggccttcactggggttcccctcagtgcactaaggtggacatgggagaaaaagccccgtggccccctaaacaaatcgaccccagatgccatgggacagggttccaatcccgcctctcgtgttggttttcttggtgatgaacgacaaatcccttttcatttctagttctgatcccctcatcttggaggtgcttgtccctgtctggcatcccacagttttctatgggaatgtgaagatgcttcagcggggctgctgccctaaggagcatctggggcaggtggaccagggtggatgcatcagtcgtgaggacagtgaagggccgcggatgcggcagtagagaggagggctggctggagaagatgggagagcggcagttcccacgcagaacagcagcaggagggccggggaagatgagctggacaggtaagtatggcgggcaagcgggtaagcaggtgagcaagtaagcaggtaggcaggtgagcaagtaagcaggtaggcaggcgggcaggtaggcagggaagcaggcccttgaatactgtgctaaggagtttgggttttaccttgagggtgaagagttcttagcgggatgttggtggagcctggcaaaaccagaggcacagagatgctgccaactcatcttgcagagcgcgtctcagacattcctagcaaagagaaggccctgggaaatcca

SEQ ID NO: 18352 - DNA, 1150 bp, Artificial sequence
  DNA replication origin
gcaggcggcaggtaaacaggaggagccatagtgtgtaacaccgtgaccctgacctgaagcagaggaggaagtgggtagaatccagccatcaggactgggtcatgagtcaccagggctgcagccttggctcttgttgcaacacaagttcttcatttaatggatgcacgagcccccgcttggccagagtgtgcaagcatcatgttaggtctcaggccactgtcctgggctggaaagtggagcaggggacagaacctagcggcaggggtccaagttcagtctggcaggggaagatgcgtctggggagtgcttattcattcagatacctgcacgagcagcctgtgtggggaggctggctagctgtggtactattcccaaggtgacaggggatggccttagggaaggcccagggaagggagaatgctgatcagctggtggtggggcaatagtgtggagatggcgtgggggggtgggctgcatgctcgggaggcttcctgaaggagcaggggtcccctcagtcgaggaatttcagccggaagcaaggtggggaatggggctgagaagagctttccaggcaggggaaggaacagcatacgcaaagcatgggacttgcagccactggactctgtgtgagtcggtagagtttggtgtcactggacacggctgtgtgcatgacggggagcctggggacagggcctgtgactgcatggtcgtggaccttgttccttgcctgggttccaccctggaggagggagcccttgtgagcaggccctgtcagactggcttgtcaatcatctgcattagggagggggcaacctattatgtggcagcagtgggtgggatttaggggcagaacgtgagtcccggagggaactcgccagcacggcatggagtctcgggtttccaaggcggtgctccgccaagggagagggtgcagggattggggagggggggcgtcttgccaccacagggagcctggcacaggggctggaagcagcctgcaatccatcctggccagtccattcactaacagacagcatttcctgtgctcactcctcatccatttaaggtccgtgaccataagctgtccttcccgattcttttcacctgggacactgaccctgccattgcagggctgagtcacattgctctg

SEQ ID NO: 18353 - DNA, 1061 bp, Artificial sequence
  DNA replication origin
cgccagctccattttcctctctttctcttcccctttccttcgcgcccaagagcgcctcccagcctcgtagggtggtcacggagcccctgcgccttttccttgctcgggtcctgcgtccgcgcctgccccgccatgaatgaggagtacgacgtgatcgtgctgggcaccggcctgacggtgggcgccagggctgaggggccggggctgagcagccggggcgggcgcacccccggctcctgcacggcccgcgggtcgcagctcctcgggggtctcgttctgccgtcagccgtagttttcgggacgggagtcgtggctaggggcgcgggcgggttcaggggcgccccgcgtcccggggcgagcgggcggctcccagtgtgaggggcaggcggggaaatggagatgcgggccgtgaggctcggggcggggtgacggccgagcccggcctctgcgcttgcccccagcggaagcggaggggaggggagaaggccgcccgggccaagggtcccgctccccggtttgggccggtgacctcgcccggttggaaaccagcacccgaggcggaggggacggtgcaggcctcgcggttgcatttcctattccgcctcggccgctgccccgggtcagtctggctgccaaagccgagtacggggtttcctgacaagtcttggataatcactgcttcggaactgctagggcttgattaacttatatttttggcgaaaacgtggaaattagtcttttaatcctttctcccccctgctaatgagaagtattattgaatccttttagccaccctcccttctcacttactgagcatctgtagaattggaattgagttttttcaaaacttgtccgtcaaatgctttcgcacctgaccttcgccgccttttccttttgtttggtgggttctctgcctcctttgtctcttctggactgttttcccctaagaattgggttggtgatggattgctaaaagccaagttctctgtactccgaagctttcttcagggagttggaagataataacatgaagaatgcattgtaatatatgaatgcaaggt

SEQ ID NO: 18354 - DNA, 1143 bp, Artificial sequence
  DNA replication origin
gttcttccttgtgcaggccatcatcagaggagtcctaaggccaaccaggagaagctgtcagatggaggcagctgagacattagaagccaggggccaggtcttcaaaacacacacatccttggcacagatggaaaacctagaggattcaggggtctggcaggcaggaaaacagctttgaccggcaacctctgtgccttctgtgaggaccctgggagaaataataaggggaaaatgattgtaacgaacgtgtacctagaggagagggtgcctgggagacaaagcagcttataagctagttcacaggatagcagtgaattggagcagagctaagaaaacccacagacaaccctcaacacataacgaagtctattcccctgccccagtggggaagatgtacttccctatgttcctaaagatgttcacgccctctaacgaacctgacctagtgagtactaaaatcagtgtcaatctaacaaacgaaatgcaattggcttgtgtgatggtggagcagagtatctctgactgtggtggttatgcaaggctgcacgtatgtgatacaactgcactgtgctctacacacacgagcgcgtgtataactcaggaattctggatattgattggagcaatgccacttgaaacaatgcattggtgcagaagtaacttagctaaatgtccccagaacatcgcatccggaggctatctgtatagtgcacacacttcattgtttggtaacattctctttggttatattctacactattccgtgctctagaaagggaggtgactgccccgaccagttaacccacaagggcaggaacgagggactctgcaggtcatctgcgttataagggaaagttgggcaggaggtccctgccgctgagcaggcctggggtgagaactaggagctgagaacagctacggtgtccaaggggacggagaagcacagggaactcgctacgactctgcgagtagaggggaggcggggtgtctttccgctccacacctaccagtcggccttcttcaggcagtcgaccgctgccccccggcccagcaggtagcgcacgcagtctcggtggcccatggaggccgcctcgtgcagaggccgcttgtagtctcggttggtggcctcgatgtccatgcccc

SEQ ID NO: 18355 - DNA, 1410 bp, Artificial sequence
  DNA replication origin
ggtctcgcgtcccgattggtcgcgggggccgtcagtccggctccggcggcgggcgcttcccggggctgcggcggggcggagctcgcggaggaagtcggcgggcgtctcgggctccaggtcccggccagaggaggagctcgctgccgggggacgctgggctgagcggccggcggcgcgggcccggcggcggcggcagcggggtccgggtccggagcgccacagtgcgtgaggccgcagacgtggcagggagtgtgggaggggctccgccgtgtggaaaacttaacctccggggtcctgcgcggggggtccgggcccggggtggggcagcgggggccccgggggcgcgaggctgggctcgggcaagcgcgggcgtgggggctcggccgtccgggccgtgggcaggtggagggcgcggcgggggtgcgcgggggaggccagggcgctcactgaactcggtcgggagcggcccccgcgctgccccccgaggccaggaaggcgcagcgtgtgggtcctcggggctgaaggggcaagcgcggggacgtggcctcggctgctaggaggccaggctttcccgtctactctgacgttttgaccttgggcaagtcatttttcgctgccctctgcccctgtgtcatcggtagcttctctgcccctcctctgagcatgggaagcctaaggcgatgtgggaggcctggcgctggtggagggcacggcgagagctgggcaggctgtgggtgatggaagagatcagtaggtgttgggttccttacccgatctgattaggtgccagtcacttaacctctccatgttttcgattcctttagggagtagaatgggagtagctcctatttgccaggcctaaaaacgagtgccgtttacattttttattgcagtctgtggtccgaagacaaccctatgaggcatcagtagggttttacaggtggggaagtggaggcctaaccaagtcagtgactttcttacagaattacaggtaataaagtcttctggaaggcaggatggtagcatgtgttgagtgtccgccagcgtctgccgctgtggtaaaatgagcggagataaatgaaaagacttctggaatgggcccatgaagataagtccgttttactcatgagcagattgagtttggttaaggtaacagtgatgtggatagcctctggagacagaactagtccaagtaccagctttgctcaggttattgttctgtcgtgccttgtcactccagcaaaagaaaaaaaggaaggcataaaagttgtttgaaatgcacaaaagtgtagggcgtgccaagcagtgttctgctgccgttgaagttagtgcaaattggaagttgaggcatctggtagcttcatgctttttgcttttacccctgcccctctcccagtttcagatgactat

SEQ ID NO: 18356 - DNA, 964 bp, Artificial sequence
  DNA replication origin
aatagcagtgtctgccgaaagctggttcctattctgggttggtacatgtgagtcctgaaagccatttccagtcagacatggaccatgcagaactttttcgctttaaaacattaacactcgcctgtgtgtggcacttgaagctacctcctggtgacattagagagaatggaggggacgttcaatagcaccaagccaggagagccacgtgctgttcatttgggatgggtattgcaggtaccagtcaaagaagaagttgaatctcttcaagttaacacccttcatggtcaactccgtccttgctgaagggaagggtggattcataagagccaagcttgtgtgtaagactctagaaaacttctttgcctcggctgacgaagagctgaccattgatcacgtgcctatttggtgtaagaacagccaaggacagagagtcatggttgagcagagtgaaaaactggtgagtgtctaagtgtctgaagtgttagggatctgaggatgggggaacaggggaagtgttagggatctgaggatggggaaacaggggaagtgttaggggtctgaggatggggaaacaggggaagtgttaggggtctgaggatggggaaacgggaagtgttagggatctgaggatggggaaatgggaagtgttaggggtctgaggatgggggatcaggggaagtgttagggatctgaggatgggggaacgggaagtgttagggatctgaggatgggcaaacagggagtgtgggacagcattatttcttctttcatttcttcagacctggtcataggaggttgaaggtgggagggtgaggctgtaggcccatggtgatggctgtgaattgttgggtattttctcctgtgaaggacactggtgaccatctcacttaagcctcggaatagtcctcccatttaacagagaaggcagacatggaacgacccgcctcagtttataagagcttgt

SEQ ID NO: 18357 - DNA, 1261 bp, Artificial sequence
  DNA replication origin
cgccacctccccccggcctgggcagcgctcgcccggggagtccagcggtgtcctgtggagctgccgccatggccccgcggcgggcgcgcggctgccggaccctcggtctcccggcgctgctactgctgctgctgctccggccgccggcgacgcggggtagggagctgggagcaggggcgcccgggcgggacttggaagggggccgggacgtggagctggagggaaccgggcgccccatctccccgggccgtgcgggggcgtcggtgccctcgggagcgcggtgcgcgcaggcccaggccggggaggggacgcggcgccgggcaggagggacacgtgccgggagccggggtcgcagggagagcgccgccgctgcgcccgggtcacccacgtaagggagcgggcggcctggctggggtctccgaggccgaggtcaggagcagttctgagaagcccgttttggccacgggagcgcggagccggcggcgtccagcagtttggagacacgggcgagtgcgcttctcccaggcgcctggactgcagggcgggtgttgcatagcacgcggtcctcggaggggtccgggagaaactactcctcccgactcccaggcaaaagtaaattatgtcagtgggagctgggagggtggggaggagctgtgtcccagggggaaacgcgtcgggcaagttgcacacctggggacctggaaacaacttccaattcttaagcgatcaggaaaccagcagaggcggtcgggaccggatgggggtggggagtgggggccagcctggagtctacactcgcagaaaaagggggaagagatctgtgatcgcttggtgtattcgagaagaaagcgggtcgcggagctctgatctcggcagggaggacggaatgagcgattcctaggggttttgtcccggcagccagaggaaggaggaaaacagtagcagggtctagctctatccttgtcagcgcttctttatctttttatagtcagggagctcttggagggtctgatgaaagctatgaacccccggcccccagaaaaatgcatgaatgaacatagttacaaaatgtgcatatgattttggggtcaaagccccactgaaggccatccatggactctctataggaattagtaacgccatgatctgtgtgtgtttttaagcgagaccctgaataatttacatccagtcgggccagtctgcccaggccctggccaaagccattccacgcacagttgctgctgcctggtgtggcctgaac

SEQ ID NO: 18358 - DNA, 954 bp, Artificial sequence
  DNA replication origin
gtctctccacgcggctgcggcccggtaccctccgcccgccgccgcctctggtgaccctggccctgaccttctccctcttcccttcctcctcctcctcctcatgtctgcctcgggctgtttggtgctgaagagcgtttcttctccgtctcgtgcaccgcatcctgacgaaattgtctggtcaccagaaccgagtagcccgtagcgtgtcccccctggccctgcacggttgcccctctctggggctcggagccggttcctcccggggtctcagaactgggagtgcagacgttggcgtttctcagactccggagctgcccgggacaggaatgcagccctaaccccggcgtcgcctcggctcgtgcagtttgagcggtgtttcagcgctcacgtccgaccccaggcagtctttgagcttcgcctcttgccccgagaatgtgtaatgatcggagaatgcaggtggaatgaggttctgcccctgcttgcaggagtttggtttctgggaaagcaggcgtgaaaacccaggcccgggttgatttgagaaacgcaagtggggtctggaaggacctctcttgagagaggaggtcatgcttatgttgagtcttgaaggtacgttgttagatgtgagaggtgggaaaaaggctgccggcggaggaagtaagtgcgaaagtagcagaagcgaagccccgtagtgcgttctggaagctgcaggttaggcagaaagaaaggtttgaggaggggctgctgtgtttccaggagtagtcaggtcagaacatggaggtttcttgagaagcagtaaagaagcgccattgagggtccttattttgctagagccaggcatatggatgggaaataggatattctagataagggcaagattcgcatatactcaaatagatgggtagatgtgcactggctccccgcagcagatggagtttttaaaaggatgcaacacaa

SEQ ID NO: 18359 - DNA, 1151 bp, Artificial sequence
  DNA replication origin
acagccaggcccacgagcagggtctgttctgaaggctccaccagcagctgtgtcccaagccaactggcaagacaccgtcccacccgacagtggcttcctccccgtggcgtcatctcccttccaaagagggaggaatttggactattacccacgaacgatagcaggctaagaaacaaattatgattacgaaagattaaagaaaaaaaaaaccacccacacctactggctgtacctttcctgcatgatttttgccaccgcatgggaagcgggccaattgctatttgcctgggtgttttaaatatcaggagatcaggagatttgctcctgacataattttttttcgaagtgcaacagaaaatagcacttttcacaacaattaactgttaactggctccaaagaaggtctgcttgttagacattagggaggaatagaaggcatcttctcagatgttggcctttgcggaggcaaggtcagtggtgccgggaggtgactccctgcatttccgtatgtccgtttcttaagtcgcactattacttcccttgagtaagggacgtaatattgagtaatatttattgagctgtgtgtgagagactgtttcaggctccgggaaaacagcgaacaaaataaaaacaaattggctgctttcatagaccccacacactaataagcacatagggagtcggtcaggcggtgacccgtgcggtggagagaaggcagccggcgggacgtggaagggtcgaggttaaaccgaggtagtggggaggcccccagtgaaagacgcgagtttccggggtgctccctctagccagcagttaattgcaattctgccgggcgcggtggctcacgcctgtaatcccagcactttgcgaggccgaggtgggcagatcactttaaaccaggagttcccgaccagcctgggcaacatgacaatacccgtttctacaaaaacatttagaaaaattatctgggcgtggtggcgcacgcctgtaatcccagctacttgggaggctgaagcaggagtatgggttgagcctggggaggtggaggctgcagtgagctatgatcgcaccgctgcactccagcctgggcgacagagtgagatcctgtctcaaaacacacacacacacacacacacaccccccaaaacaac

SEQ ID NO: 18360 - DNA, 1173 bp, Artificial sequence
  DNA replication origin
cgggggcggcacttgcagcgaattcccgcttcccgctgcgctccagccccgggccgcagatataccagggctccggacccggagagacccggagggcggcggggcccggggtcctgagggcgggattggtgggctcgggggcacggagaggggcagcgcggcgcgggaggtgggcagctctggcctgagtcccacctttgcccctcccgccctctgacccccgggcagtcatttcagcccccagccccagttgcctcctgggcaaaaccgacagatggctagggacggccgcgtgaggatgggagccgtccccagaaaagcaaactcaggcccgctgatgagcgcggcccggcccctcctgcaggggctgccctccgccttttccgccctgcgtgccagaaaggcccggctacctggtgttcctacccgcaccggggggtcccagcgcaccggaccccggtttacaggccgggtggttggaggcccagcactgcccagagccctgggcccctctcagctcaaagacccgggagagaagtgggagctgcagaagtgtggggaggggggcctcgatttgactttcaaatcagagttgtgtgactcctgcgccgtctgtttgggttgggaggggttgagttctggtgatgattgtcactcaacacccgagactcccccactgcgacctgggcacactaaggacgttgaggactgggggtgtgtgtggggggagcctggcctcccctggcactgggcctgtgctgtgccgtctctcccttcccgcacccacccatctgcctctcttctctcataactcagaggcacggccagcgtgatgctacggttgcctggaggctgtaccggacttgtttttcaaacagagggtgcctaggtatcagcgtgggctcctggcggtgaagggggtggctgctgactctcctgtcccgttggggtagagagatgggggagggtggccagaaggaaggtgacagccagcaagcaggggctctgccactcctctgtcagctggacacgtttagtcccaaggccactgtcttcggtgtctccattaatccaggtatgattcggccaccttgactctgtgggttctctggaggctctcagagtgtccctccccccctactcattaactgcaggggacaatcatttatctct

SEQ ID NO: 18361 - DNA, 1759 bp, Artificial sequence
  DNA replication origin
gggggtggtccgcgcggattggctgctgcctgcggcgcacgagccggtcagcgcgcaccccgcccttcccgggccgtgcggcacgccgcgttcacgtgctgtcgcgcgccctcccggcgtgcgccgcgcggccccagcctgctctgcggcgactgtccggctcgtgagctccgcgtggatccggcgctgggccccctacgctctggggacctggggttgtgtttccggcaaaggatgttttccgagaaggcctgggagcggctgtaaataatacccgagaggaaataggcccggcaggtgtttttgcgcgtcccggcgttgggtgtggctgcggcgggcgtgcaggccgcagatgaggaaacagactaggagggatttaggcatctggactctgcggggcggcccgggcgcgcagcccgtttccctgtgggttgagggcgcgggagaagtgggcggcccaccccaccccgcgcgtggatgcggggctggggcaggtccgcggtggaggcgccgccagtgagcacccggggaccgctcctagcccccagtgtgggacacagactccctgaggacctcgtatgcgttgggtctgtggctccatccgaatcttcatgaacagggcctgcggtgaatttggggagagtgagtgagcgggtgaagggtcaggaaataagtcacaggaggcatggttgaagaattggggatgtttaacccagacatggcaggactgggcacacttgacccctgtctggaagtatttgaaagacttctgaagggggccagcccctccacacctgtgggtgtttctcgtcaggtgggaggagatactgagaaaagaaataagacacaaagtataaagaacagtgggcccaggggactggcactcagcatacgaaggacccgcactggtggccgtctctgagttccctcagtattgatcattatttttactatcttggcgaggggagtgtagcagggcaacaggtggggagaaggtcagcagggaaacatgtgagcaaaggaatctgtatcatgaataagttcaaggaaaggtactgtgccctgatgtgcacataggctaagtttatgtttccctttactcagacatctcagtgtagcaaagagtaacagagcagtattgctgccagcatatcgcctacagccacagggcggttttctcctatctcagaatagaacgaatgggattggtctgctttacaccgagacattccattcccagggatgagcaggagacagaaggcttcctcttatctcaactgcaaagaggccccctctctttcactacttctcagtacagaccctttacgggtgtctggctggggcacggtcaggtctttcccttcccaggaggccatatctcaggctgtctcagtggggggaaaccttggacaatacccaggctttcttgggcagaggtccctgcagccttctgcagtgcatggtgtccctggttaatcgagaatggagaatggcgatgacttttaccaagcatactgcctgcaaacatattgttaacaaggcacatcctgcacggccctgaatccattaaaccttgattcaatacagcacatgtttctgtgagcatagggttggggctacagttacaggttaacagcatctcaaagcagaaacaatttttcttagtatagatcaaaatggagtttcttgcgtcttccttttctgcatagacacagtaacaatctgatctctcttttccccacaacttccttatgaggaa

SEQ ID NO: 18362 - DNA, 776 bp, Artificial sequence
  DNA replication origin
aatgcagagaacaagatacaaacttaaagaggcctagggtgtggcgggaaacacacaccccttcccccacctatatatgctcacgtgaaaaggtgcagacaagtatttgaggtagtgcagaaaataaatgcttggagaacagcaagggagggatgttagtagacacagagggaatagacagaggcaaagggggtttctgggtctccagagatctggggggctaggtgcaggaaggctttttttgggagagaagcagatcagctgcgggggtgcagagagagggaggggaaaggttgcttgaggcctcattgtagaggaccttccgtgaagcctaaggaggttgaacttggtcttagtggcagtcgggagccagtgattgtttctgagcaggggaagaaaaccaaagtactgtcttaggaagatgagtccctgtcagcggaatgcgcagtggacgcaaacgggaggcggggaggaagagatggggagtgagggcctgtggtccaggtgcggcatttagaatttaatccgcacagatagtaggcacggaaagaacatagatgatgtgtgcgggagttgagatttggggattgaccaggtgtggggattggagcggcttgaagaggcaagttccagtagaaggagtcattagtccttacacggtgctccttactccaaagcctgtattttttctgctgacttctctgagccttagtctcctcttctgtaaagtaacgggcttggatctcttgttatttgttctggactcctggcacaga

SEQ ID NO: 18363 - DNA, 1118 bp, Artificial sequence
  DNA replication origin
agcctacagccctccccgacccccgcgaaccccagggcgggaactcgtcccggtggcgcgggcgctcgctgcctgctgtttccctcttcgggtcagcccactcttatttcaggagtggagtgggactctcccctgggcgtttagggtgtcgcctctggcatgtgctcccactgcagaaaacaagtccaaatgcaacgcatcgggtttctgaacagccgccagagcgcggaaaccagaccgtcagcaaagctgtcgcgggaacaggggctctgagagggcggcgcggggggcggggtgccggagtgggggtcgaggcgggagggggagtgggggtcgaggcgtgggggagggtggcggggcacaggccaggtggccgatgttgcgcgttccggggcccctcggcaggcggcgggtcgggaggagtggaggcccgggtggggcgggcgcgcggggcgggagcagccccggtcgccgcctgggcgcgggcgccctccctgtggagcatgcgggacgtgagcgacgtgtggcagcctctgcgcagacttttccgccgcggtgtaggtttcagcgagcgccgccttccctccaatcacagcccagcctcagcgctaagtgtgcacctctctgcaaggcggcgcagcgctcccgtactgaggcttcgtttgcaaaagttacatccgtcccggcgcgggcggcggttccccaccaaaagcaacccagatcttccccgcacgcctctgacctgactgcacgactgtcacaagtcgcgagctggtgcaaactgcgagggccgggaaaggagacggggcacgcatgcaccaaaaagtggggaggcagagctgcagggtgtgcaggataacggagtgaattttaggagtctgcctaataaggggccgcccccaatagttttccctcgacttaggtaatgaattgcagatcgaaatgggtctagttttattcattcttctactcggggcgataaaggtttattgaatggtgtacatggtgagtgtgaaaaccagatgccagctgcccccagccccagtccacttcagtccagctccccggggctttcccgccccctcctcgtacccagcaccgcgggcctctcaaggttc

SEQ ID NO: 18364 - DNA, 864 bp, Artificial sequence
  DNA replication origin
gacccccggaacaaaggaggagaggggggcgtgcgccggcgcgcggccgggcgtttcctgcgctgccaggggaaacgtgctttgggctaagttccggaccctcgcctgtgcggggctcgacgtgtgctgcgagggtagcgaggctggggatgcccggcacggccggctcgtccgctcggaaagctctgggatgctcgggcgcagtgacagccgcgctctcgccaccaggccctgctgctcgcctcctctccggcttggctgggatgccccgcgcaccgccggcttttaaagagtccgggctggccgcagacgcgtacgtcagcctcggggcgggccgcattccttgggtcccagcccccttccacgtggggaggagggtgggcgagccgggaagcagcctgcgagctccccctgcgggccggcgacggcggtgcaccagctcccgccgccctgccccgggcctggagcgcgcccagccctgctgaagggtcctggctgctgttatcccctcgtcccgttgtcccctcgggacgtctggcacagcttccccgactaattccggcccctcacctcaactgtgctggccgggaggagagcagagacgcagtcctgcccagtgtagaccgtggaccccgcagccgaatcccttgggaagctgcttaaagtgcatcctaccaatgcagctcctttagggccatggagccccaatactctgcattcctaacacgcgctgtggggcaggcgcagtccaggtaaggacatgggccaggctgctccctgataatacccgtgagcccatcccccgccacgacccgggcgacccgcggggaggaggcttccctgatcctcccacctcacctcgtc

SEQ ID NO: 18365 - DNA, 751 bp, Artificial sequence
  DNA replication origin
gagctgccaagtcccgcgggggccgtcctaagaaacgtagtagccgggcaaccctgcctgccagccgcctgcgctcaggcgccttcggatgacccgaagccacctcgagagtttgcacctggatcccacggtcactactcaggctacgacctgacctgggcaaaaccgcaccaggcggctccctgtccagcccatgggagccggggcgcattacctggagaggcagcgtcgcccctctgcgctgcccacccgcccttttccgcggcggcgctccgcagctgaggtggagctcgaggtaaccctctcccaagcgatcgctggtggcgggggcggcgaccggcggggcggggcagggtactgccagccaattccgagcaccggggggtgcgtgcgcccggggcgcgtggagcagcgccaaccgtgcactcaccaacccaccgaccctccccaaagccggggacacaggcgtggctccaggtggctctcctggcgcccccagcacgggcgcccccatggcactggagatgcacggaagagagagaaggagagagaaagagataaaagcagaaagaaacagtgggagaggaaggaggtagaaacagagaaaaacagagacatatatatcgaaagagaaaacaggacagagaaataggttattaagtgaagcgaggggataggaatgcatagcaaggcgggagaggagatggaaacatgcagagagaggagatccggacggtgaaaaggggcggag

SEQ ID NO: 18366 - DNA, 1499 bp, Artificial sequence
  DNA replication origin
ctacctccttcctctcccactgtttctttctgcttttatctctttctctctccttctctctcttccgtgcatctccagtgccatgggggcgcccgtgctgggggcgccaggagagccacctggagccacgcctgtgtccccggctttggggagggtcggtgggttggtgagtgcacggttggcgctgctccacgcgccccgggcgcacgcaccccccggtgctcggaattggctggcagtaccctgccccgccccgccggtcgccgcccccgccaccagcgatcgcttgggagagggttacctcgagctccacctcagctgcggagcgccgccgcggaaaagggcgggtgggcagcgcagaggggcgacgctgcctctccaggtaatgcgccccggctcccatgggctggacagggagccgcctggtgcggttttgcccaggtcaggtcgtagcctgagtagtgaccgtgggatccaggtgcaaactctcgaggtggcttcgggtcatccgaaggcgcctgagcgcaggcggctggcaggcagggttgcccggctactacgtttcttaggacggcccccgcgggacttggcagctctcctggagccctgctcggtctgaatcaccggcctcgtccagacctgcccctctccccacacccacccccatggtgtgccctgggtggggacgtcagcagatccaccctggtggacttcagggttctggggtagccctcaggagaggtcttgttccccctctttgtgaggtagcccaggactgggggatgtgggtgtgttgcccagcccagtcagatgcgcttgaactggggtggcccatggttctcttgtctttgtgtaaaacctgtaagtggagtggaatgcagctcttaaatccccagggaggtttggccaaggccaaatgcagaaacaacttttgcataaagcaagtattatctctatagcactttgtaaactgcattggaggctagtcccacatatgtaaatacatgtgattgtatacgaatgcccacgggtctgagaggagtgtcccgtgacttccagggctctgagatctgttggcatcagctcagttgtgatcttgagaactccagcgtgcaccaaggcgtcctccctccaggcttggatcctgatccattagaccccatcaacctgcacgtctcacacgcagtgagagatttgcctaagaatccctgtcagaatcattcagagctggagggtgggaatttggctaaagccaatggattaattcttttgtcccgcctactgctggtatcctcctgtgtggctttgaggtatagtctcagacacattccttcttgtaaaaagatccgcagcctgggtatcgcacatccttatttcaagtggtggtgtctttctcagtttatatagtcacatttaactcttactggaatggagggaagaaggtgtttctatttggtatctttcctgacaccctccctcgattctctaatggcatttgg

SEQ ID NO: 18367 - DNA, 882 bp, Artificial sequence
  DNA replication origin
ctggccgcccatcgtctgggatgtgaggagcccctctgcctggctgcccagtctggaaagtgaggagcgtctctgcccggccgccaccccgtctgggaagtgaggagcgtctctgcccggccgcccatcgtctgggatgtgaggaccccctctgcctggctgcccagtctggaaagtgaggagcgcctcttcctggccgccatcccatctaggcagtgaggagcatctctgcccggccgcccatcgtctgagatgtggggagcgtctctgccccgccgccccatctgggatgtgaggagcgtctccgcccggcagccaccccgtccgggagggaggtgggggggtcagcccctgcccggccagccgccccgtccgggaggtgaggggcgcctctgcccggccgcccctactgggaagtgaggagcccctctgcccggccaccaccccgtctgggaggtgtacccaacagctcattgagaacgggccatgacgacaatggcggttttgtggaatagaaaggggggaaaggggcggggaaagattgagaaatcggatggttgctgtgtctgtgtagaaagaagtagacatgggagacttttcattttgttctgtactaagaaaaattcttatgccttgggatcctgttgatctatgaccttacccccaaccctgtgctctctgaaacatgtgctgtgtccactcagggttggatggattaagggcggtgcaagatgtgctttgttgaacagatgcttgaaggcagcatgctcgttgagagtcatcaccactccctaatctcaagtacccagggacacaaacactctgcctaggaaaaccagagacctttgttcacttgtttatctgctgaccttccctccacta

SEQ ID NO: 18368 - DNA, 1298 bp, Artificial sequence
  DNA replication origin
caacgagcatgctgccttcaagcatctgttcaacaaagcacatcttgcaccgcccttaatccatccaaccctgagtggacacagcacatgtttcagagagcacagggttgggggtaaggtcatagatcaacaggatcccaaggcataagaatttttcttagtacagaacaaaatgaaaagtctcccatgtctacttctttctacacagacacagcaaccatccgatttctcaatctttccccgcccctttcccccctttctattccacaaaaccgccattgtcgtcatggcccgttctcaatgagctgttgggtacacctcccagacggggtggtggccgggcagaggggctcctcacttcccagtaggggcggccgggcagaggcgcccctcacctcccggacggggcggctggccgggcaggggctgacccccccacctccctcccggacggggtggctgccgggcggagacgctcctcacatcccagatggggcggcggggcagagacgctccccacatctcagacgatgggcggccgggcagagatgctcctcactgcctagatgggatggcggccaggaagaggcgctcctcactttccagactgggcagccaggcagagggggtcctcacatcccagacgatgggcggccgggcagagacgctcctcacttcccagacggggtggcggccgggcagagacgctcctcactttccagactgggcagccaggcagaggggctcctcacatcccagacgatgggcggccaggcagagacactcctcactttccagactgggcagccaggcagaggggctcctcacatcccagacgatgggtggccaggcagagacgctcctcacttcccagatggggtggcggccgggcagaggctgcaatctcggcactttgggaggccaaggcaggcggctgggaggtggaagttgtagcgagccgagatcacgccactgcaccccagcctgggcaccattgagcactgagtgaacgagactccgtctgcaatcccggcacctcgggaggccgaggctggcggatcactcgcggttaggagctggagaccagcccggccaacacagcgaaaccccgtctccaccaaaaaaatacgaaaaccagtcaggcgtggcggcgcctcctgcaatcgcaggcactcggcaggctgaggcaggagaatcaggcagggaggttgcagtgagccgagatggcagcagtacagtccagctttggctcggcatcagagggagaccgtggggagagggagagggagagggagctg

SEQ ID NO: 18369 - DNA, 805 bp, Artificial sequence
  DNA replication origin
ttctcccccttttctgggaggcaggccagcctcacagccagacaccagctgtgggagttgtcttacgcatatgctctgccccttagaaggattcagtctgtgccctggaggggcctacggtcccgccttgctgttctctggggatcacatcttcggagacgggccaggtgcatcctgctgtgggtggtggcctgagctgtggttctcggtggggtctctctgcagggacttgtcgctgatcaaggtgattgacgtgggccggaggttcctggtgaaccgggtgcaggaccacatccagagccgcatcgtgtactacctgatgaacatccacgtgcagccgcgtaccatctacctgtgccggcacggcgagaacgagcacaacctccagggccgcatcgggggcgactcaggcctgtccagccggggcaagaaggtgcggggtgtgctgccgcatgggccgttctggctgtagggcggttgcagggtctatagggtgggtggggagctgtgtgctgctgctgctgctgctgctgctgcttggtgtgcttgctgtgtgtgttatctgtgtgtgcgcctgcacgtctctatgcatatctgtgtgcatctctgtatggctctgtgtgtgtgtgtgtctacgcctatccatgtggctttgtgtgtgtgtgtctttgtgttactttgtatgtgtttgtatgtgtgtctctggtgtgtgtatctctgtgcatgtgtgtgatgtgtgcgcggttgtgcactaggaagggaaggggcaggaagagctgagcctggtctctgggtagggtgtgtg

SEQ ID NO: 18370 - DNA, 1208 bp, Artificial sequence
  DNA replication origin
acagtaccttgggcattacagattctaaaatatatgactcatttatttatcccactaatatttactgagcacctactacgtgtcagacacaatgctgactgctagaagtgcaacaaaaagagtaagagagagtgtggatccagtcctcagggagtgtacaatgtggaagaaagccaagtcctgatgtggaggatcaggaagagctttccagaggacaagagacatcttgggagctgaagatgtacaggaagtagctcagagattgagcagacgtccacgagatgaggggatgctgggacctcctaggagcttaaagaggctcagacttggaggaacccgatgtgagggctggagaggaaaggagtagaaccttcgaatccacatcagggaggctgggctttatcccgggggcactgggtagcctttggagaacttaagagcagggagtggcacactgggttccagaaggcagcccatggtaaccacggctagggaggaggttccacaccaacccagaagagaaacggtgctgcctgtaattagagcagaggtggtgggagtgtgacaggctggagggaacacagaggaattggggtgagtgaataaaattggtttggggcaagctatggagataggggagacagaatcaaggaaagacacacagatttcaggtcgtgcagcaggtgatgtctatgccagttgcagaaaagagcaggaggagaaaacgtgttgaaagagaaaggggaaggtggtgcatccagtttggggcatgaggcattagacgtgcccaggaactttctggggaagaatggcaaggatctggggcagtcatgactgggtcacagtcagcgaggagataggtatggaggctgatgagggaagaggatgctcacagggcgggaaaattgaggaacatcagtcatccaggttgataaaagaagaggagcttgcaaaggagaagagaggaaggaaggaaggaaacatgggcaggggggtcatgggagacacagagggacaatgtcccaggatgcatgtgtgctcacggcacatctggttgcaggaagtcaggtaagaggcgggtagaactccacgggaatcggccatgaggagagtgcgggtgatcatttctgaggggtgcaagaggcaaggccaggcatctgtcgttcaagacatgtggggtgaggaagcaaaggcagcaagtgtagaca

SEQ ID NO: 18371 - DNA, 1397 bp, Artificial sequence
  DNA replication origin
ccgccagccccgccagccccgccagtccccgcgcagtccccgcgcagtccccgcgcagtcccagcgccaccgggcagcagcggcgccgtgctcgctccaggtagggccccgcgccccgcgccgccgccgggagggagcgggctggaggggccgagacccgtggcgagaagggctacccgggcccctcggagagcctccgggaaggggtgagggctgccgggtgagcaggcggagtaggaaatggaaccaagcgggcgcaagagcgcaccgggaagaatttccccgctgggtttctgggacgcaggtcgcacgggatgcgggatgctggcgaccttagccgggtgggggccgccggcctgggggcgcttcctcctttcttctcccttttccttctcacctgaacgaaagggggcctgcggggagggaagaaggtggaaagtttttgtattcttggtaaaaaaaaaaaaaaaaaatgcgtgaggaaacatgttttctggagatggtatcctgtccacaggggagcataaccccttttctgggaatgtattggagcacggacgggggtgccattgctcaggcttctaaacaagccaagtttctggtcaagggcctgggggagggggaggcaggtctttgaaagataccaaaaaaaaaaaaaaaagaaaaatctgcgtgctcattcctgtagcctcaagtgaggttattccccagctttgagggccaggttaaccaagcaaagtttgtgcaataaagtatctttgtggtattggattttcgagagccaccgttatcaatgggagagtgactgttgaatgctacaggcgtgtgcactcccccgtgggcatgaagagaggtccacgggctggctggattgggagactccggtcatttctgcaaggagagcgccacaggactgccttgttccctgggctgtcctgcccctgtgcgggctggacgtggtgctataaaagatgattcaggagtggcacaggctgagggggactaggctggagaaggtggagggaagagggagcactccgtgccctcttcctgtccatgggaaatgaaccatctgtgcctggtgtccaagtccttgacgttccagttgccctttgagagcacacctcaagcctgctgaattcttttaagaaccacctacaagatctgagaagtccgcccatgctttctgtcaactccggcctctttgaccttttcttttgccaaagaaaattctaaaccactgggattcgtgaggctccgtgagagaggcaagaagcctggagggtccactccgttgctcttttcccttggtttgctccctagaagccatggtccccactgggcccttcttgcccgaggctgtgtgatagacaagccctattcctaaggtcctgggt

SEQ ID NO: 18372 - DNA, 1183 bp, Artificial sequence
  DNA replication origin
aggagcattaaccttgactatgcctttagctccagccaccgttttaagagtaaattgctgggcaggagggggagggctagtcactgaacgaaactgtaagccggaccaggtgtgaggaggggaggtgatgaaaggattacagggtggaggagcagaggctgaggaagaattgggacctagctcggcctggcaaggagcagcctggggaggaagggagaggtcagatgggtctgtagaaaaggaagattagaaagactcagtgacgcttggggttggtactgaggggacaggcgggagggaaagaaggaagatttgggacgagttgcaatgggcacagactaggaagggactgatgtgtaaaagaatacctggacatcaggcacctcagaccatttgcctattttacaacaagaattatttagatcttgcaggatggaaaaattcaaagtgccattttctggctatttggaactactgtcgagtttgtattggggtcaagagacattgcagaagaaaataaggcatttaggttttaggtcaggtgtgagttgaggttttaagtttttgagaacacaggccaagggagtagaaggaggaatggagggtggaagtttcccatagtgaaggaagcaagcctagagaaaagagagagtagagaaatggaaggaaggggttcaggggttcttaccttccagaaaagtgggaaaaggggttggggctcagagataagaggtcagggcacggaaataagggatggggcgcagaaataagaggtcggggcgtggaaataagggattggggtgcagagatatgaggttggggcatggaaataagggattggggtgcagagatatgaggttggggcatggaaataagggattggggcacagagatatgaggttggggtacttgcccctcctctagaaaagcgggacttgccactaagagtgaaggagaaggggttgagtggtacttgcccctcccccagaaaagcgggacttgtcgctaagggtgaaggagaaggggttgaggggtacttgcccctctccaagaaaagctgagaaggggtagagacaaggagagaaggggttggggtacttgccctgtccctggaaaagcagagaaggggtagagacaaggagagaaggggttggggtacttgccccttccccagaaaagcggg

SEQ ID NO: 18373 - DNA, 1112 bp, Artificial sequence
  DNA replication origin
cttggcattgcctttcccgggttctttagggatgaaaggatgctcaggtggctagaggaagagagctacatgaattttacatgggatgctgcccccgtgtagggtccatgtgccacggatgggtttttcttcttttccaaaaaacaaagagagtgatggcgataacaaaacgtcaaagtcccagccaaatgctgaacactgcagaggatggtccttgcggaacgcagaaaagattaattatgggaggaggagaggaggccttggttttgtattcaggcggcgctgcagtgttctccgtccctttatctgctaccgaagcgcaattacagcgcagggaggggaggggggtgagaggaggggaggagggtgcagaaggggaaggggatgcggggaggggaggagggtgcggggaggagagggggatgcggggaggggaagggggtgcgtggagacgaggagggtgtggggaggggaggagggtgctaggaggagaggggggtccagggaggggaaaggggtgctgggaagggaaaggggtgcagggagaggagggggtgcagcgagctcccagctccagcattgttgtcttagtcttttatttcattttagtccctctgggttggacgaggaataaagttaaacatacaggttcttctgaactgcaagttacaccttaataagacttagagaaatccaattattttttattctgtggttgaagggaaattcatttcagtggtcagaagaggggctgagagccaggagagctgaattctgctcttgtttccgcactcttccctcatttactcctaatggcttaggtgtggtttgccctggaggctggctttttaattctaggatcgttccagcggctttccaggctgaagatgttcattcactgtagaccttcccttcttaattcatctgcagtggatctttgctacccaagttagtattaaaaagaaggttagtacagaaaagtctatctttctagggtgtgcttcctagatacattgaagagattttaactggaatttattccatagctagagcccatccgtgtgttaattttcccacgtatattgttattctcaagtgtgcagacccttctt

SEQ ID NO: 18374 - DNA, 1630 bp, Artificial sequence
  DNA replication origin
gagattgtggcaagatggtcagaaacactgaagaagagccccctcctccttacttgctgaaaacaaatgtagtgtgtccagctgctttggctgggaagggcctcgtagggcccacgggtgggaccactggctccatttccgagggtttgctaggtggtctgcactgggcccagggtctgaccgcggggccaccgctacaggcccccgggccaccagccccttaaatgccttttcctccttcccaggaaagtgaagaggaggacgctgacgccatggacgatgacaccgccagtgaggagaccggctccgagctccgggatgaccagacggacacctcgtcggcggaggtgccctcggcccggccccggagggccgtcaccctgcggagcggctcagagcccgtgcgccggccacccccagagaggacacgaaggggccgcggggcgccggctgcctcctcagcagaggaaggggagaagtgcccgccgaccaagcccgaggggacagaggtgatgcccgggcgtggggacagagggcttcccgctgggtctgaagaagcacacctgttacacttcagggccacgatgtggggaaacctgtttaaaatacctccaacagcagcagctgctctagctagttcccaagtcaggaacaaaggctggcacttcacctctgggtggaggggcctttcggcatcagaatggagtgcccagggtggagacagcgcctctttcctggacggctttagtgccacctgggttcttgtcaggaggagggcacagtcctcagtttcctttgaagtctgggtttccagaaattccttccccgcatctcccctgactgcgctgtgtcttgctcccacgtcccctctataggacacctctgtgatgttttaaaatatttaatcagtgtttcaggtctcccctagccccatgggtggtgtgagatcagcagaaagggccactggcaccaccattacagaaacactgggggacactgtctcgtgtctgcttggacgtgccccttgtatttctcctcttttctctaatcagagatgcttcgttcataagcaggcccaaggtttcctgaactagggatgcaagagcgactgtcactgtgcctgccttcttccatctgaaggcacatgagtcattgcagggggcatcatcactgagccaagaactttctcagggactgagagtgtgtgcagctttttcaggtgcccagtgagggagcaaagggaggcagtggcttccggccaggaacggccgaggcctggagagtgctggagaggacccagccagctgactgtgccgcagctgagctcctcctgccctttctctgcaggacacgaaacaggaggaggaggagagactggttctggagagcaacccgttggagtggacggtcaccgacgtggtgaggttcattaagctgacagactgtgcccccttggccaagatatttcaggagcaggtacggtggttgccgcgtgtcgattgtttgatgtgctgagactctgcatctgaaatgaacctcgtgtcctagccggcttcctcgtgacacctgcgagggggttcttcggcgctgctcggcaggtgtgcgagacccttctccctccaaggcccct

SEQ ID NO: 18375 - DNA, 1279 bp, Artificial sequence
  DNA replication origin
gcagccacaaaaaagaatgagttcatgtcctttgcagggacatggatgaagctggaaaccatcatcctcagcaaactaacacaggaacagaaaaccaaacactgtacgttctcactcataagtggaagctgaacaatgagaacatatggacacagggaggggagcatcacacactggggcctgtcaaggggtgggggtaaggggagggagagcattaggacaaatacctaatacatgcggggcttcaaacctagatgacgggttgatgggtgcagcaaaccaccatggcacatgtatacctatgtaacaaacctgcacgttctgcacacgtatcccagaacttaaagtaaaataaaaaaaattaagaaaaaaaagaaacacagacctactgtgtattaggaggaaggcaatgcctgtattttacagaaataacctcaaagccccatgaagagggcagagacagcaggtaggaggcggctgaaatcacagagccagggaggagggcctgagtgcaatgtgggggccagaagaggacaggcggaggtccggactgaagtgactcatgggttgtgggggtggtggtgggagggcaggaattattgtagagtttctaactttgaggatgccgtggcttccgacttgggtgaataacggcatcattcgtcagccaggacgttcacggagaagagcagagacgggttctgacggttctgctggtgagttctgttctggaaatgctgctgccacgtggagatgttttgcaggggatggaaagggagttgtgagtgtgaggccatgggtgtgggcactcagatccgtgtgcgaggccatgggcgcgggcactcagatccgtgtgcgaggccatgggcgcgggcactcagatccgtgtgcgaggccatggtgcgggcactcagatccgtgtgtgatgccatgggcatgggcactcagatccgtgtgcacagcgtgaccgtccaaagccacagagaaagacgaggccacgctgggcacagatggctgaagagcaggactgggggattctaacctctacatctgagaaaagcagggcaaagaagaggccaagaaaagtcatctggggaggagccaacggtgggaagtgagccagccctgccaccccaggactgtgcagaagatggaggagacagaggagcaaccaggaaaggagtgggaacatccagagacagaagtcaccaagggtggtagagaaacgtactaaaaagaaaacatcacgagtaaaaagcaagaaacaaccaaccaaagc

SEQ ID NO: 18376 - DNA, 692 bp, Artificial sequence
  DNA replication origin
ccttacttttgggtttcgcgctctagggaaggtgggggatggggacagcgtttggggaagaaattgtcccttgctcggcttaggaaccctctcggcgcatcggagaggggcatcttcttgtcttggcgggcatggaggccgggcagtcgccgggggatgtgagtgggcggcgaagtgcgggggaaaggtcggcgttccagggcggggaggatctgggagtggagttcggagacaaaatcggggtcaggcagaggagccagagggaaagccagcaaacgcgagctcgggtgagagccaccggaatgcgggaacgcagcttagccgggaacagggttcccgacaggggtcgcccgtggccaggacgcggccgctgaacagaggtcgcgcggcggttcctgcccgagggacctcgtgggcgggggccacacggaggccgcgcacggtccccggggctggcgggggcaggtgggaggacctcctccgggcccgcgaacctgatctggcagcggccaggtgcctggaagcgtttttaaatgatagggttacaaagacatgttggccaggtttgtagttagcgcagcaacgtggtttgcaggagcgcagaacgaggctagacagggtcactcggacgccgtgctgtcagtgggtgggggccgggagcaagcggcactggcttggagaccccgcggcag

SEQ ID NO: 18377 - DNA, 1384 bp, Artificial sequence
  DNA replication origin
tgtgtatgtgtgtgtatgttttgcagaaatccgccaaaatgcaactgtaggaactgcgagatgtatttattgattttgaccaggggcggtgggaaggggctggagggagctgggggatcctggagggtgggaagtggctgattctcggtggccggacactcatccagagcctgatccgtactcgtgttttcttggaagcgccacaactgcggggaaggagtctttagaaaccgtgccagtttcaatatggcgggctaaggtggcttttaaaaactgaaaataaaggttttgaggtgggaaaaaacccagctgaagtttccaccccttagtttcgactctctttggctaccccaggaagcgctttagcgaattaagtggggaaaaaaagaaggaatgggctgtccggttttttttttccgtggttagagtctgtgtgtcaagtccattgctaggggggaaagggatggagaagtgcccctggcccggaccagggcaccgaaacgcaactgtcgtgtgtgcctgtggattagtgtgcaggcctgcgtgtgcgcagtttttttgggtgtgtgtgtcaaagagaaccaccccgaatgtgtgtgtgcgtcttggaaccagaccctgccatgatttgacgtgacaaactgcggacacgtggtgtaaagtacatgagggcagagggagtgatttattttgtctttctaggagacgagctagctctcgccttgtgtgtgctggatcctgcgcgggtagatccccgagtaggtggggcgaggaggtgcttattaaaaggactaactgtcccgggtattgggtgcaatcgggctgcagacgccagccggatttcgtgtgtgcagggggcgcgctgcacttaatagtgggctcctgctttcctccacgccgctctggggtgggaggtgggggaccgggaccgaagcttggagaagaccaaagtggtggtggtggtggtggggtggggcagaagggcgggagcgcgcggctctgggagacaagcacgtagggtcgaggcgaggggttgccttccttacttttgggtttcgcgctctagggaaggtgggggatggggacagcgtttggggaagaaattgtcccttgctcggcttaggaaccctctcggcgcatcggagaggggcatcttcttgtcttggcgggcatggaggccgggcagtcgccgggggatgtgagtgggcggcgaagtgcgggggaaaggtcggcgttccagggcggggaggatctgggagtggagttcggagacaaaatcggggtcaggcagaggagccagagggaaagccagcaaacgcgagctcgggtgagagccaccggaatgcgggaacgcagcttagccgggaacagggttcccgacagg

SEQ ID NO: 18378 - DNA, 1372 bp, Artificial sequence
  DNA replication origin
cgtcccgcaggctaattggcttaagaaattttgcaagcgctggaaaaggtcgttgaaggagttcgctgcacgcgcacgcacacacatacacacacacacaaaatcttaaaaaaaaaaaaaaaaaaaaaaaaaaaagagcgccgagcatgcgcacagagaggatgccatattggaatgagctgtagtgggagccggaggaccggagcgggcgcgcgagggaggcggcgggcggggagcgagcgggcaagggcgggcgagcgagcaagcgagcgaggccggtgccctcccgggcggcgaccggggcctgggtccacgccgagggcaggacgaacttcaccaggtaggacgccgcgccggctgctgtccccggcgcccaggctggccggagagcagcccttcggcccgcaggttgagtgcgctggtcaggggctttttccagcctaggaaaaaaaaggaaaaaaaaaaaaaggaaggaagcctgagggagctggggttggaggtggcgggtgggggaaggctggggagggtgcaggggagcgaaagagaagggcaggagaagaaagcgactgcacttgagcgaagcttcaaactcctctgtgcgctccaggttgtcatttttgcttcccgggtccccttcgcctgcgtctccgggctcggaaaagccgagccgtgcgggagtccgtccggagttgcaaagtgtcctccttccccgggcgcagcctgtcccctcccgccgcccaccttcctcgtttctgcactcattttagcgacgcagccgccgctgctacctaccccgcgctcccgcgtctcctccgcgctggggtctcccctttcttttggtttgggtgggagaaaaagatggtgaggacggggaatcggagaccggcatgggggtaaaaatcgtgcagacattcggaatcgctcccttggaaacatttgcctgagcaactgaaataaaattggcagtagtagttttggagcgtgctccagcgaggatggtctttttgttcattattttctctttaaagtaatatcctgtcacttaggggctttccggttgtctcctcttattcgaccccctttcaaaattgctgacttgagctggttctggagtttattttttaatatgcgtgcgtgggtatgtgtatgtgtgtgtatgttttgcagaaatccgccaaaatgcaactgtaggaactgcgagatgtatttattgattttgaccaggggcggtgggaaggggctggagggagctgggggatcctggagggtgggaagtggctgattctcggtggccggacactcatccagagcctgatccgtactcgtgttttcttggaagcgccacaactgcggggaaggagtctttagaaac

SEQ ID NO: 18379 - DNA, 1267 bp, Artificial sequence
  DNA replication origin
acacctctccttagggatgcagggcgaggaagggcgggtggagctgcgaacccacggggacctggaggacctcttggccccctggagaggggtactatgagagggattcatgggacacagatttgggggactgggtaattttaccccctttggcaaccataaaaaccctgagcaaacgtgtccattcgctatttcgcagaaatatacaatgcaggcccacacaggcatctctgcgaggccccctagttaagggcgcagcgttcttcggaagctcttggtcttgctaccagggcgtcaccggcttttccgcactggggacatttcgtttgggctctgcgcagccgttgcacctaaggccctgggagctccgcgttcctccccaggcgcccgggacaaagtgcccgagggctccgcagacgtccagccctgcccggggctcacggccgccggggctctccaacggaccgtcgagggccacgttttgctggggtgtgagcgacgattcttttcccgccctatgaggcccgccactagctaggtgccccatgagacgccgtggcgagcacggctacctggcagctcgcccgggcagccccaacttaatttcctgcccctcggggcacctttccctcgaatagctctcctcggcccctccagccctgcccaaggggcctggaaatgttcgcagcttcaagaaaggctctatttaagcacaggatggggtggggcgggcggggccaagattgccctggggattgaatttatctccgctcccagcgatccccggcggataaagcgcaagtttgtgcacacggtcgactgagccattggaaacccagctcacgaaccgcagccagggaaacgggagtttgcccagttgtccttgcggaggggtgtgcggaaacgcccgcgatgggaactttctgcagatcatgtatggagggagctcacaaaaaggaggaaggggagcgcggtggggaggaggccgcgtgggcgtggaaggtcccagggtcctgggggtgcccgcctgcttaggcgcagggaatggcgcggagctggctggggaaggagccgatcacgtcccgcaggctaattggcttaagaaattttgcaagcgctggaaaaggtcgttgaaggagttcgctgcacgcgcacgcacacacatacacacacacacaaaatcttaaaaaaaaaaaaaaaaaaaaaaaaaaaagagcgccgagcatgcgcacagagaggatgccatattggaatgagctgtagtggg

SEQ ID NO: 18380 - DNA, 1395 bp, Artificial sequence
  DNA replication origin
caaggacaactgggcaaactcccgtttccctggctgcggttcgtgagctgggtttccaatggctcagtcgaccgtgtgcacaaacttgcgctttatccgccggggatcgctgggagcggagataaattcaatccccagggcaatcttggccccgcccgccccaccccatcctgtgcttaaatagagcctttcttgaagctgcgaacatttccaggccccttgggcagggctggaggggccgaggagagctattcgagggaaaggtgccccgaggggcaggaaattaagttggggctgcccgggcgagctgccaggtagccgtgctcgccacggcgtctcatggggcacctagctagtggcgggcctcatagggcgggaaaagaatcgtcgctcacaccccagcaaaacgtggccctcgacggtccgttggagagccccggcggccgtgagccccgggcagggctggacgtctgcggagccctcgggcactttgtcccgggcgcctggggaggaacgcggagctcccagggccttaggtgcaacggctgcgcagagcccaaacgaaatgtccccagtgcggaaaagccggtgacgccctggtagcaagaccaagagcttccgaagaacgctgcgcccttaactagggggcctcgcagagatgcctgtgtgggcctgcattgtatatttctgcgaaatagcgaatggacacgtttgctcagggtttttatggttgccaaagggggtaaaattacccagtcccccaaatctgtgtcccatgaatccctctcatagtacccctctccagggggccaagaggtcctccaggtccccgtgggttcgcagctccacccgcccttcctcgccctgcatccctaaggagaggtgtccgctctgaagggctaggggccagccatggagtgaggggaccggggctgaccacgcgcggcacagacagaggtcctcaggcgggccctctcctggacggtggggccggagctgatctagaagaaatacggagggacgtgccgagaagccgctctccttcgccgcgaccctggagagcgcctctccacccaaaggatctgccgagctgagagatccagggcgggcgtccgcagccgtgaggccccctgcgccgccagtatgggaagatcctgcctccttacaccttggagaacgctgggcgacgactaaagcgccttccgccggcctgtcactccatgtgacacaggagccacgtgagacccagaagagtccagcgactcgccgcgcggcgcactttaaactctagcctgagtctgcgacccctccagctctccagtccccagctgttggggacatcaagccggagccctgggctctctgccctgtgggtcgctgaaagcagagactcct

SEQ ID NO: 18381 - DNA, 975 bp, Artificial sequence
  DNA replication origin
aggagaggcccaggatgtggctggaggcctgtggagggaaggagaggcccaggatgtggctggaggcctgtggagggaaggagaggcccaggatgtggctggaggcctgtggggggaaggagaggcccaggatgtggctggaggcctgtggtgggaaggagaggcccaggatgtagctggaggcctgtggagggagagaggggcccggggcatggctgggggcctgtggagggaaagaaggggcccagggtgtggctggagccctgtggaggggaagagggggccgaggcctggctggaggcctgtggagggagagagaggcccggggcatggctggagccctgtggagggagagagaggcttggggcatggctggaggcctgtggagggagagcaagctgagcgtggatgcaggcactgaggaggaagcctccaccagactgcacagccaggctcttctgcagcgcccttagccctccaggcaggagcaggtagaaagaaggctccatcacggggtcctgtgtgacagggaaacaaagggccagggagaggtgcagagggtagtggaagtggctgatgatggaagctatgctggaagtggaaggaaaccaggataggaaggaactcagaaataagaagaaagcaaaggtctcagaagatggcaggtcccactgaagctgaagaaccaactgtggaggctggcgagagtgcagccaataagatctgagggaagagacaaagatcagaaaaatgcatgtgagagtggagggagggagtaaaggaaagtgagtgcccagaggtgcagactgtcacgtcatgtgagttactggccttcattttggatttgcacttctccatggtcaaggggtttatgtggttgaaatgtctagccaaccacgacaaaatgcacaagttactgcagaagagaggcttatttttctggtcctggagttaaagactttctgccgtggcctc

SEQ ID NO: 18382 - DNA, 936 bp, Artificial sequence
  DNA replication origin
tgcacacgcacacagccggggatgtttctgaagtggtgtgtggcacaccagcattttagtagtggttgtctctaggtaggcgtgatgatgtgagttgtatatgtttttcttctgatctttcaaaaaatgagtaatatttttgtattaagaaaaaatacaaaggaagtaaaggaatatcagtttatggtcacagggatatttagggagaggagttggaattccagggtggtgttgaaggatgtgagggcctgacatccaggcttccgccttggaccacgggtgaaggttgcagtgtcctctgtcccgggacagagagcagcgaggagagggagatttaaaaagatgaaggttccattctccaccgagtcgagtctgagctacctgtgggacacgcagggagaaaaggttggcaggtcggtctggatggaacgagaggccagctccagagataagtctggaagttcacagatgacgatggtagttggcaccatggggatggatgatgtcacctggaggtgagaacctcagctgagaaaaggaccctgtgactcaccctgaagggccagcgggcggggggtgggggacaacagcaaagcccaggggagcaccaatcccctccagggaggagccggggaagctagagcaggaggagtttcaaggagggaacagcatagacttgacaatgtcttctgcagagtgctggcacaccttgggtgtggattctgtttatttgcatgggatactttgacgtatttcctgggggtgggagccaggcatgggagaggacgggaaaccgctgcagtcagcccctctgaacaagcagagtgtcgggggataggaggagggaatagcagaggagagaacagagaatagtggaggtctccgagccctgggaatggaaaggagcactccattgctgttcttttctccccgaag

SEQ ID NO: 18383 - DNA, 1044 bp, Artificial sequence
  DNA replication origin
atctcctatgtgccaggcactgctgggtattaaatatagaataataaatatacaataataaaccagaaaaagtgtctgggcatggtggctcacgcctgtaatcccaacactttgggaggctaaggtgggcagatcaccaggtcgagagatcgataccatcctggccaacatagtgagaccctgtctctactaaaaatactaaaatcagctgggcatggtgacgtgcacctgtagccccagctactcaggaggctgaggcgggagaattgcttgaacccaggaggcggaggttgcagtgagccaagatagcaccactgcactccagcctggcgataaagcaagactccatctcaaaaaataaataaataaaatacataaataaataaaacagaaaaagctcctgcacacagaagcatagactggagatggacagaccagtcaatgcacagagagagaaggatgttctgtatatcaacgtgaaaggagagagcaggggcccatgctttggggaatggtgggcagggctgggaggcagggaagggctctcttggaagttcatgtgtaaacccaggattgcaggacaagaagagacctgcagcagcaaagactgagaggaagaggaagggagctccaaggaaaaaacagcaggtgcaagggtcttggggagggaaagagcttgcagaagtcatggcggcacagcgtggacattgtgtagctggggtacgtgtcagccagtgcagcatcggggatggagctgtcatctgtcttcactgttgagttaggaatggcctcaccaaggaggggacatatcaagtgagttttgaagggtggctacagctcaacgtgtcaggaaggcggggaaggagggcagcccctggtgccaccacaggaagtcacgagaaagcagggtgggtttagggaagctgggtgtgggcaaatcagaccttgttgttgatagctggggtagactagcaggaaataaaagacagggatttgaaccaggaccatttattttaatgaggattttgtatccaaaaagagaca

SEQ ID NO: 18384 - DNA, 1669 bp, Artificial sequence
  DNA replication origin
gtgggcggagtccaggaggggaccgcagggtgggcggggtccgggctgggtccgtggggtgggcggggtccgggctgggtccgtggggtgggcggggtccgggctgggaccgcggggtgggcggggtccgggctgggtccgtggggtgggcggggtccgggctgggaccgcggggtgggcggccccgagagcgtcccgcagtggctggagccctgggcgctgcaaagcgtgtcccgccgggtccccgagcgtcccgcgccctcgccccgccatgctcctgctgctggggctgtgcctggggctgtccctgtgtgtggggtcgcaggaagaggcgcagagctggggccactcttcggagcaggtaagtggagccgaggggagccgggtcccgggcgcggccgcccccttccctccgccggcccggccgcggagcttctgcccgggcccccttcgaccgtctcccaggcccccaccagaggcccaggggtccctctctgtgggtcactcgtgcgtcacctctgtgtgagccgcggtgcctgatctggcctgaggcttcctgcagaactgtgcccgggacttgtcctgcggagccgagtttttcttcttggctcctgttgattgcgcagatttctgttcgtcgttgttaatttctgaggtagctccaaaagttattataattacaaggttttttccttatcacgcgtggggggcagtctgctgttatcatcattcccagttgatccagggagaaaggcaatatgagaggagttctagactcctgggagcctcagcttttcccacctgaaaaccgggagaacacgactttcccatttagcgactacctaccggtggtttagcatttaaaggtggcaccgagagccaaagcgtctgagttcctcgagttgctggtctgtgcgtttgtcaggatttgtgtttcaaatgtcttaacctcgcaggcgaataaaacctgcaaatatgaaatgtcaataaaatgatgaatagagcatttttgtctttaaaaagtatgaagcgggttcacacaaatagcattgagagctaatgtgcaacatggccctgtcacaaagtagaagtgctttcacacacatgccatttaaatatttaagccgtttagcttccagcgtgtttgtgcacggtgggaggaagatacaagtaggcggaccttttctcccttttccagcccctgttttgaagagcagttttgaagcccaactgcctaaatatgaagacagttatcttcatgttctctgtcctgtgaatgtgcttaacagtaaagtggtagtaatgatacttccttctagggggggagtagctaataaaatcccaggaggcatcgtagtgatgttggaaaagtgcaggctttggatgcagagacaggctgggctttagttgtgtgttccgggcaagccctttaatctctcagagccttcatgtcctcgttggtcagggcagggaatgcggctctttttgagcaaacttgcaaggactcagctaatttgtgttaagcacctggtatacagtggacgctcaataactgggagatgttttagtagatggctgaaggcatgggcttggtaccaggatgtctgggaccacttgattcttgattctgtcacttatcagctctgggaccctgatcaagtgcctttcg

SEQ ID NO: 18385 - DNA, 839 bp, Artificial sequence
  DNA replication origin
tagactgcaggtagtatcctttgtcctgcctattaagcgtccctggccaatgcagaggggacgatctgccggcttcaggctggcaggtgcggggtgggctgtgtgctgaggaccaggctggccttctcgcgtcctctggcgacagaaattaagcaagtccgcaaagaagcatattgcaccttgagggagaggaagaaagagttgcgggggcgcgtggggtagggcccgggaggcagtgggtgttggcaagaaacggagtaggaggctctacagaggagactggtccttggttaagtgtcacagccgcaggatgggagggtgtgggaggggtccgtggggccaacacaggtggcccctgctgtgcgcggcgaggcaggcttggaatgccttctccccgaacagagctagcccagcactgggggctggaggcgcggctctggtgggactgaggccgggaagcggcgccgggcggggtggggactggggaggaggcggggctggtgtgggggccacagggaggcgggccgggtttaagggggtggctgtaggtggggtctgggaagttggcctcggtggggacagggacaggagaggtggggccgggactggggaggtggggggaaatgggggcgtggagaaacggagcttggggttggggacctggggaagctgggtcctgactggggacagggaggcgaggccgggcttggggggtgtccagggaggcagggtgtgggaaggtctggggcggggaagtggggtctgggctggggtgggagagttggagtccagaaggggaccgcggggtggaaggggtccgggctgggaccggggtaggc

SEQ ID NO: 18386 - DNA, 801 bp, Artificial sequence
  DNA replication origin
gggaggggatggtatgtatgttggggaggggatggtaaaccaggatctcaggaaaacagtggaaaacctgcttaggtagtcatggtggctcgttcctctaatcctagctattcaggaggctgaggcaggatgatcacttgaggccaggagttcaaaaccagcctgagtaacataacaagacccccatcaggaaagaaaaaaaggaaggaagggagggagggaggaagggagggaggaagagagggagggagggaggaagggagggaggaagagagggagggagggaggaagggagggagagagggagggagggggaaggaaggggagaggaagagagggatggaaagagaaagaaagagagaaggagggagggaagaaaagaaaaatggaaggaagggagggaaggaaagaaagacagaaagagggaaggaaagcaggaaggagggaaggaagggagggagggaggggaggggggaagggagggaaagaaagacagagaaaaagggggaggaagataaagaaggaaggaaaagaaagcaggaaagaaagaaaagaataaccttcttgatgatacagaaatcctgctcacacatcccacaaacgtagtagcacatgcaacttataacaacgactactatttctgtttcccatgctggttgccactaccaatactataaagtgagtagttgaacacgagtacttttccaatgacatcagtgctgttggctccctacccagtattcatccaggctgtgacacctgtccagagtcatatatgtcaagagctctatacaattgtgt

SEQ ID NO: 18387 - DNA, 1361 bp, Artificial sequence
  DNA replication origin
gggggaggggtgggttcccggaacatctggggacagtcaaccaagagcttgccaggaggcccgtctgaaagcgaacatggcagactcgattcccggcctgcaaggccaccaaaaccaaagggcagttatggacataggccactggtggccgaggcccctatttcccctccagcttccctcagtcgcccgcactcccttttcaatttctttccttccacaccctccgccgcccccgtctttgttttttatgggagcagaggaccccctggggctctggggcgcagcccaggcccctccgcctctgtgaacttgacccgggagggtccccctcgtgccagagccccgcccccagggaccgccttcgacgccgctgcggcccccggagcgccctgctgtcgcgtcgtctcgcagccaggggcacgacctctccgggccaccccggtcgcttgtctgtgtgccacccgcaagccaggaccaagacgcggagctggctggggctccgcagagaccgactgggaccggagctgggctggcctagatgtgtggcgctgtagagatgcgaactgggctcctaggtggcaggtggaaggactcctgagagctcccgggatcagcctccctccctaagcccgggactgtccgtcgcctaggctgtcgtgaccccgcaggcggaggggataccacgtgcccagggcgatcccatcctggtcctactccaagagcgtgggaaccctgagttccgccatagaaacgaagttggctgccagctgggaactcacttggctcagaagagccgggggtaggtccccagggcctccttctcggcgccccaccccagaggcagtggcctagagcaggggagttgggagggaaaggaagccggcgagccttgccctgggagtcagctggctgctctctttcccacatcaacaaccgttcccgtgaaaataaaccagaaaacaacgcatcgccttggggtgccggtgtctagagcctccagatcaggcagggccaggcagagagggcagatgcgtggtgctggctgcactggtgggtgcagggactagtggggtgtgttggtgtctgactcagctttcttaaaagaagcccccaagcccctggagtacaggttgagagctggatgtgggaccaggaggaagcagaaagagttggctgctggtgttcggagggtcagagcaatgtcaagttcctaactgctgttgacacggtctaagacagagggtggagacctgggtctgggtgagtgtggcctttggagagaggctatagatctaggagggtgttgggggtgtccccaccatgctgtccaatggaatttaagcttataggtgaatggaggt

SEQ ID NO: 18388 - DNA, 1143 bp, Artificial sequence
  DNA replication origin
tgtggaaggaaagaaattgaaaagggagtgcgggcgactgagggaagctggaggggaaataggggcctcggccaccagtggcctatgtccataactgccctttggttttggtggccttgcaggccgggaatcgagtctgccatgttcgctttcagacgggcctcctggcaagctcttggttgactgtccccagatgttccgggaacccacccctcccccacaccctcccgccccaaccctccgcagagaagccgaggaccacatccatccgcttcctaggaacctgcccgcaccagcaggccctgtttcctggacaaactgggcaaagaaacctaagaaccgcgcgatcccggcaggtggctttctgcggagccagggctgccagcgcggccgggcggcgcctcgggacccggcctggcatccgcgggcgcccggggagggccttggcgtcggcgggggtgggggtgggcggcagatccgaagcagggtcggggaaaaacggcgttgcgggagggttggggggtggcctctgaggaagtgggacaaaaggctttatttcagaaggtacgccaggaaaggggcgtgggtcaccaagtcctgcgcagcagagttggcgcggcctgggagccggggtcccttctgaccacagacgtggccaccgcctcttctcatcccgaaggtcccagccatcccgaggtggtcagagaagaccccgacgggcggatcgggcagtggagagacccgtggtcctcgcgcctgctgtgtcgctgtgtcaatgaccgtgacactcagggcaatccttaccaacacagagcaggacaacgataccccgcacccccccgtacaagtgcaaactagtttctgtgttgggggaaaaaagcgaataaaagtttaataaacgtgtgctgtgttgtggatgactttgtgacgacctctgttgcaaatggcctatgcatgcggaataatggtctccttgcagagagggaaatagcttagtgctatcatcgttgcctcggtaaccatcagagtccccatctagcaagagagaaatgagttatgaaaaggcttgagtgaagaagggattaacacatgatcccagggacagtgtgtcaatcaaaatcaactgagaaattacactgctct

SEQ ID NO: 18389 - DNA, 2167 bp, Artificial sequence
  DNA replication origin
gccgcgcctttcgcggcgcgcgtccagctgtggccgccgcggaggtccccagcgcctgttcaaaggagagaagccggaggaccgggccgtgaaaactggcctccttcctccttagccccgggtccccatttctgtcacccgaaccatgtccatatttccttccctatggtgggaggaggggcaaaggagagatcccgggtattggagcgcgcacacctccgtctccaacccagccagcctcaccgccccctcctccgcctcggcccctggattaggttaccctggccgcgcaagggtttctactggataggactatagcacaggtaaagctgtataaacagctcgccggctgccgggcgggagggttatgccggggacacggctccaggcgccgccgctggccccggctgcgcgggccacaccgcggggagcccgctgcggcagggcgccccggaccgcgcaggttaaatacatattatctctgtctctgccactcgggcccccgttttctttcccttgcgagctgaaatgcggagagcggggagcaagacctaaacgggaagaaaaggcagtcgggcagtgggcaatactggttgaggatcccggcccagcaaggctggctctcttcaaacaaaacccagagagcagggaacttgggggaaagcagagaaagagggaccctaaaactcactggcaatgggaagatgatggaggcgggtgcgtccaaggggcaactctcctcgcggctcccacgcccacgcgccccgggccaggagtctaccttccccgtgaaatgagctatcgttttggggatggtatgtgatttgatttacccttttttcttttccttcctttagttcttttttctttttcttttttctttttttttctgtttgtttgtttgttttgcttattcatcgatcaccgtttaaaactcggaaggaaacccgcccaggccaggagagccgcgagccgtggggagagtcaaaaaagaggagatgcgctgggagattccccccgcccccgcactccgcccccagcccggccccggcctccacttcgagggatcctgaccctcccaccgccactaccaccttttccccggttgagaaaacccctgattgtagcgagataaaaattgggtaggtaggggtgcagcggaaagggggagacaggaagggagagggcaggggatttctgctttcgggtttaacaactcacacgtgaggcgagtggcagttggggggagccccgggttgggtgggagagaaggaactcgccttgagggtgagtggaaaggaattggagtcaccctggaggaaaagtgcccttttcagctctctccctccctcctggccttggcaggtggggggacaggtgggtgccacgggaggaaaagaaggggtggaggcagcccagccggcgtccctgggtctcccgggctttggacatcttaccctgcccccagtggcatcagtgactcctagccaggggcttgctacttctagacccgacctctcctccgtcccagggggccgctcagccacaccgctatagcacccaggactccggcccctgcaccaaggaaaggctccagcctggcagaaattcacccatttcaaggcttggcccaccaggccttagcattgccgggtgaggtggggtgcacgcggtgttcagtctggccagtcggagtcacctgctccactcccccggcctggtcacccacatcctcacagccacccagctcctgagccccctggccaaccacagccccaacccccagcgctggcctcagccgagtctcctccgtctgcttcagtttggccttttaggaggagaaggagggctttatctggggactattgtgttttgactcatctagattagcctaggagctggagtgtgattgtagcgggacactctggcaggggatgtgttcacagcacggataggaaaagagggggagggggactccattcagatcttggagacagtagaggcgcgcttttaaaagcacaaaccgttcttgtcttcctttggacatgctagagaccacctggtgaaaaaaaaaatccatgtttgtgcccgactcagaggtgcaaaggaggaggtttggcatgcgcacccttctcccggcctcccttggtcccggactgccccctac

SEQ ID NO: 18390 - DNA, 1158 bp, Artificial sequence
  DNA replication origin
agggaattttatggggtagaggagcgaagagggaacaatgtctccaattcaaataaaaccccaaattaagctctcagccccatcggtgggatagcctgcgggggaacccactccctctcctggcagcattgccctgggggcgagcagagagtggatttggagtcttcttttcccgcctgacccctgctcgcccgagcagcattttcgggccagcggctgcagccacccgggcgccgctaggggatgcagtggctcaaaggaccgagcgggcggtgcaggttggaacccgcggggcggaccaatcgcggctcggccacagcctcgcccgctgattggtccctccaggccccgcccccgctcgccccgcccctctcgctggggcgcctcggagccgcgtgccctccgccccggggtgcccattgcgcagagcgtggcctggagacccgcgagccggggaaggtcgccgtggagtcccgaccagaggccggggttggggtcggtgcagaccgagggctggtttccttgactgtgggagaaacgccgggagccggagtaagtagggctccgggcggggcgaaaggaaaagttgggtccctagagtgaagaccgagttctttctgtccgtctacactgagcgtactcggggaatgagttagagccagtctcttcctcccctccccccttctcatccctcactgttgccactcaagtcaaaagcacacattgattacaaatattaggtctggaaagggcagctgcaacagctgaagcgtgttcactctgggggcttgagagcgcagaaggctcgggaaagaggtgacaatgacaacaaaattgacgcggacgctccagtcaaaggcatctcccctttatccgatgactcaccctcttaggaagtcggcccgagaggcaaatctcaaaataccttgacatgaaacattttgtttttctgatcaatttaacgcgcacgtttccccacatcgatgcgctctcccaaacaccctgcattagatcctaataatgatccatgcgtgcctattttttaaaagtctgaaaaagaaaattctgcccatcgaaatgaacttcatgaatggggcaggctggctgcaccgggacggaatcgtccacccgacccgaatgaattggcaggagccgcgg

SEQ ID NO: 18391 - DNA, 877 bp, Artificial sequence
  DNA replication origin
cactctcgcgacgagccagaggccttcctcgcccatttccgggccccaatttttttgtaaatgaaccaggaacggcagatgggggctttcgcttgacctctccccgccctcaggtccctcccgacctccccgagccgggacggctgaagcggccggcgggagccccggcaccccgggcgcactcaccgtggtgggtcggagggtacctctgcaccgtggccctgaccgagtttccgtagtagggcgggacgtggttgccttgaccgtcgatgttaaaaagcacatccacctcctccggcagcgggtactgcgccgcgtccatgtaggagtggctgaggcccgggtggtgcgtgtccgggtgctgcccgttgagcacggcggggtggtggtggctcacccagcgcggctggtccgccgtcacctccatggcctcggctgtgctcgcgccctctcgccgggcccggaacccgcgcgcggggagggagggcggtccgcctgggaggtcggggggctcctgccgtcggagggtcgggggtcgttgaatgatttgctttcggtggggggatgggaaggctgggaagcaaaggtgagcaaaggagaaggttttttaaaaattatcttggaggggtcgtttagcaaagagaagaaggggaagacaaaaatccaaaaactgggtacggcagaataaaacgggaccaggttgtaaaaaggggcgacgactctgcaattctgcgagccaggctcctctgcaccggggtcctcagccgctcggaggcggagtccctcctcgggtcacctgcaagggagagaatgggagacctggatgagcccctgagttgctggagtggcacaacctcccctcgcgccgcccgcccgc

SEQ ID NO: 18392 - DNA, 1078 bp, Artificial sequence
  DNA replication origin
caccttggtagaaggcagggtccaatcaattgttctcttatgtttggattaaacaaacatttattgaatacctactatgtgctggcagcatgccaggcacgagaatgttgaaatgaacaagagccagctacaaccctgatgttcccctagtctagcgagagggactgacgcggaacagagacactttccattgaacgcggttgtgtcaagacggagctcgaggcgggacacttagctgagctctggggttgagagaaggctcctgaagaaggcacctaaggtgaaccttgacaggcagtgatggctgctgtgtggaggaggctgcaggaacagttcacacaagtgtggtcaaccaggagggcaggggtggggggtgggaagggggggcgggagccgggaggcaagctgggtggggcggggctatatgggacagggccgggctagacgagatggggcggggctatgcagggtgggaggggctaggctgggcggggctgagcagagtggggcagggctaagtggggagggcagggccagggcgcaaggggccttgttttccgagtttatcaaacagaatcaaggctgatattgatatttctcatggggggaatggcactcaccccccccgccccacattcccagagaccaagcaatagacaactccaatgtaggagaagaaaagaaagagcgtgctgcattaaaggggaattagtcagcacacggcacttatttttatatgaagcaagtgtctcccactattctttagaatgaaggctgtgattatttcctgggcatgactggggatctataagggcagaaggtaagtctggcacgaggtgatcactctcagtccaattttagtcaaagtctggcatataaaaaaaccaagcacaaataattaatattaatagtattatattcatatgtactggtaatgtttataatgttaacaatagctaacgtttaataatactttttaagtgcccggcagtatcctatatactttacatgcatcaatttgttgaatcattgcaacattcttatgaggaaaccattatgatagagtagacaaagctac

SEQ ID NO: 18393 - DNA, 1290 bp, Artificial sequence
  DNA replication origin
cttaatccatttaaccctgagtggacacagcacatgtttcagagagcacacggttgggggtaaggtcatagatcaacaggatcccaaggcataagaatttttcttagtacagaacaaaatgaagtctcccatgtctacttctttctacacagacacagcaaccatccaatttctcaatcttttccccacctttcccccttttctattccacaaaaccgccattgtcatcatggcctgttctcaatgagctgttgggtacacctcccagacggggtggtagccgggcagaggggctcctcacttcccagtaggggcggccgggcagaggcgcccctcacctcacggacggggcggctggccgggtgggggtgctgagccccccacctccctcctggacggggcggctggcctgggggggctgacccccacctccctcccggacagggtggctgccgggcggagacgctcctcacttcccagacggggtggcagccgggcggagggtctcctcacttctcagacagggcggccgggcagagacgctcctcacctcccagacagggtcgcggccgggccgaggcactcctcacatcccagacagggcggcggggcagaggtgctccccacatctcagacgatgggcggccgggcagagacgctcctcacttcctagatgggatggcggccgggaagaggcgctcctcacttcctaggtgggatggcggccgggaagaggcgctcctcacttcctaggtgggatggcggccgggcagagacgcttctcactttccagactgggcagccaggcagaggggctcctcacatcccagacgatgggcggccaggcagagacgctcctcacttcccagacggggtagcggccgggcagaggctgcaatctcggcactttgggaggccaaggcaggcggctgggaggtggaggttgtagcgagccgagatcacgccactgcactccagcctgggtaccattgagcactgagttaaggagactccgtctgcaatcccggcacctcgggaggccgaggctggcggatcactcgtggttaggagctggagaccagcccggccatcacagcgaaaccccgtctccaccaaaaaaatacgaaaaccagtcaggcgtggcggcgtgcacctgcaatcgcaggcgctcggcaggctgaggcaggagaatcaggcagggaggttgcagtgagccgagatggcagcagcatagtccagcttcagctcggcatgagagggagaccgtggaaagaggggagagggagaggg

SEQ ID NO: 18394 - DNA, 883 bp, Artificial sequence
  DNA replication origin
ccacctaggaagtgaggagcgcctcttcccggccgccatcccacctaggaagtgaggagcgcctcttcccggccgccatcccatctaggaagtgaggagcgtctctgcccggccgcccatcgtctgagatgtggggagcacctctgccccgccgccctgtctgggatgtgaggagtgcctcggcccggccgcgaccctgtctgggaggtgaggagcgtctctgcccggccgccctgtctgagaagtgaggagaccctccgcccggctgccaccccgtctgggaagtgaggagcgtctccgcccggcagccaccctgtccgggagggaggtgggggtcagcccccccaggccagccgccccgtccaggagggaggtggggggctcagcacccccacccggccagccgccccgtccgtgaggtgaggggcgcctctgcccggccgcccctactgggaagtgaggagcccctctgcccggctaccaccccgtctgggaggtgtacccaacagctcattgagaacaggccatgatgacaatggcggttttgtggaatagaaaagggggaaaggtggggaaaagattgagaaattggatggttgctgtgtctgtgtagaaagaagtagacatgggagacttcattttgttctgtactaagaaaaattcttatgccttgggatcctgttgatctatgaccttacccccaaccgtgtgctctctgaaacatgtgctgtgtccactcagggttaaatggattaagggcagtgcaagatgtgctttgttaaacagatgcttgaaggcagcatgctcgttaagagtcatcaccactccctaatctcaagtacccagggacacaaacactctgcctaggaaaaccagagacctt

SEQ ID NO: 18395 - DNA, 1623 bp, Artificial sequence
  DNA replication origin
cctcccagagtcggcggcgcgaaggggacgggcgtcgcccgcagctcccgggcgcgactcggccgcttcggatccgtcgcctccctcggccttcggaggccggcacgggacgcgggaggagggagcgggtgcggacgagcagcgccggcggtgcagggcgcggggcttcccggagggacgagcggagcgcggcgtcccggggaccgggcggggtccgcgagtccgggtgaggaccagcgggccgagcgcggcgtcccgggtccccgcggggtgagtgggggacgggcggggtccaccgaccggcgcgaggacccgcgagcagggtgagcggggcgcggcgtcccggggtccgggcggggtccatgagtccaagtgggaccggcgagccgggcgcggagtcccggggtccggtggggcgggcggggaccgggcggggtctgggggtccgggtgaggactgagcggagcgcggcgtgacggggaccgggcggggaccggcgagcgggcacggggtccgggcggggtgcgcgcgtgcgagtgtgcacgcttgtgtcatttgaaatgcggggctgacggagctctggtggccggggggaaagagctcttcttaccaaattacccgctcatctgatttaatatttgcaaagatcctttcctaaggtgggagaggggaagcggagacaaggaagggcggggggataattataaagcgtgaaactagccaggtgtactttattgcagaaattagaggtaatttttacgtaatcatggtttgtctgatatgcagtctgtaatttaataattaatgtgattctggttgttttacatgtcgtcaaactaaggtagagcgtttattggaaagaagtagagagctgggattcctgaagaaaggaaagtatgtctaatttttagctggcttgataggaaagtttttattagctcggaggggtcagtaggatctatttgtatttcaggcatgttaggaaaaggaaacctaaaaagagagaaaagattgccagagtgggaacaaaaggtctgtgtcctttttcgacattttaagttttctctgatcaggcgagaaattggatagcggatctaagctgtaattaatctaatccagtgagaaaaaaatggattggtatggtaagagtgcgtgtaaaatgtttcctgttctacccactgtaggacttaacatccctattctgtctggcaccttatggtactctgcagtattgaggttattccaggctttatgatccatttccctggcaactaactttcccctgccatgctagattctttttctagcatgttaagtgttatgagttaagagattcttgagaaactctgcagtggccaattatttgagctgcaaggacctccccaccaaaaaaaaggaggggggtggaggagggggatgatagaatctgttatgcaaattgtcttttgagtcaatattaagaatgttaatttgcttgtacacgatcaggttcatcttttccgtattctgttttggtagttttctccgagatgtgaatcatgattagtaacatttccacgatatttgttttaagagacctctgtcctgtcccccatcttaaaatatatacctgtatagacacgt

SEQ ID NO: 18396 - DNA, 1111 bp, Artificial sequence
  DNA replication origin
tgtccgagcccccagcctgcaggaggaagggcgggtaggcaggagggctggaagcagccggtgctggcggcccctgtgctccaggggctgctcccgactcctccccgcacccccgcccgcctgcccgccgggacaggttggaggcgggagagagggaccgaggcagggcgggagcgcagaggctcggtccaggcgcgtgatcgctcccgggaggtcactttctaggcagcccagcctgtgcttgggcggggtggttgcttctccgaggaatcgcgtttcccagccttgtatttcaggacctaactcttcccacccctacgttcctaggcttgcccatgtaattacaattgcatttcacttttccatagcctgtggggacctctaggtagcttataaacagttgacgtgatgccactggtgcgagggagaaaaggctcccctgaagaagggacacccattcctgggggtcaggtggggaccgtgaggtgaatctgccttttggagctgggagcagcaccctagtggcctgacatagttaggacaccttcacaaatgcttgagggttacgcccttatcagtgtggagatgaaggtataggatctggtagttgttactgcctccattttaagatgacggtgatggggggcagtgggtgccattaatgagatagagacccagaaaccattgtgaggagtgtgatgcttctatgccctggagtcttactttgtaagctctttgcagactgaatttaaaatatctactctgctgctaccacttggtctctgttgctgttttaacgtttttgctttagtaattttttcttctttctctgttgttgatctctcagtctctctactgaggagtcctctctgttgttctgcgggcctcacagtttcttttgctctgtgccttggtgtttctgtctggcatgttattttatttctatattgcttctcctaagacctctgaaagcatcacttggcttgtgtatacacttcggttgggcacacgaacatattggcacatacttttctctaacccttttccttactggcaaggtgaaatgatagaactaggaaatctttaagactgacattctgtgactccgaga

SEQ ID NO: 18397 - DNA, 1413 bp, Artificial sequence
  DNA replication origin
tttatctaatttcaatgaaagggaaatggcacttggctctgatactttcatcatgggaaattatcatcaggcagtcaggatcacgtgcacctaatgccggcctgggtcttcagaacagaggaggagggagaagaaagaggctaagtgagctgcctcttcaaaagcaggacaagtcacctgtggaaagccatgagttgggctgaggaatgtgacctctatcctatagaaatggagagaaggaccagcaacatgcctgggggagatgggcagagtctttgagcaagcgatcctcccagcatgcatctgtctggttgtccagcaggtatggagcaaacaggtaccctatgtcagtctctaggccaaaaactgggaacaaaggccagtgaagaaggtcctcccttcaggtgctcagtgtggcaggggtgggatggcgggcatgggatggcgggcataggatggagggggtgggatggcaggggcaggagagacactgagccctcagccggtaagcaccctggcaagcatgtggggagaggcaggacagagcccacaggggtccaggggtgtgggacttaatcctgcctggcgaggaaagccaaggctgcatctgggccgagtccttggacgtgcgagcactgaaggggggccggcatgtgaaactcacggggcagccccgcagtgacccaggaagtggaagggtgacagttccctctcacagggagctcccagtgtgagcatggaggaccacgggaaggggcggtgaaggtgggcaacacccagctctcagagggtcttgcaagctaaggaactgaaattttgtctgaaagtatgtggtcaggtacagaagaagtaacaaaggaaacaagatcgaaattctagaaaagccattttggctgccgtgtggagggtggattacagacgagagacacaggcagggaggacagttaagaggctgctgccgcaggccagggaacactggtggaggctgaacttcatggcgactggctggttgtggggatggtggagaaggggaactccaggtctgtacaaccaggtgactgtgggatgactgcccgaatggggaaagcatgagcaaagagtttcagaggcggctgacgagcgcaggtctggacatgctaaggttgatgtgactgtggggtacagacagaagttgtaatcatggggctcaggctcgagagacgggccagggccacagagaatgttccttagcgtgacagtgaagccacaggtatgcgcgaagctgtcagcgagggaaagaagggtgcaaagagctgagagccgaggacagaactgcagagaataccaggaaagaggagtccaaggagagcagagtgaggggcaggaggagctgcaggagcaactggtcccatgggagccatgagaggagaggag

SEQ ID NO: 18398 - DNA, 2142 bp, Artificial sequence
  DNA replication origin
tccccatcgaatcaaagacttcagggaggatttcattctgaatctgggcctatttcaagaaactgatgaactggtgggatttcttccccactccctgacatctccctgctctgatatccagcaatctgctcgggtacacagactatcatgttttctactttatcctcagtgtgttgcacagggtctagcccatcatggccactcagtaattactggatggttggatggatggatgatgggtagatagatggatgggtgagtagatgatgggtgagtgagtgggtggataatggatggatgggtgataatggatggatgatgaatggatagatgggtggatgatgggtgggtgggtagatggatgggtgactagatgatggatgggggctgaatgatggatgggtgggtgggtggatgcatggttgatggacgatgggtggataatgggtgggtggatgatggatggatggatgggtgggtcaaatatgtcctggagggggactccctggcctgagcctagaatggtggctctgcttgtcattaatcagtgccagatcatagatggatgtggggtagatgatgagtggatgggtggatggtgggtggatgatggatggagtggatgagggatgagtgtgtggtgggtggatgatggatggaggggtgggtggatgatggatgactgtgtggtaggtggatgatggatgagtgtgtggtgggtggatgagggatgagtgtgtggtgggtggatgacggatgagtgtgtggtgagtggatgagggatgagtgtgtggtgggtggatgatggatgagtgtgtggtgagtggatgagggatgagtgtgtggtgggtggatgatggatggaggagtgggtggatgatggatgactgtgtggtaggtggatgatggatgagtgtgtggtgggtggatgagggatgagtgcgtggtgggtggatgagggatgagtgcgtggtgggtgggtgagggatgagtgtgtggtgggtggatgagggatggaggggtgggtggatgatggatgactgtgtggtaggtggatgcatggatgagtgtcgtggtgggtggctgagggatgagtgtgtggtgggtggatgatggatgagtgtgtggtgagtggatgagggatgagtgtgtggtgggtggatgacggaggggtgggtggatgatggatgactgtgtggtaggtggatgatggatgagtgtgtggtgggtggatgagggatgagtgtgtggtgggtggatgagggatgagtgtgtggtgggggatgagggatgagtgtgtggtgggtggatgagggatgagtgggagcatgatggacggaggggtgggtggatgatggatggatggtgggtgaatgatggatagatagatggatgggtgggaggatccataccacaatgagggatggatgggtgtgctgatgaaggatgtgtgagtgtgtggatgatggatgagtggatgatggatggatgggtgagaggataatggatggatgggtgggtggatggatagatagttgggtagatatgtgggtggatggatggatggtggatggatggtgggcggatgatggatggatgggtgggagaataatggatggatgggtggatgataggtgagtggatggatggatagttgggtagatgtgtgggtggatgggtggatggttggatggtggttagatgatggatagatgggtgggagcatctattccacaatgagggatggatgagtgtgtggatgagagatggatgtgtggatgacggatgggtgggaggatagtggatctgtggatggataattaagtggatggatggatagttgggtggttacgcggaatgatggatggatggatgggtgggtgggtggatgggcggatgatggatatatggatggatggttggatggatggatgggcagatagatggacgagcaaatatggatccgcctccttgattggttctgactaactcttcttctctccttttgtcctcacatccctcagatgctggggatcacagtgtcctctcctttccactcttcatctcagcttccttgactcatagtttttcctttccttgcagtctggctgttgagcagtgttagctatgcccccgtgtggt

SEQ ID NO: 18399 - DNA, 966 bp, Artificial sequence
  DNA replication origin
agtgagcagaggtcacaccattgcactccagcttgggcaacaagagtgaaactccatctcaagataaaaaataaaaataaaaacaaaaaccaacaaacaaaaaaacatccaatctcgtgagacttatccactaccacgaaaatggtatgggggaaaccacccccacgattcaattatctcccaccagctccctcccacaacatgtgagaattatggcagctacaattcaggatgagatttgggtggggacacaaccaaaccatatcaaatgttctagaaagaaaaaaatagctggagaagagcagactgtggtcgtgaagggtctggtaaagtctgaaatatttcacctgtcttaatggtgactctaaaatcattgaagggtttccagcagaagagtgacatgagaaactgcattgtagaaaggcccttctgtttacatggtgggtaaagagctggagggggcatggcgggtgctgcgagaccaagtgctgtgggcagtgcaggtggccggtgacggtgacgggggccggagagagcactgcgcactgtgtggtgggaggactggatgcacaagagggaatctcgggactagaatctgttgctgtgagttactgagtggatggaaggcatggaggccagaaacagaaaagttcagggggggatttgggaagaagataggaaacaacgatggggacggagatgctgatttttggagatggcaagagaaatgcaaaatttgacagacccaaatagagataccaaaatagagcgctggggaggagagggagacctggggagatgctgttttcggggtgatgttgggacacatatggaaactggagccctagcgatggggagaggaagaaacaagacagagccccagggagcacaggactgaagggctgagaagaggagacgtcagggaggagccatgagagaggcagaaacccagagagtgtggtgtct

SEQ ID NO: 18400 - DNA, 972 bp, Artificial sequence
  DNA replication origin
tggctgagctgggtgtgcgcattaagttgtggggggagagggagcgaggtgggggtgagtggtggggggaggtggccaggtgtgcgtgagtgtgggggagggagccgggtgtgggtgactggtgtggggaggaagccgggtgtgcagggggcagggatgggtgggctgggggtgaggctggagcggggctggggctgggaagggagtaggtgagtttggagggagggggagacgggggggcggggccaggacccctgagctcctcatcttggggcgtttctttgtgcgtgttctgtggtgggatcttcccagcatggtgtcttcgggatagccaccctgctcacctggtggctcagggttttaagctgagtccccgagagagcgagccagccagtgggaggcggcctcccttttcttccctgattcgcaaagaatagctggtgtctctgcctcgcagtccccttgttagaggcaagtgcccacagctgggccccgttcaggggtaggggacggagactcgcccttcttctgggagccaaatcaaaagaattggctgacgtgttgtctacccacagacaactgtgacacagtctggggacctcctaattggaaagtctctgggcacctgccagtactggccctcgatgctgggtgttggggcatggctgggtgatggcagaacatgcctgacttgaggatggctggcctgcagctacattttctgagactaaacagcaagtctggccaccagggaaaccgccatgttgtctgtagtggggatggcgtggatccgccgagactgtagcagtcaccaccgccctctgccccccaggaatgcagagtcatgttaggaaggaggaaacagttaggagatggagccctagacaagacaatgaccttgactttggtttgcctttggtttggggatacagcggcagaaaacacaggccttggaaagacgcaggtgtcctg

SEQ ID NO: 18401 - DNA, 974 bp, Artificial sequence
  DNA replication origin
ttcccgggctcggcttcgccgggatcctcttggaagggaaacaatggggcggagggcactgcggtagccgccgccgccgccgcgccgcgccgcgccggatctgctcggccgcccgggaccgccagctctgtccgctgcccacagcctagcagtcgggaccgtactgaggtaacttccattcctcagctcccgccgtgaggggccggcggcggcgggctccgcgggcgtcctccccgggccgggactcggagttggccccggggagccggacgccgccattcccggcccctggaggaggggacgcggctgcggttcgcggctcggccctggggggcggctcgggcacagtgcgggggctgcctgtgtgtccccgcgcccggagcgtggggtccgcggggcgatgggcgggctgggggcgccgcgcggggtgcggggaggcccgggggtggaacccggcgactgcctccccgagtgagccgcgatcccggccaggcgcgtctccctcgcaagtttcggtcgcgtctcccgagccccagtgggcaggacccgggcaaacttcgtgcctttaaatgactgccttgatgccgcggaactttgtttggaccaggcgaggggaggatggggcgaatgagagatctgcaagtcttggaaatccgtgcgcctttgcaaagtttgcaaaatagtttggcgctcacaaccctaggctggtgcggcatttgtaatgcgtgaaaacggttcctcgcaggtgttttactgctagaaaatgcgggacgcgtaggaatccatgggtgcacgtttctgtaatttgaaaatgttgtctctccccacccccaacccttatccctttctttcccaacatttaatccgcagatagatgctttttagaccgtagacttcagcatgccttctttggactgggaaggcttgttgaattagggccgtacccagtgattggaaatagtgcgagacgaatg

SEQ ID NO: 18402 - DNA, 1380 bp, Artificial sequence
  DNA replication origin
agttacctcagtacggtcccgactgctaggctgtgggcagcggacagagctggcggtcccgggcggccgagcagatccggcgcggcgcggcgcggcggcggcggcggctaccgcagtgccctccgccccattgtttcccttccaagaggatcccggcgaagccgagcccgggaaccaggaagttccccggcgcgacacctcctgccgccgctatggaaacggcccccgcctcccagggcggctcgcccgggaccccgcctccgcgcctccggccccgcccgcctcaccggccgccgccaaccgtcaccgcagcggccgcagccgccgccatattggcgcggccccttcccggcggcacgtgcgctccgctcccgcactcccgccgtgcgcgctcccgcccgcctcggggacgcgcgcccagggctgcaggtgcccggagcccctcggcgggaagcgggcgctggaagcccaggacccaaagcggggcttcggggcacgcaaacgagcgacattggcgtgtccagccggcaggtcagaggatagcagagacgtagggaggtcagctgagtagggggcgagaggatggtctccggagccagcctggcttttttttttttttcatttctgcctcaactacttaccaggtgtcagcccttggacacttttccctgtgcctcagtttcttcatctgtaaagtggaatgataataggacctgcctcatggggctgtcctggaacaagcgagtgcttggtagtaagtgcaaagctcaataaaatgccattgctactgacataggtgacactgctgtcatttttcaggaacttaggctaagcgttcacatcagcactactttaagtaggctactgtgtagatcccattgctgcttcaagcttctcaaatgttcatcactgtcccatctttctgtaggtcaactttccttttttacatcgtggaaattgtcaagagttttaatctccaaagcctcccattaaggggtgccataaaaagatgaatgatgtaaacttcccaaagccgtaattagctgacagttaaatgattgattcaatcgaagctagaaaagttagggtgtacaagtaaccaaaaggcttcctgtccttgattccaggaactagaattactgaacctggcaaccctgcactgtgccttttatctctcttttccagctggtgaaaactgacacgaagaaactgaatgctgcgcccaatatctcacagaaggggtggaaggaggaggcagggtcacaggctctttgctagcacccaaactttgagaactgtgactcagattaggtttggtctctaaggctccttctagctctcaagtgtggtaatcttaacgacagggatacccagcaatac

SEQ ID NO: 18403 - DNA, 1139 bp, Artificial sequence
  DNA replication origin
agctgccgcgcgctggtgggccgcggctccgactcccgccgccccgccccggccgggtcccggctgcagaagcgggcggggagctgggcccaggggccgcgccggagacacatgggcccacttgccccgaaggcccgcaagacggcgacggcggccatagcattcgggatggccagacgccgcaggatcgcgctgcctggccggccgcaggtgctgggcgctccgagggcgctgctgtgagcagggccgggacggaactcgacggaactcgacggtggccgagacccggacggaaccgcctgacaggcccaggcttcgcggggacgccccaggccaggcccagtccgtactacgccccgccccggcacgccccgccccgccccggcacgcccctccccgccccggcacgccccgccccgcccccacgaggcccgcccccggctcgccgctccccgccgcgccccgcacggtgaaaggcgcgcattgaaaacctgcaggccggctccaggggttgtttgacaaggcctgtgggaaagtttaagcgaggggaggagtaggatgatttctttttgcaccaacaccgggaatgtggcgtttgcctgcattaggaaaacgagcgtcaggggtgattggcgctgcactgttagcaaccgctcccctacctgcctgggaaacgccccgagcctggagggcgagcacgtggggggcctggctgcgcggatgttgactttttaatcctttgtgtcctctcatccagacgctgggggtccacactttaagtttctgcctccaggtatctggaaatggaaagtgagttcataaacaaaataaagttaaatttccggaacacctgagcttgatctcccagtcatgccaagtgccaccgacgaggccgagcacgggggagcacgggggtcgcagagcctgataaaagtgaccgcccccagggcttagggtcactgctggtctcttactaagatgactttcgctggctgggaggagatgaggaggccccactccacaggggagctggtgcaagagggaactgatacacggggtttcgggaagacgaaggagctaggagagcactccgagcctggactgcgcagatgaaaatggaaagacggctgggcgcggtg

SEQ ID NO: 18404 - DNA, 1679 bp, Artificial sequence
  DNA replication origin
cgagttccgtcgagttccgtcccggccctgctcacagcagcgccctcggagcgcccagcacctgcggccggccaggcagcgcgatcctgcggcgtctggccatcccgaatgctatggccgccgtcgccgtcttgcgggccttcggggcaagtgggcccatgtgtctccggcgcggcccctgggcccagctccccgcccgcttctgcagccgggacccggccggggcggggcggcgggagtcggagccgcggcccaccagcgcgcggcagctggacggcataaggtcagccccgggccgcgcgggctcctcgcgttggtgccgagtcggggtcagggcgccgccattgacccggggaggacccggggaaccggagccccgtttacgcccctggggagggaactccccgtgtcccggacccgggcctggcagcgagacgcgcaggtgggattgtagggccgtcggtgggactgcccggggctccaaagccctcagggcagcctgcggggtcactgggcctccagtcgctgggcctgcggagaggcctggagaggagggctctgggccccagacccggccctaggggaagtgtgggcttggtcgagctgctccttggccctcacacagaggcgcggggctgggggccaggacagtaaataggacaaagtgcacagcttcctgagcgctgcccttgtggctacgggcccaaaactcttaaaaatgtgcttgtacgccaactggaatctgggcgatggagtcatgaaggtggagggccctaccccctccaggcctgagccgggtgcttgcctggccggggcaagggtgcaaagggaggcctgcgtaccgtgtttcagcatgtttcagttctaaatcaagctattaaataaaacgtcgtcttctcctaccctgagatgttcaccttccgaagaagacctagaaggccgcctgtgaactgataatcctcagatgaccaggtggttccccgcaggggtagagagccagcccgtggcttcagcgttttccttttctcctcaccctcctctcatcctttcctacctttgcacccgtcctttctgctgctctgcaaggggctgggtgcacagatctgcagacacccttccagccctcatgctctacagacagctgctcttggccacctttgggcttggggtgcccacagcaggggcagggaattccagggtctcagtaatggccgcagggtttggaaaggggatggttcccttccctgtggaccccttgctcatcaactacaggagcacaggccagagcagggcccaggccagggtctttcttgcccattgctaagtttctgcttctgtaaatctggtcacatctggttggaagcctgacttctgggcatggcggccagatggcaaaaaggaggccggtcgagttctccagaattaaatatgaatcagcaaaggtggtgactgaaacactctcacatgaatgctagggtttgtttagtaggaaaggaaacttcttaaccaagcattaaagcagcattatgttgggcactaagcaggtgaacttgagcaagaacttgagcgacccaccactcttcaagtgtcccttttccatgctcctcctcccagcagcactgctgtcatggacccagggccagctctgtgctgggctccctgcatccatgatccctaat

SEQ ID NO: 18405 - DNA, 1356 bp, Artificial sequence
  DNA replication origin
gcggcgccagtcctgggcgccgttgggctgccggggcccggggaagctctgacgggcccgcgtgctgggcagggccgggccagggcggaagcagagggacttcccagcgggcgcgaaggagctgggtgcgctcttcagggcctcgtgcgcacttgggaagccgttggccagcgccgggccccgcggagcctgaccccctgcccggagactctcagcggggcccggcaggccccggccacgcgccacccgctccggggaggagccgccccctggggccccctcgccggcgtcccccgcggcggggaaggcgccggcgtggccgtggatggtggccaacacctgcgccctgcgctcctgcacgctgacggccgccctggacagggtcctgcggggctcccgggccgcgccgttggtgacgatgatgttgctggggaagcggggtgccttgggctgcgccgggtggctgggccccgggccagggtctccactgcggggcccccgggcggcaggtgtcctccactccccgggccggccctccctgaacggggaggtgggcgagagggcttcgttccccgccatcctctcggaaatcttctgcgccataacgaggggcgtgggaacagagcgcaggagtctggggtgctccaccggcggggagggggcgcgcagctccctcctggggggatcgggggtgctaggcaggggtggtggcgcaagaagggtctcgggagccggggggtctggaggtggaggagtctcagcatcttgtttcctgtgctccttcccagcaggtgcaggccctggaagacaagggaggagcctgtgagccaccggcccacgtgaaagtaaatgcatgaagttccctctcgctgaactgaaaagagcctcaacctggacctgacaccaacttcgccggtgctgcctgtgagtcaactcctctctccctgttcctgggactagggaaggagaaggtggtatgtcatgctcatgacctcacgctgataagggacaatcacgatagccctgcaagtcagacagtccacacctaggagacattccgtccatgtgggctgctgaggctccagcccctgaggctgggacaggacgcaagtagtgaccaactcatcaggggagtttacaaaggggaaattgagtctagaaagtgtgtggcacacaccgacaccagcaggtctttctggatgaaggacatgtagctgtgtcactttcctctatgacagagaatttaacaggcctgcctctgagtccttacatagcatgtatcagtcacagatcacctggcactgctgtacttatgcatctgtctctcaatacaacactgggccgggcgcggtggct

SEQ ID NO: 18406 - DNA, 955 bp, Artificial sequence
  DNA replication origin
cccgcaggaccctgtccagggcggccgtcagcgtgcaggagcgcagggcgcaggtgttggccaccatccacggccacgccggcgccttccccgccgcgggggacgccggcgagggggccccagggggcggctcctccccggagcgggtggcgcgtggccggggcctgccgggccccgctgagagtctccgggcagggggtcaggctccgcggggcccggcgctggccaacggcttcccaagtgcgcacgaggccctgaagagcgcacccagctccttcgcgcccgctgggaagtccctctgcttccgccctggcccggccctgcccagcacgcgggcccgtcagagcttccccgggccccggcagcccaacggcgcccaggactggcgccgcgcagactccctgccccggccccagggcatcaccgtgcagttcgcgggccgcggctcctcggaggaggcgcgcagggaggccctgcggaagctggggctgctcagggagagttcgtgagggccgcgcgggctccagtccaccccgtttctccccaccctgaagagagggtgaaagagtcgctgcacccaggagctgtttggtctaaaatggaagtgacagcgggagcccctgccctctgtggcacatcggagtctagaggtgcctggctggggcctcctggctgagcacgcaccgcaagctccagccaccggcacagagaactcttccctaaaggaatctggccgagggcttgtctcccttttcccaagaactgagagagagagaataacctgttagacccataggtttccgtgatgtgtaaatgccatcttttgggggttgggaggagtaggactggtctgattatcattcttgagtctcatctaccctcttctcgaagtacatgacatgaaagttcagatcccttccactcaggattctcgccgccttttctaagaaaataa

SEQ ID NO: 18407 - DNA, 1443 bp, Artificial sequence
  DNA replication origin
gcaggccccagcgggaggtcagggcagccttggcctgagggtgctgtgcgtgatggccaggctggggcctgtggcgctgcagttcacacaatcacctcctctgtgccagcccaggtggccgtgggactctgggcctcatagtttccagtgtccctggactgggccgggctggtccaggttcagtgctgtctcatcagaagaggctgggagggaggcacagggagggcctggctctgcgaagagctccgtatttccacgggcaagggagggaacgtggaaaaacctgcgctggggtgggcggcttcctcccgtgttgtctctgagcaggaagccaggcctgcccagcctcggggaagaaaaataaactctggacacatatttgtagaaagtgggaaagccctgtttctcagggggtggtgaaatttatacgtaaaactggctgctctgctgaagtccccactgactatcagggaggggcccacgatgcagggtggctggggctgcctctccctggtcggggctgcctgttcctggtgggggctggttgtttctggtaggagctggttggttgttcctggtcagggctggttggttgtgcctggttggagctggttggttgtgcctggctggggctggctggttgtgcctggttggagctgataggttgtctgtggtcggggctggctggttgtgcctggctggggctgattgtttgtacctggctggggctagttggttgtcccttgtcggggctggttggttgtccctggtcggggctggttggttgtgcctggtcggggctggttggttgttcggtccctgctcagggctagttggttgtccctggtcggggctggttggttgtccctggtcggggctggttggttgtccctggtcggggctggttgtttgtccctggctggggctggttggttgtgcctggtcggggctggttggttgtgcctggtcggggctggttggttgtgcctggtcagggctggttggttgtccctggtcagggctggttgggtgtgcctggtcggagctggttggttgttccgtccctggtcagggctggttggttgtccctggtcagggcttgttggttgtccctggctggagctggttggttgtccctggctggagctggttggttgtccctcctggggctggtgagttgtctctggctggggctggttggttgtccctggctggagcgggttggttgtgcctggtcggggttgattggttgtccctggctggagctggttggttgtccctgtttggggctggtttgttgtccctggtcagggctggttggttgtccctggtcagggctggttggttgtccctggctggagctggttggttgtcgccagtcaggactggctggttgtccctggctggggctgccaggcccatgggctttcactcctgcgtctg

SEQ ID NO: 18408 - DNA, 1511 bp, Artificial sequence
  DNA replication origin
atgaatttagagtacttattacctttgtcttattatttgattgtacatttgcctaattttaaaatgatggctgtgattaacacctggcttgtaaaattcctgaaattgtacccatcagtctggccagcctggacaagccagctctagcagtcagagaagacagggcccggcctatgctgagtgactggatgccttggagttagtgattccggaaggaaaaggcaggccagtgcagagccagcagccagggctaagccaaagggcaaaatgttcccggcttgaacagggtgaccacacagcctacccacagactggccagggcagtcctggttatgcttggtgtcccccagccccttttagtttcaaaagcatctgtttaggatggacattacatactttccctgtgacacttgcagagctatggccctctgggtccctagaactggctgaagagggagtgggccgggctggtgagcagaggccaggttgggagggcaggggtgagtgcagatggaggaggccaggctgggagggcaggggtgagtgcagatggaagaggccgagctgggaggggatgggtgggtggagatggaagaggcggagctgggaggagatgggtgggtagagatggaagaggcggagctgagaggggatgggtgggtagagatggaagaggccgagctgagaggggatgggtgggtggagatggaagaggccgagctgagaggggatgggtgggtagagatggaagaggccgagctgagaggggatgggtgggtggagatggaagaggccgagctgagaggggatgggtgggtggagatggaagaggccgagctgagaggggatgggtgggtgcagatggacgaggccgagctgaaggcaggggtgggtggagatggaggaagccaagggaaggaaaaggtggtgacaagagtggcaggcactttctgggaagctggaataagggaaggcactgggagccatccgctggtgccagggagagttccattacaaggagcagctgaactcagctgtctccagagccaggggctaggtgggcagcttctccagaggaacaagggtgccccccgtccctgatcaactagggtgtctgtcattcattgttggccttacaaagctggtgagggaacaagaaaaaaaatgcacacgaagttcaagtgcttcacacctagctttccaacacataggaggagacggcaggaggggtcagaatccccgaactgtgggaggcctgggactcctaggtctcagctggagccccccagataaaagccccctcggagactggcaggggcggggtggggttgttccagcagccagttcccatcactctcccactcagccagcagcctcctgaaggcccaaatcccgaatctttcctggccttcttttccccccagtggggacagggcatagctggcccgtctcctggaggacagagccaggagcaggccagcaggcccttcacttcctctgctgccaacgtg

SEQ ID NO: 18409 - DNA, 1061 bp, Artificial sequence
  DNA replication origin
tgcccaagtcaaggcgacttgaaagggccgtcctcactggagggttcctgggagctgttgctgggcccgtgtcatggcttagtgactttttttttttcttggagtaagtgacttgctctgttgcccaggctggagtgcagtggcatgatcacggctcactgcagccttggacctaccaagctcaagtgatcctcccacctcagcctcccaagtagctgggactacaggcacatgcaatccagcccagctaactatttaaaatttttttgcggaacagggtctcactttgtgggccaggctgatcttgaactcctagcctcaagcaaccctcccactttggcctcccacagtgctggggtcacaggtttgagccattgtgcccacgaccgctcagtggcttgttggctaccccgggtcggatgtgtggaggaggagtcctccaggccaagagagaattaagagctgacagggggtcagctccagactgggggacacagtgcaagagaagaggacagagggaagggactgagtgtggccctttgaggaaggaggatgcagcgggaggtggagagagctgcagtggaagcggcgtgagggcagggccagtgctggagtgggcttggtcgccagtgggacgtgtacgtttccttctaagtgttacggggttggttggatctgacttgaaggttcactctggctgtggggtggggagcagatggtaggggctgaggtggagtcaggagggcgaggccctggacatgggacgcttgggggatggtggatgggaggaaaagagcagacaggctcgagcgtgtgtttccagcagagctgccaggcctgggcaatgggctccatggaggagcaggtggggtgaggggactcggggctcctggcctggcgactgggagagtggtaaagtgtgggaagcccctggtggtgccactcgtggggagggtgaggatgagctgcctaagtgccgtgtgcctctcctggtctgcgtgccttgcatggcctcatggctttactgctgccagggagaatggcccctgccaggtggacct

SEQ ID NO: 18410 - DNA, 1103 bp, Artificial sequence
  DNA replication origin
cgcccccactctcagcccggccgcgctggtgagtggcgggcgggagggctggcgggcggagggaggagggggagctgagggaaggcgggccctcggctgcgagataggtggggggaggggaggggagagcccgagcgctggagttggtgctgggaaacccggggctaatgttgacaacaggctcgaggtgagtcccggggatcctccttcccctccgctccaacgatcgggaggaaatggggctggggggcaccggcctagactcctactccctgggggaccccagaggcgactccacactccagctctccggggtcggcgagcagtggagggaccgcgggtccggcgtcgttctcctcagaccccctgtctccgaggctcccatcaacgcgggagcccccgggccgggccatgcttggggggcggtggaggaggtgcctgccccacatgcctgggccgggcctcgagactggaggcggggagcccgcggtggaggggcgaaagtgttcgggggcgtggaggagagcgaggggaggtcgggggaagctcctcgagagccgggagggaagcgagggcgagaaagtggggagggcgcgtgtgtgggaggctgcggagtggggagaccggccgggaaggcttctgtggcgagggagtgtggggcgagaagttggggttggggcagcgatggtccgcgaaggtgaccgtggatacctgtgggaaggggagttgtgtcggggaagtgtggtgggtttagaggttcctacaccaccagagcaggggtttgtaggagaggtatgtgtaggggaaggggcttggggtgtatctggggatggtgggcatgggctgtttggttgacttccttttaatcacataggctggttgattcttcactttaccttcacctcttcaaggcgccaagcactctcttcttgctaggactgttggactaaggaagtgatcacaggatatttggtccccaggttggcagagcagagccagctgggtccacgctggggtgatcggaccttcagctctcttgctcatcttagaggacttacacgacacgaaacgatgcatcagatcaaagtgaaaccctcgctgac

SEQ ID NO: 18411 - DNA, 916 bp, Artificial sequence
  DNA replication origin
cagcggtattttgaatcccacatgttcttccagaatcttgccacaatctcccctagaggtggtgtccctaggacttgtggctgcccctacagacacaatgcagtaaaagatgctggttcagttctgaggacatcccttggaccccagctgccacgctgtgaggaagcccaggccgcttggagaagccatctggaggtgctggagctgacaccagcacccaatgccagactggggaatgagggagccacctgatcattccagtccccagccctggggctgtcccagctgacctcaagtacagcagagactcatgcaagctggacctaaattgcacgcccccctgaaatatataatttatttcatgaacatagatctgaacattagaacagattattgaggccggttttggtggcccatgcctgtaatcccagcacttggggaggctgagacagctggattgcttgagctcaggagttcgagaccagcctgggcaacatagcaagactctatctctacaaaaaatacaaaaattgggtgagtttggtggcggaaacctgctagtcccagctactcgggaggctgaggtgggcaggtcgcttgagactgggagttcgaggcagcagtgagctatgattgtgtcaccgcactccattccagcctgagccacagagcaagaccggctcttaaaaaaaaagaaagaaagaaagaaaaaagataacagtggcttcaggaaaactgttccacggtaggaggcatacgatcctgatctctgtattttggagaagacggaggggactagcttacgtcgagacagaggagttcataactattaactatacacaacgacgtgtcacaaatgtttacaaacttccaagagataacgataagaagcggccgggcgcggtggctcacgcct

SEQ ID NO: 18412 - DNA, 1148 bp, Artificial sequence
  DNA replication origin
gccctgcccccaggcgcgccagccccgcctcccgggtcccgggtcctgggaccgggcccgccctgccccggcgcccgtggtcaccatggcaacgcagcggacgtcggccaacggcccgccctgggggcggggctgggccggtcgggcgcgcgggtcaggtggcgaagggcggagtctgcgcggggttgggcggagcctgcgcggggccggtaggatcgcgtcgggagccggtaccgaggcccgagccgcgggagtcgagcgaaggcagcgccgaggccgcggtttccccctgggcctccccagcagcagccatgggcagtgagtagcggcggctggagcggggactctggctgggaacgcaggccccgcctgggctgcgggcggtggggctggcgctcgctcggagtcgtgggggccagggatgcgcgggccgctccgggcctcagcggagggcacgggccgggggcctccgccgaggctcccctagccgtgcgaggccttgcccggcgggtaccgggacccggaggcccggggtttgcgtttgatagagggcgaggatggcgctgggaggccattggttttgggggcggggagttagggcaccgggtgaacctggaccactttttaatttttcaggagttaaagaaatcccgtgtttttattccctcgtcatctttccttggcatgttgcattgaagaaagctcccctaactcgtttaattttaaaaaaagtgatgcatggcgtgtgttttagggaggaaaggagtgtgcattggtaacagcgttttccttaaactgttcattctgtagcgtttactgaaaactgtaaggttttataagccttagggacaaggccttatgttataggaatgtttttcagggccctccccgtaacactcaaccccacatatgtgcacgtagctacttgcatagctgtgaagatgttcgttggatgatgggtcgtgcatacccaagcagggcacccattggccaactagtggacatttgggggaaattagaaaggagtaggagagacccgtggtaaaattttgcatcacaaggatagacagggggcagccaaaagctttgcttgaacatgaataccccttacagatgatcataaagtgtcaagaaatctgagagtggct

SEQ ID NO: 18413 - DNA, 969 bp, Artificial sequence
  DNA replication origin
gttctcaatgagctgttgggtacacctcccagacggcgtggcggctgggcagaggcgccccccacctccctcctggacggggcggctggccgggcgggggctgccccccacctccctcccagatggggcggctggccgggtgggggctctcccccacctcctggagggggcagctgctgggtggagacgctcctcacttcccagacggggcggctgctgggcggaggggctcctcacttctcagacggggcggccgggcagagaggctcctcacctcccagacggggtggaggttgggcagagacactcctcagttcccagacagcgtcgcggctgggcagaggcgctcctcacatcccagacggggcggcggggcagaggcgctcctcacatcccagacgatgggctgcggggcagaggcgctccccacatctcagacgatgggtggctgggcagagacgctccccatttcctagacgggatggcggccgggaagaggtgctcctcacttcccagactgggcggccaggcagaggggctcctcacatcccagacgatgggcggccaggcagagacgctccttgcttcccagacggggtggcggctgggcagaggctgcaatctcggcactttgggaggcgaaggcaggcggctgggaggtggaggttgtagcgagccgagatcacaccactgcactccagcctgggcaacattgagcactgagtgagcgagactccgtctgcaatcccggcactttgggaggccgaggctagcagatcactcgcggttaggagctggagaccagccccaccaacacggcaaaaccctgtctccaccaaaaaaatacgaaaaccagtcaggcgtggcggcgtgcgcctgcaatcccaggcactcggcaggctgaagcaggagaatcaggcagggaggttgcagtgagccgagatggcggcactacagtccagcctctgc

SEQ ID NO: 18414 - DNA, 1780 bp, Artificial sequence
  DNA replication origin
gcacgttacttttttttttttgagacagtcttgccctgtcgcccaggctggagtgcagtggcacaatctcggctcactgcaagctctgcctcccggattcatgccattctcctgccgcagcctcccaagtagctgggactacaggcgcccgccaccacgcccggctaattttttttttgtatttttagtagagacaggttttcaccgtgttagccaggatggtctcgataccctgacttcctgatccgcccgtcttggacatgttacttttatgggcagaaaacagcactacaaagttgtttcaggaaagtctggctgtgaagctggcaggaaaggagagagtggctgggtgaagaaaccgggttgaacaatgttttgtttttttcggatgggaggtatctgagcatgactaaatccggatggacagagttgatagagaggaagaattgcaaaaagagcagagggcatctggagaaagaggaggaggacacagtgtcctgagggggaggtaagagaggaggacacagtgtcctgagggggaggtgagagagggggacacggtgtcctgagggggaggtgagagaggaggacacagtgtccggagtgggaggtgagagaggaggacacagtgtccagagtgggaggtgcgagaagaggacagtgtccttagggggaggtgagagaggaggacacagtgtcctgagggggaggtgagagaggaggacacagtgtccggagtgggaggtgagagaggaggacagtgtcctgagggggaggtgagagagaggaggacacagtgtccagagtgggaggtgagagaggaggacagtgtcctgagggggaggtgagagagggggacacggtgccctgagggggaggtgagagagaggaggacacagtgtctggagtgggaggtgagagaggaggacagtgtcctgagggggaggtgagagagaggaggacacagtgtccggagtgggcggtgagagaggaggacacagtgtccagagtgggaggtgagagaggaggacagtgtcctgagggggaggtgagagagaggaggacacagtgtcctgagggggaggtgagagaggaagacacagtgtactgaggggggaggtgacagaggaggacacagtgtccagagtggggagatgacagagggggacacaagtgtatggaggggggagattagactcaggaagggacggacaagcttgtaggtgtgatgagaaatcaactgagggaattctcatcagtgggttcccttttccgggaaacagcaagttaaatcatctgctgagaggaaggaaggaatgatgggagactgagaagcatcaaggcgtgagccagtcaccgtggaaatggaggagaaagctgacaggaatccgctgggctgcacgtgtgtaacttctctgtcggcctcagcagctggggctggggtcagaaggaacagatgcatgagctgatctgggaccaagattcctccaggtgggtgtgacagaagaagctcagaaaaagaactaaaaaaactgatcagatgatcctgacttctgtatataaagttaagtggggcccccttctttgaccaccaccatgggcaggttagctattagtaaagctgtgttacactctgcgcttcccaagggtcctggccattgccgcctacctatgcgtctgaagaacaagcagtcagtcagtagactggaaaggtttacattgtatctgtcttaaaaatgttgtacctgctcttgagcgtcaacttcactaaaatcgccgt

SEQ ID NO: 18415 - DNA, 1458 bp, Artificial sequence
  DNA replication origin
gggagctggaaacggagcccagtctgggggcgccggggctttcccgtctccggcgggagggggcgcctctgcgtggctcggaagcgccgggcgggcgggggtgcgcggcggccggatgcggggcgccgagggcggggcgccttcccgcgctgtggcctgtggcccgggggacccgaggggcaaggcgtggggtggggggggtgggggccggttgttatggcgacgggcggcggcggcggctgggatggaggcggaggcgggcgggagctcattcgcattgcaccaaatcggtttcacgtcagtttcgggacagacccgcgaggagcaagccggggagcctctgggcgggtacgcgcaggacgcgccagcagctgcctcgtggtccctttgcgagcaaaactcccgggggtgtttggcagccgcgcgggcgccctggtgctgggctggagcggccggcgggcctggccggcctggttgccctggctcacgcttggccccttctggcatctccctgtctcctcccagagactcagtggaaagaagtgatcgtctgccccgcagtcccctcgaaggaggagcccacccgcggctggcttagtagggtgtccgggttgcggggcaggcacctgctttcctatggactgccaaaactaacccagagaattccctccggactcccatctcccagctgtactttggcctgcccgccccactcctggtgtccacctgtcagagggcagcccacgtgctccagttccctggtccccaacctgcaggggcgacctcttgatcggaaaattttagatttcttggtatcaacacttcgcctccctcagggcctctcctcgtagttgggtaaacagctctgtctcttgactggggacacctgtcccattttcccaggactgttccaatttcactgtaaaaggaaaaaaaaaatctgctccctgaataggaaacttcatccagcaccttgtgcctagttctgactctggctgaagtggaggcagcccagctgctctccctcagcccctactctgaccctaaagaggtcagacgacaccctggcatccccattcctgggacctccatgctagtttccatctttcaaagacggttagcttaaggttttccaaactgagaagagcaaagaggggatttacttgccggttagatgtagaataaatccacaaacccaatttccaacacggatgggtgagaagaattactaaggaacctctcttatacttgaggcacattaccaaagttcaaggcaaacagcatccccttcaataagaaacatttgaaaaactatcatgtattttacttgtgccaaaggttagataatacaaacagtgggaaccagggcataagtcaactaagatcccaactgtcgctttctcatgcctacagtcagcatcttcttgtcctttctttctccttcccttcctcccactg

SEQ ID NO: 18416 - DNA, 775 bp, Artificial sequence
  DNA replication origin
gagagcgaaagaggaaactgcagaggaggaagctgcgccgcagcccgagccgcccggcatccccgccgcctctgcgcccgcgccgcgcccccggcgccccctccccagcgcgcccccggccgctcctccgcgccgcgctcgtcggccatggcccgggagaacggcgagagcagctcctcctggaaaaagcaagctgaagacatcaagaagatcttcgagttcaaagagaccctcggaacgtaagtggggaccggggaggcgagggtggaggtggccgcggcaggggctgcacgggcagctccagctgccgccgccgccactaccgcggcagaaacccagcctgtcaccgcgtcctcattgtcccgttctcggcgctgcggagcccccccgagcgcgcccgacgcgtgggcctgcgacccccgggtgggcgccgttcccgggagggggagggggcagcgccgggctgtcagggagcagcccacgcgggcgcgcgacttcccacttctcctgccaccgccgccctctccgctgccttctccccacgcgtgactgtgggctgagcatggtggggatggctgtttaccggctgtgtgcgtttactcgccgtgtgcatgggcgcaccgcgttggcgagacgtggtcacgagaagatcagcctccagtcgttcccatttctgtccttacatcatgtatttctatggaattggcatctgcacgtacgaggtgtaggcaagactttgggtggccacgcgaggatggaagggaagggcttcgca

SEQ ID NO: 18417 - DNA, 973 bp, Artificial sequence
  DNA replication origin
gggggcagcgccgggctgtcagggagcagcccacgcgggcgcgcgacttcccacttctcctgccaccgccgccctctccgctgccttctccccacgcgtgactgtgggctgagcatggtggggatggctgtttaccggctgtgtgcgtttactcgccgtgtgcatgggcgcaccgcgttggcgagacgtggtcacgagaagatcagcctccagtcgttcccatttctgtccttacatcatgtatttctatggaattggcatctgcacgtacgaggtgtaggcaagactttgggtggccacgcgaggatggaagggaagggcttcgcagtgctcagggtcacacgtgggcagagcctcaccggagggtctgtgcatttcacgcgggctcggccgcacgcgccggggagcgcgtctccaagggagggtctgtgcgcgtcgctgcgcgggcggtgctctctccgggctgcatcgagtcccatgctgatggctgtgtctcaagaaagcagaaataatccgaagtcgatggcaggaacgctccaagcatgtgctgctcagctcagctgctgttccctttctgcccaggagttgggtcttgtttgttttgtttcggagcggctcagaataggtggggaggctgatagtgaaagagaatcaggacctgccgaatgagtctgaagttcaagttatttccttccctcacacaatcagtatttgctctgcatcagtatctgtcagtgtggattcacgcacaggtgtgcagtcagaaatgcccattttgcaggggttcatggaggtgttgattaggctgggaagagaaaggggagctatttcatgggataaatcagtgcgttgttgggtgccctttctttccttcctcctttttttccgtgtgcttgtttttgtgcttggtttcttttttccagcaccacattacccagcttgtcttcacctccaggctcggcgtctgctgctg

SEQ ID NO: 18418 - DNA, 946 bp, Artificial sequence
  DNA replication origin
cggccagccgccccgtccgggagggaggtgggggggtcagccccccgcctggccagccaccccatccgggagggaggtggggaggtcagccccctgcccggccagccgccccgtccgggagggaggcgggggggggggggtcggccagccgccccgtccgggagggaggtgggggggtcagccccccgtccgggaggtgaggggcgcctctgcccggccgcccctactgggaagtgaggacccctctgcccggccagtcgccccgtccgggagggaggtgggggggtcagccccccgcccggccagccgccctatccaggaggtgaggggcgcctctgcccggccgcccctactgggaagtgaggacccctctgtctggccagccgccctgtccgggagggtggtgggggggtcagccccccgcccggccagccgccctatccaggaggtgaggggcgcttctgcccggccacccctactgggaagtgaggagcccctctgcccggccaccaccccgtctgggaggtgtgcccagcggctcattggggatgggccatgatgacaatggcggttttgtggaatagaaaggcgggaagggtggggaaaaaattgagaaatcggatggttgccgggtctgtgtagaaagaagtagatatgggagacttttcattttgttctgtactaagaaaaattcttctgccttgggatcctgttgatctgtgaccttaaccccaaccctgtgctctctgaaacatgtgctgtgtccactcagggttaaatggattaagggcggtgcaagatgtgctttgttaaacagatgcttgaaggcagcatgctcgttaagagtcatcaccactccctaatcttaagtacccagggacacaaacactgcggaaggccgcagggtcctctgcctaggaaaaccagagacctttgttcacttgtt

SEQ ID NO: 18419 - DNA, 1350 bp, Artificial sequence
  DNA replication origin
cggacagggcggctggccgggcggggggctgatccccccacctcccttccggacggggcggctggccgggcggggggctgacccccctcctccctcccggacggggcggctggccgggcagagggatcctcacttcccagtaggggcggccgggcagaggcgcccctcacctcccggacggggcggctggccaggcggggggctgatccccccacctccctcccggacggggcggctggccgggcagggggctgaccccccctcccccctcccggacggggcggctggccgggcggggggctgaccccccacctccctcccggactgggcggctggccgggtggggggctgacccccccacctccctcctggacggggcaactggccgggcagaggggctcctcacttcccagtaggggcggccgggcagaggagcccctcacctcccggacggggcggctggccgggtggggggctgacccccccccacctccctcccggacggggtggctgccgggcggagaggctcctcacttcccagatggggtggctgccggacggaggggctccccacttctcagacggggcggttgccaggcagagggtttcctcacttctcagacggggtggccgggcagagacgctcctcacctcccagacagggttgcggcccagcagaggcgctcctcacatcctagacagggcggcggggcagaggcgctccccactcagacgatgggcgggtcaggcagagatgctcctcacttcctagttgggatggcggccgggcagagacgctcctcacttcttagatgggatggcggctgggcagagacgctcctcactttccagactgggcagccaggcagaggggctcctcacctcccagacgatgggcggccaggcagagacgctcctcacttcccagacggggtggcggccgggcagaggctgcaatctcggctctttgggaggccaaggcaggcggctgggaggtgtaggttgtagtgagctgagatcacgccactgcactccagcctgggcaccattgagcactgagtgaacgagactccgtctgcaatcccggcacctcgggaggccgaggctggcggatcactcgcggttaggagctggagaccagcccggccaacacagcaaaacccagtctccaccaaaaaaaaacgaaaaccagtcaggcgtggcagcgcgcgcctgcaatcgcaggcactcggcaggctgaggcaggagaatcaggcagggaggttgcagtgagccgagatggcagcagtaccgtccagctttggctcggcatcagagggagaccgtggaaggagaccgtggggagaggga

SEQ ID NO: 18420 - DNA, 963 bp, Artificial sequence
  DNA replication origin
cctctgccccaccgccccgtctgggatgtgaggagcgcctctgcccagccgcgaccccgtctgggaggtgaggagcgtctctgcccagccgccccgtctgagaagtgaggagcccctccacccggcagccgccccgactgagaagtgaggagcgtctccgcccggcagccaccccgtctgggaagtgaggagcgtctccgcccggcagccaccccatctgggagggagatggggatcagcccccaccaggccagccgccccgtctgggaggcaggtggggggtcagcccccgcccggccagccgccccgtccgggagggaggtggggggtcagcccccgcccggccagccgccctgtccgggagggaggtggggggcgcctccgcccggccagccgccccgtctgggaggtggtgggcgcctctgcccggccgccccttctgggaagtgaggagcccctctgcccggccaccaccccgtctgggaggtgtacccaacagctcattgagaacgggccatgatgacaatggcggttttgtggaatagaaaagggggaaaggtggggaaaatattgagcaatcagatggttgctgtgtctgtgtggaaagaagtggacatgggagacttttcattttgttctgtactaagaaagattcttctgccttgggatcctgttgatctatgaccttgcccccaaccctgtgctctctgaaacatgtgctgtgtccactcagggttaaatggattaagggcggtgcaagatgtgctttgttaaaaagatgcttgaaggcagcatgctcgttaagagtcatcaccactccctaatcttaagtacccagggacacaaacactgcggagggccgcagggtcctctgtctaggaaaaccagagacctttgttcacttgtttgtctgctgaccttccctccactattgtcctgtgaccctgccaaatccccctctgc

SEQ ID NO: 18421 - DNA, 1096 bp, Artificial sequence
  DNA replication origin
tcacttcccagaaggggcggccgggcagaggcgcccaccacctcccagacggggcggctggccgggcggaggcgccccccacctccctcccggacagggcggctggccgggcgggggctgaccccccacctccctcccggacggggcggctggccgggcgggggctgaccccccacctgcctcccagacggggcggctggcctggtgggggctgatccccatctccctcccagatggggtggctgccgggcggagacgctcctcacttcccagacggggtggctgccgggcggagacgctcctcacttctcagtcggggcggctgccgggtggaggggctcctcacttctcagacggggcggctgggcagagacgctcctcacctcccagacggggtcgcggctgggcagaggcgctcctcacatcccagacggggcggtggggcagaggtgctccccacatttcagatgatgggcggccgggaagaggcgctcctcacttcccagactgggtggccgggcagaggggctcctcacttctcagacgatgggcggccaggcagagacgctcctcatttcccagacagggtggtggccgggcagaggctgcaatctcggcactttgggaggccaaggcaggcggctgggaggtggaggttgtagccagccgagatcaggccactgcactccagcctgggcaccattgagcactgagtgaatgagactccgtctgcaatcccggcacctcgggaggccgaggctggcggatcactcgcagttaggagctggagaccagcccggccaacacagcgaaaccccgtctccaccaaaaaaatacgaaaaccagtcaggcgtggcggatcacgcctgcaatcgcaggcactcggcaggctgaggcaggagaatcaggcagggaggttgcagtgagccgagatggcagcagtacagtccagctttggctgggcatcagagggagaccgtggaaagagagggagagggagaccgtggggagagggagagggagagggagcgggagaggtatatgatatatttcatatccaatttaaactttatctctactgagtctttactgactc

SEQ ID NO: 18422 - DNA, 875 bp, Artificial sequence
  DNA replication origin
tctatagtaactcccgcactgacttttttttttggtcctctgcaaatgatttacatatggagtaagaggcagttccacatcatgagcagctgaaagcaaagtcaatgagctagaaagaaaatagtttgaaaccactcagaatgttgtcatggagacattcattcatttaacaaatatttattaaattctcactgtgcagcaggccgcactgctgggcactgagtttagataaggtgctctccttgccctctgggagctcacagttttgtcactaagtacgtgcagtggcattgcagatgctgtgtagtagcatggccagggcctcaagggtagggggtgctgtcttcttcctttggggtgggatgggaggagaggattcatggaggaggagggcctggacaatgagcatagtttgcagggtcagaaacgcagagggacattccatccagaagtggcagcccaaacagaggtcaggagataggagacagaaaggctggtgtgctggggaactctccagggcaaagggttcagggggaggcctggagacacctaaggttggagaggtgggattgtggagggccttgtgtacccactttgaacttcatcctctagacacgggggagccatcggagggttttgatgaaaggagcaacatgatcaagattaatttttgaagattgttgcggcagaactgagaagaatggactggggggccaggactctatgtatgtagggagaatagtgaggaggctgttggaagaatctggtggagaaatgaagaagcagcacattaacacagaagctctggagttgggatggaagaaacagttatgagtgtgtgaacacagtggaatctgtaggacttagagattcgg

SEQ ID NO: 18423 - DNA, 975 bp, Artificial sequence
  DNA replication origin
aggaggctgtgatcgagaagggcatgcatgagggaaggaagagctgggagactgccaggtaattctcagcctggatattgtgagccgagagagaggaggaggctgtaagacccaagaaagagacagcagagggaggaaagagtgggatggagggtactgtcaggagagaaggccaggagcaaacctaagttcttccctgctcatggcaggctcaggaatcagctagagttaaagcttacccggggctgccaagggctcaggtgaatgcagggtggacgccgtccttgaagttctaagaatttcaaggagatgcaagggtggaggatgtaccaggcggggttgagtggagctgggaatcctgtcacccagcatagagtgggtggggggcatgggctcacaggtgttgccaagcagaatgtggcaggctcagctctgctgagatgaagctgagagcccacgggtgtgagtggtgccctgggagcagcgcccctggggaagacagagaggagggacctcgggtctgaggaagctgggaagcaaggccgggaaggggtctggtgctgagaccagttggggaacaagtgtgagaccttggaggtggcgcatggtggctcaaaagcttgtgtggaggcagaggggatgagggggagggagaaggatgggagacattgtcactgtggattctgatgttgcaggaattggggtcaaagaaggaaaaaatgagagccggggagtagtcaaccaggagggcgctggcgggtctggggagggtgcggagtgtagaagctggaataggactttgtggtgaggggttagaatgggtgggtttagggaatggccaggtgatgacatcagcagcctggaagggcagcggccagccaccctgtccacgactgagcctcggctctcctgaggctaggtaagactcccctttatgggacgcagtgtcagggcccagaagaagcacttcagagc

SEQ ID NO: 18424 - DNA, 1135 bp, Artificial sequence
  DNA replication origin
gggcagatgaggctagaggctgctttataaggagtgagcctgggggtgggagtggggagaaatagagaatttaaaaaaattctttttatatcagtgcaggagggccaggcgcggtggctcacgcctgtaatcccagcactttgggaggccaaggcaggcagatcgcaaggtccggagttcgagaccagcctggccaatatggtgaaagcctgtctctactaaaaatacaaaaattagccgggcatgatggtactctcctgtagtcccagctactcgggaggctaaggcagaagaatcgcttgaacccgggaggcagagcttgcagcgagccgagatcatgccactgcactccagcctgggtgacagagtgagactccgtctcaaaaaaaaaaaaaaaaaaaaaaaatcagtgcaggaaataactgatcattcatgaaaagggcttggaaaaatatatacagagagaaatggaatgacgatctctaatttttgtttatctactgggataatccaggcagaaaagacggtgtcacagctgtaccctgggatcggcagaaaagggtccccccggggcctgtaaggggtgcctgcggtaagtcgtacttcactaggctccttttactgtttaaaaccctataggtggggcacggtggctcacacctgtaatcccagcactttgggaggtcaaggcaggaggatcgcttgagcccaggagggagaggctgcaatgagctgtgattgcagcactgcactccagcttgggtgagagggagactttgtctcaagcaaaaacaaaaacgagaacaaaacaacactatgaaagtgaattaaaatgagcatcagtgaaactcagagccaagagaagaaggtcacccacaagctgcccatggctttggtgtgggaggctcgaggtgagtttctggtacagaaagcagtcaaagttgttttctcctgattccttgctctcagtggtggggtcggggtggggggtgccctgaagcactgcacacacacatgcacacacactcccccgacaaccacttcttagctgtaggaccttgaccaagttacttcatcttacccttcctcattccctttatctgtaaaatggggagtatagtacactcccaaatcc

SEQ ID NO: 18425 - DNA, 1075 bp, Artificial sequence
  DNA replication origin
atcaaatgcagtgtgcggagttcgtcttccccgtgtcttcccgcagatcccgtagtggaggctggagccgcagggggtcgctgccgcccacagaaagaggagaatgccaggcatcctcggagggaggcctccatctgtgttttttgaaaaaaggttaacatctagacatagttaactgagcatacatagctttccactcgtttttgctttaaaatacactcaaaaagcagaaagcctgcaggatgcttcttgggctcttgttgcggacgaataggctcggctattcttgttgctgaagaatagcctctgctggtgtggaggagggaagctgcccccggattagacagcaggatgacaaggtaggagcgagagccgccctatgtgcatccagagtacccgggtagcgctgcagggatgggagggagggaaggagggagggggagagagagagagagggagggacggagagagggagagagggagggagagagggagggagggagagagggagagaaaaaaaacaaaacaacaacaacaaaacctaatctgaaacaggaaaaaggcagatgcgccctctcctggtatctccgaaggattctgcttcgctgtctggacctcctgctgcctggccaagcctgactctcaaccctgcccctgaggctaaccccaagagcagggcagagaagcaagcaagtcagcgactgccccagacccaattccgggccctcgagttggtgtggtgtaggaggggcagatgaggctagaggctgctttataaggagtgagcctgggggtgggagtggggagaaatagagaatttaaaaaaattctttttatatcagtgcaggagggccaggcgcggtggctcacgcctgtaatcccagcactttgggaggccaaggcaggcagatcgcaaggtccggagttcgagaccagcctggccaatatggtgaaagcctgtctctactaaaaatacaaaaattagccgggcatgatggtactctcctgtagtcccagctactcgggaggctaaggcagaagaatcgcttgaacccgggaggcagagcttgcagcg

SEQ ID NO: 18426 - DNA, 1291 bp, Artificial sequence
  DNA replication origin
cggggccttggtcgggtggggtatggaatgggcagggtgggggggatgggcggggtatgggatgggcggggcccgggaaattccccggcgcgggcagggagcggctggctgtcagctgagccgcgctgggcggggtcgccaggccgcgcatcagccctaggcaccccagtcccggctgccccctccgccaccgccgccgcccgccggcaggttccctggtcagcgtcccatcccggtcgggagttctctccaggcggcacgatgccgaggaaacagtgaccctgagcgaagccaagccgggcggcaggtgagccagggcagggggctgcagcggtgggcgagggggcggcggctccttcccggcgggcgcttccgcggcctgaaaacggtacccgccgccctgccccgcggcccggagcctgtcggggtgagggtggcgaggggtggggcggccctcccgcgagacggctgccctgggaggatccccaagcctcggcgggtcctgacctggtgggagagggtgggtagtgaacacagggtgggcccaagaagggtccagggccggcctcttggccgcaggtaacccctctacaagtcacccagagacttggaggtgacgtcctcccgcaggctgggaaggattccgcagccagttcctcgccataaggaggtggttacagacacgcctgtgggagacatgggaccactacccgagctgaatgaggtgcccagggtcggtgggaatccacatagactgctgtgtctaggagagtgtgtacactctatatagagagaatatttgatgaggccgagaaccccaaaggaattgtttttgccatcgaaatgcataagctacaggaagtaaacatcgctcaaagaaaatgaaacccaggttccgacctggcctccaccagcaggaaaactgttgtatggaaatgtacaccaaggaactgtttgtaaggatgaaatggaaaatgaaagcatagaaaagtaaggcaatgtgaggacctcagaagcctttggatctggttagcaaggtgcaggctgtgtgaacagaagaacccaccttgctcttttgacccagggagagaagagttagtggtgccaggctgcctcccaggacaggcccagttttggggcgggggctggagaagtcccagggcagaccccaaggccagggattgccctggagtggacaaggcaagtttaaatgtgacctgtagacagaggacgatcattgatttaagtcctggcataattcatctgtttttccactgggccaattttaggc

SEQ ID NO: 18427 - DNA, 952 bp, Artificial sequence
  DNA replication origin
cacctgaggtcaggagttcgagaccagtctggccaacatggtgaaacctcatctctactaaaaaaaatgcaaaaatgaaccggaagtattggcgcatgcttgtaatcccagctacgcgggaggctgaggcagtagaatcgcttgaacccggaagacggaggttgcagtgggccgagatcggccactgcactccagcctaggcaacaagagcaaaactccgcctcaaaaaaacaaaaaacaaaaaaaaacacaaaaagtccaagccgagcccttcctgctccctctaggaatcaaaatggcggcgagggaaaactggagcagtcccggagcctgagccactgacaggagaggagagggcggcggcggcggtgggaggaggatggcggcggtgtgctggcgccggtgcctgccgcggtgctggtggcggaggcggcgggggcgacggccgaggtccctgcggcagcagcagcagcggcggcgggaggagcctccaggtcgattgaactgtggatgaggaacctacggaatacgaagggcagactgtatagtaaacacttgaggatgcttgctgtgtggttcttacagaatgcactgtccgtgtgtctggctgcccacagcctttcatacttcaatagtatgcactaaagtaaggtctaatggccctgttctcatagaaatagatggaaagaggctgctggatccagggttgaaggttcctaatggcctctaggattatactctgaagaacccgcagacggaatgcctgaatgactgaagaaaatgggtgctaatgcatctcattatcctcatccatgttccgcgaaggtagggggaaattcacaggcccaacagacttttatagggacgtcatcctattctcagcaaggctatggttgtgaatcaaaattgtatagccttgaccatggccatgagaaaccacaagacaaaaaaa

SEQ ID NO: 18428 - DNA, 1181 bp, Artificial sequence
  DNA replication origin
agcgctcacacaaacattacgaagtttcctaaaacccgccagactttctataagaagtgtggcaagcaccaaccccacaaagtgacactgtacacgaaggagaaggattctctgtatgcccagggaaagcggcgttatgacaggaagcagagtggctatcgtgggcaaattaagccgattttccaggaaagggctaaaactacagaaaattgtgccaaggcttgagtgcgttgagcccagctgcagctctaagagagtgctggctattaaaatatgctagcattttgaactgggaggaggtaagaagagaaacggccaagtgatccagttctaagtgtcatgttttcttttattatgaagacaataaaatcttgagtttatatttttaaaacatccattgaatgtggagatattagcgagaaggaagcagagaggggatggggagacaggtttaggatgactgttaggtttctgatttatacaatagggtcgtttttgaggttgtgcactgaagtaggagacataggaagaacggaacaggtttaggggagaagatagatttagttttctatttcagaatgagatgtatgagagatgctgattaagaaaggcacggtagccagcttgatctccagatctggggttctaaggagaggcctggactctccttagaatacaaacgaaggccaaaaaagaacagctctgacagttatcaacatctatctaaaatgaaatctaaagcaaacagcccatattgcagtggtccttaaccttttttgggcggtaggaggatgtttatcacagacccctttaatgtattaaaagtgggccgggcacggtggctcatgtctgtaatcccaggactttgggaggccgaagctggcagatcacctgaggtcaggagttcgagaccagtctggccaacatggtgaaacctcatctctactaaaaaaaatgcaaaaatgaaccggaagtattggcgcatgcttgtaatcccagctacgcgggaggctgaggcagtagaatcgcttgaacccggaagacggaggttgcagtgggccgagatcggccactgcactccagcctaggcaacaagagcaaaactccgcctcaaaaaaacaaaaaacaaaaaaaaacacaaaaagtccaagccgagcccttcctgctccctctaggaatca

SEQ ID NO: 18429 - DNA, 892 bp, Artificial sequence
  DNA replication origin
tgtcgtatcctttgggctgcgcggggctcgggctggatccggcgccggcgccgccgcctgagtggtggccctggtccgggtggaggcctcggggtcgcacgcttcgcagccccagcgcctcctcgctcagcgccgcgtccccgcctgggtcgcgtctcttccaggagccggggagcggggaagaggctgcgtcccccgaggacacgcgcggccgccctggggtcggggcaattgccgcgttgccctgccctccgggatccctgggggcctctgctcctctctttgtggagacgtcgtttcaccggcggcgcgtgaccccggcagctgtccagagacccagagatgtccaatcacaggcgcacggtgcacaggcgcgcagggctgcctggaaccggcccaggcaggcagtgaccgggacctctccggaggggagaggacggtgccctcccgggcaggagctggccaggcaggcgctgcccagggcggcctccctgctggactacggcattgccactgagttatataaagacactatttggggaaggacagcgggtgaggactggcgcggcggcacacgccttgcctgttgtctcggctcttctgggggccaaggccaggagtccagggttacagtgagccgtgatggccagtgcgttccaaaagagagaaacagagagaaagaaaggataacatgttaattgatgagagtgacattccgaaagtaaccgattaagctaaagaaacaatgcaattctatgtcaactctctgcagttaccggatagaaaggagatctttaaaaggaatttctagggttttgcttttttggtttttttttttttttgaaacagggcctcactctgtcacccaggctggagtgcagtagtggtacga

SEQ ID NO: 18430 - DNA, 1138 bp, Artificial sequence
  DNA replication origin
attttttcgcccgccgacatttttgcgcggcggcggcggcggcccgtgcgcgcggcgggagcggccggcctggggtcgcggggtgcctccggggcctccccgcctccccttttctccgcgcgggccctgtcgacccggggcgggtgcgtcccggcgtcctccccggctcctgggccgcacgcgcggtgcccgccggctcccgccgcctcccgccggcccgaacagggatggcccggccggggccccgagctgccgcctccgccccgccgccggcccgcagcccgggcctgctgggccttccgaggcggcggcgagggcctgagcctgagcctgagcccgaaggtgtccccgggttccttgctcccctccccggccgcctccgacgcgggcgtcctggagagcgcgccccattgtgcggggccggcggggaggtaggtccggggttggcggggcagcgcgccgggcccaccccgctgaccggctccccggctccccacgctcgttggaagaaaaaaaaaaaccaaaccatggaaatgtgcccgggaaggaaagggctaaacgttgctttaaatattcatgccattgttttaaaggcgtaaacatgtggctgcggggtcgccgggcaccgtcccttattaatgcaaatggatccccctggttccctaatcactgcacatttcccccagaaccccctcccccttcccatgccctccaaaaatgtaagaatctagtacttttttcattaggatgtgaggctgatttgtgtccttagtaccatttggaattttaaatctgagcgccttcctgatacaaggtgttttaaacttttttccacccttaaaactcttgagaagatagtaatttaaaaggaagtgatagccacacaattcccctccccacctttttgggagccaggagaggaatagataggaggtaggaaaataactggatgcctcgtgagttggattttttctttttcttttttttttcctggtaggggtgaggctgtgttaaatgcgaggtgttttttgaggaaaggactttgttgtttttgttgaaaacgccttccaagtcaaagtggtattcaaactttcccataactctaagatggcttcaaaattctcgtctcttgtcactt

SEQ ID NO: 18431 - DNA, 955 bp, Artificial sequence
  DNA replication origin
agggggcgggggcgccgtgcagccccgagcgcggcaatgattggtctcgggggaggggtggggggttgcaaacccgaggagcggtggcatccgttgcatgatgcaaaaaaggattgatttcaaaagttgcgagttgcattggcagccgcccttggcgcccgggccacctttttcccgggccccgctgcaagggccgggaacgtttccgccacctggccgggctcgaccgcgcggcgctctgcggggcgctgtccccgctccccgagtgcgcagcggagcgtcctggaagacaatgaccatgggaacaatttgcacaggaggctaggagcccaggaaaagccgcctgggcgccaggcagaggttttttgaaaacacaaacggcgcgttagatgcttggggactcccagcatctgtccttcctattgtttagctcggctccggagttcacgggagcctcgtgaaatgtggagacgtcctgcaaagtttcttgaacacttcatgtgcgtggtaggaagtcgaggaaaaaggtttacggttccccgctggttgcattgtttgtcctgcacatgttcgagcgaacatggcagccgcaaccctggatgtgttcgaattgacatcgaggggggagcttcacgtcgtgaaataacttttttctgggctttcgagattctaaagcattgctgatgaaaataaaccaaatactttcagatatcgtttagggcttctctctaaaacagcagtgtgcaggaatgccgatcgaacttttctaggcagtaggtcagcattttccaaatgttatttgggagcagaaatgttttgggtcactggaccgtgctttacgtggcacggcaggttggcacgctacgcagatgcccttttcgttaacatttccgcttgccagttgctccgggttttaatcctgggctggatgcagaagtgatgccacctcgaagac

SEQ ID NO: 18432 - DNA, 1442 bp, Artificial sequence
  DNA replication origin
ctgtaatcccagtactctgggaggccaaggcgggtggatcacttgaggtcaggagttcgagaccagcctggccaacacagtgaaaccccatctctactaaaaataaaaacattagccgggcatggtggcacgcgcctgcagtcccagctactcagaaggcagaggtaggagaatcgcttgaacctgagagatggaggttgcagtgagccgagaacgcaccactgcactccagcctgggtgacagagcaagactctgactcaaacaaacacacaacaaaacaaaacaaaacaaaacagtgagagagagaacgttcaccagagagaacatggagagtggaaagggcacaggctgggttgggagccctggggaacgccacgctgccaaggagaaggtggaggcagaagagcacatgaaggggcccaagcacggctggccaggcaggaggggtggggagagtggaggggaggccactgagtggttctcataaaaaggagggaccagcacgctgcattgcagaagagggacagaaggggcggcttggtgccctatgaaggtcagtgagggctggggagggtggccaatctcaggacacctggcccagagaggggtggaagaagaggggagacaggagggctgagggacagggacttgggtgtgacgtgcaggctgagggagcagtggtgtggcaggagagaacaggatacagggagaaggaggagacggtcaaaggcatcaccctgggggggttggggctgatgaatctggaatagaaatggaggggctgcctccaacagaaggagggaaatgtcctcttctgaacccacggaaagggaagatggtcgattcagaagtggttctaggctggagcaaacactcctgaggcctcagtgagctcaggggtgaggggctctggaggatggagggtgtaggggaggtgtggaatcatctctgagaagaattggagaggaagcagaccacagacaactaatacggctgccacgccacagacaggctacgtggtagggctatgcagcgtggcgggagtctacaggctttccacctccgtctcctgcagctcctttaggacacgggatggtagggctggtctaggctcagggttttgctggacagttttggcagaagaacagggatataagcccgtgaagatgctgaaggtgtgaccgggcatgaatgaactcacctctctactcctcccctatccttcaccccccaaatctaggaaggacgtgaatacagaaaaaggctcatgggcttggagctatctatagagatcagggagtgcaggtgtcaatgggttggcaggcaggggtcatgcagctggaagaattgttctgagataccggagcatgcaggagcagctgaggagcaaccgcgtgtgaggatgctcaggtgtggccaacagtgtggggctgaaatgcag

SEQ ID NO: 18433 - DNA, 1292 bp, Artificial sequence
  DNA replication origin
ggcggcggcggcggcggccccgaagacgcggcgggcgggctgcggggagggcggcggcgggtgcagagccggccggggcgctgaccgcccccgcgggaggaggggcgccggcggagggggcggtgccgctgggaccccagggccacctgctggcggagcccggccgccgccatccccgggggccgccgccggcctggccgcgcggcgccccgaggaggcgcggaggccgcggcgcagcgccctggcccgggcccggccggcctgcctgcccccggggacgacgccgccgcccgggcctccgctcgcagaccccgctcgctggcctccctccgccgcttgctgggccgagctaactccgtgcacctcgccgtgggggcgcggaccgccccgacaaccacctccccgccctcacatcccgggcgccccggggcccgacgcgctgattttaagcaagttttagggggaaaaaacttacccatttgcgctctctctagaaggacagagaggaggttttagaatattgtggagaagaatatagtagagagctcccattccctaacccaggctgggcggattgtggaaagagccgagtcacattcaaggagagcacttggaatggggggcttggtggccctggggactctcaggaggccatggtcaaggcaggtgcagggcactatgcttctccacgtcatatgtcggaatcatggacccaaacacaaagcgcttagtagttatgtgtaatattcttttcgggggatcagagagcgcacttcaggcaccatttctttctcacatctttcgagtgggccaggaaaagaatttcacactacctgggaatggtaggacaggaacatgacgggacatgcgtgaaagtatctgccaaacccaaccaggaagagggtaaagagtcgggggatgggggggctacctctccggcacgggacaaaggccagtggccccaaaagagtagagaggaaaaaggggaggttgacaaatgtgatgagtgtcacgtgggtctcacccaaatgaggcagccgctgaggaaccgctcttatttcagggacacagagtaggacaactgccgaggaagggggacattgaggcagcttgcagaaacacacatggagaaacagaaccaaagagcagggtaaccagcaaaccaggcagtggaggcagggatgggtacccatcccgagatcttgggtgataccaaaggcggcacatccggaaggctggttatacctagcgtggaggggagagggagaactgtttcttccgttcaataaagc

SEQ ID NO: 18434 - DNA, 1211 bp, Artificial sequence
  DNA replication origin
cgcgatcttggctcgctgcaacctctgcctcccgtgttcaagcgattctcctgcctcagcctcccaagtaggtgggattacaggcacctaccaccacgcctggctaatttttgtattttttagtagagacggggtttcaccatgttggccaggctggtctggaactcctgacctcaggtgatccacccaccttggcctcccaaagtgctgggattagagacgtgagccaccgctcctagccacaccttctttttctaaaaagaagcaaaccagatcacggagggccacgtgatgggggctttcatcccccttctgagtggcagtcggaagtgggactcgcctcttcctgtgcttggcccgtggggccgctgtgaagttcacatgcagtcccagcatcgggcaacatcatctgccatgtgatactgttttgcacttccctaagccctgagtggactcaaacgagcagaatgaattataaagtaatggtatggtgagtatttgcatcattcattgtttaattatctcatttgccaccaaccttctatttcccagttttcacaggaaaggggagtctatttatatggatcatgtaatagtatttggttaaacaatatgaagggcctctgtaggactgcttttatctgatctgtaaatagggacatttcatctggtttgtgttttctttttttttttttttttttttttttaagagagacagggtcttgccctgttgcccaggctggagtgcagtggtttgatcatagcttactgcatcctcaagtgatcctccctcttcaacctcctgactagctgggacccctggtgtacaacactacacccagctaattttctaatttatttgtaagagatgaggtcttacagtgttgcacaggatggtctcaaattcccaggctcaagcaattcttcagcctcctgaagcactgggattacaggcgtggaccacagtgcccagccctatctggtttaacatgatactaaggattctgtgattctctttgtgtctatagaattatttaaaaaaaaaaaaaaacccagaaatcgaaacctttctgtgagtcctagcttcagtcccacttcccactgggaatcatggtggagaccccaggttcacctcccgcaatgggcagttcccggatccctggggcagccctgctgagtgagactctggcttgctgggctggggcctgcgc

SEQ ID NO: 18435 - DNA, 923 bp, Artificial sequence
  DNA replication origin
cagggaggcgactgacggcagcccttcgccttccgtgttttcacgctgggccggggaaaagggacgcgccgctgcttctttactgggggcctggagtcgtttatttcgcgtatgttacagtttttaaatgcaaatcccacgtggggcacatactgtgctttcttctgcaaccctcccctcggcacacacacacctactttccttgggcacctcagtcccacgctgtctgaatctacccggggagataggaaaggacatggctttaggcagagctgtgtaggctttttttaaaaccattttctgagagtgccaggggagccctttcctttgggtgcaggacagggcgtttcagacaagggtggcgggggccagcagccgatcgccggtgcccggggctgctaagatggactgctttttacgttccaaatggctgcagcaagtttgatgcagagaaaacggacgctcggaaggggaggagaacagaagggaaccccctttagtacgtgctcatttaaaattggctaaatgcagtgcttctatattggaggcagctgctcaaatgttggtgcacgttgaattcagaaaagattcccggtgctgcaccgagaaagctgcgtgggctgcctgtgcgtaacgagcgacttggtgcctttttctccagtaccctgttagcagagtaactgttcgtacattcaggcgtattctgcgaaatttccaagggatggctgtgctaataatagctctggcgacggcttcttaatagacatcctcattctgaacgatgcagccatgccagccccccgggaagtgcagcttgctgagaaacgagaaccaatgcccgcaaaggactccctgaccccaccatgaatggatgcggctctggctcccctatgaatggagcatcccagtggagacgctgctac

SEQ ID NO: 18436 - DNA, 774 bp, Artificial sequence
  DNA replication origin
ggcggcgactgggggcgtccctggctttctgggggggcgggggcgcgcattgttgtccaggatcgggcggcgggcggtggcggcggcggtggcgcgcggtggccgcctagcacccgacctagcagcgcgccggggactggctcggggcgcgctgggcgcaccatgcggcgggccgggcgcgggcgaggggcgggccggcggcggggctcactggcgccgggccaggctcggcgcgagaggcgcgagcgggctatgggctgacgccgagggcccgcggcgggggcggcggcggggacggggcgggggctcgccagctgcgggcgccaaggccgcctagtaggccaagggccttcgcccgggcgaatgggacgcccgttccggggtaccagccgcttgcagccagaagttcctcggatcccttggaagcgcaaaaaataaaaggtaatgtgtctttgtttcccggtcgcggtggcagggaggcgactgacggcagcccttcgccttccgtgttttcacgctgggccggggaaaagggacgcgccgctgcttctttactgggggcctggagtcgtttatttcgcgtatgttacagtttttaaatgcaaatcccacgtggggcacatactgtgctttcttctgcaaccctcccctcggcacacacacacctactttccttgggcacctcagtcccacgctgtctgaatctacccggggagataggaaaggacatggctttaggcagagctgtgtaggctttttttaaaaccattttct

SEQ ID NO: 18437 - DNA, 818 bp, Artificial sequence
  DNA replication origin
aagggaagaaagagaggaagcaaggagagaagaggaagggaagaaaggatgaaaggaagggagggagggaaggaaggaagaaaggaaggaaaggaaggaagggagggagggagggagggaaggaaggagaaagggaagggaagaaaagattaaaggaagggtgggagggagggagggacagaagaaaaggaaggaaagaagaaaggaaggaaggaaggagaaagggaagagaagaaaggatgaaaggaagggtgggagggagggaaagagagagagagaaggaaggacagaagaaaaggaaggaagaaaggaagggagggaggaaggaaggaagggagggagggaggaaggaaggagataagaaaggatgaaaggaagggagggagggaaggaaggaaggaaagaaggaagaagaaaggaagaagtaaggaaaggaaggaagggagggagggagggaaaaatgtatctgcccaccctagctagctacaattctgcctagagtcttccaaatggcacaggaggaggaaaagtctgtccaaagacagatactgcaaacagcgcactgtgtcagagcaaaccgtaggtaaaaccaagagaaagctttcccacactggtgagctggagataatctcgcagcccctgggcatgtgaggtctggtgataggagtgttgcttgatgtcttggtcctgttcttacggatattgggtttcatgtttggcctaaattccagccagttttcaaacagaaaattatggatgtaggcagcctttctgtttgtctaacctcagtcccagcttcctctaatgagacgtgacat

SEQ ID NO: 18438 - DNA, 940 bp, Artificial sequence
  DNA replication origin
gcgagctgggagggagccgcgcgcctttgtgcgcgcgccgaggtaggttcgcctcccgcacttactttccacacaaagacgaggggcgcggggaggcgggcggcggccctgcccgaccccggctccggggaccctctcggcgggcgggcggccgggcgggtggggggtccccgtgcgcgggagggcagcgggcgtacggggaccacgggtcaccccgcgcggcgcccgggaggtgccggggctcagggcgggcacgcggcggggccgtgcggggggcgccgcggaggcgggggccgctgcggggaaggggcccagcggccgcccggctcattgttgccttctcggcgctgccgcgggggagccctacccggcgcggtgtgcactgcctggccgtgtgcgccgtatgcccgccctcggcgcccctcgccccgcggcgcccggcgtggaccgggtcgcgccccgacgccagcccccgccaggcagacaaagccggggccggggaggtttgccccgcgccgacggtggccgtgacactgactccagtctgcaagtaacttttcctcttttgcctcttctctttctcccctgttccagtgaacccagcatatggggtggtgtaacacacacaaggagtcctaattcaatttgggttccgtaatttcccccaggcatctttaggtcccttggaggtggcactgatgggtatggccaagtgttagtgttatgtaggggatggtgtccaccacttgtgaaatctgcaagaggaattaggttgagagggtaaactgtagatttcattctctgctgcaaggtaccaagcctgcttccttcctccctcccaaagattttaggcaatgacagcggagcaaagttacttgataggatgggtgcgattttgaggggtcaaagaaaaacggaatgagggctgttggacttcaca

SEQ ID NO: 18439 - DNA, 2149 bp, Artificial sequence
  DNA replication origin
tggcctcttctctgtgtttgggcagagaaagagagagtggggaaagggacagaggggaaggagggagggagagaggaagagagaaggaaggagggatctggtgtctctgcctccttatataaggccaccagacctatgagcttagggtcccacccttatgaccttgtttaaccttaattacctccctataggtcctgtctccaaatacagtcacattggaggttagggcttcaacatatgaattataggggtatgtggtacacagtttagtccataacacttcccatatgccagatattacattaggcaagagggtataaagatatgtatatatgtcaagcatcaactctgggctcacagaggcacatatttacgatacagtgcaataacgccaataccatgtcgggtatgggaggggcagaaaagatccatttagtgtgagcaggtcaggaaagggtttccagagaagactgattctcagagaggagaggagctcttggggattggtgaaggtctgctaggcagaggggaagcccgtggaagagcatgacaaggccatatattcattatttcatccagtcttcatcacagagcagggccacttagcaaatacggcactctggctgagtggagccttggatgtttgctggggagcttcgacttgatcatgtagcaggaagcaggcatccactaaagtgtttcaagcagaggaggaaactgagcatcttgcacctggaaagttcacttgcaccccagaaagttgagaggaaaagcatgtgttagaccagaggctggggccagttaggaaacccctgccaccatattgtgactgagcccaaaggcaacagtggcggtgccagcagagggggagggagatagccaggaattgtgcacactgcacaaaccttggagttgatgccaatgtggggagggagagagtttaggctggatcctaggttttggtttggtgactggtggagccattgttaagaacagaaacacaactcaaggacgagagagaaggaagaatcataggaaacaccatgtataaagttcatggaattcagcttcctcagctgggaaggagtttctttaagttctctggcagggattccacccctcagtgggttccagggacccagggatggccagacccttacttggctggcaggctgtggcttagagcatggtgtgtgataggtatctttggaataagtaatttgtttaccaaaatccgtaactgatgtgacttttcagtatgactatgacccaaactgtcttagtcagaaaaatttccccataaataagcccttagtcatctgttgccaagacagttaaaaagcttttgatctaaaatccacgaacctgttgtcctttttgctacgctgaaaccgataactgtttcagtccctgattttgtacctgctgtgattcaagtagattgtaatctcagagccttagggttggccagaaaagcacttgtaagagagctgaagaaaaggagatcagagagcaaagaggcggaataaaccctttctttcttgcatatttaaatttccaattaccctttgatgaagggaggggaggaaaatgggtgaatctccaggtcaccgggttttgggtcctggcttgaccgtaaatttgtacaattacaacaaatgtctccttttcctccctgattctgtctgcgttttcttccaagaggaactggcaggatttctatggggacggcctcttagcatcgcagacttgccggggagacggagcccggacacccaggagcgagacgctcttgggtactttgtgtgtgagacagaataagagagagagatgggggtgagcacagagagagaaagagaatgaaagaatgagacagaggagagagaaagaatgaaagagaatgagaatgagggagagaatgagagaaagagagacaatgagagagaaagagattaagggagagagaaagagataaaagaagagagaatgtgtgtgtgagagagacagagaggtagagggagagagcgagggaacgagggagtgagaaaaaaggagagtgagcgccccggagctttgtggctgtgacccacgcggccgccttcccactttcccggtcatccggggccgccgcgctttccctccagccctc

SEQ ID NO: 18440 - DNA, 1006 bp, Artificial sequence
  DNA replication origin
ggggaccccctcattcctgccgctgccgtccctgctgcctcatggcggccatcggagttcacctgggctgcacctcagcctgtgtggccgtctataaggtgaggggctgcggagctgggctagggcttcatgacggccacccggttttctggcgctgggtcatccacaggcttgagagcggcgtgtcgccggcctagggatgtcgtggagtggcgttgccgcgaggacactccggagcgaagggccgggcaggcccggcctcgcgcctggcgattcctccggaaagtcgtctactccgcggcggaggctcgcggcgatgtagacgcgcggggtcccagggcgtcatggcggcgggatgcccggaggggtcccagggacgacgtagctgcagggtgcccgggggggtcccggagacagcggggccgctgggtgtcccggggggtcccggggacggcggggctgcgagcattttgggggaggtcacggggacgtcctggcctctggatgccggaaggggtctcgctgacgtcagggcctcaggattcccgcgggtgggaggtcctgggaaagttgtggccgcgaggtacttggaggcggtggtctctgggacagcagggccgcagaacgcgctgagctgggcccgaacgtctaggtcccggaggggcggggaggctgcagtcgagctggggctgatggtcccgcaaagctgcctggctgtgaagccagttgatggtgcgtggtctacagaggtggcctttctggaagtgagagcctgacaggacttgtggcctttctctcatcagtggggaggcagaagaaacgataatcatgaactccgttgccactagtcccgcgtttaaatgtcaaatgacttgttaggaaaagccaaagggaataatactacttcatttgtagaaatgggaagaaaggggcccagcgcggtggcttacgcctgtaatcccagcactttgggaagccgaggcaggcggatcacgtgaggttagga

SEQ ID NO: 18441 - DNA, 1253 bp, Artificial sequence
  DNA replication origin
tgcccacctccgcggcgggagccggccgggcagggaggcgggtcagcggcctgggggaggataggcgtccgcagcgtgcgtcccggagttggggtcgcggcgggcggggaaccgccacgtcgccatctggctggcccgcgggacggccccgccgcccgggccttgggagcttgcctgggaacagggaaggcgagggggccgcgctccagcctcacctcctcgcgcctcggccccgaccgccgccatcttgtagagctttcattcaaactggcgcggtctgacgggatagctcagctggcccgacgccccgcccctggccggcccgcgcgggacttgggggccggggcttgttgggggacggaacccgcacggcgtcctgacgtcactggcggccgaccccccgccgcggcggccagcgcgcctgcgccccaaagctaggcccggccccaagcgcgaggagcggggcggggcgagcgcgcgtgctcccggatcctcggcagtgtccggcgcccccttcccttcgccaggcccgtttggcgccttcactcgggaagacgtcggccaggactttgcgctttggagacgtcttacttcggcagcactcgcacactgcgagatccgacacgggcagcggggacctagggagccggggacgctgcctgtcgggtacggttccgcagctaccgcagccccgtgggccatggttagtctccccccgacaccgctccctctagagctccgggcttcggaagcggctgcacgtgggcatggctggagaggttccgctggcttggggcagtcgccgggattccgactggttggtgtggggtgtggcctgtgctatccagctcccagctgatcctaatgtgcggcacagcggaaaccaccggtccacatcagtgcttctcacttaaaggggcttacgaatcgtcgggggtgggggagctggacttggaattttttaagagatgaggtctcactctgtcacccaggctggagtgcagtggcgcgattacggctcactgcagactagacctcctgggctcaactttaatgtaaattgggattgggtaggtctgtaaggggacccgagctcccctcccatgttgttgccaagctcctgagctcggcctggtggcgggtgggggccgggaggagaaggacacgttagtaaggaagctgcaggacgactccaggggcctcccacctggtctccacccccctcccccacccattcttgacgctgcatccat

SEQ ID NO: 18442 - DNA, 1384 bp, Artificial sequence
  DNA replication origin
caagtcccgcgcgggccggccaggggcggggcgtcgggccagctgagctatcccgtcagaccgcgccagtttgaatgaaagctctacaagatggcggcggtcggggccgaggcgcgaggaggtgaggctggagcgcggccccctcgccttccctgttcccaggcaagctcccaaggcccgggcggcggggccgtcccgcgggccagccagatggcgacgtggcggttccccgcccgccgcgaccccaactccgggacgcacgctgcggacgcctatcctcccccaggccgctgacccgcctccctgcccggccggctcccgccgcggaggtgggcactgtccgagcctggggcacttcggaagtggagcgtggcctctccgcccgctcggcccggccccctccgcgtctcccgtggcggcctcgggcttcgaggccgctccccggcagtccccggttggaggtccggggggcacggctgcgactggctcctttgtggtggttcgagcgcggcgtgcggcatgcgcccgggcctttgaagtgggaggcgggaagcgacgcccgccggcgtgaacatgaccttaatatcagagggggagagtaaatcggggcgcctgtgtgctaagaaaggggataagcgaggaatcccccccaaggcggacacgctaggaggttgagtgcctcgttggagaatcgcccagaaagtgggtatttgaggttgcagcctctggcttacggtaactctttcacccaccgggagcttggtgttatttctgtggacgctggggaattgggcaccggggaactgggcaccgagcgcgcgtgggtgtgggcgtcggggggtgttggtgtcgcgcacgctttgagagcctggaacttttccgtgcgttccggaatgtaaaggtgttttcaagctcgtctcctctccgctgggattatgacctcattatccctgaatttttctccttggagaatgtcaggggttactgtgaaccagcggaaggtgtttgtggtggtcatgaactatttaattttgtcagtgaaatctttttctgcattactggagactgtcgagagattgtctttctttttttaaccacgtgtttgcagtttttcatgttcactttttttttttttttaattttcaaagagcatttcctttgcgggttgtgttttgaatcctcaactagataaaaatgtttaggaaaagcacacaaacacaccttgagtagataagaggaacctcctttatacgtgattcccttaatgaggtcagcttaacacaaaacgttctctagtttttgtagatggaagggacttagggggtcatttctttcccatcactgtcctacccccaaacgaccactacaaagccaatcagcctct

SEQ ID NO: 18443 - DNA, 1163 bp, Artificial sequence
  DNA replication origin
cagcgccgccgcgatggcggaggacagcgagtctgcggccagccagcagagcctggaactggacgaccaggacacgtgcgggatagacggggacaatgaggaggagacggagcacgccaaagggtaggggcggcgcgctggcgcaccgggcgcgacagggcggggaccgcgcgcgccacggtctcccgttcgggggtggctcccaggactgggggttcttcggccgctccgccccgcgatggcttctccgtggcgcggagcccatggtgaggtccggggcgcgcggctcgcgggagagtgcagtgcgcggggaggcgaggcccggggtgggcggggaggctggggcccgggcggggagacgctactgtcacttgccgcgcgcccccggccagcctcgcccatccccgccggcggcctggcccaggaggcgcctgttgccctcgcccgcgggtggctccggtgggcgccgaggagaggcgctacgcccttccctttgtggcggccgcagcctggggtaggaggtcgccctcctctgctccctgccatccttgttaagtcccttcagactccctctccgcagccgccacccgaaaagaatgggcaaagacgtgggtggagcggcgtggaggtgccccgatggtgtcggggccgcaggcggcgaactgcgcaaagttctggcgccgagggggtcccgggcccggcccctgctggggatactgggctttgcaccgcctcgcctgtccctagagctcttcagagcagggccgatcccctgaaccgggctcccgctgacctggccgtatcctgtttgcaaagctggtatttgatctccaaaactcgatgcaccacgcattttcacacttgatcggatttcttaatcctttccctttgcccccgaaccctgcagacttgatttgctcttctgttggagaaaaggattgcttcaggtgaaggccggtgttgatgctctctttttagaggcagtgggtcattttaaataaaaactggtgtccttttaaagtgctgtttacattacccttttaccctattggattcaaactatgcgctggcacagagcggttcttgctacacccttagaagtgagatttttcgaaccatggtgagtgatggagaagtgggtcagcttaaaaaacatgataggg

SEQ ID NO: 18444 - DNA, 1538 bp, Artificial sequence
  DNA replication origin
atccagtactgtaccgatgtacttcaatccagtactgtaccaacttgtttccattctggggaacagatgttccctgtttgtcattgttttctagtgtttcactggtttttgatgccctcattttatttttccaggattatttgttttcttattcttttttagagcagttcttagtcaaaacttcttgaaaattcagataaatatatgactgctgagtttcctttgccttaagttttaaaaactcttttagagaacccttctggcaggttagagtggatgatttgattgataggcttgctcctggccagtttcctgttggttacccgagcgggctgcgggttctccaacaatccatgttcacagagatgagctgcaggaacctcactcatctgtatttgcttctatcctaaagtttcacagaggtgacatgtgacattttgcctcagaaatagttgccgttgttaaaggcaatattgtatttccttttgtgttttgaccccatttgcccttcttacagaattttagttgtctcaatgccaaacagctgacgggctttgaaatcgctctgcagttttcatcttttgatacttctagctcattgcgttttaaaaacatagtctcccttggggaaaaaagccataaaatgctcctagtatcttctgcaaaaaaaggacccacaccaaaaaattcaggtggctctttaaagtctcattttcctcactgagcgggttctgatgattatctttgcaaaaccactgcggagacttccggtggcctagcagcacatttgaacaagatcatctcagcaaagcaaaggacaggactgctctgtacagaatgcagtagcaaataagagaggctgaacttcaccggtcttctatttggcagtactacagaatgcctcccttccctcttctgagagagacagcggacaatttcagcacagaaggccgtgcacgtttgcttggaaatctaggtcatgaccttgactttgggaaagccagggtagcctacctgaaactgtccaatcccccagcatcgtggacacgtccccaagtccctcaagatgtctgttctggtctgagccgtccgtagtagtgtccagggaaagcaggggtagctcaaaaatttctgtcaagagttttagtgctgcaagcctggttgggacagggcggtggagggctggaaatactgtttttgactttgaatttgattttataatgtattagatggatagatagatgcgaaatggaattgttaacatgtatgtggaggggcgggaagagtttctggaaagccccatccctgagtgcctactcctgagtgggaaaaacccctgcacgggctgggagcgctccctaattcgtccagaagtaaaatcgcatggcctgtgttccaaaaatgccgccactcaggatgtcaagtctgcacgtttgcagctttgagagccgagccccaggcagaggcaccgcgcaggcctggatgtacaggactcggccctgtgcagggctggccagggtgagcagggttggagctgg

SEQ ID NO: 18445 - DNA, 997 bp, Artificial sequence
  DNA replication origin
ctttgtgtcgcgccgggcctggcgcggaggcggcggcggcggcggcggcggcgggagggtcccgggccgcgtggtggcgacgcagcccgagccgcatcgggagcctccgggcctgcagcacccgcaacgcgctcccgagggggcggcgcgggccggcgacgcggggtgacccgggcggaggcttcgggggccggggatcgggggctgggtcgggcgggggcgcgggcagctccagctgctgtcgccgctgcggcgggggctcgtctggatgcgcccgggggtcccctttatgccgcgcctcggacacgcggctctgtctcccatgtcgccgcggacagaggggccgcccagggcgcgccgcccgatcgcgctcccggctccccacgccgggctcgggtctgggaagtcccagctcctgggctgcgctggggccttttgttgtggcgggagggggtggctgacgccccggggtgccccctgtgtcccggggccccgaggtccgctgccgccactagccactagcctgccgcagtttgggaaagtttggggggttctctccccctgcctatctgacgtctcttccagaccataagggatttgctcagcggcccatgagtcttctctgtaagggaagaaagaattgaactgggaggccctcatcgctcaccaaaaaaaaaaaaaaaaaaaagaaaaatcctttccagatcagtttgtcgccagctcgtgccttttgtctcgtctttggcctccacaaatctgctttccagccctgggagtaacgtggtcgcctctgagaatggccacgagcctgtcttttgtttttaaaatcagcgttttttgaggggagtcccccacacccaccctgaggcttgcttggcacatttttgtggggacagcgtcgaggactcctctgttgctggcgttttcaaaagggccactgaggcccgcagatgagcctctgcattcacccagggcaccgctgcctggactcttgccg

SEQ ID NO: 18446 - DNA, 1673 bp, Artificial sequence
  DNA replication origin
ccgcccactgaccttgggctccggcgccgggctcccgcagcgtcttggtcaccgccttccagacgtggcagcccagcaggcacagcagcagcgtcgcggacctgctcatctccgccgcggggccggcggcggctcgggctcgccgagagcgggccgggcggcggcgcgtcacgggcggccgggcgccgcgcccccctccatgtcgctggctccgcgcgccgggcccgccgcccgattggcccggccccgccgccccggccgctccctcccgcgccccgcgccgggtttccccgaagagccgcggcggcggcggcggcggcggctgctgctgctccgccagctccttaaccccttcctgcctcgcccgccgccgccgccgctgcccgcgcccaggccccgggcccgtggtgccacctggcggctgcggcgccgagggcgcccccgcccggcgccgctgcgtcgcgcccccagcccgacccccggcgacactgccccggcgcgccccatccccgcagccccgcagaagagccagacctgcctttcagggcggagcccttttcatcacaccaggtcacccaaggggccgcaggagacattgtatctgggtgtgacccccccaccaggtgccatcctaatgtagttgtgtcccccaacgtagatttcacacccagtgttaaagatccgcaaaaacactccccaagccagtatagactgcagtaggcctgcagtacctacgtgttggcgggtggacagcttcaggaggaatggtacttggatggttctaggggttagggtggggaggaaatccacatcttttgaggccctaggtgctttaaaactttctgtcctattaaagaaaaaagactattccatgacacgtgtgaaagcacagcaaagaagaccctctttggaaccatcgcaataggtataagccctaccatgggattctgcagtcggggagaaaggttgggttcaactctgaatacagcaggaacaagtggggatttataaccgaggaccagggtgggatgcagggaatgaaaaattataagaggaaacatcagggggaagggggattcttgaaagtcagacatcccctggcagggctgggcaggacagggcggatggggaagctgatcagatatccagggtggagggttcttggtaaactgacttagcagggttcttcctgaaagcagattttacaaggaagggcacaactgagcctagaagaaggttccggagcctgactgtagttcggtcaagcagagactctttgtccatcttcacaatacatgatctaagaggtagttagcattatcccccccattcacagatgagaaaagaggctaaagagggttaaggaatttgtccaaaagtgcatacctggtcagtggcagagccaaaattctaataaaacagtcagtctgaccccaaaattgaaactcttcacaaaaacctccagacttggctgggtgtgatggttcatgcctataatcccaacactttgggaggctgaggtaggtggatggcctgagttcaggagttaagagaccagctgggccaacatggtgaaaccctgtctctaccaaaaatacaaaaaaattaaccaggcatagtggcccatgcctgtggtcccaactactcaggaggctgaggtgggaggatcgctt

SEQ ID NO: 18447 - DNA, 918 bp, Artificial sequence
  DNA replication origin
ggtaaagaaacaggagttgccaggatgcatccgaacactcagggtcaaaatagtgtcctttctctagggttcactaaacgtcttccttcagttaactgagagttgaaaaaactgatttctctagagacccacatagcccacaatacggacatatcagacaagctaaacgagcagcacaccaagacagcgggaagtcgcctctgggatggccctggttcttccaaacccaggcccacagcttagaaggacaaatctcacttactggtggtgtcaaacggtatctgcctgcactgcgcagacccctccgcgggccaaggacagtaatagacggctcccccttccacgatatcgggctggctggtgttggctttgggcgcccccaccaagacactcgctctgcaaaagagttggagaaagtcactctttgggcgccacaaaaccgtgcgcatgcaatgcagtctctgtaacctcctgcccggggacactggggcaggcgtggagggcatgaacgtatttatgatgaggaccgactgtcaaacttgatttcctcttggaaacgggggtccgcaacctggtttgcaagaatgcaaacggtcctgcttctctaggtggagctctgtgggtacagtgagatgagagaagggggtggggtaggaggaagccaaggacagagcccagctgctggtagccgacagctcttgcgcccagacgcaatggttacagactctgcataaacagacctcgctgtggtggcggttttaactggcttgggtcttctgggtcctgttctctcctttgtaggatgcgtgcgtcttggtacctggaacacccaggacttgcgtgttctatgcaagtggcatgtctctagctcaaaattcacaaggcacatctagcatggcaggggagagaaggggctgg

SEQ ID NO: 18448 - DNA, 1362 bp, Artificial sequence
  DNA replication origin
gaatattggattactccttttttttcttcagtagctgtatggggtcagaggacatgtctttcttgattatcactgcatccatagggtccacctagcacctaataccagtagcatctcaaaaagattttaggcagtaagaaagaaaagaaagaatgaagagaggaagggagggagaaggtagaagggaagggagggagaaggtaggaaggtaggaaggaagggagggagagagggagggggaagggagagagagagagggggaagggagagagagagagggggaagggaggaaaggaagggggaagggaaggaggaaaggaaggaaggaatggagggaaggaaggaagaaagaaatggagggagggagggaaggaagaagggaaggaaggaagaaagaaatggagggagggaaggaagaaaggaagagggagggagaaaaggaaggaaggaatggagggagggaaggagggagggagagaaggagcaaaggaaggaaagaatagagggagagaaggaaaaaaggaatggagggtgggaaggaggaaaggaaggaaggagggagggaaggagggagggaaggagaaaaggaaggaatgaatggagctaggaaaggaaggaaggaatggagggagggagggaggcagggagggagatggaggataagcgaaggaatttacccagacataacaaaatgtatttcctaaagtcataggacccagcacaagcaacagcttcttaataaataattatggctttatttgcagattacagaaagcatgtagcaaagatccagtgacagaagaaaatggttagtttaaaaaaaaatgtttcccaggcacaccaaagagcacatgaagaaagagagaaaggtacatgtgaagtgcattagcaatggcctaggtgaccgtggcttccttgatttgatggattttggttgagatgaaccagactcagtgtgttctaagacacatggccaaaggcaattgttacatctttcctttgaggaaacagacattcctgagtttgctttcatcagacctcagaggcaaaaggatagaccaaacggcatctgcccaagacttctggtccccaattaaattattcaaatggtaccagtgagcttactgaaggatcaggaggagagtgttaaaaatttatgccttccaaaaattaaacaaaccgagaaaattttaacttgccaagtaacctaagcagcatatgaaagagcttaacactttgtccggtacattattatgtagtagttactcaatcaatgatcaaaccactgcatgttataaataatattttgtttggtgtttgctgaactaaaatgatagcagcccccagaacattgatggaagt

SEQ ID NO: 18449 - DNA, 1455 bp, Artificial sequence
  DNA replication origin
cagcatgaaggctacgaggtgctcaagttcgacgacgtggtcaccaacctcggaaaccactacgaccccaccaccggcaagttcacctgctccatcccgggcatctacttcttcacctaccacgtcctgatgcgcggaggggacggcaccagcatgtgggctgatctctgcaaaaacaaccaggtgagcgcgggcgggcggcggggagggcggggagggagcgcgggaaggtgcgggcgagagggaggagaccccggaaatgggggtgggagcccgcggaggaagggcgcggcggccgggctccctggagcgacggcaaggggggacgccgtcccaccctggagaggcgggggtcgtgcgcgcaggagggcgccccgcggcctggagagggcagttccggagtctgggaccctcgatcggtgcgcgcccctgcgagcgcgaccctcgaggggcgggaagccgggagctgggtcccggggacagctcgtgcgctggggagtcccggcgcgggaagcgacccctggccgtgggatcctccgcaacagagggtagcttacgggctttctggggagtggagaggcctgggggagtccggaatgggcgtggcagggtgaccgactcgggggtggtagacaaaggccggagggagaaacaagggccccgaaggaatgagtccaagcagggctcagccacagcggaggagcgaccgtggggctcgccgtcgccgagtccttgcggtgtcccaggccgtgaaactcacatatagtcaatttcaaggcgcaaactccagtttcgtcttcagccaaaaaatagcggaggggagaggcaaggagtgctgataacaaaaagaatagttgagattcgggggttcatgcggtgaaacacagcgcgcagccagactcagaacccaaactctctatggagtcggaggacgctcaggcaggtggcctggggggcgaccggttcgagcccagccccgggtctatcggcctctggaccagccggccaagaggatttgattccctgagccggtcggcgccgctacaagggctacgcatgggtctgcagtattctgctggggccactttactgtggagaaattcgaggtcattgcaaaaccgaagcttgtttgatctcttagtcaaaggaggaaaataatatttgtaactacctaaaagtgtaatgggaccttctgtgcacgctgaatcagtagccactgaggcgaggccttgcagcctgcagcctgcggtgtgggctgagtttctcggttttaactttgcttattgagtggcataggggatggcccgcgaccctggcatcgccatcaagagacctcctctcctgcagcaactttgacttaacgaggtctattgggctttaggtaactcgacccctggacattcagagattcttagctataacccaggtttctgttaagcaccattcaagcaggat

SEQ ID NO: 18450 - DNA, 1142 bp, Artificial sequence
  DNA replication origin
gcggctggggagggagcgcgggcgcccagtgacttgagccgaagtcccgagcccggggtgggggccgggggaggggtgcgcggggcgccctcgccccccgcgagctccttcgcacctgtggctgcagccggcgccggcgcggccaccgggagggcagagccagccgccgcctcctgagctcgcccgggcagctcacacttttatgccgccgccgcctgcgatcgacttttccgtttttgcagactgcgcctgttcgcaccaactttccgtctgaagttgcctttttctgcctcctcctcctcttctttcgctcgctcagttcgcccgtccgctgccttttttttttattgcctcctttctctcttcctcctttgccaccaccacaactcgaatagacgcgcaccccaaagccccgcgtgggcccgggcgtcccccgggtgcgcccagcggcggcggcggcgggcacggtcggcacggcgaggctcagagctggggcggaggagcgagcgagcagcggcgagcgcctcacggccgggagcggagcgagagagagactgaaggcagaattctgcctgggtaccacctgccaggagaagaggaggctgacaaacgcgcgccggagcaatttataggcacccaaggcacagaggaaggggagccgctttggcatctcattgcagcatctgctctgctcatcccactcagagagagtttggcattactctgacaatgtgggatttttttttttttttcggcctctctttttttctctctctgcacatggatgaacagtgagattctgaatactcccttgctgaaccaagcgatggcaggtcctgctggacccacctggggaagggagacagctgtgcgacagctttcagagctcaagggtcacacctaaatccccgatttccccactgccagcagccccagttggagggtggaggtgaaggttgaaaggagggtggctgagttgacagtttctttgctagctcctctacaatcagtgcttcaggtgttttcaaaatgccactgttaacagaaggagggccttttagaattttccagatggtagatgtgattttcttttaacctgatggttttcctcctctgccttgtaaatgaataagatgttgccc

SEQ ID NO: 18451 - DNA, 1343 bp, Artificial sequence
  DNA replication origin
gaaggtgagtggcaggaagtcaactgaacaggcggaagagcatttccggaactgggaattctcatgggaatagtctgaagtgggaggggcttggtgtgaaacaaacgaacaaggaaaaaaacacacacaaaaaaacccaacagtggaacatgagggagtgttcagagatgaggggagggcagagagagatcctaattagataggaccttgtaggctacctgaagcatttaggacttcatccaagcttgaagcagggaaatgtcctatcatgagaagatcactgtgtttaaagtctagagaggtgactgctgttttttttaaaggtatagtcataggaaaattatcagttttggtaaacctgagagaacaacaatccagaatatattggggtttccactaaaatgaggtgtgttcttcagtcccagtggatgccactcggcagtcagtattttcgcccaggctggtatctgtgcctttgaaggggagtctcgccattgctttgggtcctgtcaccctcagaagatgatatagctgtaatcacacatatatattcccgtacaacatggagatcaagctttgatcagttacgaaaggagagttcctcatttaagataggcagacagacagagagagagagagagagagaaaggcgggggtggggaaagaggtagagagggaagtggagcatggggaaggaggcaaagagggaggtgaatagtggcctggggagggaggcagaaagtgggaggtgacggggtacacagaggcagagcgagagggagggaggcagagagggaaagagtgagggaggaagcagagataaagggggagaggcaaagtgaggtggagtgggaggaagagagacaaacagagggaaagagtgagggaggaggcagagaaagggggagaggcagagagagagaggtggagtgaggggagagagacacacagagggaaagaatggggaggagacaacgggggagaggtagagaggtgaagtgaggggaagagagacacacagaaggagagagaagagggagggagaggaggggaagaaagaaatggagagacaaagaattgcagaaccaagcacagctgaatggagttcatacgaaactgaaagcagacaagaatagagagggaaagaagagaggaaaggagggtggaagaagaaataaaatgaagcaagaagggtcaacagcagcagacctgggtgaattcctccaggccccagccttgctgtaattatttagctcagtgagtttaggcaccagcgccagccccccgagggctcgtctgagacccttcactgtgaccaattagtttcactgcatcccctgatc

SEQ ID NO: 18452 - DNA, 1450 bp, Artificial sequence
  DNA replication origin
atagagggagggatggaaagatagagtgagggagggaaagatggagggagggaaagatagagtgagggaggcaaagatagagggagggagggaaagatagagggagggagggaaagatggagggagggatggaaagatggagggagggaaagatagagtgaggaagggaaagatggagggagggagggaaagatagagggagggatggaaagatggagggagggaaagatagagtgaggaagggaaagatagagggagggagggagggaaagatagagggagggagggaaagatagagtgagggagggaaagatggagggagggaaagatggagggagggagggaaagatagagggagggagggaaagatgatggagggagggaaagatggagggagggaaagatagagggagggagggaaagatagagtgagggaggcaaagatagagggagggagggaaagatagagggagggagggaaagattgagggagggaaagatggagggagggaaagatagagggagggagggaaagatagagtcagggagggaaagatggagggagggaaagatagagggagagagggaaagagagtgagggagggaaagacagagtgagggagggaaatatagagggagggagggaaagatggagggagagagggaaagagagtgagggagggaaagacagagtgagggagggaaagatagagggagggagggaaagatggagggaaggaaagatagagggagggagggaaagatagagtgagggagggaaagatagagggagggaaggagggagagatggggcgggtggggggaaggaagaaagaaaagaaaagagggagggaggaaaggagggagcccaggagggaatgatctgatcatgttctcagagtgtgacagaaaatggaaactatgttctttttaaaaaccctccatgtacaatgtaaggtcggttctgtttggtctgcatagtgatgtctttgttttaatgcagggcctcagcaaggatgtggtggttatctgacaggctcgaataatacctttgcctctcctgattctgattcgaatggaatgtatgacaagaatttaaactgtgtatggatcataattgcacctgtaaacaaagtaattcacctcaccttcaatacatttgctctggaggcagcaagtactaggcaaagatgcctttatgattatgtaaaggtaaggctgttttatttttttaacagagtctattcatcccagactctaatatagtgtattccagtttatatcgttacaggaagtcctgctaattttgagtacaggtgctactgctttttaaaatgaccttttcttcagtgatgctacatttaatattatagatgctctatcttcatatcaaattaatctttaatatgggtgactcaaatattttgtgtgactggcttccaacattagc

SEQ ID NO: 18453 - DNA, 2003 bp, Artificial sequence
  DNA replication origin
ggcacgctgctccgcaggcgcacggcagaggagcgcgtggcatacacgccgcccggggacgaggcgtagaggctgcggctggtgctggggcgcagcgcgctgcccaggctgtaggtgcgggtggacgtagtcacgtagctccggctggagctcggccggctcgcggtgcccgggccgccgaacatcctgcggtaggaggacgaggacacggacctggtggacatggctgcggagggtggcgatggcctgggcggcggcggtggcgcggactggctcccggagaagaggcgaacgagggcgcggtgggtgtgggtggtgggagcgcggctgcgtctctggcgcggggacctcggagcgagagtggcagaggactggaccccgccgagggcgctgtttttataaccccgttaggaaagagggtcccctcccactgccatcccagccgcggagcgcgccagccaatagggacctagcgagaagcggggagggtgggcgggtggggtgggggcgccctcgagccttcctgctccggggcctgggactgggcatggtcccgttacttcagcgctgggctgggacttttgggggctttccggatgatagtctgagctgggctcaccctggggtgctgaaaaaggcggggtcgcgcggtgaggggggggtccgcctgggactgaaccagaggggtccggtggcaccacgccaaaggggcgtgggaggaggtgcgcggcggtctcggggctgcggtcaggcggggagacccgcgggcaaaggagcgggaagaggaaagagtaaggaatccctcagatctgaagtcgcggagaaagaaacaaagagcgcctgagattggaacgcggggtgggggcgcgcacagcgcaggaacgcagggctcaggcctcgccgcagcctcgcgcgccgcccgcttggaaaggggggctgctccggcccgcgcctctgtccatcgacttgccttggcggagagatgttggggggaggggaggttctgtcgagggacctaacgggctcagtccagcttcggacggcgggagttgcgagacggcggtggcagaggaaagcccgagggagaggggtggggtcgcttagtcaccggcggtgactcaccgcgccctgctgtcccgccgattgagggctcctagcggtttaggggaaaccgttagaccagattgattcaagtctcagcgggctccgcgcgcgctgctagttctcagtgctaccaacttacagctgggccatcgccttgctgtgtgcggtcgggccctgtgggggacaagagcgcccctaagtttttaataactcgctaaagcctgtctttgctcgaatgtgcggactttttgttagcaagaaacttctgcagcctttggagaggcgccatacgtgggcctcccagatcacgattgcaccgggaaggtttttcttgcagagtccccgcccccgtccctctggtctcctctcgctcttccccctccccccatgaaaccacacccaactttttaaacaagatctgaaaattctgggtgaaagaggaaactcgacgtccgtagtttcaaaatagaactcagtgatcagtggtttttaccctggtggaagtcattaaaggtataatatgagccagttaaagaattaattaggtgttgcttaaaaaccccaatttgattaatgagttcaaatgaaaggcaattatgtaacacaaatgacagaatctttggcggcaatagatttatgtgttaattttaggacagcaatgcacagtacagggttcacggtgatttgtctgggaaatgccataggtcctgttttccaaaagaattcgtgcaattgaccttggggtgagggggataaaactgtctacgcagcaaaaaacttcgtgtccaagacatggagggagtgttcagattcggtcaccttaacctttctagggaaatcactcaattcaagggctgttgtttcaatattagtaacgagcagagctgagtacttacccg

SEQ ID NO: 18454 - DNA, 1254 bp, Artificial sequence
  DNA replication origin
ggggtgcggctcctgcaggactcggtggacttctcgctggccgacgccatcaacaccgagttcaagaacacccgcaccaacgagaaggtggagctgcaggagctgaatgaccgcttcgccaactacatcgacaaggtgcgcttcctggagcagcagaataagatcctgctggccgagctcgagcagctcaagggccaaggcaagtcgcgcctgggggacctctacgaggaggagatgcgggagctgcgccggcaggtggaccagctaaccaacgacaaagcccgcgtcgaggtggagcgcgacaacctggccgaggacatcatgcgcctccgggagaagtaaggctgcgcccatgcaagtagctgggcctcgggagggggctggagggagaggggaacgcccccccggcccccgcgagagctgccacgcccttggggatgtggccggggggaggcctgccagggagacagcggagagcggggctgtggctgtggtggcgcagccccgcccagaacccagaccttgcagttcgcatttcctcctctgtccccacacattgcccaaggacgctccgtttcaagttacagatttcttaaaactaccactttgtgtgcagttgaaggcccttgggcacaatgagagccagtcctccaaactttcagaaagtttcctgccccttctggcaggctgccaatcaccgggcgggagaaggaaggaggggaaggcggtggagggagcgagacaaagggatggtccctcgggggcggggatggcggggctgtcctgtaggtctgtgcggccaccgtgattgcccctctgcgcggtgcccgaagtcccgctgaaacctgccgagggcagcaggtctgaaagctgcaggcgctagttgcgcggaggtggcgcagctgctctggaggcgcagagcgaatacgtggtgtttgggtgtggccgccccgcccctggcggtttcctcgttcccctttggttaatgcgcaactgtttcagattgcaggaggagatgcttcagagagaggaagccgaaaacaccctgcaatctttcagacaggtttgtagactctcttcccactcgcagccgcctgaccccacccaacacaacccacgagcaattctaaaagttgcttaactcacgtctaaaaagtgcaaaacttcagggctgcgcgtaaagccctctagtggcgggaagaccacaggttggagcttctcatgattagaaaaatattaataaaaccccttgag

SEQ ID NO: 18455 - DNA, 920 bp, Artificial sequence
  DNA replication origin
cgaccggtggacggcggctggggagcagagggaccggtcagggctgcgggggctctagcgcgcatcgctgtgggcgaggcagctgtggagcgggacctgccgtcgggttccgcatcaggatctcatgctccccattctggtccttgctgtctcttccttcccgccctaaggctcttccaactctggggctggggacctggcctgggagccggggagtgcgagatctccctgccaggcaaggagcgcgactcccagcctttcagccaacagctcccggcggggtgtagcaacttaagttttctccccggctgtgcaggattctggtggaggaaagcagggaggccacccacggcacccccgcagcgctgaggacgctccggagcccggcgaccgcggtaccgcgcgccactaacaggtacagcggcgcccagcgcgggcggactggggctcgggagctgcgagccgggcatggggcgcggctgcaccggcttggactcgttgggagtaggcaggctgggacggcgcgagtgagtgtaagagtgtgcgtgtgtttgaagagggcgcggggttgggggggggcacccttcacactccctcaaccctctaagcctggatgtgaatggtctttgaatcaagggggatcctccagcagctgcatttgaaaaacgggtgctgagttttcctctcgacaatggtgtgttgaaagcacccccgcccccgaccccgccacctttggagagaagcagctcagcctgtctttatggagggatttggttggtttgctttttcttttctatgctttaaagggcaccggtgttaagattcaggtttgttttgcgtgctaggaatgattttgtccttagtgactggaggcttaaattttttttcttatcattcacatgtgtttttattcataggca

SEQ ID NO: 18456 - DNA, 1395 bp, Artificial sequence
  DNA replication origin
ggggcgcgcggcgcggggcgcggccggcgggtgggtgggttacctggcgcggccgggcgcgtctgccgggcaccagagcaggcgcagcagcagcagcagcagcaggctggcgagcagggcgagcagtgcgccccccggccgcatcctgagccacaggcgccgccgccaccgctgctgccggggcgaagcacagcccgggcggccccgactcgcggctcccgccgccgccgccaccgccgccgtggccgcagccccgcgcacccacagcgttcacaggcggcagcgaggggcgcccgcagcccacccggcagagtctccgcggcgggcggagaagaagccgcgttcgggctcgccccgggctcccggccccggcccgcggagcgccgcgatcggctggcagatgacgattcgccgagctcgccgcctgtcctcccggaggcgctcggagctgctgcgggctccggtcgccgctgccactgctgctgccgccgccgccgcgcggggtcacctgaaggttggggcgcggaagctcaactccgtgctgattgggctccaagttttctgcgccctcgcctcgtcccgagtgcccgcgaatcccccggacgcccacgcagaccacccagccacaccacaactctgcctgcggagagaggagaggagaaaaaggggccgcttcaaaaactttcaaaactgtgcagtcgcttggctggatcctcccacgcatgaagaaagctggggactggggaattgctgggtggatcatgacactgaacagaagcagtaacctgtgcttacttcaacccagattcagagggacagcgaactggtatgaggggctaggagacctttaggcatgagcacattactacctggagacccgtttagcccctgcctgtatttgcaaatagttttattggaaaacctccatgcccatggctttgtattatcagtgactgcatatggctgtatgatctagggctgcaagggcagaattgagtagtgatgacagaggtggcatagcccacagggcctaaaatatttaccatttgaaactttccaggaaaagtttgcatactgctcttaaataagcaagaggccattagcttgaggctgtctctgtacgttgagttcccacctaacaatggaaacctacattaggctgtaatgaacagggggctactggccaatcatgggcaaccaactcattataccaggccccacaaggcagcctgcatagctatagccaatcagtttctccactgtgcttctgagtttggcctatcaggctttgctgctcacaccatggggtggacctcactggacctcctctggttgtgagtgctgcccaattcatgaaccctttgctcgaataaactgtgctaaatttaatttgtc

SEQ ID NO: 18457 - DNA, 1563 bp, Artificial sequence
  DNA replication origin
aaaaacaattgatttttgttatgttgatcttgtagttccaggaggttttttttttttaggattcctcgagattcctgggattttctaggaaacacattgctctcatttgcaaacagttttacttctttcttccctttattttatttttattctttttcgaaaagaagtctcgctctgtcacccaggctggagtgcaatggggcgatctcaaatcactgcaacctgtgcctcctgggttcaagcgattctcctgcctcaactcctgagtagctgggattacaggcgcccgccaccatgccccgctaatttttgtatttttagtagagacggggtttcaccatgttagtcaggctggcctcaaactcctgacctcaagtgatctgcctacctcggcctcccaaagtgctaggattacaggggtgagccaccacacccagccttcctttccttttttttttatttttttgagacagagtctcactctgtcgtccaggctggagtgcaacgggcgatctctgctcacgatttttaaaaattatttccactaaggaaactgaggcatggataggttacgttgtccaagttcacacagctaataaaatgggaggattcaggaatttgggggttgtatttcagtaggtgcaaggaatttcaaaaggtaatgtcatcagttaaggcaggaaccggccacacttctttagtgattcttcagttactttaggccatctggatgtatacgtgcaggtcacaggggatataatggcttagcttgggctcagaggcctgacacttggtaaatagacacacacacagacacacagacacacagacacacacacacacacacacacacgctccggtaaaattcacacaagtgaggccgggtgcggtggctcacgcctgtaatcccagcactttgggaagccaaggcgggtggatcacttgaggccaggagttcgggaccagcctggcaaacgtggtgaaaccgtctctactaaaaataacaaaaattagccgggcgtggtggtgcatgactgtagttccagctactcgggaggctgaggcaggagaatctcttgaatcagggaggcggaggttgcagtgagccgagatcacaacactgcactccagactgtaaaaaaaaaaaaaaataagaaatgaaaaaggaaaaaaaaatcactcaagtgggacggtcttctcactgttggaagacctgttggactcgctagtaaacgggaaacagggcgaaataggcgtttcttccccagaagctcttaagaatgaatgaatgtttggcccagcgctgtggctcaggcttgtaatcacagaactttggaaggcagaggtgggaagattgcttgagctcacgaaattgcagtgagctatgttcacgtcactgccctccagcctaggagacagactgagaccgcatctctaaaaagaaaagaatgagtggcgggaagatcccgctccctgcctgcgtattgagaaactgccttacaaaaggccaggcagggcagagccacgccaagttcaggtgcgttccctgtgtccccactaaat

SEQ ID NO: 18458 - DNA, 953 bp, Artificial sequence
  DNA replication origin
ccccgtctgagaagtgaggagcctctccgcccagcagccaccccatctgggaagtgaggagcatctccgccgggcagccaccccgtccgggagggaggtggggggggggtcagccccccgcccggccagccgccccatccgggagggaggtggggggtcagcccccccgcccggccagccgtgccgtccgggagggaggtgggggggtcagccccccgcccggccagccgccccgtccgggaggtgaggggcgcctctgcccggccgcccctactgggaagtgaggagcccctctgcccagccagccgccccgtccgggagggaggtgggggggtcagccccccgcccggccagccgccccgtccgggagggaggtgggggggtcagcccccctgcccggccagccgccccgtccgggaggtgaggggcgcctctgcccggccgcccctactgggaagtgaggagcccctctgcccggccaccatcccgtctgggaggtgtgcccaacagctcattgagaacgggccaggatgacaatggcggctttgtggaatagaaaggcgggaaaggtggggaaaagattgagaaatcggatggttgccgtgtctgtgtagaaagaagtagacatgggagacttttcattttgttctgcactaagaaaaattcctctgccttgggatcctgttgatctgtgaccttacccccaaccctctctctgaaacatgtgctgtgtccactcagagttaaatggattaagggcggtgcaagatgtgctttgttaaacagatgcttgaaggcagcatgctcgttaagagtcatcaacaatccctaatctcaagtaatcagggacacaaacactgcggaaggccgcagggtcctctgcctaggaaaaccagagacctttgttcacttgtttatctgctgaccttccctccactattgtcccatgaccc

SEQ ID NO: 18459 - DNA, 1628 bp, Artificial sequence
  DNA replication origin
ccacaaagccgccattgtcatcctggcccgttctcaatgagctgttgggcacacctcccagacgggatggtggccgggcagaggggctcctcacttcccagtaggggcggccgggcagaggcgcccctcacctcccggacggggcggctggccgggcaggggggctgacccccccacctccctcccggacggggcggctggccgggcggggggctgacccccccacctccctcccggacggggcggctggctgggcagaggggctcctcacttcccagtaggggcggccgggcagaggcgcccctcacctcccggacggggcggctggccgggcggggggctgacccccccacctccctcccggacggcacggctggccgggcgggggggctgaccccccacctccctcccggatggggcggctggccgggcggggggctgaccccccccccacctccctcccggacggggtggctgcccggcggagatgctcctcacttcccagatggggtggctgctgggcggagaggctcctcacttctcagacggggcagctgccgggcggaggggctcctcacttctcagacggggcagccgggcagagacgctcctcacctcccagacggggtctcggccgggcagaggcgctcctcacatccctgatggggcggcggggcagaggcgctccccacatctcagacgatgggcggcggggcagagacgctcctcacttcctagatgtgatggcggctgggaagaggcgctcctcacttcctagatgggatggcggccgggcggagacgctcctcactttccagactgggcagccaggcagaggggctcctcacatcccagacgatgggcggccaggcagagacactcctcacttcccagacggtgtggcggccgggcagaggctgcaatctcggcactttgggaggccaaggcaggcggctgggaggtgtaggttgtagtgagccgagatcacgccactgcactccagcctgggcaccattgagcactgagtgaacgagactccgtctgcaatcccggcacctcgaggttggcggatcactcgcggttaggggctggagaccggcccggccaacacagcgaaaccccgtttccaccaaaaccagtcaggcgtggcggcgcgtgcctgcaatcgcaggcattcggcagactggcaccctttatctataaaaccgggtcactctgcagcttccactctgagagttactcaaagctcggcgtccgtgatggcctatggggcttccgaggcgatcgggcagcatcagtcttcagccgctaagccgagaaggagtcagtcagagagccttgggccagagttgcaggggctcggggagtggctgccaggtgagttgaacagtctaatttccagtagggtcccgcacagatgggacacggcttaggaggaatcctgggctgcaggcattccttgccctggtggtcagatttctggcacttgtagcaagctcctgggggaggaggttctagaagaacgcctagccgctgcggttcaggcatttggaagttcttgtatgctggagatgtggctggggtttgtctcacagtggagccaaggaattgcaacttttttctattat

SEQ ID NO: 18460 - DNA, 923 bp, Artificial sequence
  DNA replication origin
gtctcagggttgctgccgaacgagccatgaactgggctgggtttttatatttgatgaaaaagagcctaaacgctatgtgatttgggataaagaaaaaggagcattaaccctgactatgcctttggctccagccacctttttaagagtaaattgctgggcaggtgggggagggctagtcacagaatgaaactgtaagtcggaccaggtgtgggatgaaggggggggaggcgcggaggctgaggaagaattgggacctagcttgggctggcgcggaggggagaggtcagatgggtctgtagaagaggaagattagaaagactcagcgccgcttggggttgggactgaggggacaggagggagggaaagaaggaagatttgggacgagttgcacggggcacagagactaggaagggactgatgtgtaaaagaatgcctggacgtcaggcacctcagaccatttgcccattttacgacaagaattatttagatcttgtaggatggaaaaattgaaagcgccgttttccagctatttggaactactgtcgagtttgtattggggtcaagcggcattgcagaagaaaataaggcatttaggttttaggtcaggtgtgagttgaagaggttttaagtttttgagaacacaggctaagggagaacaaggaggaatggaaggtggaagcctacccatagtgaaggaggcaagcccagagaaaagagtagagacatggagaaggggtggggagttcttgccctccagaaaagcagagaaagggttggggcacggaaataagggattggggcacagagataagaggttggggtgcggaaataagcgattgggaggttcttgcccctaggaaagcgggacttgcctctaagggtgaaggagaaggggttgaggggtacttgcccctgccccagga

SEQ ID NO: 18461 - DNA, 1272 bp, Artificial sequence
  DNA replication origin
cgttctctagcagttccatctggatctcctgcgccaccgccgccgccgctgtgggaggcgacttggacatgtccctttggaccattggcgaaaagtcggctcggagcgaagcagccagcccccggcggcgggtcccctcctcctcgcccccgcctccccgcgctctgatcggctctgggggccgcccagggctcaggcccggccgttctcggcgcagcgccccgcagcgccccgggactcggcgccctgctgccaggcgctcagtgcgcgggacggggccggggcatcgggcgaagcgagccgctcgggaggcgggacgcgggggcgcggctgcggtgcctgggagaggggagccctcagcggggcagccggggccgggagagcgggcgcagcgcggcggggatcggagccgcgggcgccgggaaaggtcctcgccaggaggggagggaactccgggagcgcgagccagggggaggcgcgtcggaaagcgagagtgacaagcagcctacaagccgaaaagttcctcgcgggaggcgcgcgccgcgtgggctccgactcagccgctgcgcgtcgccgtggcacacaggctgaaaagtttgcgaagccacagaagccaggcccggcgctcagggggccttgatcctgttcccatggccccagaccacccctcaggaacccttagagcagatctcttaactttggaggggaaggacgacggaggctgggttcctacactgaaagttttaaatttgtaaagcctgctggcagcccgggagagcaaatgtctgcaaagaacatcttctgggcagctgaaagcccttgctaatgtcagtaataaggatccagagaaagaaatggcattgataaagatcatcaggtgatcccacctgaatctgcagctggcctcgtcaactaggtgggaatccacccaacctgagaccgaatgttttgctttatgactgctgtcttcatctttgccaaattaaattagcacttctttccaaacataattgaagtttgttgttgttgttgcttgttgttgttttagacggagtctcactctgtcgcccaggctggagtgcaatggcgcgatctcagctcactgcaacctccgcctcctgggttcaagcgattctctagcctcagcctcacgaatagctgggattacagccacaggccaccaagcccagataatttttgtgtttttagtgcagacggggtttcaccatgttgcccgggctggtcttgaactcctgacctcaagtaatccac

SEQ ID NO: 18462 - DNA, 1329 bp, Artificial sequence
  DNA replication origin
gctccgatccccgccgcgctgcgcccgctctcccggccccggctgccccgctgagggctcccctctcccaggcaccgcagccgcgcccccgcgtcccgcctcccgagcggctcgcttcgcccgatgccccggccccgtcccgcgcactgagcgcctggcagcagggcgccgagtcccggggcgctgcggggcgctgcgccgagaacggccgggcctgagccctgggcggcccccagagccgatcagagcgcggggaggcgggggcgaggaggaggggacccgccgccgggggctggctgcttcgctccgagccgacttttcgccaatggtccaaagggacatgtccaagtcgcctcccacagcggcggcggcggtggcgcaggagatccagatggaactgctagagaacgtggctcccgcgggggcgctcggagccgccgcacaggtagcgagagcgcggcgccttctccttcctttgtgagccgccgggcagggcaccgacctcgggttctcccggcgcctccactgcagggatctctagcctcgcacctcctcccctcgtcgcctgcccaccctctgctcctctcctggcgccggggaccctgcccctttgcgccttttcctggctctgcctcggcttccatttttctctgcttccgaaaagccagtggggaagggcgggggagacctgccagtcctcccagacttctcccgggttgctccagctggccctcctcgccccttcccgggagaggcacatggagagacatgaatcaggggagtggactggacctgctgaagatcgtgagtccgggtgggcgggagggggcccgcttcccgcagcgctttctacgatgccgactctcctggccacgctccgagccggggtgggcgtgggtgtgaggatgatggggtgcaggtgggcaggaggggagcgaatatgggggtgccctgccggatccccccagagctgcccggaccacgctgcgcacctggggctgacagctctccagtcccctcgggcacttgccaaggtttgcctgtcccacctcatgcctttcccttaagaagcgagtgagctggggacaagaaagtttttatttttccgtctcccctgaaatgttagccatttcagggatctccaggatcccctttctctccgttgagtgtttgcggtttctggaaaaagtcagcttcgctgcaggttgttgtgaaattggagatgtcagttgtaggcgctgggcaatgacaaggtggtttttacgtttttacgtaaggcttcagcaggtacagtttgggttacagacacctccaggtctcagcgatgag

SEQ ID NO: 18463 - DNA, 869 bp, Artificial sequence
  DNA replication origin
gcggagggcttgccatctgctggttacaacttgcctagccctgaagatgcctatctcagcgctatagaaaggaacgtcaggccagccaggcgcggtggctcacgcctgtaatcccagcactttgggaggccgaggcaggcggatcacgaagtcaggagatcgagaccatcatggctaatatggtgaaaccccatctctaccaaaaaatacaaaaaaaattagccgggcgtggtggcgggtgcctgtagtcccagctacttggaaggctgaggcaggagaatggcgtgaacccggtaggtggagcttgcagtgagcccagatcacgcccctgcactccagcctcagcaacagagcaagactctgtgaaagaaaggaaggaaggaaggaaggaaggaaggaaggaaggaaggaaggaagggagggagggagggagggagggagggagggagggagggagggaggaacggacggagcgggagggaggaacggacggagggggagggagggaggaaggaacaaacgaatgtcagaccaaaactgaaggtctacccctctggaaccctgggagacttctgctcacaagttgtgctgctttggttccaggtagcaaaatgtcacaaaatggaaaaagagactgtcttcacacttcaacctgggacaagaacacgatgatggtcagcagaggacttcaggaaaagcttacttagaatttctcccaatgctggaaagcaatcatcgggaagagaggaagcatagacccccacatattctcctgatggccactggtacctctgactgcactgaagcagccccaagcagcatcctgggactcagcatcgagggagaactggcgtagtagagaagaacag

SEQ ID NO: 18464 - DNA, 1208 bp, Artificial sequence
  DNA replication origin
cggggctggctgaggagtcgcggccaacagattaagccgggggagcctagcgaaggggagggagagggccactccagccccgtgcgccccaggcagccggctgccccagagcgcggggagaggggacaggccggggagctatcgggggagcgcggggcggtacctccgcgccgccggggcgccatcctcgcagcctgctcgcacgccctgggcagctccgccaactgcgccccacacccacctggctcccgggccgccttcgcgcccgactgcggggggcgatcgcgccccgccccgaccctggcggggtctccctgggcacgaaagggttaaccacagctcgccccttcgcggaggctggttctggtagtggctagggagtggagaaagcaaaccagagccggttcggttaccgactctgcgaagccccctcgaccccagcccagcgcgggagggtggcggaaggtggtgcaccgcagcgtggtccccgccgctgccgccgcggctttgcaaagtgtcagcgggggcgaaagcgagagtttaaaggaacaggaggcccattgaatttcctaccggagctttcaggggctctggctccccagtttgtttttgttttttcagctcggggatctgtttccgcgttaacccttgccggccctctcgttagttgatatcttattttgcatacagttaatcatttttgaaagggataaatacaaggaaaagaagcaaagcgctattggttaaaagtacaggatctagagcccggacagcctgggctggaatttcacctcccccgcaatgagcagtttatctcctagcctcagttatccatccatcaaatggagagaattagagtaacgcccttataaggtggttgcaatggattggatgagttaactgtatatttaataaatatagaacattgcctaccgcaaagtacatggctttgtttaagtgtttactgaagcaaaagtgagagaagacgacttcaatcacataataaatgtgcatgtgttctaagttcaaggtcctttccactccaagctctgaagagtctatggatgctgtcaatagatgtctcggcttgccacaaaacccactggaagtggatccggataatcaatctacctttgcaaatgtgatgctcaaaggacggctctctcatgggaaacaagaaaggtttcccttaatccaatactcaattt

SEQ ID NO: 18465 - DNA, 1515 bp, Artificial sequence
  DNA replication origin
aagaagctttgctctcacactgaagccctccctgggctactttggggagacagtaccaccccctgccgcccaggtgaagtaagcccgaaagcctcaagaaaacccctagtccccggcgtccttctcttgataaccctctttccccatttgggaagcctaagtttagccgaaaagcaactgcaataagtttcccaagggcagataggtgatgttggggggagagggtagggagcacgagagtgccagagaggtcttcagctgcgcacaaaatcagcaagctaaagtgcatcttacttaccaaggatttggtctccgggtttcccatcggcgaactgaaactggtccgtgaagaagtggcaaagtaacataactcctgcagcggccaggtcggccttcgggaacctcgccatgccgccgccgccacctccctaccccacccgccagtccttcgccggtgctcgggggctcccgatgcaataggcacgaccgggccaaacgctgcggatcggtctcggtaggacccggaggcctttgtaaatgtcgctgcgatttcacagtagggaaccgagaagaggaagaagcgaacgcgagtaggagcgcagcgctcttcggacctctgaggctctctttgcaacttgccacactcgcagccctcacccgacactgaacaacaaccgcggggaggagaggccacttgcagccgaggctcgcaaactgtcggttccactcgggcagcgccaacccggtgcccgcggacggtgacttccgagccccagcgatgcgctccactgggttcaaaacagatctaattccacagccagcgccgctgcctgccccagatccactagggctggtcggctctgcaggaactttcctctgtctagggatggccccggcaggaggtttaggtttgcgggaaggaggttgatgacgaaaccctcccgacaagttttgcttcttttcttcgcccgacgcagggcgcgcgtcctttctcgcagccggaggaatgggcagctccaaagagctgagccctgggaaggttagggctgcagcagtctgaggtccgaagccaggaaaaaaatgtgtttaaaaaaaaaaaaaaaaaagaggaagaagaaaggaaaagggtggagtgggagggagtcacgctggaacctatcgggagagggttcctccgggctcaggaggaggtggccccaagcccccgcggagccccaggagtttggtggcggaggaggcgctgccgtcgccacgctcccccgcgctccttctccacactttgaggagggaaggcagctcgcaatttgccagatctgccgccgcaccctcctccctcctccctccgccctccccttcgctcctccaggcttctcccaccttcctccctgaaaccggcagcccgcacagacctgtccaatggctgcactttcctcggggctggctgaggagtcgcggccaacagattaagccgggggagcctagcgaaggggagggagagggccactccagccccgt

SEQ ID NO: 18466 - DNA, 1286 bp, Artificial sequence
  DNA replication origin
ggtttccttcaagatcttcaagattcaccttgcctggaatccccaggtgtcccccaaccttccatctgtgactctctagttgactgttgaggacgcatgcatactttccgggcaatcatttaaattacacacacacacacacacacacacacacacacacacacacacacaccagaaaagaacaaattgacaaattgattatcctagggagaaagttttcgttttcttttcttttccctccaagttttttcttttttctttttctctcgtttcacctcctctcgaagtccaccctagttcaccaatttctgccaagatctctttctgcctgtgtcttcactttcttcactgaaaggcagaaatggggagtaggcacccagttcgcggtgggcagggttccaggaggcagctcccgctcggcgatagcccccggggcgcaactccccgcaggacgcgcacctgccaggacagccactaagaggatgcggaggttgggggccctctcggggacaaaatcagggcactccaaggaactctctgcgcgttcaggcctgtctgtgaagctggcaggcggaggacaatgggagcaggggtaggtctccagaggcgagcccgcctccacctttcccacctgctccccacctctgcgccggccgcatttaccccgccccccttccagcgcccgcttggcccaggtcactagacggagctagtggggatcgccaggggaaggaaggtgctgccacagggaattttctcgtgcagaggggagacctgcaatccctggctttcacaacgtcccccacccaccccataccacacacgcttagtttaaccagcagcgaggaaggaggaggagccggagagcacacagcctggagatgccaggtcctaggagatgtatccacggaagaagctttgctctcacactgaagccctccctgggctactttggggagacagtaccaccccctgccgcccaggtgaagtaagcccgaaagcctcaagaaaacccctagtccccggcgtccttctcttgataaccctctttccccatttgggaagcctaagtttagccgaaaagcaactgcaataagtttcccaagggcagataggtgatgttggggggagagggtagggagcacgagagtgccagagaggtcttcagctgcgcacaaaatcagcaagctaaagtgcatcttacttaccaaggatttggtctccgggtttcccatcggcgaactgaaactggtccgtgaagaagtggcaaagtaacataactcctg

SEQ ID NO: 18467 - DNA, 1216 bp, Artificial sequence
  DNA replication origin
ccggaatttaatttttggagttttatttagtgtcgggagcagattgggtaataaaatgcattttgagaataagacggccttttgaccttttagggtctagggctgtaaagcatctcagggttgctgccaaacgagtcatgagctgggctggatttttatatttgatgaaaaagagcctaaatgctgtctgatttgggataaagaaaaaggagcattaaccttgactatgcctttagctccagccacctttttaagagtaaattgctgggcaggtgggggagggctagtcatggaacaaaactgtaagccggaccaggtgtgaggaggggaggtgtgataaaaggattatagggtggaggagtggaggctgaggaagaattgggacctagctcggcctggcgaggagcagcctggggaggaggggagaggtcagatgggtctgtagaaaaggaacattagaaagactcagagacgcttggggttgggactgaggggacagacaggagggaaagaaggaagatttgggatgagttgcattgggaacagagactagagagggaccgatgtgtaaaagaatgcctggacgtcaggcatctcagatcatttgcccattttacaacaagaattatttagatcttgtaagatggaaaaatcgaaagtgccgttttctggctatttggaactactgtcgagtttgtattggggtcaagtggcattgcagaagaaaataagatgcttagattttaggtcaggtgagagttgaagaggttttaagttcttaagaacacaggctaagggagaagaaggaggaatggagggtggaaggttgcccatagtgaaggaggcaagcccagagaaaagagagagtagagacacggagggaaggggttcgggggttcttaccctccagaaaagtgggaaaggggatggggcacagagatacgaggtcagggcacggaaataagggattggggcacagagatataagaggttgggcgaggaaataagggatcagggtgcagagatataagaggttggggcatggaaataagggattggggtgcagagatataagagcttggggcacggaaataagggatcagggcacagagatataaggggttggggtaattatccctcccctagaaaagcgggacttgctgctaagggtgaagaagaaggggttgggggtttcttgccccccagaaaggcagag

SEQ ID NO: 18468 - DNA, 1426 bp, Artificial sequence
  DNA replication origin
ccctcccgcctgccaggaggcggtgcggggctcgccgggggatgtcacagcggctcctgggagccagcagccgccgccgccgccgcccccgggaaccgcgatcatgaacccccagtgcgcccgttgcggaaaagtcgtgtatcccaccgagaaagtcaactgcctggataaggtgagcgagggggcgccgggccagcctggacctgccgggcgaggggctgcacctgcttcgagaagttttggcacctgggatggaaagcaatgagtgggtcggtgcgtgtgcgtgtgccttggcacggggggagggcgcgcgaacgaagacgccagcgggagtgtcagagaccacgcttggcgattgtgatgttggaaccgggaagggcttttgtcgcggtgcggggcggtgcgacatcggcagagcctctgcggagggcgcacggcggtgcgcagccccggaccccggagggaccaggctgggcacccaggggggcacttcggcgagccgcgccccctccacctccactcgtgttccacaatacccccgccccccgccccacagatccgcccgcgatcccacctcaccgcccacccgcagcgcctcctgtgaccgcggcgagggggagaggcaaatagtaattaatatgtcatggggcggccgctgccgcattgctaagaataatccctgctggagagctccggctcagcgcggcaagccggacccacgggtgtctaatccaccgggtggggaattccaggggaagtagttctgtagccgggcccctccagccctgccccctgcccttcccgggcagggacggagatgaacagcccgggagagagacacccaggagcgatccggagtgactgacagttgaaaccagccaggggcgttctggggaaatttgcgtctgaagatacaaatgcttccttagaacaagctgccatcctgacagtcatcccgggcagagtccgaggtccagcattttagtggaagctggtcaggtgtaggggtacttacatagctctcgtgcagccccctcagcttgcctgacttcgggtgaacacatatttattgagatcctacaaaccctgcatttagacactttgaactggattccttttggtttcgaagccactctctgggccccgtttcttcattaaccgagctcagaaatcgtttctggctgctcaaagaagtgctgtttcgacagaaccttgacagttcgtccatggtgcgtctgtgtattgcggtgggttttcctttaagactccattttcagagctgcctgctttatttacttagctgaaagtaggtaaacacatccccagttccctacactctttttgttgtaatattttcagctacagggactgtgatgcactaaaaagccttccttctgtgcccatcctggtgagaactggcattgta

SEQ ID NO: 18469 - DNA, 863 bp, Artificial sequence
  DNA replication origin
cccggcctgcagcggcggtggcgcgaggctcactccccaggccgcacagtcgcacccacggcggtctgcggagctttccgggtctctgcccgccccctcccccgctgcgccctccctcccagggtgcccgacgtgcacgttccctgccacttcggtccgggcgcgccggtgggtttggcctgcgcggcggcggcggcgaggcgggggagcgagtgagcgcgaggggcgggcgcgagtgactgtgtgagtcacccgtacctggagtgcgagcgacgcagagccagcggcgcggagccggagccggagccgagacccagcgcctgcgagcccgagagcgcggccggccccaggcgccaggccccgtcgccctccccgtgcactcacccgtggcccggcgccgactccctacccggcgcccgccgcccgcagccctcccgcctgccaggaggcggtgcggggctcgccgggggatgtcacagcggctcctgggagccagcagccgccgccgccgccgcccccgggaaccgcgatcatgaacccccagtgcgcccgttgcggaaaagtcgtgtatcccaccgagaaagtcaactgcctggataaggtgagcgagggggcgccgggccagcctggacctgccgggcgaggggctgcacctgcttcgagaagttttggcacctgggatggaaagcaatgagtgggtcggtgcgtgtgcgtgtgccttggcacggggggagggcgcgcgaacgaagacgccagcgggagtgtcagagaccacgcttggcgattgtgatgttggaaccgggaagggcttttgtcgcggtgcggggcggtgcgacatcggcagagcctctgcggagggcgca

SEQ ID NO: 18470 - DNA, 745 bp, Artificial sequence
  DNA replication origin
ggcggcggcggcggctgctggctcccaggagccgctgtgacatcccccggcgagccccgcaccgcctcctggcaggcgggagggctgcgggcggcgggcgccgggtagggagtcggcgccgggccacgggtgagtgcacggggagggcgacggggcctggcgcctggggccggccgcgctctcgggctcgcaggcgctgggtctcggctccggctccggctccgcgccgctggctctgcgtcgctcgcactccaggtacgggtgactcacacagtcactcgcgcccgcccctcgcgctcactcgctcccccgcctcgccgccgccgccgcgcaggccaaacccaccggcgcgcccggaccgaagtggcagggaacgtgcacgtcgggcaccctgggagggagggcgcagcgggggagggggcgggcagagacccggaaagctccgcagaccgccgtgggtgcgactgtgcggcctggggagtgagcctcgcgccaccgccgctgcaggccggggagcccaggtgggcggcggctggggagggagggatccaggcgggggaggtgacaaacaccggtggggagagtgctcaaacccgcgtactcccttccctccctcttctcttccccagccgggggcaccctcatcccaggctgactgacgtccctggcacccaaatgtcgcggggagtgcggggccagggtgcgccctccctcctcctccagccagtgaaacccgggacagcgg

SEQ ID NO: 18471 - DNA, 939 bp, Artificial sequence
  DNA replication origin
actaggactacagaggcatagaattcagcctcttaggagcccctctgcccggccagccgccccgtccgggagggaggtgggggggtcagccctccgcccggccagccgccccgtctgggaggtgaggggcgcctctgcccggctgcccctactgggaagtgaggagcccctctgcccggccagccgccccgtccgggagggaggtgggggtgtcagccccccgcccggccagccgccccgtccgggagggaggtggggggggtcagcccccctgcccggccagccgccccgtccgggagggaggtggggggggtcagccccccgcccggccagccgccccgtccgggagggaggtgggggggggggtcagcccccccgcccggccagccgccccgtccgggaggtgaggggcgcctctgcccggccgcccctactgggaagtgaggagcccctctgcccggccaccaccccgtctgggaggtgtgcccaacagctcattgagaacgggccaggatgacaatggcggctttgtggaatagaaaggcgggaaaggtggggaaaagattgagaaatcggatggttgccgtgtctgtgtagaaagaagtagacatgggagacttttcattttgttctgcactaagaaaaattcctctgccttgggatcctgttgatctgtgaccttacccccaaccctgtgctctctgaaacatgtgctgtgtccactcagggttaaatggattaagggcggtgcaagatgtgctttgttaaacagatgcttgaaggcagcatgctcgttaagagtcatcaccactccctaatctcaagtaatcagggacacaaacactgcggaaggccgcagggtcctctgcctaggaaaaccagagacctttgttcacttgtttatctgctgaccttccctccactattgtcccatgaccc

SEQ ID NO: 18472 - DNA, 1241 bp, Artificial sequence
  DNA replication origin
cccttcccctccgagcggcgcgggggacctcttccccggggaacccccacccagccgttcccaacctcgagaacaaagggtctgggaagcacggtcggggtcggggagcggaggtggagggaggcaggaaggcaggcggtgggggcaggggagggcgcctccccacgtttcctctcgcggccgaatgatggaaagctccctccagcaaacgcctcactgaggccgcttctgaatccgggagggttcgggttcgttacctaacggctgcacttcgctcccttcctcccccagcgtccccaccccctccggggaccggggccccggagctgccaggcccgctgcacgcggcggcgcgggagaaaccacggggcagcagcgccccctgcaggtgccgggcgcctccgcagccgctgcgcggacccgactcttaaggtggcaccaccgggttcccagcccgcgcgcaacccgcagccctggctccatccgccgcacttctccctgtagcggcgggcctgaccgtccggaacggccggagtgtgctgatgcctgctgctatctgcttgatcccttcaccctacctctcatccaggacttcttccgcggatgcgcagctagcgatttcgacaggcgagattgaaaattccgggcgagtatatgaggttgagtaagtcccgcttcagggaggaacgaccagaatgacatttctttaagcctaaatcaaacttttattttcgtttataaaaagcagaaggccagcaggaaagggtcgcggaggactggcacatccacaaccgtaggactcttggatccaagtttttaggctgagactgggcggtccggggttctccttcggcgctcacaccccgcaaactcgtgggcagtgcagtgctggaggccgggggcagtggcggacccgcagggtaaccttgtctcgcgcacctcccgagcccccagcagcccactctcgtccgaatgctttgtttatttggtgacaccagggaacgtggagaagaagatcgaagttcagtttttcttttttctttattttaaatatttttcttaactaaatggtatgtttatgtgaacccatcatctcttggaattaagtgtcctcagcgaactccagattcctaggggaaacctacgtgcccagagcaggaaacgcacaagtcaattcaggttccggtgccatccgcagtaaattcccttccttttgctccaaattcctcctctgcgtccag

SEQ ID NO: 18473 - DNA, 1100 bp, Artificial sequence
  DNA replication origin
cgcggctgcaccggggcctgcctcgcggacctggactcgggactccgggcggccctgcctggtgccattgcctcagccaagtctcccacctctctgctcggtttcccgccccacctttcccctactaccgcatccctgtcccctcgcttccctccgcgatgtctccatccgagtaagaaacgaagctgaacgcattggtaactgtgctcaagaagatgcaatcgcgggagccctcagggtggcgcacggcggagaggcgacgcgggtggcgctgcagagggtacggtggggggcggggaagaggggggcgttcgtgtgcaattagcctccccagggcgcggaccacggtgtccccttctctccagctgggggtctcgggtcctggcgctgagaggccgcaccttgccttgctgcccgggccgtgcacccgtgggccccagggcgacgcggcgggggcggccctagcgacctgcggcggcgccgggaaagccctgcctctgcagcgggtcccaggggtcggggcctggaagggtccctgggaatgctccgcgccgagaaggctctgtggtttctcctcccccacacgtctccctctcctcccctcttcccggggacctcagaggtggcggggaagtgggaagggaggcgggcttgcagaccgtgcaggctggggagccggagctcgggagttgggggagtccgagtgagaacggaagcgcgtggacgcgatggaaggggccgggggaaagggggacggcactggggagggctggggtgcggggcaggcgacagtcccttcccctccgagcggcgcgggggacctcttccccggggaacccccacccagccgttcccaacctcgagaacaaagggtctgggaagcacggtcggggtcggggagcggaggtggagggaggcaggaaggcaggcggtgggggcaggggagggcgcctccccacgtttcctctcgcggccgaatgatggaaagctccctccagcaaacgcctcactgaggccgcttctgaatccgggagggttcgggttcgttacctaacggctgcacttcgctcccttcctcccccagcgtccccaccccctcc

SEQ ID NO: 18474 - DNA, 1111 bp, Artificial sequence
  DNA replication origin
cgccccccgctcgcccctggcctggccccaaggccgactggccgagaggctgctcgggaggtgccgcggcgctggccctgccgctcgccccgggggtcgacatcgtcacccattcagaggacagcaagatctgggcgggaaaacaaaagtcacaaagaaatttgtttgccaccatgcaaaatggcggcacttaaacatctttcttgtggtggtggcccggcccagagagcccggagctgccctaggtttagcgcggtgcgccctagagctcggcggcctggggcaagcgagggggaaagggaccctgaaacccctgcggcccccaagccggcccttagcccgcagcccatcgcgcgatcagccggcccctgccttccttcccagcccgccaagcccctagcccgcgccagcagcccccggccactgaccgctgtttacaaacacagcctgggggtggggtgggccggccggagcgcgggctggcggggtgggggcggccgcgcgccccggaggacgccaccagcagagaggaacgaggagttggtgcgagagagcgggctcggcagctggaaaggactgaacgccttgtttttgaaactgtcaattccctcaacccctattgtgagggcttcatgcaaaacatctcaggccttttaaagtaggagcttgtgaggccgccacagtttgaaaagaagcgagagaggagcgggggcccagggcatgggcgaagaatgatagctgggcccccctaagccctccccacgtactctgtttttttttttttttttttttttttttttttgcaaaggagggcatgccaaacaggtaaaatgcagccctcccccacctcctagatctgccctatgtccccatcccccaggctagtttgcaaaatgccctttggcctagggagcaaaccaaaaccaaagctagcatcaaaaatagtttttccttacagggaaggggagaatcctggtatgattggggtgaccgggtggactcgctaaggtggatgccctgttcctccttgccaatttcctgaggttagttgatgggaagcatttttttccccctttcctagtttggctctgggaactcctttttacaacct

SEQ ID NO: 18475 - DNA, 867 bp, Artificial sequence
  DNA replication origin
cgcctccgcaccaccaccaccaccaccaccatcaccaccaccaccaccaccaccgggcccagccgccgcagcagagtcaccacccccctcaccaccaccggccgcagccccatctgggcagctttcccgagagctgcagcagcgactccgagtccagctcctactcggaccacgcggccaacgactcggattttggctccagtttgtccagctccagcaattctgtgtcctcagaggaagaggaggaggagggagaggaggaggaggaggaagaggaggaggaggggggcagcggggcctcggattccagtgaagtcagctcggaggaggaggactcgtccaccgagtcggactccagctccggctccagccaagtgtcagtgcagagcatccgattcaggcgcaccagcttctgcaagcctcccagcgtgcaggcgcaggccaacttcttgtaccatctggcctccgccgccgctgcaaccaaacccgctgctttcgaggatgccggcagacttcccgacctcaagagtagtgtcaaagcggagtcgccggcggagtggaatctgcagagctgggcccccaaagcatctccggtgtactgcccggccagcctggggagttgtttcgctgagataaggaacgatagggtatctgagattacattcccacactctgaaatttccaatgctgtaaagagaactgacctgacaattaactgcctggcagagggggcctcttcacctagcccaaagacaaacaatgcatttccacaacaaagaatactccgagaggctaggaaatgcctacaaacaactcctactacacactgtgcagataacaacacaatagctgctaggttcttaaata

SEQ ID NO: 18476 - DNA, 900 bp, Artificial sequence
  DNA replication origin
ctccccgggcctccggcgcccgccgctgccttgggctggggcccggccgccgatacctggtaataggcggcggcggcggcggcggcggcggcggcagcagcggcggcggcggcggcggcggcggctgccgggtgtttgctgcacagcaggctccgaaaataagcagggtccgaggggaaggcgacgtagtttccctggagcggggcagtttcatagtttagagggggtttgcacggcgagcgcacgatctccgggtagtgcgagccggggtatttgctaaaaatctgaggtagatgggcggcggggcgcgcggcggcggcgcccgggcgctgggactgcgcgctgattggcaggggccgcgcggctccgctcaggccccgccaaagttggtgcttgtccttccaaaatcccgggcgggggctggcggcagcggcgcgctctggcggcggcgcctttgtggccagggcccggccgacccgcctgcgcttggtcttgaggacgcgctcggttttgcaggaggtgtagagcgcttccacgtcttcccgggagatgagcgtgcatttggcggcgtggaaggcgatgctgttaattgccttgagtttccgcaactcctccagatcgcagtggtgcttcttcactttcagatgatccatgcgcttgtgcacggtcgtcctcgggatgtttttcagcagatctgtgaagacttgggagagggcaaacatttgcttccctttaatgatgaggtagccgagcctcacgccatccacctcttcaaaacctgacttcaggtctcccatctcgggcactaaatgatccccaccatttgcagtaaatatatacgtgacgcatacatacacatgtatgtatgttaatcctcagccagatgctgcgtgtgtctca

SEQ ID NO: 18477 - DNA, 1541 bp, Artificial sequence
  DNA replication origin
ggagttgcctgggctttctcagcaccccccccaacacacccaaataaaaaaaggaaagttagaaggaggcggagaggaggacagccatccccatttcctccccgcgacgccgcggaagggctggggccgctgcgagcagagagagggcgcgggatgaggcgggccaatcgcagtcaacaggtccaggcctcagtggggcagctgagccgggaggccggcgccccctcccctcggctccccgtccctcccctccctcgcaggcccggcgcggtaggggaggcccggcccggccctccccgccccgcgcggactcgctgcggccgactccgccggggcagtcggggtgggggtggggcgggggttccccgccggagaatcctcccccggggctggcggcgggggcggggagcgagagccgggaatggaggattaggaaggactccagctcggcacgagcgcggcccgcgcgagggatcctgggtaaaaagtggccgcgcggcaccggagagcgcggagaggagccggggtcaggggtcacggccctggagccccgcgtgcagagccccccacgtgaacgcagcgagcaggaggaacctttttgttttcgaccgcgccagcatgctcccctattgaccgagctgcttttcctgggctgctggggagaggagctccattgcggagctcttaaccccacccccaccttccaccgccaacacacttcccaactcaacccttcctctcaactctcatcccagccccccgtcctgagcttgcaataacgcagtaaatttgctttaacaacaagtgggggtggttgaatttactcctccctctcctctctcctccccttcctcttgctgcggttcttgacactactacaaaccaggactataaacataaacatgtgtcactgtaacagggcaggtaatatacggattttgaggcggggtggggtggagcggggcttggtcgccgcttggagggcagtaaaaagtcgcgtttcacgtgctcgacggctttggggactcccgcacacatcgatccgtttatataatgccgaaggcacttggtcacttattcagccacgcagacccacaaagccagacttgcggataaccagcgtaccccaaagcaaatgcatttcaatacgaatccctctcctttcccagccagtgctgccatttcttctattagcaaacagtaacgtgatacttgaatcccctttcctttttaaaaattcttttccagatagccatgagatcatttttcgacctaaatagtacatctctcccatagccactacctacacattttgtgcgcagaaaccccttcaaacagcaagaaagtctatttaaatgactgagttcgaaatctggtgtgcaaagggtatttcttgggctttgcctccgtgcattgagcaacttctgctgcaagttgctgacactggcgcggtggagatccgccacagcaagccttttttattattatttagtctatatctgcctctcaacttttttctcattcttagttcaacaagccag

SEQ ID NO: 18478 - DNA, 1315 bp, Artificial sequence
  DNA replication origin
atgtccttgctgattccccccacctcccctccaccgcctcctccgcctcctcctcctcctcagcgtcttccctccccacctccacccggccgctaacgcgggcgcccggagagggcacacataatcaagagggcctccgcacaggcgcactggggggagggggggctcccgctgggccaggggcagcgagggaggggaagggggctgcgcttcctcctcggagcgtcacttggcgtgcgcgcccgtcctgcggccggcgtgagggaggaggcctgggcgaggctagccctgcgtgcgcgctgccgcggcctgttggctgcccccggcctacctccggggccccgtccccctcccccgcgccgctcgccgccgccgaggtgtgctgggggtgggcgcgaggggagccggcggcgcgcggaggccggaatgaacgggcgcgggggcgcgcacgcgggggcggggacgttagggccgccctctgcagcgctggtggcgcgggccgcgtgtgagcgtcgggaagaggcctgggaggtggcgggggaggtggacgcccagggctgggaaggggttttctcagaatcgccagaggggagtccccgggggcatcatctccgtgccctgggaacctacctgctggccttttcctccaagactggcccgtggaaaacgagggtggggcgagtgtgccagcttccatgaagggtgtaatgaagcatggcttcctgcagttggccgcgctaacttcacagtgctgccgcagccactccacccattaaattcacgtcctggactcttcccaaagttcacccgctggaagtcctaccaaatctgccgcccattttcgcactacgtgggccccaatgacaaacgaaagtgtattccaggctgaaggtcaaaagcctgtgttagggctgcactcggagagggaacgccaaggcgcccctcagctcggtgtgcaggacaaatggtggtttatccggaattagcaatataatacgatgatccggaaaatgcagttgtattacaccaaaaggaagaaggaactctagccctcctagtcagtcgctaaaacataattaacgccatcagacagtggcgtccagttttgatggaggattcctctgatccgggtcttttctccaaatttatacttggaaatgtgaggtcatttaaaagtggcagaaagatgagagctcccacctcacaaacaaatggaaaatggattaggcctatctgcatagattaattagctggatgctgagcacttttaaactaaaatcttccactgtctgcctattccttatgcatccgtaaa

SEQ ID NO: 18479 - DNA, 1079 bp, Artificial sequence
  DNA replication origin
gagaggctgggccgagaacccgctggtttattgcgacgggcacggctgcagcgtcgcggtgcatcaaggtaaacacccaaccgcccgccggggcgcgccggcctgcgcccaacggtcaccgccgcccccacctgggccgcaaccgccggcgcccccgccccgtgccgcggccgcgggagggacgcggagggtccgcggcggggcgcggggggtgtgggccgcgcatgtgggagaaagtgcgtgtggcccggactgtcatgtgattccgctctcactctctcaagtgtcattcggccgccgcctgcgcctggggccggggtctgctgactcggcggggcggggcggggcagggcggcggccgcgccctcgagatctgggccggggtgggggcgggggcgggggcgggggcggtgcgcgcccttcccggggttcccggggccacgggggtgggtttgggagagtggagcgccctcttctcccctggcctgcagccgcctgtctgccgcagtgtttggagacttcctgtggcgtggagacgggctcgggaacgcggcgccagtgtggggaggctgggggtcgccttgcctctttagatggggagggatgcggggcccgttgcaccccgagccagaaggctcgggccctgccgccgccgcccggtagctgtctgcggaggagatggcggagtccgttgctgaccatgcgggagtggcggggctgctgcagcgcctgtggggtggccgcggcaggccaccaccagcctaggtggctgaagaggtggcggtgccaagtcacttttggggagcctcttagtttatttctggttgttaacaattgatgaggtttttggatatacaagaaggccgaggacactagtaagatacttttctggcctttgaagtggccgacttttccccatttcacgtggtaaggaatccaggacaaaacagtctatattcttttttggtggctccatgtcccttcgcatttctgaatctggcattaagcgatgcatatgtttttagtagtctgttggaaaggactaccaccaaaagggagacgaaaatttgaacatctgc

SEQ ID NO: 18480 - DNA, 1160 bp, Artificial sequence
  DNA replication origin
gggcggagacgccccccacctcccagccggggcggctggccgggcggggactgccccccacctccctcccggccggggcggctggccgggcgggggctgcccgccacctccctcccggacggggcggctggccgggcgggggctgccccccacctccctcccggacggggcggctggccaggcgggggctgccccccacctccctcccggacggggcggctggccgggcgggggctgccccctacctccctcctggaccaggcggctgccgggcagaggggctcctcacttcccggacggggcggctgccaggcagaggggctcctcacttcccagacggggcggctgccgggcggaggggctcctcacttcctagacagggtggctgccgggcggaggggctcctcacttctcagatggggcggccgggcagagaggctcctcacctcccatatggggtcgcggccaggcagaggcgcacctcacatcccagacggggcagtggggcagaggcgctccccacatctcagacgatgggcggccgggcagagacgctcctcacttcctagacgggatggcggccgggaagaggcgctcttcacttcccagactgggcagccggacagaggggctcctcacatcccagacgatgggcggccaggcagagacgcttctcacttctcagacggggtggcggccgggcagaggctgcaatctcagcactttgggaggccaaggcaggcggctgggaggtggagggtgtagcgagccgagatcacgccactgcactccagcctgggcaacattgagcactgagtgaacgagactccgtctgcaatcccggcacctcgggaggccgaggctggcagatcactcgcggttaggagctggagaccagcctggccaacacagcgaaaccccatctccaccaaaaaaatacgaataccagtcaggcgtggcggcgcacgcctgcaatcccaggcactcggcaggctgaggcaggagaatcaggcagggaggttgcagtgagccgagatggcagcagtacagtctagcttcggctcggcatcagagggagaccgtggagagagagggagaggaagaccgtggagagacggagagggagagggagagggagctctcccattattattgtgtgg

SEQ ID NO: 18481 - DNA, 1435 bp, Artificial sequence
  DNA replication origin
tctgcctggcagccgccccgtccgggaagtgaggagcccctctgcccggcagccgcctggtccaggagggaggtagggggcagcccccgcccggccagccgccccgtccgggagggaggtggggggcagcccccgcctggccagccgccccgtccgggagggaggtggggggcagcccccgcccggccagccgccccgtccgggagggaggtggcgggcagcccccgcccggccagccgccccggccgggagggaggtggggggcagtccccgcccggccagccgccccggctgggaggtggggggcgtctccgcccagccgctgccccgtccgggaggtggggggcgcctctgcctggccgccccttctgggaagtgaggagcccctctgcccggccgccaccccgtctgggaggtgtacccaacagctcattgagaacgggccaagatgacgatggcggttttgtcgaatagaaaagggggaaatgtggggaaaagatagagaaatcagattgttgctgtgtctgtgtagaaagaagtagacataggagactccattttgttctgtactaagaaaaattcttctgccttgggatgctgttaatctataaccttacccccaaccccgtgctctctgaaacatgtgctgtgtccactcagggttaaatggattaagggcggtgcaagatgtgctttgttaaacagatgcttgaaggcagcatgctccttaagagtcatcaccactccgtaatctcaagtacccagggacacaaacactgcagaaggctgcagggtcctctgcctaggaaaaccagagacccttgttcacttgtttatctgctgaccttccctccactattgtcctatgaccctgccaaatccccctccatgagaaacacccaagaatgatcaataaatactaaaaaagaaaaaaaaataataatgggagactttagcaccccactgtcaacattagacagatcaacgagacagaaagttaacaaggatacccaggaattgaactcagctcttcaacaagcagacctaacagacatctacagaactctccaccccaaatcaacagaatatacattcttttcagcaccacaacacacctactccaaaactgaccacacagttggaagtaaagcactcttcagcaaatgtaaaagaaaagaaattataacaaactgtctctcagaccacagtgcaatcaaactagaactcgggattaagaaactcactcaaaaccgctcaactacatggaaactgaacaacctgctcctgaatgactactgggtaaataaagaaaggaaggcagaaataaaggtgttctttgaaaccaatgagaacaaagactcaacataccagaatctctgggacacattcaaagcagtgtgtagagggaaatttctagcactaaatgtccacaaga

SEQ ID NO: 18482 - DNA, 1038 bp, Artificial sequence
  DNA replication origin
gaggccaggggacccgcttggggctcccggccgagccccgacctcggacgtttttccgggagccgcgagaggcctgggggcctgggccaggcgccgcggcgggcatcgatcgccggctcccagagagtggccccgcgcaggtggaggtgaccccgtcacctccaggagcgcccccaagccccggtacccgcagcgtgcgccctctcctcctccccgaaggttaagttcgtctttttcggttctcggttacgcatccccttggcacgcatgcccagccacaccgtgggcgaaactagagggcccgcgtcccctgggggctgccgcggggccccgagtgaggtgtcccctccgggccgggcccgagtcggaggccccctttgcagcctagaggagcgcggggctggcgctgcgcaggaaccgccaggccggggagggggccgcgcccgggcctgggccaagagcgcgcgtcccccgcccgggccctgcggccctccccaggtgtctgagcagagctgctgaagctgcagaaatgtgctggcgcctgtccaccgccgcacacaaaacccagccaaaagcggcgagaggaaaagcgaatatggcgctgctgaaaatggagactccgcatctagaaagtctttctttcctttcctcttttcgctcttacttcgtcgatcttttcccccttgccctctcacgagggcctcctgcgctttccttcgggtgttctctacccctcggcccctttcctgttcttatgaataacctcctttactcggttttccttcttcctttccactcccggttcctctttctccattttgtgtcacaggcgccttgcttcttgttccctttcagggcgcgcactcccccgcccggctcactttattttgtgtgtgggtggcggagcagggagggggtggcaaggatcgtgaggctaagtatcgagtttgtttgtttgtttttctttctttcttcttcttctttttaaaggtgttatcttaggagccaagcatctcctttggtcctgcgctccttcgc

SEQ ID NO: 18483 - DNA, 1047 bp, Artificial sequence
  DNA replication origin
ctggtggccgtccgaggtaagcgccgaaccaaggagaaagcgccgagcgcgtccacaaaacgcccgaggccgcccttctcgccaaggctcggcagctcccgcggcctgcgctggacaagcgagagctggacggaaacggtgggaggccgtaggcggcggctgggggcgcgggacccgcgcgcgggcgcggaggcgggcggggaggccccgcagcccgcgccgccgccagccgccccgagccgcgtgcgcgcgcggccgcatcagctgagcgcgcggcgcgtgtcacgtggtgtgcgtgtcgaaggtcacggcgcgctcacaatggagctctcggagtctgtgcagaaaggcttccagatgctggcggatccccgctccttcgactccaacgccttcacgcttctcctccgggcggcattccagagtctgctggacgcccaggcggacgaggccgtgttaggtaagccgctcggctcggctcggagctggatccgccggggtggaggggcgctcggagaagaggagccggcggagcgagaaggggaaagccccgggaagaggaagtctccgggctttgcccttcgctccggacggagtgttggggacgtggctctgccaggactcggagcagactctgagcattgttttggccccacttggcacctgcatagagccaactccacgttcctggcccggtttccctcccagtctctttgttcttttgtaaagccggtgttcaagtcttgtttgtggcctaaacatctaaggtgtttagccttgtctgaggctgcggctgttttgacagttggacttcatctggggagctccctgcaattcaagcttccagggctaggctagcaaaggtttaagggtctgtttccgaagtaattactaggtcagacagtgttgacatttgccaacttagagcatacctcaagttgctatgatcactccagcgctctagttcagcatgtttacacaggttctacgcctagaaccttaaactatgatgcacaatactttgttccgccccagttaccaggatgc

SEQ ID NO: 18484 - DNA, 1051 bp, Artificial sequence
  DNA replication origin
ttccgggtacgtaggaggcgaggcgcccccgggacggggctgggggccggcgggggccgcgcggggctcggggcggccgcgggtggaaggggagccccccccgcgccccggccgcgccgccgggagggcgctgacagcgtgggcgcccggccccgcgccccgcgccgcccgccccgcgcctgccggccccgcgcgccgccctccccgcgcccgcgagcgcgcgcccgccgccgcccgccgactcccgcggcgccgggaccgacccgcagcccgcgccgcgccgccgccgccagcagggctcggcgccgctccagccgccgccgcccgctcagccccggcgcgccgcgcgcggccccacgttttagttccccgctcccccgggcgcccctccgcaccctcgcgacgcacatggcccccgagaggagtactggtatttccagcctcggcggctctcccggccgcagcgccctttgttgagaggtagatttggatgaaacggggacgggttcctgaaatcgggagctgcttgggtcaagtggcttccctcctctcccgaagaaagggctctggaggggctccagcagccagagaacgcccccattttatagggacgggttgcgtggggggcggccatcccgccaaggtgggtgttaggctggagagagccccgacgaaaatgttattaacttaagttggggggacacttgtctgagattggatggctggtaagatggcggttcccagttgtttccaaggtctcctgcatttgtgtttaaaatgctgaagttttcaaggtggtgtgtgttgggagtcttggataagtgctctgaacatcgcttgggaggtgctccctgggaagtgggcatttcaaatttggagctttttgtggagtgaagatggtgactggacgttagctttgctggaggcttgctttctcactacttctttttctcctttttcttttttccccttttggagactgcaacttttctctcgacttctactaaaggatgcactcagcatcatgactccagtccactatcttttacag

SEQ ID NO: 18485 - DNA, 1112 bp, Artificial sequence
  DNA replication origin
tgttttagacggttccagcaagcagaacctggcacgtttttacgcgacgcgcagggaaaacaattctgccctccctgcatccctggcatttccggagccgggtgctggggccgcaggaggagcacctccagtcggcctgggccggggcctgagcgcggcggacgcccgggggccgggatgcgaggggcggatccggcggcgcccggggctccgtctcgctccggattcggaactcgcctcggtcggggtttccatagcaacttacacttacacttggcatccggccaccgctgcaactccgcgcggagcccggcccgagccccgagcctcggcgggcgtgcggggcggcgggcgggcgggcgggcgggggaggggcggcgcgccgcgggggcggggccggcgcgggggcggggtgggtgcggcgacgccgggggggcggggcagccccacgaggccacagcgctggggagcggggagcggggatcggggaccagggacccagtcctgggcggcggggaccccggagcctgcggcagcgcccgcgaaaggaaaatgcaaaccgcactcccggccatttcggacactccgggggcctcttttcacgtcgacttggtgcgcagagctggtttcagatctcgactctctcggtctgtcctgtctgcaatcactcggtcagaaatttcacgaagggattttttgagaattgccaactgtgcacttagcccgaaaccgtcagggctcaaattgcagagatgtttattgaaccgaacctctttaaaacttccttctctaatgtgacgctctcctgtagattaaatgagcgatacaaagttttggaaaggctgaaaactgaaatctgttttacaagaagaggagagggcaaagcccagtgttttatttggacaaactatgctgggggcaagaaaaagtactttaatcggtacaatagtgacaatatgtacagaaccatgtgaccagcccatttccaacgctaaatcaacagcttgtcaacccaaagcagcgacaggagagaaaaacaaatgtaaaaccccccatacgatgaaatgatattcccaacagatacctctattacaggaaagtcacaatgggga

SEQ ID NO: 18486 - DNA, 817 bp, Artificial sequence
  DNA replication origin
gccccgcccccccggcgtcgccgcacccaccccgcccccgcgccggccccgcccccgcggcgcgccgcccctcccccgcccgcccgcccgcccgccgccccgcacgcccgccgaggctcggggctcgggccgggctccgcgcggagttgcagcggtggccggatgccaagtgtaagtgtaagttgctatggaaaccccgaccgaggcgagttccgaatccggagcgagacggagccccgggcgccgccggatccgcccctcgcatcccggcccccgggcgtccgccgcgctcaggccccggcccaggccgactggaggtgctcctcctgcggccccagcacccggctccggaaatgccagggatgcagggagggcagaattgttttccctgcgcgtcgcgtaaaaacgtgccaggttctgcttgctggaaccgtctaaaacaaccggaaccccggattttcacttgcagattcttgaggaagttttataataaattcggagacctggaacaagccctagtggttggtaaatatccgcggggattgtgtggcgtctgcagcagccttggggctgctgggctggaggacaaatggaagaaagagaccctaatacgctcagctcccagcccccaccccagactttcttctacctacaggaatgatctgagagaccagaagtaatgttagttggatccttttgcatcagtttggtagaactgattccgatctgatgagtaaattccttctgtagaaacgttaggacagcccagctgtacagtgttaaatgagttttataaattcagtgtttcagggtttgt

SEQ ID NO: 18487 - DNA, 847 bp, Artificial sequence
  DNA replication origin
cagcggcttcgcgggcagagcccacgggagcgcgccctgctaggagccaggccggataatcgcctttctttgtcctcctccctcttcgagtccaatcaatgccctttctccttaatgaacgaggtgtccttggagtttgaggttttgttggatgattttaaataaaattattaagttataaagtggccaccctgaaggttcccgaaggcgacttcatgtctgtgactggaaaggcctagaggagagggtcctcccgctgggctcgtttaatagaacgcgctcgaatcccctgggaaagagccttgactgggtgacagggctgaggaggggtggctgcgcggcgggaatctcaagatctgggcaaaggctcgcgtctcgggacgcgaagtcgacgccaaaatgggtccccggacaaggcgaccctgggagtgccggcgcccccggccgggcagaggagcgggtgggccgaggctgggacatcgcctccgaaagctgccgggacgcggcggcttcctgcagagcctgcgcctgccggatccccagaacacagaagcttctcggacatgggagctccccgtgcgccctaaaaccaggagaggaagggacgacttgggaaaagggactggggaaacagcggagaagtgaaagcggcctaaaatgggcgacggcgggcgagtcctctttatcagtgcagcaggctgccggagccgccatttggtggcggatctcggtagttcagtagcacgttgtgctgaacgtcacaactggcttgtctacgtggcatcgtcatttcttaaccgcggttttacgaaatgcaaatttccccctggccttcctcctccgcggc

SEQ ID NO: 18488 - DNA, 974 bp, Artificial sequence
  DNA replication origin
ggagacctgagcagtggacgcaggcagcgtcagcctgggcgtccccggagtcgcggcgagaccctggctccccaccaccgcccggctctcagctttggcatcgcgtctccagagagggcggtggatgacgaggaactgcagcagtgtacgacccccgggctccagacgaccctggggagagcgcgcagagttcctggctagcggccccctcgcagccgggcaccccttctcggctgcgcgcagccacttaggggcacaagataagcccctggggagggagcgggctgcaggcgcggtggggaagaacggcccggacgcagccgggcacagggaaggccgggcctgcagactggagagacgtgggctgcggtgaaaccgttagggctgctttgccgcgcacagacgcggaggcctttacaaggccggcaggcctcgcccagggcctgggccgccgcaggtgcctttgggtcacacccggggcgaatcccaccccctcctggggccgcttctgtttaccaaacccctcaggctattgcgttagttgtgcgggggaaggatagaggcagggtcctctggtggaggggagggaactggggacccggggctgctggggacgcaggcgacagaatgaaaggcgaagaggcggcagctcgaatctgtctgggggtgattttaaccggcgcagaggtgcagcatatgctttccaggttggactgcggaatacaaagaacgactctgagcccggggagcctcctgacaccgaaaccaaacgatcccgacctaggggggctgagtggcaggagactggattttttgttgagttgcaattaaagggagataattaagcccggagccgcgcagcttattaatatttatagcccggagcgacagggcctgcgctcgctggaagcggatttgcaggcccaggcgcggagccggtgtctcctgagccaggggcttcgcagactcgggag

SEQ ID NO: 18489 - DNA, 971 bp, Artificial sequence
  DNA replication origin
gcaggtcggtccccgcagcctgggaggtaggaagtttgtgcggggcacggcgcctcggctgtcagccccggcgggagctgctgggggccgggtccgggcgaccgctacccggtgtgggggccgcgcggcgcccgcgtcttccgcttgcgggcaggtgtacctgtcccgggctgggcgcgtgcgagcctcccactggggcactggggcgaggataccggagcgcgagcagatttggggcagcagctttagtgcttaggtcctttctttttcctttaaaggcaatattactgggcacaagtcggctttttggcaaagcagcagccgatgtaaatatggctctggcgtcgggcggcatccctgcgcttctcccgcatcgccctgccgctgtgcgggctggagagcccttggcggggagtcttcctcccttcgtcgcctccccccactttggggagtcaggcagaagtcaccgactgcggaagggcggccggggcggggacagcaggcgggggtcccggcgggcgcgggcggagggggtcccgagttggccgcacccgctgtggggggtgtgggaaaggctggagaacgcgtggaaaggttagcgtcacgcacagtcggggattggaggatgcgccgctgcgggctatgcggactgcggttcgagggtctgaaatagcctcctgctgatctgacagcgagaaactcctgcagttttaatccacttcgataggatcaggaaacatgatcggagctgttggctcagccaggaaagtttaaacgagctgtgaattttgaccatgaccttagccactgcagtcacttagcatctggggaaaagtgtaagttcgctttccctgcttttgatttcgatggatgtctgtatgtccttttcagcgtaatggaaatgacagaaaaccatgctggtttttcggaaaacacacacacagacacacacacacacacacacacacaca

SEQ ID NO: 18490 - DNA, 1257 bp, Artificial sequence
  DNA replication origin
atgtcccctccaccgccgtgctcccgaggccggggacccgccctctctacaccccggcccggggaggcagccgcatccccccggcggcggccccggcgcgccgcgctccgctccgcccgccgccgccggcgcgctcagccccactcggctcgctccgcccgctcggcccggcagactgcgctcggctcgcgccccggcccgtatcctgcgcccgccgcggatccgcgctcagcccgcggctggacccggcgcgcggcgagcggcttccgcgttgggcgccggcgtcatgacgcagggggcgggcgggcaggcgggaggcggctgcggcgccgcgggcggggcactgggtgcggggcgcggggcgcggcagctggaccgttaggctgcgccttcccgccccggctccgctgcagccgggccgccccctgtgcgcgggcgacctccgggcgttcgctccctgcccgcggaggaggccgtgggttgcgagcgggagcctggggaccccggctaggcgtcccctgccgctccccaaggagggagaggacagagtgggcagagtgaggaggttggggagaggagcccccaggcgtcgatcaggcgaaggagggaggctcatgcactcacccacgccacgagtcaggagacccagccaggtgtgaaatgctgcagggagaccagggcttcccagcaccgaggggaaggacccgggcacattgccgggtcagtccctgaaatgaacttaatacttttgtgcggataaccgtctggcctttcagaccctcgatatgggcctcctggagccattcaagagggagactcccacgtaataggctgggctgtcactgccaacccactccgtgcccggggcaggaacctcggacctcatcgagagcccttggcttaaccagtagaatcatgccccaaagtgcaccttcttccaatccatcactatggtacttgccatccctgcctgttttccagtgcactcaccgtccgtggaaatctgttcaccgtcttcctccagatacacctaaatgtagcccttattatgctgagaatacttggcctacctcaggaagctgccattccaagtatgtctaaaaccctgctgcccccatatcgtccttgcagtcgtcatcctgtgctatttactctgacccagctcaccagtcctcacggagtaggttcttggaaactgtcaccttaagcaaaacaacatataacaaaaccaaatttgccataggctgacatataaaa

SEQ ID NO: 18491 - DNA, 1122 bp, Artificial sequence
  DNA replication origin
agaggggaaggaagggaaggagtgggagggaaagggaaggagaggagaggcaagggaaggagaggagaggcaagggaaggagaggagaggcaagggaaggagcagggagagagagcaaaggagaggagagggaagggaaagagaggggagagaagagaaggagtggggagggggagggaaagggaaggaaaggggagggaaaggaaggagggggaagggaaaggaaggaagggggagggaaaggaaggagaggagaggagaggaaagggaaggagagagaagatggtaggtcagggaatgggaaggaagggagagagaagggaagggaagggaaagagaggggagagaagggaagggaaaagaagagaacagggaagggaagggagacaggagagatgggaagggaaggagaggggagggaaaggaaggagggaggagggaaaggaaggagggaggagggaaaggaaggagaggggagggaagggaaggggtgggagggaaaggggaggagagggaagggaaagagaggggaaggaagggaaggaaaggggagggaaagggaaggagagataagagggtaggtcagggaatgggaaggaaggggagagagaagggaagggaaggggaaagagagggaagggaagggaaaggaagagaagaacagggatgggaagggagagaggagggaagggaaggacaaagaagcggagggaagggaaggagagggaagctggagagaagggaagagaaggggagggagggaagggaaggacagggaaggggaggagagagcaagcagaagctatgggactggaaccacagggatggatgagtagcagtgatgagaatattgagcaacagagactctaacaacagagaagaaagccagagcagaaaataaagcagtctgaggatgagggcaaaccactgcgtacgccttgggagacttggggcccagcctccttggaaagcaggggtctggtatctgttccccacagcctccaatgccaccgtggcccttacaggcttaagtctaccataactcaatacagtttttcaaagaatccaggaaagttctcatagaagaagtatgttttaaaaatatgtaaacatgtggggccg

SEQ ID NO: 18492 - DNA, 1124 bp, Artificial sequence
  DNA replication origin
gaaaaaaaatctttgtaaagcatatgtttgataaaagatttgcatccaaaatatataaagtgttctaagctcaataatgaaacaactcaacattaaatgggcaaaagatctgaacggacacttcaccaaggaaaatacactcgctgcaaatacgcacatgaaaagatgcttaacatcattaacgattagagaatgcataataaagccacaatgagctaccactacacagaaccggaacatctacagttaaaatctctggactttcaagtgttggcaaggatgaagaacaactggaactcgcatagactgctagtgggaaggtaaagaaaaaaaccacttgggaaaacagtatagtagtttcttaaatggttacacctaccttacgacctgggcattccacttccaggtatttaccccagagaggaaaaaccgtatatgtctgtacaaagatttgcacagggatgttcctagcagctgtagttctaatcaggaaaaattgaaagcaggctaaatcaagtgctgactaaacacacggtggtatatccataaatggaatactgctcaggaagcaatgaatgattgttccatgcaaaaacacgcaggcatgtcaaagtaactatgttgagtgaaagaagccagacaaaatcaagtacatatgggatgattccatttatggacgactctagaaaatgcaaactaaaacagatcagtgtttgggctgcggatgagtggagttgggataggtggaggggggcagggcgagggaggagcaggagtgggaggagctgggagatgcagagatgggttggggagggtctcatggaagggaagggagagaggaagggggagaggaagggggaggaaaggcaaggggaaaaggagaggaagagggagggggagagagaggcagagtgggaggaaagaggggcggggacctgggagggcccagggcacatagtgggaggagcaggtgggaaggagggaaggagggaggggcaggggagggagaagagggggagggagacgaggggactggcggtgtgggcggagcgtggggagggaggccgactagcgcaggcggacgggagagaatgggggaggggtgggatgggagcaggggcaga

SEQ ID NO: 18493 - DNA, 1268 bp, Artificial sequence
  DNA replication origin
tcggccgccagcccccgcccaggatgtgcacatctgctggcagcactggcccgggtggcagtcaccgggccacccactccacaggtacaaccgcacccaatccaacctggaactcggagggctgtgcgcgccgagctgggatcgcgccccagcgagccgggcctttggctgcgccagggcccaggccgagtcatcccgccgctcgcgtcgccgcgaggcgggacaccgtgtgatacctttgccgtgggctgggcgtcggccgcggggcggagagcgggtgtcccacctcgcctcatcatttgatttccgccagcgtctgaggacggcgcacccaattcgttccactcgctgcgctctgtgaaccagcggcgggcagggcgggggaggccgggctgggggagggcagggtggtcccaatcccccgcccccgccccgccggcctcgcggagcacaagtgttgggattcccacgggcaggcgtgctctgcggctggaggcccgagcgcccagggcccaggagacgtggcggacacagaggggtttgtaggcacggtgacctccgtgctcctgctctgaaagggcctgaaaggagcggtttatggtgcattaccagtcaagggctcaggtaccagcgccttgtgtcgggaacccgggcggccgcccgtgctgcaggtgtctgctatacaaacgccccgggagggggagggcaggccgccggattgggggccggggaggggcctccggcctggcctgctcctgccactcgcgcggtttcgctcttgctcctctgcagccatagcagccagccaggggtgcagacggagatcctagctgccgggacagaaaaagctgcaggggcctggctgcccagtcccgatttggtttcaagactaacggcagcaggaggtcacaggaggcttgaacctctccggggagacaaccgctgtgccggggaagaaacattttgcccatatgttgggctgcttgggcctccagaggcctgccaggatttaacttgaactttccaggtaggcctgccctctccttgtctatcttcctgtgcaaagaagggcctgagcccaggcgcatttagcagctgttcctggttaaacagcagtgtggccttctcactgacctctcccaacgccacagtcgctccctgcccagaagaaaccacggaaggtacgttagcttctttgggctgcaccaacagctatgcctttagtgggtcactcctgtacccgtctgtgtcccgaaggcctgacaaac

SEQ ID NO: 18494 - DNA, 1098 bp, Artificial sequence
  DNA replication origin
cccgcgctcgcgctgcgctggggagggctgtggcggacttcctggagctgagggccggcacgcgaggattcttataacaacatccataggcgcgtgccagggacccatcgcgccagccaatcagagcgcggtgtgccggcggcgagggggcccggaggcgcggcggtgggcgggggtggggggcgttttgctccctttgggagctcctggggcgaggaaaaggcggggtcgcgcggcccggggctcctcgcaccgctctcttccctctcctctgcctctgcatactggattctgtacctgccccgcgtgcggctccaggggcacctgcgtcccgcggtgcccgctgcgtacccgcgcgcgctgagcagcgccggctccttccgccctgggactggggcagccgcgcgccgcgtctacacgcggccagagaagttcctaggggtgcgcgccggtggcccagacggcgagagcggagcccgcgcggcgatcgtcctcctccgcggcagcctgggcaatctaagggtgctgccctcagggaccaggtgggtgcattccgccacccccttatccgaggtgcgcggggctccggcctgggttctgctgggggcttctgtcccatctctggacttttcaagggcttttgcacagtttgcagagtatatgcgggtgtcattggaaggtgatccgggcccactcccactgcgttccagacgcaacacgggggctgggagcgcacctatgggactccgctctggagcctggctgtggtgcctggtgcgggtccccagcgacatcggctcagtggctgcctcccctgccctccccggcccggagaaaggaatggggagacgggaggggcagcccccagagcagctcagcggggcgcgtttcttctgagagcaaatctagaccctagggattctgagcaataaactggatacaaaaggagtccattgaatcgtctgctccggcgcagtccggagggaaggcattgaagttaaagggcagaatgtgaatcgttttcaaagcccgagtctctcacctttccgactggccacagggaccatccctgaatgacttgtttttttctttctcgac

SEQ ID NO: 18495 - DNA, 996 bp, Artificial sequence
  DNA replication origin
cctggcctacccgtgcgccggggcggcagtactgtctcccggggcgcggctgcgcggcctgagcggagcggcggctgcggcggcgcggcgccggcggcgggtgcgctccgaggcggagctgcagcagctgcggcaggcggccaacgtgcgcgagcggcggcgcatgcagtccatcaacgacgccttcgaggggctgcgctcgcacatccccacgctgccctacgagaagcgcctctccaaggtggacacgctgcgcctggccatcggctacatcaacttcctcagcgagctcgtgcaggccgacctgcccttgcgcggcggtggcgcgggcggctgcggggggccgggcggcggcgggcgcctgggcggggacagcccgggcagccaggcccagaaggtcatcatctgccatcggggcacccgtaagtgcttccgcttcccagctcagggagaaggggtcgggcactcgaaggctccggaggggctgggggagctgactgccaagcagacagtcggaccgacggattgtcggtgggcacggaaaaacttgaatgcgagctcgcgtttctcgtttttttttttttttttatttttctgccacgttgaccgcggctctcaagggcgcgcgtccccgccagacttgcagctcctcggattcctgggaggggacggtggggacttgaagtgtggaggaagagggtggttctagtataaccggagagcacccaggaaagggtcctaaaggacctgatgggaccaatgggaatgtggttggatattcacagtctgttttctcttctcacctgtccagggtccccctcccccagcgaccctgattatggcctccctcccctagcaggacactctctctcatggactgatgaaaaacaactcaaggaacaaaatattatccgaacagccaaagtctggaccccagaggaccccagaaaactcaacagcaaatcttccttcaacaacatagaaaacgaaccacca

SEQ ID NO: 18496 - DNA, 1247 bp, Artificial sequence
  DNA replication origin
ttgaagaagtgaaaactgcagctcttttcggacagtgatcccctcgaaaaacaaacaaaaaactgaagcccagcggctggagcaaggggcctggaaaggcgttgagcgagggccggggcgcgagggctccggggcgggccggcggggactgcctctcccgctggtcacctggggttgaactggaattgttcaatagaggcctcgaggccctccatgatcttccggccctcctctgtctcaggcgagtcgccccagttcgccattgcagccccggacgtgcgcctcccgcggagccgctcgctctcctgagtcggagtcgggaacccggcgtccgttgccatggcgactcccaggtaaccggcgaagcgcgggaatccgtgggcgggggccggggagggccgcgagtggaggggggtggggaacggggtggggaggggaagggggaaggagatggggaggagggggatagggagaaggttggggatgggggggaaggggagagggaaaggaagtagaggaggtgtggagggaaggaagagggggaaggagtgggggaagggggaagagatggaaaggaggatggggagggagcacgcgcgggaggaggggagtggagagggggaggaggaggcggggcgggctcccaagccaccccgctgcgctttcactgtcccgcctgcctcaaggcttccccacaagactcccacagcctggaggctgctgcgataccccagaggaaagctgcacccccgtaaataacccttcagcctcccgccgtgcccctggaccctgctcgcttcctcctctacccaggcgcggagctcagcctacctcgtggacccgcgcatttgcgggggcttgaattcccgagcttctcgcttcctacgcgcgcagcagacccgcagctcggtggccttggctttcatggcctcccagcgtgtgccaaaggtccccctcaaggaggaggaaaagcagtgaacccatctaataactatgctcatgacataatgagccctgcgatcccggaccaaggccatcataagaggagagcaggctgcctaataagctgtctccacctgccacaaacgtaggcgttcctggacaaaatatttccttgcagagattaaacagatttctatttaatgaggtcagaatgtgaggcgttaagtcttaaactataccatctagtgtggaattcaattttaccaggtttctacaataataagagttaatagtgaaactgttgt

SEQ ID NO: 18497 - DNA, 2345 bp, Artificial sequence
  DNA replication origin
atagcgcccgggtcccggccaaattcctgctgcgccacagcgcaggggggcggggacgggacgcgagctcgacccctgccggtgcgctcggcccgcagacccggggcgccgcgcccgctgcagctgcttcggcccgcggcggccgctggggactcacggaggaagccgcccgccccgttggagcgcgtcccgccggcgaggaggagcgcggtgcgcgcggaggcccgggaggcggggccgcggttgtttacctcaggcctcgcggccgcgtcacgtggactcactggaatgcgcggctctttgcggcgcccgattcagtcgcgcctgctcgccccgcccactccggcccgcgccccgccccctaccgcgctccgccgacgtcacgggcgtggccctcggcgcgcgagcgcgcgcgggcggggcgaggccgggggcgcggaggcctgagcagtcctgggatcctggctgggcctcccgcccacgtgactcccacggaccgcttcccccacctgggcactgggcactggtttctgcgctgcgccactctcctcagcggctgcagtggatgctgcgggatgggagctgcttggggcgagttagcatgctcggaaagcttgcgtggcaggaaagcttccggcatgggtgtggagaacggaatgctgccttaaagtctgtttggcctctgctggtcatgggctaccatccctgcttgcattcactactgcctcttttcttttatctttttagagatgggggtcttacctgtctccgaagctagagtgtagtggcgcagtccatagctcactgcagccttgacttcccgggctcaagcgatcctcccgcctcaacctccagagtaactggaaaccacaggtgtgcaccaccgcacccggctaattttctttctttctttctttctttttttttaaggcgagggtctcaccacagttgcccagtctggtgtcgaactactggcctcaagctgtttcccgcctcgacctcctaaagtgttgggattatgggtcctagccaccactcgtggaaccgccgcgtcttttcctttttttttttttctttttctttttgaggcaaggtcttgctctgccttccaggctgagtgcagtggcgccatcatgtcccactgcgacctcgacctccagggcccaagtgatcccccttcctcagccttgccttgggcagggattacaggtgcccagctagttttaccactgtgtcttttctatgcatttccttggactcaccggtaagggtgagtccgctagtggattctcttgccttgctaagacaaaaccaactttgcacctctgacctatgccatttggcaaatatctggcttgggggaaagcaaggaagccttttaggcttttataaacaagctttctcagaataccaaatgcagtatcacttagggccctttgagaataggtgtgaatgctagccagaggtcaaaagcggtggagaaagtcgtgacctgcattccggggcaagatagactatagaaaatacttctaccgagtctttttgtaatacccgcctttgtaagggaaagccagaggtagtgggagacttttgctatattctgagctgtgatcaaatgctaaattaacagggcctaaacattcgaattgaacccagaggttgtcctaacattttagagatagggagactgaacctgtaggtgatgtaggctgtactccggtccccacctttccggtggaatgtgaattccaggaattgagagacttgggtcttgctcttatatttccatcccctaacaccgtgcttggcacataattggacctaattaatatttactaagtgaatgagtagatggaaagcgagtttccaaggtttgtcagacagtggtgaagccaagattactatccaggtcccttgaccctagccagggcttttaattatctttgggcagtatgactggcagggtcccagctcaggtcactccagccgcttatgtaaattaactcagaagaaggtaaatgactgtctaacttttcaaattctggtaactaccccattgggagcttgaagctctcatggctaattagaaaaaggaaattaccatccttggatttcatcactgatttgttgagcatctgttgctctgtgcatgaagcacttcacgcttaactctttcattagctggtgttctgaaacagaagacaagactgttaacaaggccgtcaccaaataatatttaccatacccaccacgtgcctggcaggactagcataactggagcctgaagggagataaggaaaatattagaatttaaaccctaaagcaagagtagatattaacaggtt

SEQ ID NO: 18498 - DNA, 1252 bp, Artificial sequence
  DNA replication origin
cacgtccaccgcacagatcaccgtgcgggccctgggcgccgacaggctcctgctgcacgggcccgatcccgttcccggcgccgcgggctccgccgctgccccgcgcggccgctgcctcctgctcgccccggcgcccgcagccccggtcccgccgcggcggggctcctcggcctggctcctggaggagctgctgcggcccgactgccccgagcccgcgggcttggacgcgacacgggaggggcccgatcggaacttccgactgagcgagcaccgccaggccctggccgccgccaagcaccgaggccccgcggcgaccccggggagccccgatcccggccccggtccgtggggcgaagagcacttggcggagaggggccccaggggctgggagaggggcggcgatcgctgcgacgcgcccggtggggacgcggcgcggaggcccgacccagaggccgaggcaccccccgccgggagcatcgaggccgccccgagtagtgcggcggagccggtgatcgtctccaggtcggatcccagagacgagaagctggccctatacctggccgaggtggagaagcaggacaagtatctgcggcagaggaataagtaccgattccacatcattccagacggcaactgcctctaccgagctgtcagcaagacggtgtatggggaccagagcctgcaccgggagttgagggagcagacggtgcactacatcgccgaccatctcgaccacttcagccccctgattgagggcgacgtgggggagtttatcatcgctgctgcccaagacggggcatgggccgggtacccggagttgctggccatggggcagatgctgaatgtgaatatccatttaactactggagggaggctggagagtcccacggtgtctaccatgattcattatttgggcccagaggattccctgaggcctagtatttggctcagttggctcagtaacggacactatgatgctgtatttgatcactcctatcctaacccagagtacgacaactggtgcaaacaaactcaagtgcaaaggaaacgcgacgaagaacttgccaaatctatggccatatccttgtctaaaatgtatattgaacaaaatgcatgctcttgaaatgtctcaaaaccttacaccctgggaataattgcatatataacttgtgtttggagaatcacatgaactttaatcagggtaatagcactttcaaacttgctagtagattttactgtaggtgtaatgcct

SEQ ID NO: 18499 - DNA, 918 bp, Artificial sequence
  DNA replication origin
tgtagtcccagcttctcggaaaactgaggtgggaggattgcttgggcccaggaagtcaaggctgcagtgagctgagatcaaagcactgcactccagcctgagcaacagagcaagatcctcaagaaagaaagaaaagaaacatcgatggaaggaaggaaggaagaaagagagagaaagagggaaagaaagaaagaaagagagagggagggagggagggggacagagagaaagaaagaagaaagagaaagaaagaaagaaagaaagaaagaaagaaagaaagaaagaaagaaagaaagaaagaaaagaaagaaagaaagaaagaaagagaaaggaaggaaggtaggagagagagggaagagagggagggagggaaggagaaagaaaaggaggggaggggaggggaagggaggggagaggagaggaaagaggaaagggaagggagggaaggggaggggaggggaggggaggggaggggaggggagattagtgttcagagatgacccccacgttcccagcttaagaacataaactaatggcactaccttcaaccaaggtaggagaggcaggaaaatagtgtgttgctgggaaaaattatgagttcaattccagacacgtggggtctggcggggggcgcctgaaggatagtcaagcagagaacactagtaagaagttggatttggagctcaggagaaatgtccgaacaatgattcagattaggaagtcatccctaaagttatagcagaagtcgtggttgtggatgaggctgctggagagaatgaagagagaaaaagaacaagacactagcagaaaggaattccaaggatcaccaacatttaaggcaggagcagaaaacaaaaagctcaagaaaagtttttccaagaaagaaaaaacaacccaagagaatggagtcacagaaat

SEQ ID NO: 18500 - DNA, 1369 bp, Artificial sequence
  DNA replication origin
tgcgcagggcgctgcgcgccctgctcctccgccgggtcgtttctgcccgacttgcagtttcagggcatgccaggactgcagcaccctctccgtcctcccccggaaacgactttcaattcacctggaggctctcgaggctcccccgcgggcgggtagcgtgacagtgggtgcagaggagagggaggagcgcgggaacggcggcggccccagtgcgcctcccgcttgcttggcgagaagcgcgcagccctctccagccgctctcttctggactgcagtcctgacgtcacccccaccaccccccaccccgcggaggagcggcgcggagggtggggtgcagggagtgaggacgcgcgagtgtgagctggagtgtaagcgcgtgcgtgtgcacgcgcgcgtgtgccctgcagggctggggacggatgggaaccgcgtctggatcctgtgaggagccagagctcgctccctgcaaacgggcgccgaggggctgccgcgagcagccgggggcgctcgcttccaggtcggggcggggataccagggaagcagagtttggaggcgaccgcaggaaaaggaagaaggcagtacgggtagttggagagcgggagttgggcattctctttccccaaagttggaggctgcacaggatgcctttaaaaagctgcgctagaggtttaggggggaagagtgggatagacggtgtgggagagttggtttccacgctcctgtaggagggagttcggcttggggaagaagagctcagagtcctttcaacctccacccccgcggcaggttccagcaaggcagccagcttcggtgcgccaagggcgcctctagcctactcgaagcaaatctccagcccggggcccctgtctactaagttcctgcaaagagatcaaaggggccagccttttccacctgagtcccctccctgcgtgaacctccgccagaagctgggcgaaagcactccgaacaagcgaaaggggtcaaggccgaggctggattccagatgcaagagggccccgcccttgggtcctgggtctgaggtcagtcgtaggggtgacaactccaagcagagttccttgagctcatcagtgaggctacatttgagttttgccattccccgggaccttacactagaaagcgatccacgttgtcacccaactttactggttctctgaaattgtcttgggggccaaaaatagaagagactttctgcgagagagccaaacgaaggttcgttaggtggtgctgggatggctagaggttgttccttgttcctggagcgtttgtcccttagcagagacccagacatccttgaggctgagtgcctggttctgtgcgccttctgcgcacctctgccggctgccgagt

SEQ ID NO: 18501 - DNA, 1206 bp, Artificial sequence
  DNA replication origin
agagcggctggagagggctgcgcgcttctcgccaagcaagcgggaggcgcactggggccgccgccgttcccgcgctcctccctctcctctgcacccactgtcacgctacccgcccgcgggggagcctcgagagcctccaggtgaattgaaagtcgtttccgggggaggacggagagggtgctgcagtcctggcatgccctgaaactgcaagtcgggcagaaacgacccggcggaggagcagggcgcgcagcgccctgcgcagcatccccgggctgccagaagaggccaccactcggctggcagccgcgagcggcggccgaacctcggccccagactcgggcccccggcacgctcgcccgggagataccccttccccctcttgcgcatttcgcagctgcgctggtgtggggcatgagagcgaggtggctccaggtctccgcggagcagctgccagtgggagagcgaggagaggcgagggggcggcagcctcggcccgaagtaagtgcagcagaagtttgcgtcggttgccccgccgctcccccagcgcgagtgggaggcacatctcccctccttggataaggaaaccgaggggagacttacaagggagccttgcgcgggagagcaagtgagcgtttcgagagagggcaaggacccccccaggagggccaggccgggaggggtcccggtgcggtgatggggtgccaaaaggagaagacccccaactgggaggagggactggagaggaaccggaccccggggatctcagaaagggaaggatgtggggagagtgaaggtggaggcagtcacacctatcctggtgaccttggcgtgcccccctggagtggcgagccaggggcttatataggtgcgactaggatgttgcctcgtttttcactcggggctgcgaagagggcattgctctttctgatggctggaagacaggggcaaggagagagagaaccggccccgagacgggctggagggtggggacactggggagtttggagctgggggttcggagtgggaggtttgggtcttctgagacgctccagactctccggaggcggcagaggtcgaggcaggaggcgaatgtgacgcttagggtcgctacggttgatgttgggcgcctttggaagctggtcattaattcttgtcatcgggaggtttcgcggagggcgacagcgcccgggagcagggtgaccccca

SEQ ID NO: 18502 - DNA, 1363 bp, Artificial sequence
  DNA replication origin
tcgctacggttgatgttgggcgcctttggaagctggtcattaattcttgtcatcgggaggtttcgcggagggcgacagcgcccgggagcagggtgacccccacagcggccggccttccggctggctgccctccccgctcgccgctctccccgcgccgctgcgggtcctccgagaccccggactgtcctgagctgcttcgagggcgggcgagaccctgtctgttcaaaagagaccctcgagaccctcgacattctgctcacttcttttcgggggcatgtttagctcttttgggctctctccttcctaatgggattctcccaaggaggttttcttctttaactgaccctacttctcataggggaaaaaagttcttggaatctgccctcgtcctagggtcagagccctgcagagggcaggcgaggacggcgtgggccagctcgcctaccctgctctcacctggggagggttctcaggaatttgatattaaatttgatgaaacgatcctaggaaagtggctaaggcatcttctccgagagtaggagtttctgtgcttcgggaatggaaatcccacttagcttctgataccaagtctacacttcggagagagagggagatagttaattaaaaactgattcaattgagttgaagacaaaagtcatttgtaatgcatcctggtcacccaatttcactccatccctcccatacactttatggggcccaactatgtatgtgccagacattgtgctagatgctcctgcaacagagatgattcatgtgtggtctcagcactttgggagcttacagtctgtgctagaagtggtttggaaagaaggtgaagatgcttgctctacagggaagggcaggtgctacctggttttaaccacaatgactcacactcgcagcccattaagtgtatggacaaatatttgcaagacggtatcctccttgaaggcgggatactgtcattcatctttgattcccagagaccaccactgcacctgcacatagtaggtcatcagcaagtactgttaaatgaataaatgaatgcatgaattatgcatagttaaaagtaacctaacgaaaactgtcatgctaggggaacatgtcaagaagagactgaaataaagggaattggagaaggcaagagggaagagaaaataaggttcatgaacgttcgaaagtgtatatccttaaacaagtgtttgttttctatctttatgcaatggaaattaccagcacccatctccgttctctatgaaatacgtgcatctctgaacacttagattgtaaatgccatttttagagcagagtctctgttaacttaccatgcagagatcacaatacccttctcatgtggctgtgt

SEQ ID NO: 18503 - DNA, 1097 bp, Artificial sequence
  DNA replication origin
ggggcggccgggcagaggcgcccctcacctcccagacggggcggctggctgggcggagggctgaccccccccacctccctcccggacagggcggctggccgggcggggggctgaccccccaacctccctcccggacggggcggctggccgggcagaggggctcctcacttcacagtaggggtggccgggcagaggcgcccctcacctcccagacggggcggctggccgggcggagggctgacccccccacctccctcccggacggggcggctggccgggtgggggggctgacccccccatctccctcccggacggggtggctggccaggctgaggggctcctcacttcccagtaggggcggccgggcagaggtgcctctcacctcccggacggggcggctggccgggcggggggatgacccccccacctccctcccggatggggcggctggccgggcggggggctgaccccccccacctccctcccggacggggtggctgccgggcggagacactcctcacttcccagatggggtggctgccgggcggagaggctcctcacttcttagacggggcagctgccgggcggaggggctcctcacttctcagacggggcagctgccgggcggaggggctcctcacttctcagacggggtggttgccaggcagagggtctcctcacttctcagacggggtggccgggcagagacgctcctcacctcccagacggggtctcggccgggcagaggcgctcctcacatcccagatggggtggcggggcagaggcgctccccacatctcagacgatgggcggccgggcagagacgctcctcacttcctagatgtgatggcggctgggaagaggcgctcctcacttcctagatgggatggcggccgggcggagacgctcctcactttccagactgggcagccaggcagaggggctcctcacatcccagacgatgggcggccaggcagagacactcctcacttcccagacggggtggcggccgggcagaggctgcaatctcggcactttgggaggccaaggcaggcggctgctccttgccctcgggccccgcggggcccgtccgctcc

SEQ ID NO: 18504 - DNA, 962 bp, Artificial sequence
  DNA replication origin
ccgggagggaggtgggggtgtcagccccccgcccggccagccgccccgtccgggagggaggtggggggggtcagcccccctgcccggccagccgccccgtccgggaggtgaggggcgcctctgcccggccacccctactgggaagtgaggagcccctctgcccggccagccgccccgtcagggagggaggtgggggggtcagcccccggccggccagccgccccgtccgggagggaggtggggggggggtcagccccctcgcccggccagccgccccgtccgggaggtgaggggtgcctctgcccggccgcccctactgggaagtgaggagcccctctgcccggccagccgccccgtccgggagggaggttggggggtcagccccccgcccggccagccgccccgtccgggaggtgaggggcgcctctgcccggccgcccctactgggaagtgaggagcccctctgcccggccaccaccccgtctgggaggtgtgcccaacagctcattgagaacgggccaggatgacaatggctgctttgtggaatagaaaggcgggaaaggtggggaaaagattgagaaaccggatggttgccgtgtctgtgtagaaagaagtagacatgggagacttttcattttgttctacactaagaaaaattcctctgccttgggatcctgttgatctgtgaccttgcccccaaccctgtgctctctgaaacatgtgctgtgtccactcagggttaaatggattaagggcggtgcaagatgtgctttgttaaacagatgcttgaaggcagcatgctcgttaagagtcatcaccaatccctaatctcaagtaatcagggacacaaacactgcggaaggccgcagggtcctctgcctaggaaaaccagagacctttgttcacttgtttatctgctgaccttccctccactattgtcccatgaccctgccaaatccccc

SEQ ID NO: 18505 - DNA, 1278 bp, Artificial sequence
  DNA replication origin
tgcaccttggagcagacacaaatgctgaaagccacccccaaccagctcaactccaaatatctcggaaggggactgaaggaaaacggatactgaggtgcccattctcaggcttgtagcatccacagccacagagacgggagaattcctggctctgagaaggggtgaccaagatgaggacattccaaactgcgggacatgttcttgcaaaagaaacacgggagtccctggaaacagacgtgggccaggcttctcctcgctactggttaagctggggcgctcccgccaacaggctcaaagccccgggaagcccctagtgaggccccgtggccggtaacccccaacttgcaggacgctcaagacacaggccaccgccctgccggccaggaacgctggctccgcgcttacctcgcaggccttgagcttgtcaccatctccctcagacagaccagtccgacgcgtggccatcatttcatttcaaatgacaaagaagggacaaatcctttggagtccacattggacgtggcggggaatgccaccacacacccgaaggggaagaattccacaagcaggctccgaggaggggcagggctgttgaaacagacaacgtgccagggaataaaggttttcaggaagcgccttcaaatgcctcgctgatttctcgtgacttcaactgacttcgccttcttcttccatttctggagacttaaaaacaaaggcgacaggtcttcttggcagccagtgtcgaggccaattgcagaaagcggtccccttcttcccagtgccactcctgagtcctggaaaaatccgaatgggtcgtgaaggttcgagtgtcagctcctagagagatcctaggaaaacgagaagttaaaggtcatgaactttctccaggcgcctatcactgtcttgcccacatgtccacaccaagttcgcgtttcctcccgagcaaaacaaacaaaaaaaaattttaacgtaaacaaacaaaaagcctataaattcgagggggtgtttaaaaaagagaaatctcgaaactgcccagcggttgcgtcaaacacacctggctgttatgcagccttcaagaaaaaatgttccccattcaagtgcattttaattcatgtctttcctgggtagagcagagggctgtgcatgttgttttctgcatcacccagacagggacacttcggtgaagttttctcccccacgaggctgaaatgggatcacactttccaagccccctcttcgctcccctccgccccccaaaaacgcaagcacaaagccagc

SEQ ID NO: 18506 - DNA, 1477 bp, Artificial sequence
  DNA replication origin
gcccttgctccgcacacgcgggcgcggcccctccgcccccgccgggcgcccgccgcgggctccctccggccccgagccagcgcccggccgggtggcctgtggcgggaagggagagagcccgcggcaagccgggcactccacggcccgcgagcgcagcgccctctcggctgagacggaaaagaaaccagacacgcaccagaggaagcgggacgagtggatccgcacggggctggccggctccgggacagcgcgccccgcccgcccgcccggcgtgagccggaccccgcagccggacgatcccgcgctgcccgccgccgccgccgccgccgccgccgcgctccgaggccgccgcccccggccggccgctcccaggcaccgccgcgacctgccccggccggccccgggctctcggccgccgcaggagggcgtggggcggggcggcggccgccggactctcccctcgcctcgccgggccgggccggggcccagctccggcgcccgcgaacgccaagtgacagaagcgcctcgctccgtggccgcgcggagctgtttcccgggggcggatttctcgcttcttcctccctggatccacctcctcccactccacctccttcccctcccctccccaggggaggctctggggctgaatattttctgtcttgaataacacgggaccggggaaccgacgctggagaagggggattagccggaggccggagcggggtgctcgcctgccccctccccgtgggtcgcgggacctacaagccctcgccccccagcaccccaaaaccaggcacacaacgctccccgcccctgcagtctcccaagcgctgaacggcagcgtccagggatgggcttgctcccgggaaaggagacctggtggtagacgtctggggtggagagggggacaagcctataacagcgacatctgcagactccagggatcaaaggtcctagattgggggacagggcttggcaaattgtgcccccaccccttttttgcagcgggaaggcaatgaagctgcgacgagacgtgggacttccagataagggagtgtcccctcacgcctcacagcaaaaatctcttcctgtggtgggaagggggaagttagccaagcgttgctcattcagttctttcccttttataaattctgcagagcggctgagcgaatttggcgcggctagcggaactgtggagaggcggctgcgcttctctgtccgccacactccaggtcacagcggctccggagccgcggcacaaccgccaccctccccacccaattcccgggccttgtcacagaccccggcagctcgctccgccccgccgtgcctcacaacatctcccgctgcaaattacccaatcgggagacgcgacgagagaacgcgaaccaatcaggggctggtaaatcaggcttccctccgccctcttccccgcccccgggtgaaggccaccgccccctcggcctctccttcccac

SEQ ID NO: 18507 - DNA, 1482 bp, Artificial sequence
  DNA replication origin
tgctccttcccgcgccgtcttcccttcccgcgttccccgggagaaacatggccgggagcagcgaggaggcgccagactacgggcgaggcgtcgtggtaaatgcaaactccctattttggggctcggcccgctcccctccctccctggcaccctgcttgtagattaaatgcttgccgtgcgtcgggggagagagagggccaccgctttgttctccctcccggcggggatcgcttccatcctcggacccgggcctcctctccccgcccccaatctgacgaaactctgagtcccgtcccttcaccccgagttcccagcgtccccccgtgtcctccggccggtagctcgctcctgcagcgtcccgccggcgcccagccgtccccatccccgcgagccacggggagtcgcttctgcgagcccggcagggccccagagacccccgcgtgctgctctggaggcctccttcttcctgggtctcctcttgactcctccagggcgggcttcaagttttgtttttaaaaagcacactgaggggttttgaaggcagctaggaaataaagtagctcaagtggacagagcttgagatttgaagcctttggtacccaggttgggggctctctggcagtggaggcctctgcaggagctctaggacacgctggcggctcctgagtgacctatggcttgtctgtaaaagggagcaacagcaagctgggctctggagccaattgggaggatgcatgtaaaatatctagcagtgtgtccggatgggagggtgtggggtgctggtttcccagaactgagcctcattaaccctgagaatcctgacggtgtcagccagagggtacccatctctcagtgtgctaggatccaacccgttcttgaccttgtggccacgtcctccctgctccctgagaagtggttttcctagaaggtggtggttataacttgtgtcaggttcagtgtgaaactcaatggtggtgaggatggtgggtggggctaacttgccatctctttccagggatcagcttgtcattcacagataatctgtttatgaatatgaatggcctgaactaaagtaagtgggctggggagggaaacgtgtcacattcagacagaagggtcaggttgaaatgtggggctcagtgcttaatttaacagcaggacctttccttctgaaaggatgaggagttgatttattcattccacacgtttattgtcctgctgggttgtaggaggtgctgtaggctctggggtgcaaaagacaaaggccttgtcttcatgagcttgcgttctagagaagacataggcaagcagtgtgtaaacaaatagagaaaatttcaaatagagatatgtgcaataggaggagggtaacaggatagagggtaattggaggagaaggggggagtgatgcttttgctcaggtggtcagggcagcctctctgcggtgacctttgagccaagatctgaagggtacacaggagtagc

SEQ ID NO: 18508 - DNA, 882 bp, Artificial sequence
  DNA replication origin
agaggtgggtggcggctccaaggtttgaaaacacatccaggacacttcccatcctccaagagcacgctggctcacaggctctttcacgcttctgcttgggacaatcgcgtgcatgaaatctggcagggaggagtcaaggagattgttagcccgagggctgggacggtggatctgggaatcaggggcctgggggacacgttctcttcctgccgcgggcttcctgctccagagtccccgcggggcttggcggcggggccgggggctgcacgcgaccatccggcagggggcggcggcgacagcggcggccgcaagggacgcgtccggggcccgcgctcagggggagcggtagcggcttggcagctgctccccgcgcccccgcggcctagccaggggagggggcgcagcgccggggccatggatccgcgtcaggccgctgcttcccgccggcgggcccggggcggggcggacccgtccccgtccccgtccccgtccccgtccccgtccccatccccacgtcccatcccccacgcagccttcgccctccctgctccttcccgcgccgtcttcccttcccgcgttccccgggagaaacatggccgggagcagcgaggaggcgccagactacgggcgaggcgtcgtggtaaatgcaaactccctattttggggctcggcccgctcccctccctccctggcaccctgcttgtagattaaatgcttgccgtgcgtcgggggagagagagggccaccgctttgttctccctcccggcggggatcgcttccatcctcggacccgggcctcctctccccgcccccaatctgacgaaactctgagtcccgtcccttcaccccgagttcccagcgtccccccgtgtcctccggccg

SEQ ID NO: 18509 - DNA, 863 bp, Artificial sequence
  DNA replication origin
ctcccccgacgcacggcaagcatttaatctacaagcagggtgccagggagggaggggagcgggccgagccccaaaatagggagtttgcatttaccacgacgcctcgcccgtagtctggcgcctcctcgctgctcccggccatgtttctcccggggaacgcgggaagggaagacggcgcgggaaggagcagggagggcgaaggctgcgtgggggatgggacgtggggatggggacggggacggggacggggacggggacggggacgggtccgccccgccccgggcccgccggcgggaagcagcggcctgacgcggatccatggccccggcgctgcgccccctcccctggctaggccgcgggggcgcggggagcagctgccaagccgctaccgctccccctgagcgcgggccccggacgcgtcccttgcggccgccgctgtcgccgccgccccctgccggatggtcgcgtgcagcccccggccccgccgccaagccccgcggggactctggagcaggaagcccgcggcaggaagagaacgtgtcccccaggcccctgattcccagatccaccgtcccagccctcgggctaacaatctccttgactcctccctgccagatttcatgcacgcgattgtcccaagcagaagcgtgaaagagcctgtgagccagcgtgctcttggaggatgggaagtgtcctggatgtgttttcaaaccttggagccgccacccacctctctccacctccgctcatctccctccacctcccctcacctccctccacctcccctcacctccctccatcttcctccacctttctccaccttcccccacctccctcatcccagggcctggagctggaaagat

SEQ ID NO: 18510 - DNA, 930 bp, Artificial sequence
  DNA replication origin
ttcttcttcgccttctgaaggaccacaggttctctccttcacatcgtccccctttaaccccctcttagcagtcctctctcgggaagaaaacaccctatttctctccggattgctaagcgtcgttgactgtgcggttgccgtggaaaccgttactaggcaacgaggaagtggcaggcagcaccgcaaactaggtctcccctcttccctctttctgcagcgccttctgctagagaagctcatttggaagccactgtttttacgtgcctttgaaagttaacggggtgaaaatgatgtccccttaaaaactgtgctcttttctatttctgtgtatctggggaaaaaagaaaaatcctagtagagacggcaaagcgcagctggtgcgcaggcgtcacccaataaggtttttgtgagcaggccccaatcgcggtgtgggcggagcgagcggctgagaccacgaggacgcaaggccagcgccgccagggagacgagggaggggaggagcctgaggagatcggagtgctcggataggctacagtgagaaaggagagtcacgtgccctgcgcgaggccgctcggggaagggcgtggagcggaggcacgctggccgccgcaggcacaggcgcagagtccactgcgcgggggcgggaccggggagctagctgcaggtacggtgctccgtctcctgtggaggctttagcggctcgtggacactgctcccccatttcctttcatttcccccgtcttctcagtgagatttccttggtgagttattggaggagaaaggaaggaaaactagaagccagcccgctcccatcgcatgcctttccccgtaccgtcccttcccctttccgctactcgctggtcatctcaactctgcgcgcatttttcctgctgcttctggtcgaggctcctcggaacgccgcgcagccct

SEQ ID NO: 18511 - DNA, 1643 bp, Artificial sequence
  DNA replication origin
gccgaagacgctgctccatagtctcacccgccgcaggtcgttcccgcctcccggcactggctcctcctcgaccgcttcgcccggaggcgcggggcgcgcgcccagacccgcaccgcgagcgcagccgcgactcccgaggagcgaagacgtcctttaagacgttcgtctgtccggagtagcgaaggccgggcggctggttaattgcagcctttaggtttggccgcaaaccacactccaccctctctccctgctccctcctcgggggaggaaagccagtttaaagaggcagcttggccgcaaccaaacccttgtagggcggctgcaagtcgtcttgttccctgtttggtcggctcctctgtcaatcagccgactgccatttgtggggccggggagggagctgtccagtgctgaacccgaggcggcccgcgggcggcgggggcgcgggaggcagcctgccgagtcctcgcacccactcgcgttccggatgactcggaaacctgcgtgggtggcgtagggtgggcggcagaggggggagaagcagagattcggtggctcagagcgaaggaaacttggacgtactgagggggagggtgttggcgtcttgcatgcttagttaaatcagccttttgcctggaaaagagggagaagggagtagttttcatttctaggtgaaattagacagaagggacataggatggagacgtgtcctcctgagcatctgctcattttaggcaaattatcaaatcatctttcttgttgtcagttaaagaaatgattaaaacatacttgtctaggctcatcttagctgagggagtaatggagaaatctaccagctgtgctttaaggagagaaaaaaaagtcatatttaaggaatctctgcttgggggccagaatggaggggaacgtgtaaaaatgtatgcaagtaaagatgtgtaagggagagagcaagggggaggactcatgagctctgggagaatgagaaggagcctgtgttgagtgagaagggaaatcatcctgactgggagttcctggaattgagagataagaactaagacttctatttagctaaaggttgggatatcccagcagaagaaagaagaactgagcaagtatgccaagtcccccaaattattggtaaatttcttaacacaatctaattgatgttttgacgcttattagagaatttaagtgtcttctgacactccaaaagtagactggtaccagaaaagtagtgttttgcacagctagctccactttccatatgcacctctattttcaaattccccaagaaagacacaaatagaaaatatccaacttactttaattcccaactaacaaaaatgtccctcatggcattctaagcaggcactgcttagattcactgtactatttcatgtcatccttcctattgagaaaatacttaaggactggaatgtaagctccaaaagagcaaaaatctttgtctgcattggtcactgaggtaccttgagcacccagaacactacctggcacatagtaggctctggctaaatagttgctaaattagtgaatgaatgggaagatcatgatgatgaagctaacttaaaaatcaatctcctcacccaagaagagaagtctgcctgacacaccagtgatgagggttt

SEQ ID NO: 18512 - DNA, 771 bp, Artificial sequence
  DNA replication origin
tcgccgagcgccggaagctgacgggcgtggggcgcttcttgcccccaagcacccgcgcccgcgtggggtgtccctcagcccgggtctctactctgagggtgagaagcgttcgcgtcacagccaagggttccttcctcacacgtgcacccacccacaagaccggaaggaaagcttcgcttttgccttcccccctgccccccggccctccctacctgaattccgggaccaggttaggctgcaacccgtagatggcagaggaaagagtaaccagccacccgggcttgtaactcccgttctcgcactccagataaggcggagaccacttgaagtggctcttgtccccgccgagcccgtccttgcgccgccagctgtggcccaggccccggggcccctgattggggccgcggcggtgtaagtggggcctccacttgcgccggaggccgtggaaccactcggtctccagagtggcgttggccaggtggggtgcggaggaggacaggtcttggagcaggatgcggctctcctcgcgcgtggcctggaggaagacctgtggggccggtgcggacagcgaatcggtgctgaaggtgatggccgcccgggagatgctgggctcgccctccagaaggctccacaccagcgcctggtaccaatccaggtcgtcctgcaagttctgctcccgcgacttattgctctgcagcatcacgttgaggaagttggtggcgtgtgtcagtgtgtccagcgcccggtgcaaggaggggtgcgcgctggcca

SEQ ID NO: 18513 - DNA, 1366 bp, Artificial sequence
  DNA replication origin
ggcggcgcaaggacgggctcggcggggacaagagccacttcaagtggtctccgccttatctggagtgcgagaacgggagttacaagcccgggtggctggttactctttcctctgccatctacgggttgcagcctaacctggtcccggaattcaggtagggagggccggggggcaggggggaaggcaaaagcgaagctttccttccggtcttgtgggtgggtgcacgtgtgaggaaggaacccttggctgtgacgcgaacgcttctcaccctcagagtagagacccgggctgagggacaccccacgcgggcgcgggtgcttgggggcaagaagcgccccacgcccgtcagcttccggcgctcggcgaaagccattcattctctcggaccagtttccccgcactgggcgagggacaggcagcccttggcaggacggagacacccccgctgctctgtgcttccctccaattgtccggagagcagggaggggcgttccccaccggggggcgatgcgacaacttggcgagcgccgggtgtgtccgcggagtggcaagcctcagatgagaggcgaaaagggagcaggaggaacagagagttccttgtttctgccactttggggtagcctctgcctgcttcctacgtgtgcagttgggggcaccggtctgttgttagtcagagcttataattaaaactgtgccatctcctcgcagttccggcccctcagcagtgagtcagtcccagcagctagctgtctctgggatccagactttgcagcttggtcagggtgctccttctaccggtctcccctctccccgcaattgatctttccttcctcggtggccttttcctcctcttccctgtcttaggcatacttaagggttctccagcccttcacacactcacatgatttataaaaggacctagttatattcgggagggaggcatcagttgtgactgaattcactcaaggaggctggaggaaacttaagggagtctgtacttcctgtctcaaactatagcatttgagggaagcagagaatttgcaaattaacaggttttaacttctgcctgggaagtgcctgacctttgaggcggggaatttctagaagcaacctttaagagtagatgtgaggaaggaactgaaagagtagttacaccaaagagggcttaggagagggcccaagatgaactgagatcttcccttagtcccatgagggaaggctctggaaagagggtcttgggggctgaggttgcttttgtactttttgggaacctgggcaggactgagaaacctttgtgtgtggattatttattattttttaaataccctgtcacagcaaggtcaggatgctgacctgctgaaagatg

SEQ ID NO: 18514 - DNA, 964 bp, Artificial sequence
  DNA replication origin
aatgcccttcttttttttggtgagacatgcaccccagggactgaacacctgctggtgtacttttctccctctgccatcaccccatgtagtcagctcctgtttcttctacagatctttcagacctcaactcctccatcgctctcaatgaagccccttctatgctgtcagtcatggccacatttattttctatgtcctattgcagttttgggtatgttccctgtagcgtggggcttctcagcatgtatgctgtgagcttgctggactagatgattcgttggtgtggagagggctcctgtgctttgtaaatggcatccctggcctctgcccactagttgcaagttgtgacaatcaaaaatgtctccaaacattgccagatatcccctggggggaaaaattactcctggtggttgaaaaccacaggtaggcagcttcctctactgcagtctgtgacgtgtgtttttctcaaaaacctgaatacttcagagagcaggaataatggggggtgtgtgtgagtgtgtgtttgtgggggaggggcatgtgtatatatgtgagtgggggtgagggtatgtgcatgactgtatgtgtgggtgtggtgtgtgttgggttgtatgtgtggaagtgtatgcgtgcggtagttgtgtgtggtaggtgtgtatgggggtgtcgtgtatgtgggtgagtgtgagtgtatgtgtgtgtatgtggtgtttgagtgtgagtgtatgtgggtgtgtgtggaggtgcatgtatgtgtgggggaaatgtgggcgcatgtatgcgtgtgggtatgtgtgtggaagtgtgtgtgtggtgtgtgtggaggtatgtgcatttgtgtggaggagtgtgtgggagtgtgcgggtatgtgtggggtgtgtgggtgtggtatatgtgaagatgtgtgtatttgtttggaggggtgtgtgtgtgtgtatgctgaatgagagaatggtaaaaaaata

SEQ ID NO: 18515 - DNA, 1501 bp, Artificial sequence
  DNA replication origin
cttgccttagagggaggggtgacaatggccagcattctgagtctggtctatccactacactcctattttcccccagaactcagccagagcatctcttcaggacacgttcctgacctccctgtctgatttagatgatcacttttatttcacgaccccacatataactctatgatcatgtaaagtaccgtgatctgttctttctgatagatgttagtcagcctgatagcaggaaccacttcttgtctggctttgcccaggccctagcacagcatctgaaacacattagatgattaataaatgaaagaggttgagtggataaaaaatgccccagatactagaatagtcagggaacgctttattgttgaattggatcttgcacaggtccctacatttaatctgattacattgggctttttcaagcttatcagattgttttctcttaatttcaggtaggcgggcctcaatctcatggcaaactgagcacatgtttctctgaccctttctgtgagctctttgctccatcttcactctctccaatcacccccacttccccaccgatctttccacatacacaactttaaaactttccccaggtatctagatctgtccaaattctacccaagagtgcagggcccttgaagccaagtggaaaacaaaaagtcaaaagagcatcaaagaagtcttgaatctgggatagtcaactaagagtgttggaacaaaggaagagatggtgagagggtagagagtttgcaattgggatcgtggaggggtggtggccctggacacagggcagagcatggtggaaggagaggctgcaggaggtgaagaactggttactggaggagaggaaggtagggaagggaggccaggggattggagggggcatttgtggtcactgactcaccaaggagcctcatgaggatggcactgaacagactgtgtcaaggaagaggtgctaaccttattgagagatgagaggagctcaactcagtgatgcataaagggacgtagcaaggaggggtggtgggtggtagtctgagaatgtgaggactgtagagggaagaggaaacacggtctttagtcactgtgaggggcacacccaaaaccaatgtgggatgtggagaggaaacagctgccccttcgaggggccataagaggcagaggcctcagagcagcaaaacagtaaagggacccatcagagaggtggctgaggatacaaggattttacctaaaactgactgtgatcccaaagggtgtggtggcagtgtttcaaaagtcgagggtgatgggaggtggggtcagggtagcagaggggcttcacatgttggggtgacatggagtctaggccttcctgtggataggagtcacatgggagagagggcacaaggagatgcctccgtggcctcaacaaggtcagtgcttgcgaagcttcagggctgggggcagggaatggggttcttttcagagacatgcagagctttggggtgccctgttcgtgcct

SEQ ID NO: 18516 - DNA, 922 bp, Artificial sequence
  DNA replication origin
gagaagagagagagtagagacacggagggaagggtttcaggggttctaaccctccagaaaagcgggaaaggggtcggggcatggaaataaggttggggcgcagagataagaggtcagggtgtggaaataagggattggggcacggagataagaggtcggggagcggaaataagggatcggggcacagagataagaggttggggtgcggaaataagagatcgggggttcttgcccccagaaaagcagagaaggggtagagacacagagagaaggggttggggggttcttgccctctagaaaagggggaagtggtagagacacggagagaaggggttggggagttcttgccccctagaaaagcggtacttgccgctaagggtgaaggaccaaggcaggcgtccccacgtggtcagacacctctgaaacgtgggtgaataatcagagaggcgtccctgcaatgattaaacaccaagggaaggctgccttcctgagtctgtgaccggcgccagagttttgagtccacagataaaacatgtctcctttgtctctattgaaattaagagaagggagagattgaagggtggtgccaagattgaaaggagaaagcagttgagggatagtgagagaggttggagaagagagtaagaagaggccgcttacctgatttaaaattggtgagatgttccttgggctggtgggtctgaggacttgaggtcgtaggtggatctttttcacggagcaaagagcaggaggacaggggattttatctcccaagggaggtctccggatccgagtcacagcaccaaatttcatgcgcatccatgtgaagagaccaccaaacaggctatgtgtgagcaaaaatgctgtttatttcacctgggtgcaggcaggctgagtctgaaaagacagtcagtgaagggag

SEQ ID NO: 18517 - DNA, 1271 bp, Artificial sequence
  DNA replication origin
tacactgctatttagctgcctctactctaactctattattatacaccttgaaggtgaggttaattaattcctgttgtggggtttgagggctggaatttaatttttggagttttatttaatgtcaggagcagattgggtaataaaatgtatattgagaataagacggccttttgactttttagggtctaagggctgtaaagcgtctcagggttgctgccgaacgagccatgaactgggctgggtttttcatatttgatgaaagagcctaaatgctcactgatttgggagaggtcagataaagaaaaacgagcattaactttgactatgcctttagcttcaaccacctttttaagaggaaattgctgggcgggttggggagggctactcacagaatgaaactgtaaactggaccgggtgtgaggaggggaggtgataaaaagattatagggtggaggagtggaggctgaggaagaattgggacttagctcagcctggcgaggagcagcctggggagaagggaagaggtcagatgggtctgtagaaaaggaagattagaaagactcagtgatgcttggggttgggactgaggggacaggcaggagggaaagaaggaagatttgggacgagttgcactgggcacagagactagggagggaccgatgtgtaaaagaatgcctgggtgtcaggcacctcagaccgtttgcctattttacaacaggaattatttagatcttgcaggatggaaaaattgaaagtgccgttttctggctatttggaactactgccgagtttgtactggggtcaagtggcatcgcagaagaaaataaggcatttaggttttaggtcaggtgtgagttgaagaggttttatgttcttgagagcacaggctaagggagacagaggaatggagggtggaaggttgcttatagtgaaggaagcaagcctagagaagagagagagtagagacacggagggaagggtttcaggggttctaaccctccagaaaagcgggaaaggggtcggggcatggaaataaggttggggcgcagagataagaggtcagggtgtggaaataagggattggggcacggagataagaggtcggggagcggaaataagggatcggggcacagagataagaggttggggtgcggaaataagagatcgggggttcttgcccccagaaaagcagagaaggggtagagacacagagagaaggggttggggggttcttgccctctagaaaagggggaagtggtagagacacggag

SEQ ID NO: 18518 - DNA, 1076 bp, Artificial sequence
  DNA replication origin
gtaagctgcttttttaagcccttcaactaggcaggaaaccatgtaatcttgcctagctatacctggggaatttgcctggtagttccattggggatccttttggggaactgctctaatgccttcctggaggtctggctcatgaagccggcagttatcagcatgagattgggctagagaaaaaactctttcccgttcatctggggagagggtagaagtcaggatgacacttaagtcactccaggttaagttgtaggacagagttagatattggaattcctgtatatatttagtgcggtctgatgagaaagagccttaacgttgactgatctgagagaggtctgatagagaaaaaggtacatgtaccctgactatgccttcagctccagccacctctctaagaggaaattgttgggcaggtggggaggagctagtcgcggaactaaactgtaagccggaccgggtgtgaggagggggggtggtagaaggattataaggtggaggagcggaggctgaggaagaattgggacttagcttggcctggcgacgagcagcctggggaggaggggagaggtcagatgggtctgtagaaaaggaagactggaaagactcagcgacgcttggggttgggactgaggggacaggcgggagggaaagaaggaggatttgggaggaatcgcattgggaacagaggctagggagggaacaaagtgtgaaaaatgcctggacgtaaggcacctcagaccatttgcccatttttcgacaaaaattatttaggtcttgtaggatggagaaatcgaaagtgccgttttctggccatttagagccattgtcgagtttgtactggggccaagtggtgttgcagaagaaaataaggcatttaggttttaggtcaggtgtgagttgaagaggttttaagttcttaaggacacaggctaaaggagaagaaggaggaatggagggtggaaggttgcccatagtgaaggagacaaaccctgagaaaagagagcgtagagacatggaggaggggagtggggttcttgccctccagaaaagcagagagggggttgggacacgga

SEQ ID NO: 18519 - DNA, 1082 bp, Artificial sequence
  DNA replication origin
ctcagagagccccgggcccgccctgcaagccccggggtccaaggaagcggggccgtttccagcgccgcgcgggcgccgctacccaccgccgccccaagccagtcccctgcgctgtcccgacacgtacctgggcgggaagccgggcgcctccttatttctttacgggggcgctggctacgggcgctccctcgaggggcgggcaggggcagccgagcaggggaagaactgggccgcctgtagagggcgggccgaaggtcggcgggaggatctgacctgggtcaaccgagccgaaggggccccttatcccggctcgcggggaatattcttcctctcgccgctctctccactgcccgcaggtggaggccgcgccatccgcgccatccacatcctcgcagggcccttggctggctgccgaggggcttcccgggactccggccgcgcttccttggcccggagcccggcgagaagggagtggggcccctggatcctggagccctcatggactggcccagtgcctggagcaaattctgctcccggccccgcgtagtatcttcctcccaggaaattccccacactacgagggtctcggacccggaaaatgtaatgggtttcaggtccaagagggatagtgagtggctaatgagatcgctcccagggtccagttcccttttgcagactgctaaggagtttggggctggggctgaagttaaaggcaagaacttctaccctcgggaggcagcccgttagtcaccaaccctctacttggtcctttgcaatcctttccagaccttctgtggtctcctgtcacacagggctcacctggggggaccctgatggccagattctcttgaacagtctctagggacatattgggtattgctataccttcatccattgaacaggtgagaactacaaccaaaacatcctttgattctgttaattatctcaatgggtctgtcgttcatgttatctaaatgagaattatagaagagaccaaagagaggtcatctaatcctaatcaatgcatatcttaaggaaaaaatgtgatgttaaaaatctgtttcaaaaggtcattcagtata

SEQ ID NO: 18520 - DNA, 976 bp, Artificial sequence
  DNA replication origin
gcggccggagtcccgggaagcccctcggcagccagccaagggccctgcgaggatgtggatggcgcggatggcgcggcctccacctgcgggcagtggagagagcggcgagaggaagaatattccccgcgagccgggataaggggccccttcggctcggttgacccaggtcagatcctcccgccgaccttcggcccgccctctacaggcggcccagttcttcccctgctcggctgcccctgcccgcccctcgagggagcgcccgtagccagcgcccccgtaaagaaataaggaggcgcccggcttcccgcccaggtacgtgtcgggacagcgcaggggactggcttggggcggcggtgggtagcggcgcccgcgcggcgctggaaacggccccgcttccttggaccccggggcttgcagggcgggcccggggctctctgagcgcgaggctgccgcgaccgcccgcccgcccaggtcagatccggaggacctgtgtgtttgtcggggcctggggtgagagaggggactcgaggggagaagtagagcgggaaaccaagagggggaatgtgaggcttgaacgagctggatgggagagctcgaggggaggagagggatgaacttgagggggaaacgggggcgggggtgaactcgagggggagccaggaggagggaacgggaagggtgaacctgaggggtggacttgagggaagatcttgtgggtgaacccgaggagggaacgcgaggggatagtgaggggggatctcgaggagggaacgtgaggaatgaacttgaggagggaacgggaggggtgaacgtgaagtggaaacaggaggagggaacgggaagggtggcgtaaggggtgaaggaagatctttaggggtgaacttgggaaggaaacgtaaggggaggacctcgaagagtaacgaggggcgagaactgagggggccctgcagggagactggagggaggaggcgccgag

SEQ ID NO: 18521 - DNA, 1026 bp, Artificial sequence
  DNA replication origin
gggagccaggaggagggaacgggaagggtgaacctgaggggtggacttgagggaagatcttgtgggtgaacccgaggagggaacgcgaggggatagtgaggggggatctcgaggagggaacgtgaggaatgaacttgaggagggaacgggaggggtgaacgtgaagtggaaacaggaggagggaacgggaagggtggcgtaaggggtgaaggaagatctttaggggtgaacttgggaaggaaacgtaaggggaggacctcgaagagtaacgaggggcgagaactgagggggccctgcagggagactggagggaggaggcgccgagtctggcgggtgtcgcctcggagacctgtggcgcgcgcgggctttgcggcgccgcccacaggtggcgctgggtcggcccgtccctgagggaactgcgttccgggtgatttctcagaacaagcaggtcggtggagctgggctccctgcaaccccaaatgcatccgtaaaggagttttaattttaaggagaaagagcagacaagaaaagtatgatcattattgagaaatagagaaacctaccaggaaaggatgtcctttcaagtctgctcaccaacagctctgttctgttctccaagtagttgctaactcgcaccttgctactatcccccttccagaaaaaaaattttattattgttagaatggaaattggccataagccttgaaatgactgttgtaatgccactgaaccctacacactaagcgtttttgaaaactcaaaagaatcttcatttctggttgtttctagttttcttggtgaattaactaattgtacaggtgcacttaaaccttcttaagcatttttataattcagacggatctggtagcttgagagttgtttaatgccagcatatgaaatgaggggctttaagttccttgttcattgtgtaaaagtgcgaaaacttagttactgaggaataaactatttgtcttgcccttctacctagaagtttctaagttcaacttctgattattttccccagat

SEQ ID NO: 18522 - DNA, 1819 bp, Artificial sequence
  DNA replication origin
catttgagggaaagggagcccagtggggatgaatgagggggcggcggaggaaaaaaacacgagagagggagggagctgagtcgtgaggatgcgaggcagaccatgcacgccagctggagtcagagtgagggggtgggaggcgtgccagcgcgtcctcgggcgagccagaggcgggaagtgcgggcggccgctgtcccgggtgctgccacagccgctgcgcgccagcgtcagcgaggggcagactggggagacctcggcgaggcgggaagcgtggcccagaggagttttctgtgtgcatcgattggggttttgtttgaggtctggctccagctgaggggaaggaagcggggttcccgcgccgttttcctccaagcaggtgctgaggtcactgcgacctcgagagctcgcgccccgggcgggcatcaggcgccgttcacgagcctggggaggggacggcgggggaagggctcctacccgctgatgggctcatttcagcgccttggtagaacctgacgcctgcctgctgaaccgcgccgtacccgggggcgcaccgttcctgcgtagccaagggctagatcgcgggacccaccgtccaggctctgagtgacggctggggagaatgactgctgattgaggcaattaaaatccacgctggagtctactgaggacctcgggctggggaaaaaaaaataaaacgaatggaaacttcttggaagagaatgaggcagagcggccagagtcggcaggattgatggcgggtgggggatggaatcagggcatttggtgaccttggcccgcggaggcgtggaagcgcccgctgcttgcgtgtaagggggatctgtgtgcgcctgggaggggagaacagggtttccaactaagcaatctcggctttacaaatccgagtaggaaagaaggcatcgcctgcagggccctcgttttaaggggcttcaaaccaatgccccccctcgcccccagagaatcttcgcggtagcgggtgacccggaagcgcgagattggttctctctgaggcgtattaggaggcggtttctctttttctaataaagaaaggaggagaaagtcagaatcgttctgatgatttcctttctacaaaaagctattgcagacagggaggacgccctaaggattgggagccctttgacagtttgcgctgcgttctcctggcagtggagatgaacttcaagtgcacctcggagctccggggctctgggggagacggagggagggagagagaggaaagggctgaggtcggcttcccgaggcggctgccttccccgcgcctggccagagcgcctgtcatttccattgtgttcacaagtcgttttatttctctgacctcctgaaccagccaccaaagctgctaacaaagcagagacccggggatcccgtctgggcgagcacccctcgaccctcgcttagaagggacatcctggggcccatgctggacgcatacaggcccaagtcctgtgtgctcgagcataactgtccctggtcaattctctccacaaagcgctgtcttcttctcgcgtgcctgagtccaggggttccctgaggagtcatgggatccacactatggcaactgggcccaggcgccaggatgagagcaggaaaccagtcgggcgttgatagcgtcctgccgaaggctggcactgagcgtgctaggtgaagtctgttccaggctgtgggagcccgggtggtcgaaaactcagggctcagtttggctcctctttcttgctctcctggctctgacactctaggtcaccacaataacaactccggaaacctaaagacttgtggttca

SEQ ID NO: 18523 - DNA, 926 bp, Artificial sequence
  DNA replication origin
tctggtacaatggctcatacttataattcattcactttaggaagctgaggtgggaggatctcttgattacaggagttcaaggctacagttaactatgaatgcgctactgcactccagcctgggtgacagagcaagactgagaaagaaagagaaagagagaaagagaaagaaaaacagaaagagagaaagagaaagaaaaagagaaagagagaaagagaaagaaaaagagaaagagaaagagaggaaaggacaggaaaggaaaagaaaaggaaagaaaaggggaaagtagagaggacaggagaatggaaggaaggaaggagggaaggaaggaagacagggaaggaagggaaggaagggaggggaggagtggagggaggaaggaagagagaaagagagagaggaaggaaggaagaaaggaaaagaaaggaaaggaaggaaaggggaaagtagagaggacaggagaatggaaggaaggaaggggggaaggaaggaaggggaggagtggagggaagaaggaagagagaaagagagagaggaaggaaggaagaaaggaaaggaaaggaaaggaagaagggaaggagtagagggagggaggaaggaagagagaaaggaaggaaggagggaagggatgagggaaaggaggaagcgagggagagagggaggaaggaaggaaggagtgaaggaaggaaggaaagaaggaaggaagaaaggaatttgagggagacatatgaactcaacattgaactggacacctgaatatttgggtttctttcccaattctttcaccccataatcagtttctaaaacttcaacatccacatgcaatagtcccagtagtgccgtacagattcaccgttcaatgaaagatgaagccacctgaagttgtccttttcatcatcatctttagggctcacatctggcaccta

SEQ ID NO: 18524 - DNA, 772 bp, Artificial sequence
  DNA replication origin
aagccagccctcgggaaccaccacgacccggcagtgccccgggccccgcacgcccccaagtccagcctgcccccgccccctccggtgcggaggtcctccgacaccagcggcagtcccgccacgcccctcaaggccaagggcacaggcggcgggggcttgcccgccccacccgacgacttcctgccgccgccgccaccgccgccgcccctcgatgaccctgagctcccgccgccgcccccggacttcatggagccgcccccagacttcgtgcccccgcccccgccgtcgtacgcagggatcgcgggctcagagctgcccccgccgccgccgccgccgcccgcgcccgcgcccgcccccgtccccgactccgccaggccgccccccgcggtggccaagaggcctcctgtgccccccaagaggcaagagaacccagggcaccccggcggagcaggaggcggggagcaagatttcatgtcagacctcatgaaagctttgcaaaagaagagaggcaacgtgtcctagggacgggcatgatgagtgttccagagggagaagcatcgctgaccccgagcgcaggttttgctagcagattgccctgacatcttgttcatttcagataaaatgtgatgggaaacttctcactgatgtgctcaagtacaggcataaccattaacccagtagagttcagaatatctgcccaaatgtacatatcgttcccatgtattttaacctaaatggaatgtatcttcccttccaagctgcctaaagcgct

SEQ ID NO: 18525 - DNA, 1156 bp, Artificial sequence
  DNA replication origin
cgcctcccgggagcggctgcagtccccgttggctgcagacgggcagacacccgaagtgtccgcgccggcagccggaccgcaagcgaggaagagcgaaccgcgctcccgggcctggccgaagcgcttcctgtgccaggtttccggctccgggtcccgggaggaggatcgcgggccagaggcggagccgccgccctgccgcgactttcagactccgaccatggcctcgcgctggtggcggtggcggcgcggctgctcctggaagccggcggcgcggagccccgggcccggctcccccggccgtgcgggaccgttggggccgagcgccgctgccgaagtccgcgcgcaggtgaggttgggaggcgcgcgcccggcggggctcagaggtcacggctccaatgacagcagtgggcggaatgaatgggagcggggagcacgtgcgtcgcgacgcgggggcgcgcggggtagctccggggtagctccggggtgggactccggagctgaggggtgctcgcggtgggacggagccgcgcgttggactgaagtaggggcgccctacacggggttgcagaaagcggtgtcctggggaccccgggagcgttttggggggtggagaaagcggtgggatccgtgtcctgggggaagcgcaggagcgatcagattgaccgctgctatatggacaaggttaagcctggagagcgactgcagctatttactttggagttagaggaagacagatcttgcctgaaattttagagccaaagtgctcagagctctctccgagaaacggaggatcgaatcggcctcggaatagtccgaaaaggtcttgtggagaatgcagggctggtgctagggtggaccggaccttagttgtccagcagtggcctcgggaggagagcacacctggatggggctggaatgacactggaaggagaaaggcccgaggccgtcaggaggagagaaaccctggagtcatctaaagtcagaatctcagcgatagcccattctttcagggtctcctctgctgcctttgggttccgatctcctttttctccctttctggtcagtttagcccctgtaaatggacactgtgagcccttctgcgctttgtaatgattctcagtgtgccatggggtaggcccatgctattagcataacc

SEQ ID NO: 18526 - DNA, 781 bp, Artificial sequence
  DNA replication origin
ccagagcggacacatcggtccggcctcggtttcccccttctgaacaaaagcgcgcacagtgtgctccccgcaccaagccgggactgtggccccctttccccgcttcccggaccctcctctggggacagacggaccgcgcgcgtccttgccgcggcggcgggtcgggtgggtggggtttgctgcactgctgctgcggcggcggcggcgccagtgggtcctccggtgactctggggcggggctgtggggagggcacggactgacagacggactccggcggaatggggggtgtggctgctccgccagggtccccagggtgggagagcggctccgcggccaccgatgcccggaccccctctgtcttctgctagacatgctcttcctctcggtgagttgttttgctgtcgtcgcgggccggattcgtggccttagtcacgccccgggggaggaggaaggagccgggccgcttcgatctgtgtggcctggatagggcagggcaaaggggaactgacccgcttcgctcccgggcctcctccttttggggcatgttgatccgcggctgcgctccatgttccagtttcatgcaggctcttgggaaagctggtgctgctgctgcctgattcccgccgacagaccttgggaccggggccaacactggcagctggagatggcggacacgagatccgtgcacgagactaggtttgaggcggccgtgaaggtgatccagagtttgccgaagaatggtacgtgcgctgggccccggctgtagacgcctcctgcaga

SEQ ID NO: 18527 - DNA, 951 bp, Artificial sequence
  DNA replication origin
accctggaggctcatctgagttcacccggagttctggaggcaggctgccaggatactgtgtatccatactcgaatattcatcctgcaaagtctgtttctaacgctgtggtttggataattgctgtggaattccaacaatatcagcaatgctccaatgctgagctagatctttcttcaggttcctgggtgaaacaaacaataaataaatttggttggttttgaaaccttactgtctagtggaacaagtatttcatctgcctgatgacctgcagccccatctagatctgcagtttgaaccttacttttgaggcgaggaggctgaactagggtctggttctgatccctgtccagcattggaaccacctctgggagcctttcttgcagagtcagcttgtcattgaaatcctggtgtgcaactgagaactgccctggccctaggggcagctctccagctgaatccgtgtccaggaatggaaccaaattttcagttgattcctggggtggggctgacatctgcgaggaagcagagggccccaggtaatcaaagtcccccggatctgctggggcaataggggcatggggagattcccatgggagatgggaggagcggaagaccagggctcaggcggcccccgggggttagaggtcagctggagcagatccttgacccactccagaggctgagcctccttgactagtagccacaatagttgccacgtgagcaggggccataggccccagaaacacagccgggacatgacacatgctggcaccgcgcagtgagcgagagccattctggcagccccgaaacgctcgtgtcccttataagcgtgcgccctgccctgtctttatgacacctttatttaatgccacctttattaggctcgggtctaaatctgctccatgtcaccatggcaatcttatgtcacaatcctgtccaagcaccccttc

SEQ ID NO: 18528 - DNA, 895 bp, Artificial sequence
  DNA replication origin
tgatccagagtggggccccagcgattcggattgagccttctccctccacccgcttcggcaggccgggtctctaccgcccaggcgcccggcccctcgggcctcctcgtcaggccccggcgctccccactgcctccactgcgcccgccgctcctcgtccgctttcccttctcccccggtctcagccgccgccgccgcacacgtccgaacccatcgggggctcagctagcggcaacgcagtagcagccggggcaggtgggccgccgccaggatgaggtggcgcccaagacgcggctgagctcggccagggtgggcagcagtagttggcggaagctgccgctgccttccgcccccacacacgcacaccacaccacacacaccagcgcccctggcggcggcggcgggggcggcggggctggggcagccacctggcgtgcaccaccgaggccctcggccgttaacaaagtggtatacgatgacctcaagagcgaggaggaggagtacggcgacgctgaggagacccaggagtctgaggacaactaggaggatgagatggaggaggacgacgatgacttcgattacccttacccggaggagctggaagacgacgaggaggactccagttactgcagggaaagcaacttcaggagccatagtacctacagcagcacttcaggctggaatgcaatgttgcgatctcgcttcactgcagcctctgactcccaggttcaagcgattctcctgcttcagcctcctgagtagctgggattacaggtcagtttctctccctggaaggaagagtattctcggatttcaaaaaaaggaggaagagttcaggctgccagaagtggactagcacttctgaatatccggaggcgaggtcgcctgacttccttgg

SEQ ID NO: 18529 - DNA, 1058 bp, Artificial sequence
  DNA replication origin
ataacattaggagaaatacctaatgtagatgacgggttgatggatgcagcaaaccaccatgccacacgtatacctgtgcaaccaacctgcacgttctgtacacgtatcccagaacttaaaagtgtaataaaaagaaataaaatttatcctccaagtgaaattactataagaagataaatctaacctataaataaataatcgactatttgggaaagttaataaacttctcaacacacaatagaattaaggaagataggctgggcgcagcggcttatgcctgtaatcgcagcactttgggaggccgaggctggcagatcacgagctcaagagattgagaccatcctggccaacatggtgaaaccccgtctctactgaaaatacaaaaattagccgggtgtggtggcctgtgcctgtagtcccagctactcgggaagctgaggcagtagaatcgcttgaacccgggaggcggaggttgcagtgagccgaaatcctgccactgcactccaacaggaaattaataacaaaaaagagacagagagggtgtggagagagtgtgtgtgtgtatgtgtgtgtgtgcatgtgtgaaagagagactatgggggtggggagtgtgtgtgtgtgtgagagagagagagattatctctgcttcttttgtggaaaagcagccccgcctcctcctgctgatcagagtatatgaatcctgccccagtggtgatgtatttcttgtcttttggttactggacccaaagaatctaaagcacccaacccataacctttagagaacaggacttgcctgccttccagatcccagagctgcagtgatgagaagcacaggaaaaccttagaagattattgggagcatttgtaactggggacactcctgtttctacctctcagtttcctgtagattcttcctatgaagaactactatataaagatctgtgattgaatatgtataaaagatgatgcctcctgctttcagaatgtctcttttggcatagtacctcctttgcatcttgagaagatttccccagggctccatgagtccaactgcggct

SEQ ID NO: 18530 - DNA, 1375 bp, Artificial sequence
  DNA replication origin
caagtccccaccagattagctagatacagagtgctgattggtgcatccacaaacccctggagctagacgtagagtgctgattggtgcatatacaatcctccagctagacataaaagttctccaagtcgccaagcgactcaggagcccagctggctttacataggcctggtggatcctgcgccatgggccgcgggcggagctgaccttcagtcccaggcggtgcgcgggcactccttagcccttgaggggtcaatgggatctggcgctgcagagcagtgggcagtgcgcccatggcggggaggagccaggggaggagcgggggaagagggggtgggggaagcggggcgggagcggggggggcggggcgggagcgggggaggggggcggggcgggagcgggggtggggggcggggcgggagcgggggtggggggcgcggggcggatttgggcatatgccgcaggctgcaggtcctgagccctgacccgcgggtaggcggctgaggcccagtgagaattcgagagtggtgcgcgcaggccggcagtgctaggggtcccggggcatcctccgcagctgctggcttggtgctaagcccctcactgccctgggcactccaagtgcaggtcccgccgagcccacgcccacccggaactcacgctggcccgcgagtgctctgcgcagccccagttcccacccgcgcctctccctccaggcctctccctccataccttccggcaagcagagggagctggctcaggcctcggccagcccagacaggggctcccacagtgcaacggcgggctgaagggctcctcaagcgtggccagagtggaggctgaggccaaggaggcacggagagcgagcaagggctgctagcgtgttgtcgtctctcagggggatggagtctggctctgtcacctaggctggagtgctatctctgcttactgcaacctgtgcctcccagctcactgcaacctttgcctcctgggttcaagtgatcctccggcctcagcttcctgagtagctgggattacaaacatgtgccaccatgcccagctaatttttgtacttttagtagagacagggtttcaccatgtgggccaggctggtctcaaactcctgacctcaagtgatccgcccacctaggcctcccaaaatgctaggattacaggtgtgagccactgcacctggcctgttttgggttcttttcttctctttttgaaagtgcaaaagttgttgggaattgaatagtttcgcctaaaggagcttctacctgcagagaagcttaggcttgcaaccagtgagaaaggggcttatgctaataggtatatagcctgggcaacagcacaaaaactctgtctcaaaaaaaaaaaaaag

SEQ ID NO: 18531 - DNA, 941 bp, Artificial sequence
  DNA replication origin
cgcccggccacccgccccatccgggagggaggtgggggggtcagccccccgcccggccagccgccccgtctgggaggtgaggggcacctctgcccggccacccctactgggaagtgaagagcccctctgcccagcaagacgccccgtccgggagggaggtgggggggtcagccccctgcccggccagctgccccatccgggagggaggtgggggggtcagccccccacccggccagccgccctgtccaggagggaggtgggggggtcagccccccgcccggccagccgccccatccgggaggtgaggggtgcctctgcccggccgcccctactgggaagtgaggagcccctctgcccggccagccgccctgtccgggagggaggtggggggtcagccccccgcccggccagccgccccgtccgggaggtgaggggcgcctctgcccggccgcccctactgggaagtgaggagcccctctgcccagccaccaccccgtctgggaggtgtgcccaacagctcattgagaacgggccaggatgacaatggcggctttgtggaatagaaaggcaggaaaggtggggaaaagattgagaaatcggatggttgccgtgtctgtgtagaaagaagtagacatgggagacttttcattttgttctgcactaagaaaaattcttctgccttgggatcctgttgatctgtgaccttacccccaaccctgtgctctctgaaacaagtgctgtgtccactcagggttaaatggattaagggcggtgcaagatgtgctttgttaaacagatgcttgaaggcagcatgctcgttaagagtcatcaccactccctaatctcaagtaatcagggacacaaacactgcggaaggccgcagggtcctctgcctaggaaaaccagatacctttgttcacttgtttatctgctgaccttcc

SEQ ID NO: 18532 - DNA, 1395 bp, Artificial sequence
  DNA replication origin
aggggcggccgggcagaggcgcccctcacctcccggacggggcggctggccgggcggggggctgaccccccacctccctcccggacagggcggctggccgggcagaggggctcctcacttcccagtaggggcggccgggcagaggcacccctcacctcccggatggggcggctggccgggcggggggctgacccccccacctccctcctggacagggcggctggccgggtggggggctgacccccccacctccctcccggatggggcagctggccgggcagggggctgacccccccacctccctcccggacggggcgtcttgctgggcagaggggctcttcacttcccagtaggggtggccgggcagaggtgcccctcacctcccagacggggcggctggccgggcggggggctgacccccccacctccctcccggatggggcgggtggccgggcggggggctgacccccccacctccctcccggacagggcggctggccaggcggagacgctcctcacttcccagatggggtggctgccgggcggagaggctcctcacttctcagacggggcagctgccgggcggaggggctcctcacttctcagacggggtggttgccaggcagagggtctcctcacttctcagatggggcggccgggcagagacgctcctcacctcccagacggggtcgtggccgggcagaggcgctcctcacatcccagacggggcagtggggcagaggcgctccccacatctcagacgatgggcggccgggcagagacgctcctcacttcctagatgtgatgacggccgggaagaggtgctcctcacttcctagatgggatggcggccgggcagagacgctcctcactttccagactgggcagccaggcagaggggctcctcacatcccagacgatggttggccaggcagagacactcctcacttcccagacggggtggcggccgggcagaggctgcaatctcggcactttgggaggccaaggcaggcggctgggaggtgtaggttgtagcgagctgagatcaggccactgcactccagcctgggcaccattgagcactgagtgaatgagactccgtctgcaatcccggcacctcgggaggccgaggctggcagatcactcgcggttaggggctggagactggcccggccaacacagcaaaaccccgtctccaccaaaaccagtcaggcgtggcggcgcgtgcctgcaatcgcaggcactcggcaggctgaggcaggagaatcaggcagggaggttgcagtgagccgagatggcagcagtacagtccagctttggctccgcatgagagggagaccgtggaaagagagggagactgtggggagagggagagggagagggagagggagagcg

SEQ ID NO: 18533 - DNA, 1577 bp, Artificial sequence
  DNA replication origin
cccttcaactaggcaggaaatcatgtaatctcgcctagctgtacctggggaatctgcctgatagttccactggggatcctctcggggaactgctctaacgccttcctggaggtctggctcgtgaagccggttgttatcagcgtgagattgggctagagaaaaaactctttcccgttcatctggggagagggtagaagtcaggatgacatttaagtcactccaggttaaattgcaggacagagttagatattggaattattgtatacatttagtggggtctgatgagaaagagcctaaatgctgactgatccgagagaggtctgatagagaaaaaggtacatgtaccctgactatgccttcagctccagccacctctctaagaggaaattgttgggcaggtggggaggagctagtcgcagaactaaactgtaagccggaccgggtgtgaggagggggggtggtagaaggattataggacagaggagcggaggctgaggaagaattgggacttagcttggcctggcgacgagcagcctggggaggaggggagaggtcagatgggtctgtagataaggaagactggaaagactcagcgacgcttggggttgggactgaggggacaggcgggagggaaaggaggaggatttgggaggaatcgcattgggagcagagactagggagggaatgaagtgtgaaaaaatgcctggatgtaaggcaccatttgcccattttttgacaaaaattatttaggtcttgtaggatggagaaatcaaaagtgccattttccggccatttagagccattgtcaagtttgtattggggccaagcggtgttgcagaagaaaataagacacttagatttcaggtcaggcaggagttgaagaggttttgagttcttaagaacacaggcaaagggagaagaaggaggaatggagggtggaaggtttgcccatagtgaaggaggcaagtttaaagagaagggtagagacatggaaaagggggtggggagcagccctgggctgcaacgtgggtgagcagccaaagcaggcgtccccgcgattgacttgccaccaagggaatgtgggtgaatgatcaaggtaggcgtccccgtggagatcagacaccaatcgaatgtgggtgaataatcagagaggtgtccccacaatgattaaacaccatgggaaggctggcttcccaagttcatgaccggcactggagttttgggtccacggataaaatgtgtctcctttgtctctaccagaaaatgaaaagaattgaaattaagagaagggagaggttgaagtgtggagccaagattgaaaggagaaagaggttgagggatagtgagggaggttggagaagagagtaaaaagaggccacttacccgatttgaaattggtgagatgagttccttgggctgatcagtctaaggacccgaggtcgtaggtggatctttctcatggagcaaagaacaggaggacagcggattgatctcccaaggggaggtcccccgatctgagtcacagcaccaaatctcatgcacgtccgtgtgaagagaccaccaaacaggctttgtgt

SEQ ID NO: 18534 - DNA, 1184 bp, Artificial sequence
  DNA replication origin
tgctttattccctatgtccagtcggcgacctttcccctgaccacaagcgacggaaagcctctgggagcagacaagagatccccgagggaagtttcgagagccagccgcataccctgccaggcctgccaggccagggccactcgagggtgcggcgccagcgggtgagggaagggtagcagttagccccgctgcccagatacgcgactggaatagcagtattcttcaaatcacttgaccttcgtcttctaaacctctaaccttggggtattgggttcaaggtatccccctattcaagataaacctatcgaaatgatctccccatccagaaactgtgtggctcccacttcctgcctctcccaaacactctgggcgcgcgcaaagcaggggcgcaaggcaggaatgcgcagtttggatgcggggcccgggcttggccggggcgtggagcgtccgggcgggcaaacgcgtcgctcaccagggccgcctcctctccccatgtcccagcgcccggcagaatggcgggaaggtgaggcacaagcggcaggccctgcaagacatggcgcgacccctcaagcagtggctttacaagcaccgtgacaacccgtaccccaccaagaccgagaagatactcttggccctcggctcgcagatgacgctagtgcaggtaatcaggacccattaacaccctgatccgttttcccgcgaggggctgaagagcgggaacgcttagagttcgtgtggctctccacgtggcgcttctacctggagagggatggagccgagctgtgggagtttctgaattacctctcaccctcatccctcagttcagtgcagatgctccgtgcaggaaagaatgcaggatgcgctgtcaggtagggaagtgaaaagtaaactgcagacttacgagaaggttcaacattagtgagcatcagaatcgcctggagagcttaaaacacgaatcgctaggccccacctccgagtttcggattcagcaggtctggggtgagaccatcatttgcatctcttacaaggccccaggtgttactgaagcagaggctagggaggaaccccactttgagaaccacgcagtgtgacgctccatattaaggcccagtattaaagctcaggtacagagtaactttcaaaattaccattactgacagctaggagtaggggatagaaagaca

SEQ ID NO: 18535 - DNA, 1252 bp, Artificial sequence
  DNA replication origin
gaggtctgacttcacttccctacgaacacagaccgtagccgtcgtttgatcgcggtggtcacgcgtggtcctaaatgtcacgcgtggcctctgctgcggtggccgaagggcggggcgggggcgttggcgagtgtgggcgcttggcgaggcaaagggtgtgtgtgtgtgtgtgtgtgtgtgtgtgtgtgtatgcgcgcgcgcgtgtgttagtggagtagcagcccatgccgcggctggacgggcaaagggggcgctggcagcgaagctgaggccgctcggaggaaacgggagctgtcccgaggcgcgaggcgaggagatggggcgggcgaagtccgccgcgcgccttggggctgtaactctgcggctccgcggccgcgcggacttgctcctgacgccggtgcgcggcaggcagaggctcagggcctccgcgaccccagaggtgagctgctggctctccccgacagtggcagcagtggcccgggaggtgcgccgaccaagctgcctcctgccttgggcttctgacacctttacagcctctgaaagggtccccggagaccccagagagaggcgggtgtcgaggggctacgagctcgcggctgacacccgcgctgcggaagagaatggcactgattgagggctctggggacctgggtcctggcgccttggaccttaggaccatgcacttcccggggcgcgttgggggatgataggaagattctgggagagaagggggagaagtggtgctttcgtcctgacgccacttaactttttcctgtccttgaacccaacctcaccccgggggaccttggcggacagaagatgcgggggtttcaaccaaaccatccacgatctagaaaacacgaaaatcccccaaatcccggtatggcctgggactcatgagctggggggtcttgtggatacggttggcacattaccccaaatcttcccttccatccaacccctcctgacgccccgagttggggttcctagaggctttagtcttctgctgtgattgaagaaccacgcgcggcctcacgccggtcgcgctccgcagtccggagtatgcctctcccagattcaaactgaaacccagaggctcgtttgggaattcgtttcctttgcctctgcgggtgaatgattcccggttgtagttctggggagtgaagggattggggggatcgatcgcccaggcaaggaagagggcaggtacctgtccggggaacctgcaggggcgggggcgtgtagccaactg

SEQ ID NO: 18536 - DNA, 1342 bp, Artificial sequence
  DNA replication origin
ccgggcgggcgcggacgcttcctctccacccgcccgggaacgtggataccgcgcccgcaggatgttcgccggctgggaccggcagtcaggaaacatgagaaggcctcgctattcctgttcccgggcggcgcgcgccgggctgggtaaataaagccgagacgacggcggtggcggtggtgagcgcgctggagcccgcgtggagaacatgcggcggggatgggagtgcgcctagtctcgaggcgggagagccagccgccctgcagccggccgtcggccccgcagccacaggtacagcccccgcgtcgccgagtctcagccggctgcggcggaacgccaggctcgctctggcccctgcgccctgggcgccggtgctctcccgcccttcccccaacttccctccaaggtctggtggagaggcgctcgggtagcggccaaggctggcccaagggtctgcgcggagcttgggagcccacctggccgcgcctcctttgctttaaaattattcgccggcgttgggggagggggacacttctgcagggagtgacctccccggccacagtctggagtgaatcggggtaagtgatttgagaagaggcgcgggtggccgcgcgcgggagtcctgggagggtcagcaagtgtggttcacacgcccccggaccccttgcgacaggacagcgctcggacctttgccatcgcttgcctctgagcctgctgcctgcagacctacagcgcgccgggtgtctgtgtctgcgatctctgcgtgggcttggggctgccggggaagtgtccgaggtggctaacctcgtgatgacttcgctaggaaaaacacgtcgtcgcatctaggaggacgcgctggggtggctcggagaaggccgggccggggaagggtgtcttgtacaaataaagcagcatgaacacacatccctaagggcatgattttaaaagaaaacaccaacgcgagtcttgactgtagaacaggggctgcaagcacgaaaattctctttgacacttatcaccgaggctatgtgcacaccccaggcacgtacctgtctgcgcgggaggacgcagtcctaggggacacacgacatccagcagaggtctgacttcacttccctacgaacacagaccgtagccgtcgtttgatcgcggtggtcacgcgtggtcctaaatgtcacgcgtggcctctgctgcggtggccgaagggcggggcgggggcgttggcgagtgtgggcgcttggcgaggcaaagggtgtgtgtgtgtgtgtgtgtgtgtgtgtgtgtgtatgcgcgcgcgcgtgtgttagtggagtagcagcccatgccgcggctggacgggcaaagg

SEQ ID NO: 18537 - DNA, 1424 bp, Artificial sequence
  DNA replication origin
gcgggagagcaccggcgcccagggcgcaggggccagagcgagcctggcgttccgccgcagccggctgagactcggcgacgcgggggctgtacctgtggctgcggggccgacggccggctgcagggcggctggctctcccgcctcgagactaggcgcactcccatccccgccgcatgttctccacgcgggctccagcgcgctcaccaccgccaccgccgtcgtctcggctttatttacccagcccggcgcgcgccgcccgggaacaggaatagcgaggccttctcatgtttcctgactgccggtcccagccggcgaacatcctgcgggcgcggtatccacgttcccgggcgggtggagaggaagcgtccgcgcccgcccggccgcgggggctgctgttaacccctagcagaggagccgctgccggggagccccgggcccgccgagtcctccggagccgggcgcggctcccagatccgccggccttgcagtcgtggagcagacggggcttttcccttcgcactttaggagagaaattggagaagctgccgggagcgctcggctccggctccagaagctgagaggctgcggtgcaaatcccgtgtcttagctggcccgattgccggaaatttcactgcgcgtggctaggcgggagaggccactgtgacgcgccctgtattttcctctcgattagctggagggaagttagagctccgttttgcacctacagccctggagcgtattgcgggaagtgctagtgcccaggagcctcttttctgatgtcactgggcttctggggtcctagttgtctcagtcaaagccaggcacacattcacctccggggcaagggctggtgaggctgccctcgccgctgggtatagggatgggggaaagcaaggatgggatgagttcagcccaggtggccaacccgcggtggcccaagtgcagaagaggaagcgcgcccaaagccaaggatctgcacgcagcaaaggagatggaacttagaagaatcacaagctgggacacagggcaaagagagagaatggctaccagattctctgattgatgatactttgcttcctaacattaccgcaaatataagtagcgaaagcggcggtttaggtgcaactgcaagctcagagcttctggcagcccagaagatccccaaggtgccaacacgaagctgcctgcgctctcgccgaaggccctgtggtcctagcgaactttcgccctttttaaagaacaaacttagatttccccccaccaagcttaaagaaatagcgccatttgtccttttcccctctaaatgcggctggccagagccggggcagtggcccaccttagcatcttcttcgtgtgtgtgtgtgtgtgtgcgcgtgtgtgtgtgtgtgtttgtgtgttgggggggtcgctagaagtgcttaaaa

SEQ ID NO: 18538 - DNA, 1196 bp, Artificial sequence
  DNA replication origin
ctgctcacgacctctgtcaaagtcaacctttcccaccgcgtggagtgagttagggtgcacactcgggagttgcataaaagtgtttgagaaagggagatgcaaagttgaataaaagtgtttcccgggaggggccgagcggaaagcagcaggtggccggggcgggtggaacccagcgcgggcgcagagcgtctctggcgcgggcatacggtgcaacgggtccgcgggaatcttggatgcgcggaggtcccgagaccagggtaacggactgggctgcggtcgcggccgggtgaggctgggagcggaaggcggcggcggcggcgcccgggggagggcacgggccctgtaggcctcccacaagggcgccggcgtgcgcggccgcagggcgcgcagtgttgacccgcgtcctagcaacaggcgggcgccgactgcggggggcagggtgctgcaggtgagtgcggctgggggtctccacgctcacccccgcaggggttctgcagccgcccgcgtggatcgggaaacagaggcggctctctggccccgccgctgccgctctcgcctgctcccctttccctcccggggaccaagacccgcccccttcccttctctctcccagccccatctcactccttcctccccgcgagaccctgcctcggccctaggttggggaccgtctgctcctcagtccctgcgcccctctctgcactacctcggccccatcacctcccggatccgctctccacttctcccgccgcttccctgcctctccttcccccagcccgtctttctcctccgccctttgcagctctgcctcccgctcccagcgtggttttcgccgtcccttccctcctcgtccccttaccgaatccattcctggaaacttagggtctcagctctgacgcccccttcttgtaacgagtctggtgggggccgtcatcccacactaggcttagctttggttttacttagggccctgttcatgtcatgtctaaaagttcgattttctgtcggtcttactgagtaacttctgcattctcagaaagcagtgtatgcgcggactccccgtggatgttaccaaccacatttcatagatctcagagctgatggctgcctttccgtagccccctaaagaattcggttgtgcttctgtttaagtgttaacgatgtgattaccgaatgggtttcatttcactaatgat

SEQ ID NO: 18539 - DNA, 1272 bp, Artificial sequence
  DNA replication origin
gtttagggatagtctcgctcgggcgcctgctcgaggctgatctcaggggctccgggctgcgcagggagggagccgccttccggaagaggacggtggggcgcgagggaagccatcgcggactaaataagggaggctgcagcggctgcgcgtgcgcccagaggcgcagcgggagggggtgctctcgggcgagctctccggccgcggcccccgcccctgcgctgtcgggcggggaggtcggaaaccccctggcgagaccacgggcggacgcttcccgaagagctgcctgggctgcagccgcggaagctgcgttctggggagcggggagcgtgctccggcgccttcgggccgctgctggaagccggaaccgagcccgggccgctgcccctcaccggacgccgcgcgccaccggccctccgcggggcaggggctgctgcgagctcgccgggcgccctttagacgtaagtctcaccctgcgccccgaggcaggaaggagcgcgtgcagtcccggccagaaacggctaataggaagggctgaggggttctgtgttcaaggcagaaggccgtgcgtcagggcggccctcagcggagatgcgtgcacggagcggggagcgccgctcggggcagggaatgaaagcggcgcttgagactggaaatttagggagatgagttccttgggaacaacgctgaaccatctcactgccccaccctaccccttgttatttttttttgagacaggtctcgcgctgtcgtccagtctgagtgcagtgacgcgatcacggctcactgcagcctcgacctccggggcttacgggtcatcccacctcagccctctaagtagctggcaccacgggcatgcaccaccacacccggctaattttttaaaaaaagtttttccggagatagggtctcgctgtgttacccaggctggtctcgaacccctggcctgaagcgatcctcccgcctcggcctcccaaagtgctgggattacaggcgtgagccactgcgctcggcttttcacccctttctaacgttttccatccctttctaacgttttccatacccagcggtgccctgcccaccctctctttatctctcacttttccctcctctgtttcttcctcgctgaagtccattggtgaaagaaaattcatgtgaaagttctcaggtgtgttaagtgaaattgctacaaatttgattttatgtactgctgcaggtacattgagagaagaaacgtgaagtataccaaacaaccgttagttgagagtggtggta

SEQ ID NO: 18540 - DNA, 1401 bp, Artificial sequence
  DNA replication origin
gggagatggcccgggagcgccggcgccagtaactgggagctgatgagagtcgccgagggcgcgccgggcccaggtgccggggctgcccgccgcccgccgccgccgccgcctgcgcgcccgcccgcctttcgcggccgctctcccccctccccgacacacactcacaggccgggcattgatggtaatgtatgcgaggaaacagcagagactcagtgatgggtaaattgtcttttcgtttcgggccgggcggcggcggggggcggcggcgggggggctgttcctccttatctggagctggccgggccgccatttttgttgttaaccctgatccggatcgggttggggaggaggagcggccgcgcgggcgggcgggcgggaacgcagtgtggcggggagcgggggcccggcttcgcggcatttcgccctctccggcccttccggaggctccgggtttgtgccgtgtgcgtgcggggctcggcgctggggcgctcggtaggtctcccgcggggaggggcggcgggggccccgttttcttcctccccggccccccacccgcgccgtgtcttatgtcgctgccttctcttcctgtttttcagctgtcacgaccggaggggggactcgcagccttaccaggtaccagccgaggccggggtggagggattggaaggggccggagggggaagggagggactgctactcgagcgcaggcctcagaagtcgatacaggcccttcggtgcaacacatctgaaactagcaccgcggatccccttaaaattccaggtttggttcctttagcgctctccagcaaggtttagtgacttattttgacaggtgactggagggagttcgctgatttaggaaaaaagaatcatttgcagccagaaagacctgactcgattatttgattatttgcgagtgaaggaatcgatgggatgagatgataggtgacttacgaggcttatttatttatttattgtgttgggggaactgaaaagttaatgtaaaggtattaaaattaagtgaagaacttgggtaaatagctaaatgacttacaactttcaagtcggttataaagtactaccctttccccttttaatatttttggtatacttaattgccttacaagtaaaagatatgtgtgcttttgtttctgtaagaattgaggtctttgggtacttggataatcattctgatgtaggtggttctaggtaggtgggttcctttttgttactgcagtcattgtgtgtgaagttctaaggattatgatgaaagtggccccaattttcaggagggaaacctcataatgattgttaaccatcagatgactgcagaaaacactttctacatcttaaaggactagagagcaggtttctaacctgatggttgtgttatacagctga

SEQ ID NO: 18541 - DNA, 1258 bp, Artificial sequence
  DNA replication origin
ggtctccacagcacgcaagggtatccgccgcagctcccgcccgcgccagcccaggtctctccggctccgcgccgtaaatagcgccccgcgccgggagccggcctgcaccgccccgcctcgccccgccccacggcgtccgattggccgccgggctcctgtcaatccgccccgcagcggggggcgggcccagacgcgagcgctgggggacctgcccggcggctccgagcggcgccggcgtctggggcgcccggctggggcgcccggctggtgcgctgccgtctcccgcgctcccccttgcggaggcctgcgcgtcagtgaccttcgcgaggcgccgggggagcccagccccgggaccggctcgggaacccgcctccgagaccctgacggctcagcctcgggtggtcagcgttccccagcgcggggcttcttttgggtgccccccgaaacacgcagggggtccgtgtggtcgtcctccccggccgcactgcgttttctggaacccccaggggcgagtgacaatgccccggcctgtgcaggtggcggaggagggttcgggtgggagcccgggggaggcggcccagcgctggggtctgcattcagccttcgccccccaccccctcagcgtgtccgcctcgagctgcccgccatgggatcaataaagcccagacagactgactgttgatccgttaggagccgctaggttctcccgggtacgcgggacgagtagcgggctagagacacttaacgaaaattagcaaatccaaaagcacccggcgccaacgagacgacactggccgagactgacactcaattaaccaccccccaaacaatggctggcaaacacgccggctgaccctgatcaatatcagccccgcagtgatctcctccttgagatgctaattcatttattagggatcgcggggctgcccttcccaaggtactcaaggtggtcttgctgtagttttgtttccccctccgctttggaaggaattaaggttaaaactcattatctgagggaatgttcttttatcctctccctccaaaacctgagatgaacaaaagtcgaccatttgcaaaattcttcttgagaatctgccagagcttccctaccggatatgtcaaaagggggtggggggtggggaaggaaagaaagagaagcacatttcatgctaaggtgagaattataaagacaaatcctttaggactagagtgcagacatgagctttgagactaagaaaaatgtacatatgtcttgagg

SEQ ID NO: 18542 - DNA, 1012 bp, Artificial sequence
  DNA replication origin
gggtcgtaggctgccgccgagccggggctccggaagccggcgggggcgccgcggccgtgcggggcgtcaatggatcgccactccagctacatcttcatctggctgcagctggagctctgcgccatggccgtgctgctcaccaaaggtgggtgccgggggcgcacggggcccggggtcccgtcctcgccgcggggctttggagccggctgcagaggctttgttagcggcaggcgaggctccctcctgcgccggagccgcaggtcgcgacaagttgctgtgttcttagaagtcgcggcggtggcctggcgcgtggatgcggactccgatctaagggcaggcgctgatcagagggtcctcctggctctgcctgcggggagcggcgcgtttgcagcccagcggggagcggggccggagtctcggcctcgacgccgccgcttccgcaccctgggggctcgggcggccgggaggaatcgcagatcctggcctgtagctgccgcgtgccctcagcgtgtctgtgtgagtgcctcagggtgtatttctgtgagtgtgtctctgagtctcagtatccctaaatgcatttttgtgtctctgagtgtcgttgtgtttctgaaagtgtgtctgaacctctgtatcactcagcgtatctctgtgtctctttgaatgtatctctgaatgcatttctgtgtctctttctgagtctttgtgtctctgaatgtgtgagtctctgtatctctgatcttgagtgtgtctttctgaatgcatttctgtgtctgtctctaagtgtctttgtatctctgaatgtgcatctgagtctctgtgtgagtgtgtctctgcgtacatctctctgtgtgcgagcgagtgtgtgggtctccctgagagtttaggtgtccgaggtgtgcagaagtgtgtgttgtgttgcttttcagcagccgggaggagtaggctctgtcagcgtctcactgccactcacctcatattttacaaacaggaccaaaaaaaaaaaaaaggcagc

SEQ ID NO: 18543 - DNA, 814 bp, Artificial sequence
  DNA replication origin
ccccacatttcccccttttctattcgacaaaaccgccatcgtcatcatggcccgttctcaatgagctgttgggtacacctcccagacggggtggcagccgggcagaggggctcttcacttcccagacggggcggccgggcagaggcgcccctcacctcccagatggggcagctggccgggcgggggctgccccccacctccctcccagacggggcggctgctgggcggagacgctcctcacttcccagactgggcggctgcagggcagaggggctcctcacttcccagacggggcagctgccgggcggaggggctcctcacttctcagacggggtggccgggcagagacgctcctcacctcccagacggggtggcggtcgggcagagacactcctcagttcccagacggggtcgcggccagacagaggtgctcctcatatcccagacggggcggcggggcggcggggcagcggcgctccccacatctcagacgatgggcggcagggcagagacgctcctcacttcctagatgggatggcggccgggaagaggtgctcctcacttccccgactgggctgccaggcagaggggctcctcacatctcagatgatggacggccaggcagagacgctcctcacttcccagacggggtggcggctgggcagaggctgcaatctcagcactttgggaggccaaggcaggcagctgggaggtggaggttgtagcgagccgagatcacgccactgcactccagccccggcaagactgagcactgagtgagcgagactccgtctgcactcccggcacctcggga

SEQ ID NO: 18544 - DNA, 833 bp, Artificial sequence
  DNA replication origin
gggaagtgaggagcacctcttcccggccgccatcccatctaggaagtgaggagcgtctctgccctgccgcccatcgtctgagatgtggggagcgccgctgccccgccgccccgccgccccgtctgggatatgaggagcacctctgtctggccgcgaccccgtctgggaactgaggagtgtctctgcccgaccgccaccccgtctgggaggtgaggagcgtctctgcccggccaccccgtctgagaagtgaggagcccctccgcccggcagctgccccgtctgggaagtgaggagcccctctgccctgcagccgcccagtctgggaagtgaggagcgtctccgcccagcagccgccccgtctgggagggaggtggggggcagcccccgcccggccagctgccccatctgggaggtgaggggcgcctctgcccggccgccccgtctgggaagtgaagagcccctctgcccggctgccaccccgtctgggaggtgtacccaacagctcattgagaacgggccatgatgacgatggcggttttgtcgaatagaaaagggggaaatgtggggaaaagagagatcagattgttactgtgtctgtgtggaaagaagtagacatgggagactccattttgttctgtactaagaaaattcttctgccttgggatgctgttaatctataaccttacccccaaccccgtgctctctgaaacatgtgctgtgtccactcagggttaaatggattaagggcggtgcaagatgtgctttgttaaacagatgcttgaaggcagcatgctcgtcaagagtcatcaccactccctaatctcaagtaccca

SEQ ID NO: 18545 - DNA, 1174 bp, Artificial sequence
  DNA replication origin
cagcttgcaagagaggtgtggagggagaggcgcgagcaggaaccggggctgcgcgccgcgcttgcgagccagctggagttccgggtgagcgtgggcttggcgggccccgcactccgagcagccggccggtcctaacggccctgggcagtgagggacttggcacccgggccagcggttgcggagggtgtactgggtcccccagcagtgccggcccaccggcgctgcggtggatttctcgccgggccttagctgccttcctgcggggcaggcctcgggactgcagcccgccatccctgagccttcccccgcctccgtgggctcttgtgcagcccgagcctccccgacgagcgccactccctgctccacggcgcccagtcccatcgaccacccaagggctgaggagtgcgagcgcatggtgctggactggcaggcagctccacctgcagcccctgtgcgggatccactgggtgaagccagctgggctcctgagtctgatggggctgtggagaacctttatgtctagctgagggtttgtaaacgcaccaatcagcaccctgttaaaacaggccactcggctctaccaatcagcaggatgtgggtggggccagataagagaataaaagcaggcagcccgacccagcagtggcaacccgcttgggccctcttccacactgtggaggttttgttcttttctctttgcagttaaatcttgctactgctcactctttgggtccacgctacttttatgagctgtaacactcaccaggaagatctgcagcttcactcctgaagccagcgagaccatgagcccaccaggaggaacgaacaactgcagatatgccgccttaaaagctgtaacactcaccgggaaggtctgcagcttcactcctgagccagcgagaccacgaacccaccagaaggaagaaactccgaacacatccgaacgtcagaaggaacaaactccagacgcgccaccttaagacttgtaacactcaccgtgagggtccaaggcttcattcttgaagtcagtgagaccaagaaacaaccaattccggacacactttgatctgtgttcactgttttactaacgagattaagaatgttttcacatgtagattgatttaagtgaatcacttgactgtttccatttttatccatctttctgccttttttc

SEQ ID NO: 18546 - DNA, 1161 bp, Artificial sequence
  DNA replication origin
atgatccactggactggacgccatacctaattgcaaaagtcgctggaaaatgtagtctagactgtgctcaggaagaaatggaaaatgaatttcagtgaactaacggcactctccactataccttcctttccttttctagtttttttttttttggggggggcggggggatttctctcttgttgcagggcaatggcatgccttgttgccaggctgcagagcaatggcatggtctcggctcactgcaacctctgcctcctgggtttcagccatcctcctgtctcagcctcccaagtagctgggattacagtcacctgccaccacgcccatctaatttttgtatttttaatagagacggggttttaccgtgttgtccaggctggtcttgaactcctgacctcaggtgatctgcccacctcgacctcccaaagtgccttttctcagttctcaatattttttttcttttcaaacgctatgactccatatccatcaagatagtgtgtccggaattggtgggttcttggtctcactgacttcaagaatgaagccgcggaccctcaagatgagtgttacagttcttaaaggcggcgtgtccggagtttgttccttctggtgtttggacgtgttcagagtttcttccttctgagggggttcgtggtatctctggctcaggagtgaagctgcggaccttcgcggtgagtgttacagctcttaaggtggcgtgtctggagttgttcattcctccccgtgggtttgtggtctcgttggcttcaggagtgaagctgcagaccttcccagtgagtgtcacagctcataaaggcagtgtggacccaaagagtgagcagctgcaagatttattgcaaacagcgaaagaacaaagcttccacggtgtggaaggggacccgagcgagttgccagtgccggctcaggcagcctgcttttattctcttatctggccccacccacatcctgctgattggtagagctgagtggtctgttttgacagggcgctgactggtgcgtttacaatccctgaggaagacacaaaggttctccacctccccaccagattagctagacacagagtgtccacataaaggttctccacctccccaccagattagctagacacagagtgtccacacaaaggttctccaaggcccc

SEQ ID NO: 18547 - DNA, 885 bp, Artificial sequence
  DNA replication origin
ttggatgcggaactggaagagatgaagggccgactgtatacacttaaagacttcagtaatatatcttttcctttaaagtttaatattggcttatttcaaagaaacacaagctcatttcccccgttcgtgatggaatgggaagtttgctccacatttcagcccctttcttggggtggacactggctgggtacgtggggcctgggctcttacaaccagcatttccagcttcgggggaaggaaccaggagagtgagggaaaggccgccccagggagaagaagtggggagtttccatctgtgaagaggcgagatgactacgggaggaccccagacaccttccctgtcagcttcgcatgtgaaaccctgagccactcattcaataactgctggtgctgctggagcaggcccatcgcggcactgtcagaggccacctgagagctaagaaagccccagtcctgctggggagacaaggccctagagggaggggacagaggccctagagggaggggacagaggccctggagggaggggacagaggccctatgagggaggggacagaggccctacgagggaggggatagagactctacgaaggaggggacagaggccctagagggaggggacagaggccctagagggaaaggacagaggccctatgagggaggggacagagggcctacagggaagggacagaggccctaggagggaagggacagaggccctaggagggaagtgatggggcaaagcccggcagggaggagatgggagcctggcattcatggaaaagtggatggtgccactttgcagagttgttttgacaccaaggacattccacggtgaaataaaagaaaccagccattcctatttttcatgttattcacccacac

SEQ ID NO: 18548 - DNA, 1363 bp, Artificial sequence
  DNA replication origin
catggcccattctcaatgagctgttgggtacacctcccagacggggtggtggccgggcagaggggctcctcacttcccagtaggggcggccgggcagaggcgcccctcagctcccggaccgggtggctggccaggcggggcgctgacccccccatctccctcccggacggggcggctggccgggagggggcgctgaccccccccacctccctcccggacggagcggctggccgggcagaggggctcctcacttcccagtaggggtggccgggcagaggcgcccctcacctcccggacggggcggctggccgggcggggggctgagccccccacctccctcccggacggggcggctggctgggcgaggggctgacccccccacctccctcccggacggggcgtctggctgggcagaggggctcctggctgggcagagggactcctcacttcccagtaggggcggccgggcagaggcgcccctcacctcccggacagggcggttggccgggcggggggctgagccccacctccctcccggacggggtggctgccaggcggagatgctcctcacttcccagacggggtggcagccaggcggaggggctcctcacttctcagacggggcggttgccaggaggagggtctcctcacttctcagacggggcggccgggcagagacactcctcacctcccaaacggggtcgcggccgggccgaggcgctcctcacatcccagacggggcggcggggcagaggcgctccccacatctcagacgatgggctgccgggcagagatgctcctcacttcctagatgggatggtggccgggacgaggcgctcctcacttcccaggtgggatggcagccgggcagagacgctcctcactttccagactgggcagccaggcagaggggctcctcacatcccagacgatgggcagccaggcagagacgctcctcacttcccagacggggtggcggccgggcaggggctgcaatctccgcactttggggggccaaggcaggcggctgggaggtggaggccatagcgagccgagatcatgccactgcactccagcctgggcaccattgagcactaagtgaatgagactccgtctgcaatcctggcacctcgggaggccgaggctggcggaacactcgcggctaggagctggagaccagtctggccaacacagcgaaaccccgtccccaccaaaaaaacacgaaaaccagtcaggcgtggcggcgcgcgcctgcaatcgcaggcactcggcaggctgaggcaggagaatcaggcagggaggctgcagagagccgagatggcagcagtacagtccagctttggcccggcatgagagggaaacc

SEQ ID NO: 18549 - DNA, 922 bp, Artificial sequence
  DNA replication origin
aaccgccctgtccgggaggtgaggggcgcctctgcccggccgcccctactgggaagtgaggagtccctctgcccagccaggagcccctctgcccagccagacgccccgtccgggagggaggtgggggggtcagcccctcgcccagccagccgccccgtccgggagggaggtggggggctcagccccccgcccggccagccgccccgtccgggaggtgaggggcgcctctgcccggccacccctactgggaagtgaggagcccctctgcccggccagccgctccgtccgggagggaggtggggggggtcagcgccccctcccggccagccgccccgtccgggagggagatgggggggtcagcgccccgcctggccagccacccggtccgggagctgaggggcgcctctgcccggccgcccctactgggaagtgaggagcccctctgcccggccaccaccccgtctgggaggtgtacccaacagctcattgagaatgggccatgatgacgatggcggttttctggaatagaaaagggggcaaggtggggaaaagattgagaaatcagatggttgccgtgtctgtgtagaaagaagtagacatgggagacttttcattttgttctgtactaagaaaaattcttctgccttgggatcttgttgatctatgaccttacccccaaccctgtgctctctgaaatatgtgctgtgtccactcagggttaaatggattaagggcggtgcaagatgtgctttgttaaacagatgcttgaaggcagcaggctccttaagagtcatcaccactccctaatctcaagtacccagggacacaaacactctgcctaggaaaaccagagacctttgttcacttgtttgtctgctgaccttccctccactagtgtcctatgaccctgccaaatccccct

SEQ ID NO: 18550 - DNA, 1131 bp, Artificial sequence
  DNA replication origin
ggggcgcctcccgggggtggaggccggcgggtgcccgggccgctgcgacggggcgctgcgctcggcccgcggggtccccgagccgtaacaaaggcgcggcgcggccgcggctcccacccacttccgtccccggagcgcgcctcggggaggagcgggccggggcagggtttctctccgcggagtttcgggaagttagcgcggctgcccgttacgctgagagcatggcggggaggcgggtggcccggggagtggcgcgccagtgatcagaactacgacatcgcccggttcctttcccgacaccagccgcaagtggccggagctgcggtggctcccgcgccccagcccggggtcccagaccggcgcctccgcagggcccgcgcgggtttgaacccgatgcgtggtgcgccaggccaccccagctgcccacgtttctgcgcgcgtgcgggctccccgaagggagtggtttagtccccgggtgacagccagcagtccctggcaccccgagtggagctccagaaggcggtaattgcattacagtgagtgagcggcggggaggctccagtccaggccgcaatctgggtcaggtgcgggattaagagcttcaggcgttggcatgagagatcttgtgaagtctgacagtttattgcaatgagaagttcctcacaaggggagaggccagctggggaaattaaaggagctcctgtccgccatccccagccccatcccgaggttgtgataacttgtgcctgtgcaaaccctagcacaggcacgcgttttgtcatagaaatgtcagaggcagcatctctactgcgccagatgtttctcagcatctgaacaggagaggaggaggtggtattgaagagaaacccaggacgttctgcttgctgtgaaccctagcccctcgcagtcaatcgatggaattcacgttttcgtgtcttgtcttatctgcctccacccccttcttctgttggaaggaaagggcaggcactggtttttatgaagggctaatggaccagggactctcccctacacaatgtggaaggctcttcattttctctttaaaccttacaacctcttcccaggaggttatttctgtttcacagatgaggaaactgaggcttaaagaggtta

SEQ ID NO: 18551 - DNA, 1582 bp, Artificial sequence
  DNA replication origin
tgctggagataacgcaagggaggtcaggaggatgggaacaaagaggattcaggctctggggcagaagtcattccctgggtttcctttccaggtctggagaaggacaagatgcagccagagaaggactgtgggtcactgggaggagggcacattcccaaaggggagttagtagcaaatagagggacaaagatggccagatcaggcgtttcttgtgggctggggagcagaagaaagaggctcatcccttgctctagctggatgacctaataaggcttcttccatcttgcttgctttgagtctggcctccgagaggactccctgttctctctggcaggcgctgcagagcccacagtgtttaggatttctgagcgccactgagtgttccagccaaagaccccatgtgactttcctccaagcacgggtgaggggtgcaggaaggaagggagggagaggggtgaagggggaaggggggagggaggggggagatacagagatggggaggagtgcaggagggaggaggggaggggtgctggagggagaagaagggtgcaaggaggaagggggagaggtaatggtgctggaggaatggggagcggataggggtgagggagggagggagaggcatacaggagggaggagaagattgcaaaagggaagagaaggggtgcagggagagaaagggaagggtgtgggagggagggagaaggagggtgtagggagggagaaggagcttcccatttcaggccttggcaccaggctatcagctgagacaaggtggacaggagagggggatcagaacaaatgctagggcccagctgtatctggccagctttcctaaagtagttaaagctaacgagaaaggtaactgagaaggtgaagaaaataaaagactactgaaataggtgtgctctgtgggacacaatgccttcctcaaagagttgacattttagtgtaggaggcagaggataaaccacaaactctgtggggattggaggcatttctgttgtgtttttgtatcagtcatagcacttattcttccaagagctcatttgcccctgcagcagggctgggggctcatgggtggcacctgtttcctggccagagagggactcctccacctggacagagggcaactggtttgtttccaatttcttttaggctcttagcatgctgaagctgggagggagcttcgagatgatgaggacgccagggcctccatgaggggctgccctggtgaacacaggccctggtactgaataagctcttcccggttctaactcgactttcatggtgtcatttttgcgaggtgcatctctgatctgcctccagtaaataaacggctgaaacagaaggttttgagtttgttttttgcggaggaaaggaaggagagcattaaagaacacatttggaagaaaaaatgttcactgagaggtgggaagtcaggccagccagggagagctttgttgcctgtgagaggttcttacatctaaaccaggatgggtttgggggtggggcagtcaaccctggaattcaggttttacatgcaagctgtctttctgacaatctacacatttcacaggta

SEQ ID NO: 18552 - DNA, 1448 bp, Artificial sequence
  DNA replication origin
tgcccagatactgaactaagtaacctgcccccccgcatcctgctctgggtaatgttctcactggggctcccctttcctgagaagagactgtgaccggcatctggggctcttttcttcttaacattatcacctgtttcgcatctcagccacctcaaggacccagggtgccagacttatggcactgggattttagacagaaataacatcatctttgcccatgggggtcttgtgatgtagttgatcaaacaaataggtaaattgggaaatgtagtcttgtcaactttattttggaggctttagaattgatatacaaattaaagcaaaaataaacaaacaaacccactcccagaactcagctcttagaccaaaattaaatcaaaataatttaggcctctgaaaattatctcccacttcctacctctggctctcctccttcactttctgggaaagagaagcaaacaatcaaagaaatagattctctaactcctgatttatttatcctaaacctataggtggatcacttaccttttctggggctgagttactttatcgataaatacaaatagtaataacaacagcaacagatggattgatgaatggatggatgggtggtggatggatgaatgataatagataaatggatggatggtagatgggtggatggatggtggtagatggatggatgaataaatggatgaatggtaggtggatagatggttatggatggatgtgtggtgaatggatgattggatagtagatgaatggatggatggtagatgggtggatagatgaatggatggatgatagatgaatgaatagatggagggatgggtggtagatggatgggtggtgaatggatgatagatgaatggatggatggtaaatgggaggatagatgtgagtggatgaatgatgaacagatggatgaatgggtgatggatggtggatggtagatggatggatgggtggatggattggtggtggatgataattgggtagatagatggttggatgggtggtgggtggatgtggatggtagatgaatggatcgatggtagatgggtggtggatggatgaatgatggacagatgaatgaatgagtggatggtagatggatggacggatggatgggtggtggatggtaattgggtagataaatggtgttggatggggggtggatggatgtagatggtagatgaatggatagatgggagatgggtggatggatagtggatcgatgacgaataggtgtatgaatgggtggtgggtggatgatggatggatggatggatggatggatggatggatggatggatggatggtggatggtggatggttagacagatggtggttggatgggtgatggatacatgaatgggtggtggatggtcagatgaagacactgggcccagctattactcagatacctctctgaggtagatacagca

SEQ ID NO: 18553 - DNA, 1494 bp, Artificial sequence
  DNA replication origin
aagaggtggagaaagagaagaggagagagaaagaggtggagaaagagaagaggaaagagaaggggaggaaaagaaagaggaagaagccaggcgtagtggctcatgcctgtaatcccagctctttgggaggctgaggtgagtggatcaactgaggtcaggaattcgagaccagtctggccaacatggtgaaaccctgtctctactaaaaatacaaaaattagccaggtgtggtgccaggtgcctgtaatcccagctactcgggaggccaaggcaggagaatcacttgagtccaggaggcggaggtagcagtgagctgagatcgcgccactgcactccagcctgggcagcagagtgagattccatctcaaaaataaaaaagaaggaggaagagagaataggagaagagaggaggtgaagaggaggagaaaaggaaagaaggagaagaagagaaagaaggtaaagaggaggagggaaaaggggagaaaaaagaggaggaagagagggtaagaggagggaagggggaagaagaggtaaacaggaggaagagagtgtaaggaagcaggggagagaggacataagaaggaggaagaggaggagagagaagggaaggaggaagaggagaaggagaagaaagcaggagtagagagaaggtgaagatgaggagaggagagagaaggggggaagaaagaggagcaggctgggagaaagaaggaggaagaagaggagagaggagggagggggaaaagaagaaaggagtgggagagagcaggtgaagaggtggaggagagaggaggaagaggaagagaggatgagaaagggatgaggcagaagagaggggaggagggaggaggtggagaggaggaggaggaggaataggaggcaggaggagatgaggaagaaaaggaggaggaggagaagtgaaaggaggggagggaagggaagtagagattgagctgtgctccagaaaccacttgttctcagcattccaagaagagggcctttcccagccagcagaaggagttcaacttttacaaggcaggaggagaacgtggacagcaccagcacctggaagctgttggttcaggtggctgctgcctctccgcagccaatgcccaggtcacacatgattatcagctggctcagggatttgctctgtgaagggtggcaactggtcctgattgggctttgcttgagccttggggggcaagaaagctagatgttaacttgaatgaaagtctttctggctcaccagttaagacggaaaatgttgtgccctttttctgaggaactgccaatatgcttgtgggggcggaggaaactgatcaaagcaaatcaccctcttttttttttttttttctgagacggagtcccactctgtcacccaggctggagtgaagtggcacgatctcagctcaccgcaacctctgcctcctgggttcaagcaattaagcctcccgagtagctgggactacaggcacgcaccaccacacccag

SEQ ID NO: 18554 - DNA, 1094 bp, Artificial sequence
  DNA replication origin
tcagaccacctgacctcagtagcttcactggtgcccaggacctgaaagaatatctcaaatgtaaaatgtaacattttgtaatgttcaagttgttatttgtagagcagttaaggggatatgtaacaggttccgtgtgattctggggcaataggcagcaaaccactatgaggaagggtcagagagcagctgacccccggactaatgctgagtgtgtgcaagcctgctgtatttttgtttctctccctcccttcttccctgattaattttgtaaagtttatagcgatggttttggaaggaaggaaggaaggaaggaaggaaggaaggaaggaaggaaggaaggttggttttggaaggaaggaaggaaagaaggagggaaggagggagggagagaaggagggaaggagggaaggagggaaggaaggagagaaggagggaaggaaggagggaaggagagaaggaaggaaggaagggagggagcaagggagggagggagggaacagctcaaacaaacaaccccagatgcatcaaatagtagaccctttttttcctgtgatgattctttgtttttggctcactaaccatggggtctccataggcagatgatgagcaaaatgctgttggtggtggggttggtggctcagagatggatgttcagagccccgtgccaagtctctgtgatggcaacagagctcacaggtggggtggacagtgaaaacaaagctgagaaaaaaggcaggtgagccaacaggtggaggggatacctcagagctccagaatgcaaatgaattgtccaggtatcttatgaaaatgcagacccattagggctgaggtggggtctgagagttagaattcgtaacaagctcccaggtgccattgatgctgttggtcaccagaccacacttggagtaagaagggtctagaggccacaggtgagaggtcttggcgttaaacacagggtgtctgtagcaagagacttggaaacagtcattgccatcctcagcccagagacctcacggactccacacatcacagagcatgggggttcccagacctaggggagaaaaggtcttgtgaacagtaagttaatccaccca

SEQ ID NO: 18555 - DNA, 1625 bp, Artificial sequence
  DNA replication origin
tcgcagccccgcctgggccccccgcgcggtgcctagcccggcagcctcggggtggagggcgcctgccagcccgggaggggcgtcccctcccctcaggtgccccgctcggagcgcgggggtcccggggcgggcaccgcgggccgcggctggcgttagcgctcgcgtcgcccctcggcgcgcggagggcctggggggccggggtcactcactcccctctcgaagtcgccctccccagcctgtgtccaccaacccctcccgcgccctcgcgcccagatctcgcggacctcaccccagagctgacagccgccgcgctgggtccccgaggtcccagttcccacgctgccccggccgtctggactgcccgggacggtggggggctcccgccgcggccccgctcccgctccggtctctgcgcggtctgcgctggggattagggcgctaatcgcagctgcctcccagcgagtgcccggggccgcccggctcctggctgcgcgtgggatgggagaagggcaggagccccgcctaggagtgctgtaaatcccgttaattatctcatttatgggatctggaacccgccctcctagggtctctgcgctcagatctccgcgggcaccctctacttcccccgtctccagtcggggtccgttcacccccaaaatgccagggtttgcctcgatgccctggccacagtggggcccagcactagctgctaaaaagcgcccctctcgcttccgtcaagaagcagagcgcctgggattcttctgggcatttgtaaagaagctgtgatttcactactgaagaagaaaataaaaacgagaactttaggccagcgctacctgggcatgccctggtgtttggtcatccacgcgcttaaggagtagagaggccttgggggaattagcttgggcacatcacctccccacacctacacccactctcccacccccgcacgcactccacccgcctcccgtgtcctcattccctccccaaatctagtagcttggtcttagtcttggggagaggggtggggcggtgcagaccacacaactcccagggtttcctgtcctgacagtttaatgtgatgtttctcccacaacttgttttccttctccggtcttttgtcttttcagatttacaaggaatagataacccagagattgagggctagggttgcaaaatacagggatttgggggaaggggcctgatgggtaggattcgggcagccagaaatgctctggcaaaaaaaggcagtctgcatggtgtgaactgagggtcatgggctgtacaggtaaaactttgggaatgtcagttcattttagaattttaagaccacccggcaaagcaagaatgcatacaggcttttttggaaatcatatgcagattctatttcattggacttgtgttggttttcgtgtgacattgggagtttgttaaagtggtttggttttccataacgtctgtggattgggacttaattatttaccttgacattaggtgtctaattcttagtcaccagcttaacaagcttcctgaagtctctaagtgtcactgtgggcatgcagcatgtaagaaactgttactccgcctggagtgggcgagcaaatatttgttgaacagaggccttt

SEQ ID NO: 18556 - DNA, 1441 bp, Artificial sequence
  DNA replication origin
tccgagcggggcacctgaggggaggggacgcccctcccgggctggcaggcgccctccaccccgaggctgccgggctaggcaccgcgcggggggcccaggcggggctgcgactgggggtgcagacatcccccaccgccagggtggctggaaccggagcgacgtcccagctggagaagttggggggagtgcgggaggctgcgggtgaggcccgcgaagcgccgtgggagcggccctaatggacggtgggagccaggagggttagacgccgggacttaccgagcggctccctcatgccgcctcgcgccgccaccgccgccgctccggccggccggggaccagcgcgacccgccccgcctgcagccgccgaggccgagcatgcccggagaaccgccgtccgccccgcccaccgcccgggcccgccccgcccaccgcccggggctgcctcctctgcgctgagggcggtatccaggccacgagcttcctaggcttttggggtccgcctgcgtgggtcgcgcagaaggcacaagtgagctgaccaccattccctcttttcttgtcacttgggtttgggccacgtcaaccctgtggaaatgtccaaagacacacacactctcacagatacacagaaagcaaacatattcatatcacacaaacacacaaagatgtatgcaaacacactcatatacacccacacacagatgcacacaaacacactcacaggaaacaggcgcacacaaacacatatacaggacacacaggtgcacacacagtcacagacaagtgcacacacactcaaatacagtcacacgcaggtgcacacaaacacacccatatacagtcacgcacagatgcagccaaacacactgacacatatacatacatacatgggaacacagtatggctatacacacacacacacacacacacaaacgcacccacataacacatcgatattatgaagagcagaaaacagtgatggtgacaacagcttgggatttacttctttcaaaaaaaagtctgaaggagtctggaagccaccttcagatcagctggcccatactctcctgtggcagaggaggaaactgatgacaggagcaggatttgcctacagggcaggggtaggaggagagataggaggaggtcagtgggagagttcagaccagaatgaacatttggggtcatttgggtaaccccaaacccactccatatttctcttacagcgggaaggggcagaaagattagactgctgcctgggtctgctcagggcgaacgttttcataattttggaaggcagacagaagacaaaaaatgtgaaatattgctgatgcattggggagagacagggaatgttagttaagtccacccagacaaaacatggatggcacagcagactggtgaccttgccaaattagttttcagaaaactacttagccacatcatg

SEQ ID NO: 18557 - DNA, 1029 bp, Artificial sequence
  DNA replication origin
gcggcgcagcggacgccagccaccgcctccccgacttttccatttcccctttctctccgtaaacagaaagagactgcccggttgcagggtaagccagagcccccgcgctgggaaattccgcgtctcccccccacccgccaccccgccgcccctcatttgccctctgggcgcccgggcggagctggaggcgggactagggaggagcagagcggcgcgcagggaggagcgcgggacgtgagctgcggcccgaatcgagagcctgggacggggacgagttttcccccgggcctggtgacccaaggcgtcttagtggcggagttgcaagaggtggttgtgcccttcccggtccccagggaaggtcgtatatcttagtgtactcgcgccctcggcgcttctctggagtcccagggtccggcgggagggcacgctcccggggggcggcggggagggcagtcaccagacctttttccgcgcgccccacgctctggggtggggacagaggcgccgtgtgccctcccagcagtgctgcgggaagccggggaagcttcggggcttcttggaaccgcgactgtgggtccgattgctagtagcacggccccgcctcgcccagatttcgcttcaaattcacacacaaagagggcagtgacccgtggtgcgcacgcacacattccaacttagagatttccaagaggctgcggcagggtgggcccggaacctggttgttgggcgctcggctgggagcctgtgcactccgccagcagaacctggttttcttctctgcagtctttattaaaattggttattttgcggcaccgcctcattaggaagcgtacttgtactatctccccgctcccgcctaccgctaaccctcagtcctagctgctcatctggggttttccttctagagtgtcaagcttttactccaggtgtaaccggaagagagttctagagaaaagcgccactctcccgaaatccactctgcgggacattcccaatgccccgccaccccctccccctacatttcccacg

SEQ ID NO: 18558 - DNA, 877 bp, Artificial sequence
  DNA replication origin
ctcccccttcctcctccttcccgtatccgcagcgccagggcagtgctggtctgggcagtgcgcggggaagcggggacccgctgtcactgcgcctcccgctgccgacgccgcctggacggccgcactctccctgcccgagacccggtgagtgcagctcggaggctggaggacccgatcctcccaaatgctgggtgctttgataatttataagccttttaggctcccttgacttagagaaccaggaggaaaggagtgggagtgtgggttggcggagcccagagacttgtgaatggctggaactaaattcaagtttgtaacccggactctatcccatgactaaagaggtcatagcagaacacgaaggctgggcttttggtctaagaaagaatactaggagaaaaaaaaagttattttcacggaagttgttttcgagcgatagtgcatgatcaggactctgaaatttttctagctctgggcggagaaggacgcctagggattgtctccatagttaacaggggaaggccaccggctgcctgtaagagagaaacgttgcgatgcttgtctatttcacttttgggaagacaagattaaaggctgctcttgataaaaaacagggacagaaaggctcttgcagttgctttacatacctgtggcctgagtcgtttgtgccaaggagagtgtaatccacttccagctgacgcccccagctctctgcgacggattgaggtttgtgtgcaggacgtctggcatacggcccatgaggactttgtcgtgtaaagcaaatgggaacgttgaggcatgtagaggttttgaagcagagtgtcggtccttccttccatacgcctgaaacgcataatccggggctttttgagagcaa

SEQ ID NO: 18559 - DNA, 909 bp, Artificial sequence
  DNA replication origin
cagatattgttgcttgagaaagcttcgagatattaaagactcaattcatttattaaagaaagtaaacaagaaaggaagagagagcaaaagaaggaaggaaggaagggaggggagagcgggagggaagagaggaaggagagagggagggtagataaggaaggaaaggaaagaaagaaggagggaaggaagggagggagggaagagagggaggaggtagggaaagaagagagggagggaaggaaggaagcgagggagagagggagggaaggaaggaaagtaaagaaagaagggaagaaagggagggagggagggaaagaaagaaaagaaagaaggagggaaaggaggaagggaggaagcaagggaagcagggaaggaaggcaaggaggaagagaagagagggaggagatagggaaagaatggagtgagggaaggagggaaaggagggagggaaggaagggagggatggggagggaaggaaggaagggagggagagagggaaggaagggaagcaaagaaagaaggagggaagggaaggaaggagggagggagaaagcaagggaaggagggaaagaaggaaggaaacatgccctgattatcttccccatatagagttaattcggtggccaaatgggaagcaaatggattacaaaaaccccagatgagaaatgggaggcccctgcgagaggtgaaagttcagaataggctttcttctggatcagctgtagcctggaattgtcagagaaccttttaaactagaaatggacttctacaggggttcagttacttctaacccattgccctgatcatagtgtaatgcagtgtctttcaaattgaggctgagatctactgggggttacgaagtcaagttagtggtttgtaatgagcatttacaaaaaatttagaagaaaa

SEQ ID NO: 18560 - DNA, 1042 bp, Artificial sequence
  DNA replication origin
aaagggcagattggaagagattaaatatttgtgcaaaagcccgtaccccccttcacaaagggctgcctctgtctggcataaaagggaagggatgcgggaactgagaagagggccttatctttccagaggaaggactgtttggggccggaggaggtggagaaggggagagaaaatagcggagaaggggagggataatagcagaggaggggagacatcagatgggtgtgagtcccctggtcactgtcgggccaggccaggctgctgtcatcggctgaggctgcacttctgacccctgcagtgaagccaagccacgcgggctcaggggcagacggaaacaggatgactcgagctttgaagctgccagcctgtgatggcagagaggccagaaagaagcccgctccagaacccactctctcagcagcagcaacacattaatttgcaggggggtgggaaggacagaggaggggaggggcagagagtggagggcaggagaggtcgggctgggacggaggccagggaagcgggtcatgtgcacaaggcagcccaaaggcctgccacggggtgcccaagaaggaccttagagaaaggagataaaattgtagttttcgactctgctgacagttgatcaaagctggtttctgcttctgagacattttagtgtctgccaggaactcagaatttagaagagaaaaaagaagaggaaaggaaaaaatcgacaatggagcagtctgcgcgggcggtggggagaaagatgagagtctttgaggaattgggatttttctgtggactttggagctccttggggcccaccacaaagaccaacatgtggccggcggcacagggaataacacccctgggaggcccttagaacacagctcaggttacccacatttgaggagagacaatgggagggacggcctgcaatcccttgggccagctgagggacagggctggaactgtggttccaaaccctggctgcataatgcaatcgtcaggacatttcaaaaaaatgcagatgctggccaggcacggtggctcactc

SEQ ID NO: 18561 - DNA, 1738 bp, Artificial sequence
  DNA replication origin
aactgttgtattgttctttcttattggttttattcccaagtatccctagttggttgaatccttggatgcggaactggaagagatgaagggccgactgtatacacttaaagacttcagtaatatatcttttcctttaaagtttaatattggcttatttcaaagaaacacaagctcatttcccccgttcgtgatggaataggaagtttgctccacatttcagcccctttcttggggtggacactggctgggtacgtggggcctgggctcttaaaaccagcatttccagcttcgggggaaggaaccaggagagtgagggaaaggccgccccagggagaagaagtggggagtttccatctgtgaagaggcgagatgactacgggaggaccccagacaccttccctgtcagcttcgcatgtgaaaccctgagccactcattcaataactgctggtgctgctggagcaggcccatcgcggcactgtcagaggccacctgacagctaagaaagccccagtcctgctggggaggcaaggccctagagggaggggacagaggccctagtgggaggggacagaggccctagtgggaggggacagaggccctagagggaggggacagaggtcttagtgggaggggacagaggccctacgagggaggggacagagggcctaagagggaggggacagagggcctaagagggaggggacagagaccctacgagggaggggacagaggccctagtaggagtggacagaggccctagagggaggggacagaggcctcagtgggaggggacagaggccctagagggaggggacagaggcctcagtgggaggggacagaggccctagagggaggggacagaggccctagtaggagtggacagaggccctagagggaggggacagaggcctcagtgggaggggacagaggccctagagggaggggacagaggccctatgagggaggggacagaagccatagagggaggagacggaggccctatgagggaggggacagaggccctagagggaggggacagaggccctatgagggaggggacagaggccctagagggaagtgatggggcaaagccctacagagaggagatgggaacctggcattgatggaaaagcggagctgttttgacaccaaggacattccacggggaaataaaaaaacaactgttaatatttttcatgttattcacctacggagtggctcagtccaggcaaggtctcccttccagggtgggagtccaaggtctcccttccagagcgagtacagcgaggatggagggaagggtgagggggttcatggtctcttgctttaatagggccattggaaccagctccccctggttctttaatagggtcactggaggggcctcccctctctgagtcttcctccctgtccctccacaccccaaactgcctccaccatatcctcctcctctatgaactgagcaggacaacatcctcactgagccggagcaaagaacacggacgcatctcctgggctcctgactcaggatccaggcttggaggctgaaaggggacactctcctcttaaaccagtttcatgactatgaggtgaattaatgccatcaagtccacctgaaaatctgagccaaggatcagtgtgtgtgtgactgaccctaaatatatgaagaaccaattaaacacacataggcacacacttaaagacacacacacactctcatagacacacacacacaga

SEQ ID NO: 18562 - DNA, 1429 bp, Artificial sequence
  DNA replication origin
ggaataataaacgtttttatttttaaccagctcagatctcgaattaaagcctaatattcccatcatcactctttcctgtaaaaataagacagcactttcaatgagagtggaaataaaccattgtttcaggttttacttacaactggagctgccttgcaaaatccctgccctggccatctgccgtggttccaaataagtttgtaaaagtgaatcttgccattttcaatacttcctcctttgggtctatttattccgaagtctgtttttctcattcttttaatttttttccccccaagacggatttgtctgagacacttttttgccataacatttgttttttctgcttacgagagtgtaagaattccacaagccaaatgttaatattttgttgtcagttctttaagccttcattttttccgtctatcgagcccttttttttaaccagaactcattgcttctgagagtataaaagagcaaagaggccgggcgcggcggctcacacctgtaatcccagcaccttgagaggccgaggcgggcggatcacgaggtcaagagatggagaccatcctggccaacatggtgaaaccctgtctctactaaaacataaaaattagccggctgtggtggcgcgcgcctgtaatcccagctactcaggaggctgaggcaagaaaatcgtttgaacccgggaggcagggggtactgtgagttgagatcgcgccactgcactccagcctgggagacagagaaacactctgtctcaaaaaaaaaaaaaaaaaaaagtggggagcagagagccggacttggacacgggaaggtatcgtgacatgagtgggtcgggggctggaaagtttgcccaggcgaagaagtgaacatgtttatccggatcaccgtttgttaaatgaacagcaacccataggtagcttcaccgagccgaaacgggaaaggcggcaggcaagggagaagctaaaatctgcaagaaacgggctgggctggaggcggcgccagggcaagaagggcaggtgggggcccgcgggagccgggagccaggggcgggagccggaagggcgggacccaggggcaaggcctaagtgggcgtgggaggggcatagtcaagagatgggcggggactgctcggggtctgggcggagtctagcgggagccgcgtcgagccggggaggagcgagggaccctgggagagctgtcttttcagggctgaggacccgccagcacctgatggagagcaaatggctgtttccacacgtggagaacttttaacgaacacgtgaggaaggcgggcaatgtctgtggaaaaactacctcacaacccaggcgtcttactccagcccccagggcgacagcttgtttacagtatttctgaaggtctccgtccccttttgtcggcccctcctcctcctctaaccccgacttc

SEQ ID NO: 18563 - DNA, 1048 bp, Artificial sequence
  DNA replication origin
cagcgcccaggcccccgggagccgcggaacaaacttgtgcccggcgctgaccgtgcaaagtggcttccgcgcgccgcggccccggccggcgccgtcgctgtcgctcgggccccgcgactcgggccgggctgtgggcgcgcggcaggcgggctgcggcggcggcgggacggggcggccgcgggttgcgtggggtttgtgcgcgcgtgtgcgcgggcgccggctgtgcgcgccgcgggcggacagggttcggccggcggcggtaaagttgggacccgcgggccgggcgcgctcgcgtaacggggattagaggcgcgggggcgcgggtccctaagcgcccctcctccctggcgcctcccgctgcccggcccagagccccggcctggggactccgcggcgagccccgcgagtggggtccacgtttggcggggcgcggcggggcggcgcggggaacaaggcaggaaaggtacccacttaacgccgccgggagccgcgcggatgggggcgagctgggcggcgggtgtgtttgcggagttgttacctgggcttagagaccgggaagcaccacagacagatccccctcccggggcagacgaggtctctgcgccgggatgggccggtgtgcgtgcgcctcgcgcttttctctttcggtttttggggaagttgttacctgggccggacgcacggagcgctgaagccggataatggggcttggatggcgctctgggtctcgggtggaaggagggtgggggagggggcggacggaccgacggacgcgcggggctgctacttgcaccgcagctgcagtgtttattgatttgtgctgctgtgccaagggaaacacacacccctctgcctggcgtgagagttaaaaaaaaagagagacagcccgagggatcgagacctgaacatgtggtggtggttgcacagtcgccttttccagtttggagagacgttgtaagttgattgtatttctggttatctcggggcgatgctatgctttctctccctctcgtgcagcagcgaaatgtctgctgattgttattgtctg

SEQ ID NO: 18564 - DNA, 1086 bp, Artificial sequence
  DNA replication origin
cgggcgccgcaccccctagccaccccagaccgtcccggagacccgcgcccgcccagctcgcccgggccatcacgtgagcctcccgccccgcccccgcgcgtcacgtgagccccgcccccgcgccggcgcgctccgacgtgccctgtaacttaccctccctcagaggccagcctgcggggacgggccggccgcggccgtagccgtgtgaacgctcttcgggctcgcgtcgtcgacccgcagccgcggggcggactaagaagggagccgcctgctgcgaggccgccgggctcccggtgaggtgcagggcgcgggtcctggcggacggagggcaggttggcgaggcgctgcacaaaggcgcgccggggccgggctgtgcccgccgagggcggtggagtcggggggaggcgtgtgcgggaggcgcggcggcggcggcggcggcgccgcggaggtgcgcgcaaagggaggtcgggcgcgcagcgaggggctctgggcgcgggggttaggcgccgagggggagggggccggcgcagcctattggctgacgtgggcgagagggtttaaatggcccgaagttgtggcttctctgccccctgggtttcctgacttcctgtgtgagggcagcgcccgcccgccccgcccccagggaggagagtgtgagggtgcgcgggtgtgtgtgtgagtgcgggagagtgcgcgcgtgtgtgcacaaggcgggtgtgtgcgtgtctatgtgcaaaaggcgggtgtgtgcgcgcgcgtgtgtctgcaaaaggcgggtgtgtgtgtgtgtgtgtgtgtgtgcgcaaaaggccggcccggcccctcccgcgccctgggcccactccctaatcgcggtggggcttgcaggcctccacccacccggggagcccacccggggaatccacctggggcgtccctcgaggactgttgaccttaaaccggacactttcttctttgcggtctttcccggtgccctgcccctgctggatggacgtgcattcgctcccctccagcttatctgggcggaatctcctcaaagtccttgaattgaaaaatcctctttaccagcgtgcagcccgcctccca

SEQ ID NO: 18565 - DNA, 2360 bp, Artificial sequence
  DNA replication origin
agagcccctcgctgcgcgcccgacctccctttgcgcgcacctccgcggcgccgccgccgccgccgccgcgcctcccgcacacgcctccccccgactccaccgccctcggcgggcacagcccggccccggcgcgcctttgtgcagcgcctcgccaacctgccctccgtccgccaggacccgcgccctgcacctcaccgggagcccggcggcctcgcagcaggcggctcccttcttagtccgccccgcggctgcgggtcgacgacgcgagcccgaagagcgttcacacggctacggccgcggccggcccgtccccgcaggctggcctctgagggagggtaagttacagggcacgtcggagcgcgccggcgcgggggcggggctcacgtgacgcgcgggggcggggcgggaggctcacgtgatggcccgggcgagctgggcgggcgcgggtctccgggacggtctggggtggctagggggtgcggcgcccggcggggatccgaatagggggcagccagcgtacggtgtgggaactcgggccggcgcgggagcctgcggtcaagggggctcagcactttgtaaacaaggagtgggaagcgttaaaaaaacgctcgtagggaaaaccagggaagggcggacatagcgccagggtggcaggaatggagcccgggcaaagacggccctgccgtgggccctagcgctcccttcgtcggcccctggagctgcggccgggcgtgggtcagtcgttcacgggcccggaaattccactgggacacccgaaaaagtgctgcacgccgcctgagggagacggaaagggacccggggcactgagtccattgctggggtcgccagggtacgtggcaggacccgctgtgcacactcgggactgaggagacccctgggacgcggagagccgctccagggcagaaccagtccgtcagcatttagccttccacgggcctgagggtgcgagccctgcgggggccacagggtcattgtccaaagtcatccccgtttgcactgtggcagcaccgaacccggaagtaacagctttggcaggtctttgatggtgatccagtggcaggaggagctcagctggaatgggaatcaggaaagagacctggcttctgccatttattggcacttcacccttctgaacctcagctttcaaatgagagctggcttctaggtctagaatacagtgagtgtgagaaaaataactgagaggcgttgggacttcagtaactactcattccttaaccagttgttgattgtgcctgttgtgccaggatgaaatatttgttaataatagagaccagaaaggagaggggggaaaaaacaagcatatgtatgattcaagcaatgaagagctactctccggagttggctctttcctgtgcttcacttcgtacttgaagatgccacaatgcctggcttccttatcaaccagctgaactccgaattgtgccttacaggatgcgaagaatccggtagggcagtggcaagactttaacagctgtggtttacaaccttcttattaaattaagtctaatgcgagctaaagtgttaagatagtctccatttagaaaggaaagaggcttacaatgagaatttttgaaaaataagcctgagactgtgctgtctctatcgttgcatttgcttttcacagtccttggcacccactgcctttttgtctccctcggtttctaacccgttctgttttcttgcatttgttcagtataaggagtatttcctgtatgctttggcaactattttccatagactctgcttgtgttctccttataaaaccagaacaagagcagtgcaaaaaagaaaacgaccctgataggaatgcgctgataaccttactttccctactctccaaacctgaattgggcacccttggttttagcaagagatagaactcaacagtttgcatacacttgcggatctgcctgtaaccccacttcctatttcacagcctaatctcggatgataccacaatgcccacagtatgctgatcaccaccaacagcagatggaggcggataaaaagagctttctcgctagtgtgttgttttaaaagaacctgatggagagctatgatcatatgtaacactgcctctagttagtttttaaataacacttgtagcatatgtctggcgcctgtgctcaggatttcaacagatcattttcaggattttgacatttaactggcttcttatgaagtagcagagagttccaaaatgtagaactgaaatataagctccacacacaggcagagatttgagtctgatttgtttgtgtgtatatcccaagtgcctaaaagcacttggcatacggtagatgcacaatagattcctg

SEQ ID NO: 18566 - DNA, 1277 bp, Artificial sequence
  DNA replication origin
ggggctgacccccccacctccctcccggatggggcggctggccaggcggggggctgacccccccacctccctcctgggcggggcggctggccgggcagaggggctcctcacttcccagtaggggcggccgggcagaggcgcccctcacctcccggacggggcggctggccaggcggggggctgaccccccacctccctcccggactgggcggctggccgggcggggggttgacccccccacctccctcctggacggggcgactggccgggcagaggggctcctcacttcccagtaggggcggccgggcagaggagcccctcacctcccggccggggcggctggccgaccccccccccccccccccccccccccccccggcctccctcccggacggggcggctggccgggcagaggggctcctcacttcccagtaggggcgggacggggcggctggccgggcggggggctgaccccccccacctccctcccggacggggtggctgccgggcggagacgctcctcacttcccagacggggtggttgccagacggaggggctcctcacttctcagacggggcggttgccaggcagagggtttcctcacttctcagacggagcggccgggcagagacactcctcacctcccagacagggttgcggcccagcagaggcgctcctcacatcccagacagggcggtggggcagaggtgctccccacatctcagacgatgggcggccgggcagagacgctcctcacttcctagatgggatggcggcggggaagaggcgcttctcgcttcctagatgggatggcggccgggcagagacgctcctcactttccacactgggcagccaggcagaggggctcctcatatcccagacgatgggtggccaagcagagacgctcctcacttcccagacggggtggcggccgggcagaggctgcaatctcggctctttgggaggccaaggcaggcggctgggaggtggttgtagcgagccgagatcacgccactgcactccagcctgggcaccattgagcactgagtgaacgagactccatctgcaatcccggcacctcgggaggccgaggctggcggatcactcgcggttaggagctggagaccagcccggccaacacagcgaaaccccatctccaccaaaaaaaaacgaaaaccagtcaggcgtggcggcgcgcgcctgcaatcgcaggcactcggcaggctgaggcaggagaatcaggcagggaggttgcagtgagccgagatggcagca

SEQ ID NO: 18567 - DNA, 922 bp, Artificial sequence
  DNA replication origin
tgaggggcgcctctgcccggccgcccctactgggaagtgaggacccctctgcccggccagccgccccgtccgggagggaggtggggggggtcagccccccgcccggccagccgccccgtccgggagggaggtggggggatcagccccctgcctggccagccgccccgtccgggaggtgaggggcgcctctgcccggccgcccctactgggaagtgaggacccctctgcccggccagccgccccgtccgggagggaggtggggggaacagccccccgcccggccagccgccctatccaggaggtgaggggcgcctctgcccggccgcccctactgggaagtgaggagcccctctgcctggccagccgccccgtccgggagggcggtgggggggtcagccccccgcccggccagccgccccatctgggaggtgaggggcacttctgccgggccgcccctactgggaagtgaggagcccctctgcccggccacgaccccgtctgggaggtgtgcccagcggctcattggggatgggccatgatgacaatggcggttttgtggaatagaaaggcgggaagggtggggaaaaaattgagaaatcggatggttgctgggtctgtgtggatagaagtagacatgggagacttttcattttgttctgtactaagaaaaattcttctgccttgggatcctgttgatctgtgaccttatccccaaccctgtgctctctgagacatgtgctgtgtccactcagggttagatggattaagggcggtgcaagatgtgctttgttgaacagatgcttgagggcagcatgctcgttgagagtcatcaccactccctaatcttaagtacccagggacacaaacgctgcggaaggccgcagggtcctctgcctaggaaaaccagagacctttgttcact

SEQ ID NO: 18568 - DNA, 1137 bp, Artificial sequence
  DNA replication origin
ccgattggtcgccgggccgcctggcccactgcgcctgcgcagtcctcctcccgcaccgccctgtcgcccaacggcggcctcaggagtgatcgggcagcagtcggccggccagcggacggcagagcgggcggacgggtaggcccggcctgctcttcgcgaggaggaagaaggtggccactctcccggtccccagaacctccccagcccccgcagtccgcccagaccgtaaagggggacgctgaggagccgcggacgctctccccggtgccgccgccgctgccgccgccatggctgccatgatggatcggaagtgagcattagggttaacggctgccggcgccggctcttcaagtcccggctccccggccgcctccacccggggaagcgcagcgcggcgcagctgactgctgcctctcacggccctcgcgaccacaagccctcaggtccggcgcgttccctgcaagactgagcggcggggagtggctcccggccgccggccccggctgcgagaaagatggcggacctggccgagtgcaacatcaaagtgatgtgtcgcttcagacctctcaacgagtctgaagtgaaccgcggcgacaagtacatcgccaagtttcagggagaagacacggtcgtgatcgcggtgagtgacccccgccggcatccctcctcccgcttcttcgggccggcctgtgcggggagtttagggaagtggcagggtgcagaattgaaagggagcggcggtgtccccagccctccccggcggggtttgccggttcagataacccagtggagggagactgcgcagcctcgcgtgcgttcctggatcgcccccaccccagtcttcggcgccgggagacgggaagcgcccagcctcagccctggacactcccccacctggggcaatggaggaacgtccgggcagcaagttcagtgcacgtttgtctgcgtgtgtgtgtgtgtgtgtgtgtgcaattacggatactgttggtgttttggattaaccccaaatttgccattcagaaaatatgtaatgctaatataaagatcggctggtgacattgagctctgagataagccgtagtgtactttagtaaagatgcttagttttatggaaacataaccagtccttgaaccgta

SEQ ID NO: 18569 - DNA, 912 bp, Artificial sequence
  DNA replication origin
ttgcagcctctgcccggccgccaccgcgtctgggaagtgaggagcatctctgcctggctgcccatcgtctgagatgtgaggagcccctctgcccggccgcccagtctgggaagtgaggagcacctcttcccggccgccatcccgtctaggaagtgaggagcgtctctgcccggccgcccatcgtctgagatgtggggagcacctctgcccggccgccccatctgggatgtgaggagcgcctccgcccggcagccgccccgtctgggaagtgaggagcgtctccgcctggcagcctcccagtccaggaggtggagggcagcccccgcccggccagccgccccttccgggagggaggtggggggcgcctccgcccggccaccgccctgtttgggacgtggggggcgcctctgcccggccgccccgtctggtaagtgaggagcccctctgcccggccgccaccccgtccgggaggtgtacccaacagctcatggagaacgggccatgatgacggtggcggttttgtcgaatagaaaagagggaaatgtggggaaaagaaagagagatcagattgttactgtgtctgtgtagaaagaagtagacatgggagacttttcattttgttctgtactaagaaaaattcttctgccttgggatgctgttaatctataaccttacccccagccccgtgctctctgaaacgtgtgctgtgtccactcagggttaaatggattaagggcggtgcaagatgtgctttgttaaacagatgcttgaaggcagcatgctcgtgaagagtcatcaccactccctaatctcaagtacccagggacacaaacactgcggaaggccgcagggtcctctgcctaggaaaaccagagacccttgttcacatgtttatctgctgaccttccctcc

SEQ ID NO: 18570 - DNA, 1038 bp, Artificial sequence
  DNA replication origin
aaccctgagtggacacagcacacgtttcagagagcacggggctgggggtaaggttatagattaacagcatcccaaggcagaagaatttttcttagtacagaacaaaatgaaaagtctcccatgtctacttctttctacacagacacagtaacaatctgatctctctttcttttccccacatttccctcttttctattcgacaaaaccgccaccgtcatcatggcccgttctccatgagctgttgggtacacctcccggacggggtggcggccgggcagaggggctcctcacttaccagacggggcggccgggcagaggcgccccccacgtcccaaacagggcggtggccgggcggaggcgccccccacctccctcccggaaggggcggctggccgggcgggggctgccctccacctcctggactgggaggctgccaggcggagacgctcctcacttcccagacggggcggctgccgggcggaggcgctcctcacatcccagatggggcggccgggcagaggtgctccccacatctcagacgatgggcggccgggcagagacgctcctcacttcctagacgggatggcggccgggaagaggtgctcctcacttcccagactgggcggccgggcagaggggctcctcacatctcagacgatgggcagccaggcagagatgctcctcacttcccagacgcggtggcggccgggcagaggctgcaatctcggcacttcaggaggccaaggcgggtggctgggaggtggaggttgtagcgagccgagatcacgccactgcactccagcctgggcaagattgagcactgagtgagcgagactccgtctgcaatcctggcacctcgggaggccgaggcgggcagatcactcgcgttcaggagctggagaccagccgggccaacacggcgaaaccccgtctccaccaaaaaatgcaaaaaccagtcaggcgtggcggcgcgcgcctgcaatcccaggcactcggcaggctgaggcaggagaatcagggaggttgcagtgagccgag

SEQ ID NO: 18571 - DNA, 1047 bp, Artificial sequence
  DNA replication origin
ctgtgcgttcgccccccgcggcagacggcggcgcgcggcgcctctggagcgcccctccgaagccccgtgggggcggccgtggccccggggcagccgctggcgagcaccccagaggtccgagccctccgagccccaggtgcccggggcccgagccccgcctgccactctccccagctgcctttccaaacggcggcgtgctggtggagagagttttcccgcaccttgttcgcccgtcagaaagcggcgccgggagggagcgagcgtgagaaagtgagcgtgtgcgctgcaggagagcacgacccaagagccggcgcccggtgtccgagcgcccagtccgccctgtccgcccccggacccgcgaagggcgggggcccggagcagcgaggcgcgggaagcgaggccggcgggtgccgggggttggcgggacgcgcgcttcgtgccggcgccggcctcgagcccgcgctccctccccccgcccgcgtgcccgcgccgctgcgcgatgcagtgtggggaatggctggggttggctgaagagcgcacagtggagttttaatgtccgccatgttggccatggcgtattgaagagagcgagcgagagaggagcggagcggcacagcctcccaccctcccggctggtgttagtgcccggacggcgggctctgcgctccgcccctcaagtccccggcagcggttggcgagtggggaccgaacccccggttctccatgatcccgctggccggggccgtttccccagagcggagaggtatctgctgcgcctgagatgagtaaactgtcgtttcgggcgcgggcgctagacgcctcgaagccgctgccggttttccgctgtgaggatctgcccgacctgcacgaatacgcctcgataaacagggccgtgccgcagatgcccaccggaatggagaaggaagaggagtcggtacgtgttaactcccctgtccgacccaccgtcaggcccgctccctctgctgcctgcggcggcggcggagcagcaaacccacacaaaatggccgccatcttctcttcgccgcc

SEQ ID NO: 18572 - DNA, 1189 bp, Artificial sequence
  DNA replication origin
aggcagaagaacctttcttagtacagaacaaaatggagtctcctatgtctacttctttctacacagacacagtaacaatctgatctctctttcttttccccacatttcccccttttctattcaacaaaaccgccactgtcatcatggcccgttctccatgagctgttgggtacacctcccagatggggtggtggccgggcagaggggctccccacttcccagacggggcggctgggcagaggcgccccccacctcccggatggggcggccggcctggcgggggctgccccccgacctcctggacggggcggctgcccggtggagacgctcctcacctcccagacggggcagctgctgggcggaggggctcctcacttctcggacggggcggccggtcagagacgctcctcacctcccagatggggtggtggcggggcagagacactcctcagatcccagacggggtcacggccaggcagaggcgctcttcacatctcggagggggcggcggggcagaggtgctccccacatcccagacgatgggcggcggggcagagacgctcctcacttcctagacagggtgatggctaggaagaggtgctcctcacttcccagactgggcggccgggcagaggggctcctcacatcccagacgatgggcggccaggcagagacgctcctcacttccaagatggggtggcggccgggcagaggctgcaatctcggcactttgggaggccaaggcaggcggctgggaggtggaggttgtagccagccaagatcacaccactgcactccagcctgggcaacattgagccctgagtgagcgagactccgtctgcaatcctggcacctcgggaggccgaggcaggcagatcactcgcggtcaggagctggagaccagcccggccaacacggcgaaaccccgtctccaccaaaaaatacgaaaaccagtcaggcgtggcggcgcgtgcctgcaatcccaggcacttggcaggctgaggcaggagaatcaggcagggaggttgcagtgagtcgagatggcggcagtacagtccagcctccgctcggcatcagagggagaccatgcaaaggggagagggagagggagagggagaggtgtttctttcttttcactctttttttgtctaatcttgtcttcttgctttatttcattgagttgatcttc

SEQ ID NO: 18573 - DNA, 1236 bp, Artificial sequence
  DNA replication origin
cccgaggcgggtggcggcgtgcggacttcctcctggactagcctggaatcctgccccagcccccaaccgctggcggccgcccccgcccccgcccccgcccccacccccacgcccggcacaaaggtcccggcgcggcccggccggcggctttaagtgctgccgcgcacaggagaccggaggccgcggcccgcgctcccacacccgaggcccgccggcccctaccttttccgcgcggcgtccggggcccggcgcggtgggctcgggcctgctgttccgcgactcccgctgggcctctcccgcgggctggcggggcctcccgggtgtcgggcgcggcgggtggcggcggctcctcctcctcaggggcgggaggaggggactcggcggcccagagccgccccccggcaggaaaccagccgcggccccgcctcctctgcgcgtctgatcccgctcccgaggccgccgccgccctctccctccggaaacgcattcctctcccgccgcgtcagcccggcccggggctaggaggaggcggaggatggggcaggaagtgcgaccgggacaaaggaaccggctgcgcgggagcgcgcctgagggaggccgcggggggcagggccgggactgcgttgagacagtcgccgtgcctcagtttcctcctctgcgaagggcgggaggagtcggacgcgccctagagccccgcgcgttcctggtgtagcctgctgggcccgtgttctttaagttcctcttcctcggagccgcgcgttcgaccctcgctcccgtttgtccactgatgtcccgtttcgagcccgggagatcctgcatctcggaagccccctgagtcccgaggcaaatcgggaccgtgagcccccctaccctgcagggctccatggggccaaaaaccacgtggtccttctggaagggaactggctaagccaggactgcttttctggagtgataatgtgcttgcctgtgtctaagagaaaggtgaagaattgggaaacccatgggtgtcacgaagggtggtgagactggggaacgttttagaaaacctggtgagttgcgtcctgcttttgatagatttatctggaggtacctttatggggaacagggatgagaaggaaaagtttcttcctaaggagtacagtttctgtttcacctcttaaaaaaaaaaaatttggagattggggctggaaacaacgtttgaaagagaaggaaacattcattatgagaatggctgaa

SEQ ID NO: 18574 - DNA, 1039 bp, Artificial sequence
  DNA replication origin
tcctcagagccctcgcttgctctcagcacctcccctgcctgggctcccattttggtggcatttgaggagcccttcagtcccccactgcactgtgggagcccctttctgggctggccaaggccggagcccactccctcagcttgcagggaggtgtggcgggagagacaagagcgggaaccggagctgtgtgcggcacttgcgggccagctggagttccgggtgggcgtgggcttggtgggccccgcactcggagcagccagccagccctgctggccccgggcaatgggggacttagcacccgggccagtggctgcggagggtgtactgggtcccccagcagtgccggcccaccggcgctgcgctcgatttctcgccgggccttggctgccttcccgcggggcagggctcgggacctgcagcccaccatgcctgagcctcccaccccctccgtgggctcctgtgcggcccgagcctccccgacgagcgccaccacctgctccagggcgcccagtcccatcgaccacccaagggctgaggaatgcgagcacagggcgcaggactggcaggcagctccacctgcagccccggtgcgggatccgctaggtgaagccagctgggctcctgagtctggtggggacgtggagagtcgttatatctagctcagggattgtaaatacaccaatcagcaccctgtgtttagctcaaggtttgtgagtgcaccaattgacactctgtatctagctgctctggtgaggacgtggagaacctttatgtctagctcaaggattgtaaatacaccagtcggcactctgtatgtagctcaaggtttgtaaacacaccaatcagcaccctgtgtttagctcaaggtttgttagtgcaccaatcaacactctgtatctagctgctctggtggggccttggaaaacctgtgtgtggaaactctgtatctaactaatccgatagggacgtggagaacctttgtatctagctcagggattgtaaacgcaccaatcagcgcccggacaaaacaggccactgg

SEQ ID NO: 18575 - DNA, 1463 bp, Artificial sequence
  DNA replication origin
cagaaggaaggggaaggaagggaaaggagaggaaagaaagggaaagggaggaaagggaggggaagagggtggaggggagaggagtgggaaaggaggggaggggaggatgggaggggaggggaggggagagggaggggggaagggaagtgggtgggtgaggagagggaagggaagaagggggaaggaaagaaggggaaggggaggggaggggaggggggaagggaggggagggggcgggggggaggggaggggcggggagagaacgcaagggaagggaagggaagggaagggaagggaagggaagggaagggaagggaagggaagggaatcagtccctattttgtaaacaactgaactgctgctgccatgtactgggtttttgaggcagagaccccctcccctcccaacgctcatgctcccctgcattgtaagcgcccaggattcctgcccgccagtgcagggagcacagtggaagggttgtggagcaaagcggaggatgtctgcgtccaggtccacgtggtgttattatttctttttgtgattctaaacaagaatcttccatttagcttaaaacaaccaaataaggcagctgagaggaaggtaacattatctttttcagtatcttaaccctaaatgtccatttatttccctggaatagagtgtggatttttggatttgtttttagcagggaaggggaaaacatgggggtaatgttgttttgttttctttctctctctctctctttttttttttttcagacggagtctcactctttcatccaggctggagtggtgcagtggcgtgatctcagctccacctcccaggttcaagtgatccttccacctcggcctcctgagtagctggatttacaggcaccatgtcctgctaatattttttgtatttttagcagagatgaggtttcaccatgttggtcaggctggtctcgaactccttacctcaagtgatctgcccaccccagcctcccaaagtgctgggattacaggcatgagccaccacacctggccacgttgttttgttttcaattgagctgtggatggtaaagatttcctggacttactgaacttgagggaatgcgcagcactgtctaaaagcctgtgcctgattcagaggcactaaaagaggctgtgggtgatggggtggcatcagctagtggggtggggtggcagagggcacgtggcaccagtccccagcagaacctcccatatcctgctgctgcccgcctcctctggggccacagacggtatttctcctgcgggtaggtgagtaaaatgtatggtttagaaatgaggatgaatagcaaagagaaagtccttgagcatctagctgagggtggctgccaggggtgagggtgtgggagatgggcatcatggttaagaggaaccctgaaataaaacatgccgtcttgctttgcttgctaattatttctcctctgtgactcccaa

SEQ ID NO: 18576 - DNA, 779 bp, Artificial sequence
  DNA replication origin
acctccgcgccccttcctccgacgcccgcacccacgcgaccggggcgcagactcccagcgccttccttcccgcggagatccctgcagggtctctgggaaagacagacagacggacggggagagcactcggagggaaagttgttcctcccagtctcctgtcaggcaattacaggcgagcccaagcggggagaggggcgggaggaagcgagggaagggctccggagtggggggaggccgcaggaggggaggcgggggtgcagttggtgaaactcctctgtctcccgctcatcttttcattgctcgttcccctccttcccgcagacacccggacctcccctgggcgccagctccgcggctccaacgggtccagaaacaagccggattttttttttttcttcctggaaattggctttggtgtgtgttgccctacctccctcctccccctcccacccacagcccccccccggccttttttttttttttttttttttttgagacatggcccgggcagtggctcctggaagaggaacaagtgtgggaaaagggagaggaagccggagctaaatgacaggatgcaggcgacttgagacacaaaaagagaagcgttcctctcggatccaggcattgcctcgctgctttcttttctccaagacgggctgaggattgtacagctctaggcggagttggggctcttcggatcgcttagattctcctctttgctgcatttccccccacgtcctcgttctcccgcgtctgcctgcggacccggagaagggaga

SEQ ID NO: 18577 - DNA, 1124 bp, Artificial sequence
  DNA replication origin
gtcagtgccagccgcagggtctggccagcccacctcgcgtgctcgctctgcacccctagagggagagctgggcagctcctgcaggcgcagatcccgccgccgcgcagtgcggagcgcccgggaggtggcggctgcttctcgcaacttcaaatcccggggcccgcgccctcggcggcgaggaacgcagggtcaccccctgccactcctcatcgcgccatcctgagacctgtggcggggagcagcggggcacccctggacgcccctgcccagagctggagggcgaggaggggaaagccgggctggagtgggagccgcaccgcgaagccgggcgaggggcagcagtgtcgctgtggtgtgaagcgaagacagaccgcctgggcgggcgaggccgggctgcagccccacgcggcctccctggcccgcatcagggcgcgcggctgggtgccctctgcgcgccgcggaggcttcattgtttcccgagatttggtgcccgttcctctggggcagagggaacaccggagggtgggaggtgctgcgccttccaagcaggggggcaatcgccgcccgaccccgcccaaccttgtctgggagcccaggtgctagggaggggtgtggaaatcaggggtcgggcggcccccgtttctctgtgcatcccgagggagggaaagagtggcgggggaggggtgctcttcgctgcgccctctcagtgtccgctcccggccacagacaacgtgcacgccggccctggagctcctgccacccccacttcccacagcggctcgtgcccccagcccgctggatgccccccaggcccgtccccgagggttttccgagaagtgctgcaggaagcgtttgtagatgcgaaaagcaaggacatttctgggaagaaacaggttgcggtcaccgatcaggccccggagaagggtcagtgcccacggggcacctcccagggagtttgtgggtaaggtgaaaaggtcacacgcctcctggggattggcgtctacacacacagccaaagtacagcctgattcctacctggcacaaatagctggccaaagggaggtaggaatgctggcaaggagactctggtcaaaggttttggcggaagaaaaaggggcgggcag

SEQ ID NO: 18578 - DNA, 1173 bp, Artificial sequence
  DNA replication origin
tcctctgccagtttcctccttcttctcagctgtcggacccctgggaggcgcggggtgggaagtgggcaccgaagggctgggagttaaatgcctaagttgagcggaaggagcactgtcgaagccatgggcagccctgcgcccgggcaggcgggcaggcgggaggcgaggcgggggcgccgaccgcgcccagcgcagaccccgggggagtgagcgccgcagaggcagcctgggctctcggctactacccgcgcgcggtcgccgcctccccaggtgcagccccgccagtcccagcccccggctgcgccgggcgagcggcatcatcagatttagggtgacccggagcgacctcggtccaggctcggagggagaggcgcctctcaggacctggcaggttgacagggaaggggaaccgggagggagcggcggccggggcggcctggagtctcggaggcccgcctgcgtcctggggggacccgacctccgcgctcgctccggagcgcccgtttggatagctctgagcctcggcggggtgagcgagggggcacacgagggagacttgagctgtgttgtttttagaaaactgccgccaatctctcttcccctttccctgctgagtgtgcattttccagcctagacccgccaggccagcaaataaagccaccggatcgtgcactccggagcgactgcccccaccccgaccttgtctttcccgaagggaatggctcctccggcgcctcaacgcacagaaaacgcctgcctccagctgagcgcttttgccagctttctccaaccagtgaataagggatgcactatggactcagaaggaaatgtcatatttaagttctgcctctgatttctctgctcttagctgatctaaggtttttctagactccttagtttccactcacagtgctgggtaatggagccctaccgcactgattgagaattgccggccagtgggttggtacagagcaaattgtccttgctaacaacctttttcctttgctgttggattccactaagtggtgagaggggtcagttttagatttttgcaattccccagcgtggagacaggccggctctatacgagaataagtgataggcagaggaagaatttggcagtgttcccgggttgattttattttggtctcttgaacacattattcttcctga

SEQ ID NO: 18579 - DNA, 1007 bp, Artificial sequence
  DNA replication origin
atagattaacagcatcccaaggcagaagaatttttcttggtacagaacaaaatggagtctcctatgtctacttctttctacacagacacagtaaaaatctgatctctctttcttttccccacatttcccccttttctactcgacaaaactgctatcgtcatcatggcccgttctcaatgagctgttgggtccacctcccggacggggtggcgcccaggcagacgcgccccccacctccctcccggacggggcggctggccgggcgggggctgccccccacttcccagacggggcggctgctgggcggaggggctcctcacttcccagacagggcagctgcggggcggaggggctcctcacttctcagacggggcggccgggcagagacgctcctcacctcccagacggggtggcggtccggcagagacactcctcacatcccagatggggcggcggggcagaggcgctccccacatctcagacgatgggcggccgggcagagacgctcctcacttcctagatgggatggcggctgggaagaggcgctcctcacttcccagactgggcagccgggcagaggggctcgtcacatcccagacgatgggcgaccaggcagagaggctcctcacttcccagatggggtcgcggccgggcagaggctgcaatctcggcactttgggaggccaaggcaggcggctgcgaggtggagattgtagcgagctgagatcacgccactgcactccagcctgggcaagattgagcactgagtgagcgagactccgtctgcaatcccggcacctcgggaggcccaggtgggcagatcactcgcggtcaggagctggagaccagccccgccaacatggcgaaaccctgtctccaccaaaaaatacaaaaaccagtcaggcgtggcggcgcgtgcctgcaatcccaggcactctgcaggctgaggcaggagaatcaggcagggaggttgcagtgagccgagatggcagcagtacagtccagcc

SEQ ID NO: 18580 - DNA, 893 bp, Artificial sequence
  DNA replication origin
gggcaggatagaacactggatgtgtgcagtagggtcttaggccaagtccactttctctgatgggggagcatttcagcaaaggcccttctgggcatatgaaggtttcccagtcagttatcagggcaatgggaagccacagagctgggggtctgctggagagtgatcaggcttgagcgttaataaggtcatctggctgcactgtaggtgatggagccaggtaagaggccctgtagtctaggcaggaggtgtgggtagctctgaccagcagtggaaagagggcaaagtggccagatttgagagatgctatttagggaggtggattggaagggctctcgtgggggtcatggggagggggccgtctaggtagctgtcctcagggtttatcatgggtaccacagagaagggaagacatttgggcagtcacttagcaaatttggggcatgccgagtgggggtgccatgtggcattcaaattgcagtttgtgcaggtaatcaaactaggggcttaggagaggcctggggaggagaaatggacctggaagttctccgccaggtggagtgactcagggtctcaggaagagcaggctggtgaggcagagccagggtgtggggcagagtgagtggaaggccgtgagaggcagggccagatggggctgggtggatcaaggaagaggagggtcaagggcgggctttcatttgagagggtgtagaaagcaaaagaatgtttttagaaagattcatgacagctgggccctttgacgtggtagttggaaggattgagtggagagagggaggtggagagtacagaagcagcaagggatgacagagggtgcgaggcagggcaggaggctcaggaaggcagggactgtgtgcatgggggccatgagccttggg

SEQ ID NO: 18581 - DNA, 966 bp, Artificial sequence
  DNA replication origin
gggaaagtgcggccggtcgggcctcgcgggcgccccccgccccggactgcgggcgccaaagttctctgcgcgggccggggcgcagcctctgggacacccagccgggtcccgcggcccccgccctcaccctccgcccgggagctccggcctcggtagcgcggggcgagccgggcagcggcgcataggccggccctgggcgcctccccggagtctgcagacccagccaagccccgagccagcgcgcggggggcgcaggccgggaaatccagccccaggcctttcccggctcccaggccccgggggcacaggccggggactgggaacttttggtgtgaggagagtttcgtgactgcccttccgacagaggcgggttgcgagccttctgcctcctctcccttactcgggcgggggcggaacagcggcggggggcttttcctccatgtcccctgctggtaggggccggcaggggcggcccgtcgcgtccgggggctgcagggtttggggagtcgccggcttggggtcggggaggcgttcccgggagggccaccgctggcacttggcactcgcttgcgagcatttactgagctgatcccacttgctgggctctggaaagcacaaccttggaagagtcgcggaatgaaaagttttcctgcgaggacctcagctcctacctatcccgggctggttccatgtggctgggctgcggggccgggcctgacttgggagttgagtggatttccctttttcctggtggactgataacattgtctccacttcacagcattcctctactgtgtgtcagaagtgaaaaggcgttttgttaaattgttttaccgactgtgtctgtgtttgacaacagcccacgctgaagtttctcccaagcacccggggatatatttcctttgtagtagagtcctctttggtggggagcgcattcgtttgggtgcagtatttcccatttgttcc

SEQ ID NO: 18582 - DNA, 1004 bp, Artificial sequence
  DNA replication origin
aatcccagctactcgggaggcggaggcaggagaatcatttgaatccagaaggcggaggttgcactgagccgaaatcacgccactgcgctccagcctgcgcaacagagcgagacttggtctcaaaataaataaataaataaataaataaaaataaatacataaataaatgtaaaaaacacaaaataaaataaagtagtatacattctaaactagtagtatactctcccaatgcatgaaaacagaaacaacacctataattatcagtaattgttgttgtggatccaagtatctatgtaagaagcaaaaaacccacatcaacagttgttgtcatcgttgtcacaaacttaattactggctagaaatgtctagtgctgcagccaaacagcagtaggaggagcctttcccatggctgagtggaaggagggaaacctagactatttctgggtctgccttgagctttctctgccgccttgggcaagtgactttggccctgggtcaatgtcctggagtaagatggggctaacaccactgcactgatttgctgggacaggtggtggaaagtggtggtccagggctgggagaggagaggaagggcaatgtttcctaggagaaactgcactatgctggggcagctgcggtgctgcaaagcgcagggagtgtggcaagcggacgaacctcgtgtcttgtttccttgttttaagattggaggtggagtgggatggatggtcgatcgccagctcttccagctcttaagtgctcaagttctgcgccaacccaggggagcttgattgctttcacgtgtcttggaaacaactggcaaaaaagaatttcacatagtctggaaagggcttgggacagggaccactctttgcagacatttgtcattctttaaacataatgacatacatttattaaggactcatagtccataactaagacaaaatgagcttcagttacgttccctaactcggtccacgttcctttagaacgtctcaagcccgcat

SEQ ID NO: 18583 - DNA, 960 bp, Artificial sequence
  DNA replication origin
tccagggggtggcagggcttacgggtcagcgctctggggagccgaggtcacttacaggataccatcttcccgggcctccccctttcatccctctccccacacctcgtcgcccccaactcctctcctccgccccagccccgccacccattaaccgggaagggaagtttcccggcgcctgcagcccggctccccgaccctcagcggggttaccttctgcagaagcagggcaaggggcaggggacaaggggagggggaggcagcccgaaggagtgaaagacgaagccccggcgaggaaggtgggcggaggcggcggcggcggcggctgtcagctcgcgttcccctgctcacagcgctgccattactgtgcgccgaggccgcctccccggccggccgccgccaccggccccggagacgcggggggtggggagcgaagcccggggagcccgcgcgccgacactcacctgtctccgcgaggaaagacagcaaagtccaaggccgccgccgctccccggcgggacaggggcggtagggagggggggaaaggggagaaggacgggccgatcacgggatccgtaaaacaatcgtcctcctctgcctccggctttgcccaacacacaccctccggtctccttcttccgctgctgccaaatcccccccgccacccggaaagcaatggtacaggccgcgttacggcaagcgcagggagccaagcttcgtgtgattgcgaaaggccacggaaattaatattccaagtgattccttgctgggcttgctgtcaatgaggcaattgcggttcgctgagctgatggacacagtacccacccactacccgttagttcagggactgctaataacaatatgttggaatggtgctttcaacagaagtatgttttccttgtttcagacctatgtgaatatcctaagacaccacaatcctcttgccacacacttccatgggct

SEQ ID NO: 18584 - DNA, 1243 bp, Artificial sequence
  DNA replication origin
ggcctctgctgctccaccgcacccggctccgctccgcctcctgcctccacctccacctcctgcgccgcgtcgcccgctgctgggtctcggggccggagccgacgcaccacttacccgccgcaaagggatttacgtagcggacctcgtcactgattacggacgcgaggaggtggagacggcgagcccgaccgccgctcagcagcggcgccgccgcccagcaacccggagccggcagcggccccacgtagtcctcacgtcagctgtgatgcggtagccgcggcctccctgccgaccccggaccaaaagtagcgctgcagccgaccgaaccgcgtcctcccgccccgtcctcccctcccccacgccgggacggcctcccgggggaggccccgaggaaaaaaatccaggctcgaactccgccccctgccggccgccagcaggagtgaagcgccacaatccaacaatgaaatggaaccggggaggggcggcgggaaggtgcgggtcagggggcggggcctagggatagggagaaggaaggtcagggggcggggccaagaggaggaactagcctggaggtggggcggaaggtaggggcgggggcaaggctggaaaccggaagctgcccgtgccgcgccgcgcgtgcgccagaaatccaatgacttgtcagccagagtaacggctgttgtcaggtcttcagggtctcgaggtcggtttcttcctaacgccgccaaccccaagctaaggtccgcgagcgtctcacctctgtccaggctgggctgcagtggcgtggtctcggctctctgcaacctctatctccccaggctcaagcgatcctccggcctcagcctcctgagtagctgggactgcaggcgtgcttcttctgacttctaaaagctatctacataccttgactagtggcccttttcctccatattcacagccagtcacagctggttgagtccttctccaaaagaagcttgagctcctgagacaattcacctgcttcttagggtcatttattgcagtttatcccagtatttgactggaaatggtccgcatgctgggcccgctggctcgggcctgtaatcccaacacttcgggaggccaaggtgggaggatcgcttgagcccaggagaccagcctagggaacacagtgagacttcatctctttttttttttttagattagaaaggtcggccgggggctcacgcctgtaatcccagcattttgggaggcagacatgggc

SEQ ID NO: 18585 - DNA, 882 bp, Artificial sequence
  DNA replication origin
gcctgggtgacggagcgagacgccatctcaaaaaagaaaaaaaaagaaaaagaaaagaaagaaaagaaggaatctatttagcaaagaaaagccttgggaagtaagttgatctttagacatgtgtgaaataggatacttgagggtgaggataaaaatcagggtattctaggtttcctgaagctgtatcctttttccattcaactcatctttcatcaacccaaatttacaggccaaatcattgaagaatgacaagtctaacctctaattaccatggcgggtagagcggggaggagatggtgcactgtacacagagcaccaggaacccaagggaagttaggggagatccaggccctgaggagggccatgacctagtgatgacacacaaggggcattattacagtgtacgcaggatgaccctggaagggatgggtgggtgggagtcaggagagatgtgagcctcgtaccaggaagatcatactgaggccaccaggttgagagccgcctggctggggggcttgtccggggacagcaggggcagaggcatggaggtgagctctgtgtgacaggagccaggcctgagaacgcttggggaggagggggactgaggagttaggagtcatgtttgtgaaaagcttgcttgggcggtgcactagcagagactgcagccaggagacttgagaggtcagggaacagggcatgatctagagaaggtgtggaaattgagaatagggccaggcacagtggctcatgcatgtaatcccagcactttgggaggctgaggtgggagaatcactggagcccagcagttcaagaacaacatagtgagaccctgtgtctacaaaaagtttaaaaattagccaggcacggtggtgcacacctgta

SEQ ID NO: 18586 - DNA, 1229 bp, Artificial sequence
  DNA replication origin
ccgacgagcgggcgggcagcgggcgtgggcgcagcccccggactcctcgcggcgcggtgcggcgcggccagggaggatgctggcggccctccctcgccagcggcgcccgccctcgccgcagcccccgccccgccccgtcaccgccccttccctctgccctggaagcagatcggcggccgcggggaggttcggggcggcgcagccccgcgcggttgtgggatcgctcccgggggccgctcctctctcgggcactggggtcgcgggagacgtcgtcgggagctcggtttctggaggcccttccccacccggcctctgcctcctccactcccccgggctggacggaacggggcccagcgcgggatgcgaggtgcgtccccggggcccgcagcgggcgggagcgcagccagggcccggtcggggacgcaggcccagggcgctgaggctgcacctgcctctccgaaaccgggctggctctttttgtctttttatttttctaatttatttttttagaggtatgatttcgctctgtcgcccaggctggagggcagtggcgcaatctcggctcactgcagcctcgaactcctaggctgaagcgattctcccgcctcagcctccaaagtagccggtactacaggcgcgcgccaccacgcctggctaaggtgtgtgtgtgtgtgtgtgtgtgtgtgtctccaaagtagcgaggactacgggtgtgtgtgtgtgtgtgtgtctccaaagtagcgaggactacaggctcccgccactacgccaggctaaggtagggtgtgtatgtgtgttaactttttgtagagatgggatctccctttgtaacacgggcgcccgccactaagccaggctaaggtggtgaatgtgtgtgtgtgtgtgtgttaactttttgtagagatgggatctcgcttcgtaacccgggctggtatcgaactcctgtcttcaaggaatcctcccgtctggactcctcccatgggattacgggcatgagccacggcacctggctattttttttttctaagcatttaaataagctggggcttgatttgggagttttctattgtattttgagctttgccgaggacttgatagtgaccttgctttaagctgtgaaataaatcttggggtcccagagctattttaatattgaattcgctgtggagttgttttgagttccttggaggttaacatgagatagaaaactaagttaacacaactcatcg

SEQ ID NO: 18587 - DNA, 772 bp, Artificial sequence
  DNA replication origin
gagggagggccgccagcatcctccctggccgcgccgcaccgcgccgcgaggagtccgggggctgcgcccacgcccgctgcccgcccgctcgtcggctagtcccgccgtccggcgcggacacgcgtgcccccggcttgaaccggaacctcttgccgaggcggccgccgtcgccgcagccgccggggaagcggacaccaactggggaagcgcgggggggaggcggcctgcgcggcgccgcccgccatggccgcggcggggtgaggtaggcgcggcggccgcagtcgcgcggacccgagcgctcctccgccgcggataggccggccgagggggagccggggccgtcgcccgctcgtcgccgccgccgccgccgccgcccatggcgaggccccgccgccgccgccgctgctgacccggcggccggccgccgttccgccccctcccgtggcggcgagcgggcgggcctccccacacgcccccgccgcccgcgccccgcgtccacccgcgccccgctcccggggactgggagaacaggatagcagcaggagtcggggggccgccgaagatggggaacactacctcgtgctgcgtgtcgtccagtcccaagctccggaggaatgcccactcccggctggagtcctaccggccagacacggacctgagccgcgaggacacgggctgcaacctgcagcacatcagcgaccgggagaacatagacggtgagtgcggcccgccgagccccctacccgcccccgcggcaacagtcgcacagcca

SEQ ID NO: 18588 - DNA, 733 bp, Artificial sequence
  DNA replication origin
cccgcgccccgctcccggggactgggagaacaggatagcagcaggagtcggggggccgccgaagatggggaacactacctcgtgctgcgtgtcgtccagtcccaagctccggaggaatgcccactcccggctggagtcctaccggccagacacggacctgagccgcgaggacacgggctgcaacctgcagcacatcagcgaccgggagaacatagacggtgagtgcggcccgccgagccccctacccgcccccgcggcaacagtcgcacagccaacgtcggggcggcccggctgctcttgcttgcccagccggtctcggcgacccgtgcataaccggggcttcgcccgcgcagcctaggcgcccggggccccgcagcctctgggcgtacccctcgctggttacccccaagtgagcggccgcggaaactttgcaggcccgcggcatcgagcacggcgggcctagggcgggtgtgtgcgcgtgggtcgcgaggtgacaggagccggccctcgtccttaatggagcggccagagctgggtgggggcggcccgggagctcggggttcccggcactacctgaatgcagcccgaagccaagttgtgcacgcgtttgtcctataaaagcgaagtgagtggattcccattttggaatcccggtgtctccaacctcgagttggagaaccatgttgagtcagttccccggaaccttacaaatggactccacttcccccgttcc

SEQ ID NO: 18589 - DNA, 2433 bp, Artificial sequence
  DNA replication origin
tgctctctgttggacaccatctggggccccagggcagtcacgaacaaagcagaccggagagaaaacaaagcaggaagttaagggtggggacatgggtagggccggtgtagcagaaattctggagccaggctgcctgagttggaatgcgaattcccattacttgccgtgtgactttggcaagccctttaatttctctatgtctctttcctcataggtaacatgagggtaatattattattatatgagttgtactaaataaattggcatgtgtaaaattcttaaaatggtgcctgccatgtaactactatgtgttaggtattaggacagtgcttatataaagggatgttatggtgttactgttaggtaaggtgacatccttcagatacctgaaggatatgagagctgaaccatgtgactccttggggaaggagccttcccagcagagtgggcatgcgcctggtgggtttgaggggcagagggagtgtgggggatggaggggagtggtcagagaggcagcaggggcagggcatgtccagtcctgtagccactgtgagtactttgcactctagaatgggggccaatgtggagtttgagcagacgtgctcctaatgcagttttggcaggattcctgtggcaactatggagagaatggacaatggagtatccccagggggtgcagtgtgggttagaccctgaggcatgtcaaggggcaaggtcaggggatttgctggttggctgcattgggtgggaatagcgagggtggaggatgagtgcaggccttgaagggtggagttgctccttagtgactgatgtagactggaaggaacaggtcttgagcctgttgattttgatttacatgttagtcaacaggggagctgaacgggcagcatgggagttcagtggagtcagtgctggagataatagcatgggaaccattggcatactgagggtattcattacagtcttgtggctgaggtcaccacgcagcgaggagggaagggacaaggaagcagcagaggtgtgtgtgagaaggagctgaggaggggcagagataggggcagggaggggggtgaagagagagagatggtcccggcagtcagcgagggagacattttgaggagaaagtgggcatctctagtaagataaggactgagatgtggccattgaattagcagtggccttggtaagagctggagagttgggggtgggagcaatggccctactgggcagggttccagagagaacagggaggaggaactggagcacgcaggagcctggctgaacaggaagcaaagaaatagagggaaggctgcagagggggaggctggttgagagctgtagttcggtttttggaatgagagtaattactacgcgtgcctgtgctgatgggaaatgcatgatgcaggagagagagggtgggaggggcagggatccattgccgagtaggggggccggccccagggaggtacctttttagggaccacaggtcagagaggtgcagggagcagagatggcagggtgagcacaatggaggcaagaaggctgcagtgcttctcctggcctctgtcttctcagctgaacggacagtaagttgagagtgccagggagtgttggaggttgggggagagacaaaaagggcctttccaatgatgctatctcgcaccactcagggcctacctgagtagggtgtcaagagtttacggtgggaccagtcagcaggattctgcatctcctccagctgtgtacagctgcttggggcagaggagatggggagttagatttaatcagctctgggatttgccagaaagcgctttggagggcagaggaacgtggtggcacgtgagagcaccagggagccaatatgactacaaggctgtggctctgagtcgggtagagaagaaagcaaggatgtagcagggggaggggtggcagagaggtggtggaatcgggctttgtggtcttggtgggtggaagaatttacagggttgggatgtcagggagtgagttgggaaggtaggagatgaggctcagaaaagggctgctcaactttgagagcagggagtccttttggtgacttacagggagagggtggaggttaagattaaaacaccaggccttgcagggcagtggcatcctgggttttagcagtgtgtggaggatgtaggacattgtgctggggatgtgtgctccctgggatggttttggaagttgggagatggcattagaggctctttggagttttctgggctgagagcttgattgctaagggacagcctgggagttgtcagcttcttgagctgacagccaagtggggataaagcgtttcttctgatggaaaggttgtggttctgaggctgctggcacattgggaagggcatcttgcgggttcccatcattgtggagctacatctttatttctgaatgttggacatg

SEQ ID NO: 18590 - DNA, 993 bp, Artificial sequence
  DNA replication origin
cgccggtgccccctcttcctcccgcccaccctcctcgtcagtccggcgtccctccgcgtggcctgaggctccgctctgcttccggatggaggggcttgtggggggtcccggcctcctgcgcatccgccgccgcaggctgcagaccaggtcggcgaggcccagcagaaaagacagcgcgctgaccgcccagaggaacagcatcagcagggacttctctgtgggccgcgacacgtagcagtccaccacgcccgtgcacggagggcgcgtgcaagggaacttcttcggggccaggaatccaaagagaaagtagtgcaaggccccgaaggctgcctccagcagggtccggaggaggaggtggatgatgtagccggccgaaaagtcgggcacctggaggccgccgcgctccccgaatggccgcgggcagcgtctctgcccggaggccggctcccgggggtcggggcagcggcgggggcccagcgcggcgagcgtggctcctcggtgcaggacatagacgctgaagacggcggaggggaggaggacgcacacgccctggatcagccagaaccgcaggtgagacacgggggagaagacgtcgtagcaaacattggcgcatcccggctgcagcgtgttgcagacaaacctctcctgctcgtcctggtagacgggtcgccccgccaagacaatcaccagcatccgcagcagcatcgtgaggacgaaccagagctttcctggaagagaggaagcgggcatggcctcatcaccccgaatacactgccctgagtaacagctttaaagtgtctattggggctgagattgggaaattgaaacgtcaataagcatgtctttagttttctgtttgtttgtgttgtcgttgttgttgttgttggacacagggtcgtgctatattgcccaggctggtcttgaactcctggcctcaagtgctcctgccgccttggcctcttgagtagctgggattacaggcatgagccacca

SEQ ID NO: 18591 - DNA, 903 bp, Artificial sequence
  DNA replication origin
tggtcgcctgcctcttctacgagcagcacaaccgcccgcgctgggaggccacgcacaactgcccgtgcctgcgggacctgcagcccgaccaggcacgcaggcccgactacgccgtcttcatgctcaagtacttcatgtgcctagtggtgggcatcacctcgggcgtgtgggtctggtccggcaagacgctggagtcctggcgctccctgtgcacccgctgctgctgggccagcaagggcgccgcggtgggcgggggcgcgggcgccacggccgcggggggtggcggcgggccggggggcggcggcggcgggggacccggcggcggcggggggccgggcggcggcgggggctccctctacagcgacgtcagcactggcctgacgtggcggtcgggcacggcgagctccgtgtcttatccaaagcagatgccattgtcccaggtctgagcggaggggagggggcgcccaggaggggtggggaggggggcgaggagagccaagtgcagcgaagggacacttgatgggctgaggttcccaccccttcacagtgttgattgctattagcatgataatgaactcttaatggtatccattagctgggacttaaatgactcacttagaacaaagtacctggcattgaagcctcccagacccagccccttttcctccattgatgtgcggggagctcctcccgccacgcgttaatttctgttggctgaggagggtggactctgcggcgtttccagaacccgagatttggagccctccctggctgcacttggctgggtttgcagtcagatacacagatttcacctgggagaacctctttttctccctcgactcttcctacgtaaactcccacccctgacttaccctggaggaggggtgaccgccacctgatggg

SEQ ID NO: 18592 - DNA, 1026 bp, Artificial sequence
  DNA replication origin
tggcgggaaggcgcggccccctggcggcggcgcggctccctgcgagcccgggtgccagtgccgcgcgcctatggtgagcgtgtccagcgagcgccacccgctctacaaccgcgtcaagacaggccagatcgctaactgcgcgctgccctgccacaacccctttttcagccaggacgagcgcgccttcaccgtcttctggatcggcctgtggtcggtgctctgcttcgtgtccaccttcgccaccgtctccaccttccttatcgacatggagcgcttcaagtacccggagcggcccattatcttcctctcggcctgctacctcttcgtgtcggtgggctacctagtgcgcctggtggcgggccacgagaaggtggcgtgcagcggtggcgcgccgggcgcggggggcgctgggggcgcgggcggcgcggcggcgggcgcgggcgcggcgggcgcgggcgcgggcggcccgggcgggcgcggcgagtacgaggagctgggcgcggtggagcagcacgtgcgctacgagaccaccggccccgcgctgtgcaccgtggtcttcttgctggtctacttcttcggcatggccagctccatctggtgggtgatcttgtcgctcacatggttcctggcggccggtatgaagtggggcaacgaagccatcgccggctactcgcagtacttccacctggccgcgtggcttgtgcccagcgtcaagtccatcgcggtgctggcgctcagctcggtggacggcgacccggtggcgggcatctgctacgtgggcaaccagagcctggacaacctgcgcggcttcgtgctggcgccgctggtcatctacctcttcatcggcaccatgttcctgctggccggcttcgtgtccctcttccgcatccgctcggtcatcaagcaacaggacggccccaccaagacgcacaagctggagaagctgatgatccgcctgggcctgttcaccgtgctctacaccgtgcccgccgcggtggtggtcgcctgcctcttctacgagcagca

SEQ ID NO: 18593 - DNA, 775 bp, Artificial sequence
  DNA replication origin
aggcgcgctcgtcctggctgaaaaaggggttgtggcagggcagcgcgcagttagcgatctggcctgtcttgacgcggttgtagagcgggtggcgctcgctggacacgctcaccataggcgcgcggcactggcacccgggctcgcagggagccgcgccgccgccagggggccgcgccttcccgccaccgccgccgccgcgagctgggggcgccgccgcgtccccgccgccaccgcccctgccgccgccgcggtgcgggggcctggcccccggcgggcggccgtggccgctgcccgaaggcggctgctcgccgggcggcggcggcggcaggcggcgcggcgggctgggcgcggcggtggttaggtcggtgcggttgtagtccatgcacagcgtgtcagggttgccttgctcgggcagccggtcgcagcgcatgcggtcgggccaggcgaagccgtactggcgcatgagcggcgcgcagccggccttggcgcgctcgcacaccgagcggcagggcggcagcggcttcttgtagtcctctaggcagatgggcgtgtacatgctgcacaggaagaacttgagatcgggcgagcactggatctccaccagcggccagaactggtgcacctccaggcccgcctcgtcttgcgtgtcgtggttgaactgattgggcatgtaggtgtagttgtagccgatgcccttacacagcggcacggtgatctcttggcatgccagctccttggccgaggcggccgcagcgccgctagagcgctgcagcag

SEQ ID NO: 18594 - DNA, 1239 bp, Artificial sequence
  DNA replication origin
tgttgctcttggaaaccagcccctcccatctgtggtgcgggcagtgcagcacccttgctggtctttggggctctgcctgcaccgctgccctcagatcagcactggaacctctggcaattacctgcagctgatgcgttctggagactcgccctctggaaacaaggtgccaaccgcagagatagtgaatttctacattcaacatacaagtgggaattccgatttgcaggaggtgagaaaagaaaaaaaattttttaatcaagtaaaggtctagtctgtatttttgaatagcccgttttctgctgaatcagctaatatttctgaagcctttgaattccgaattcctacggactttagtttttccaaaacaaaagtgggaaggaagtgttgtttttcagtataaagaggttcaactctatagactaaaactaaaaaagttaaaaagataggggggtataactatagattggtggatatgcctagaacacagaacttgccaaaaacggggcgctggggcagggtgcggtctgacagtctacttgtaatatgtttcataatgaggttgctaactgagctacagaaagcaggaggaggaagacatagatgccatcagctcaagcaatctacaaatactgctggttatttttgttttatgacaagagttgtttctgaacggacaaccacgagctaccaccaccaccagcagcgccccgaaaaccggaactggcctcaaatgtacttttaattcttttgctctgtccccacgccctctgcaacttttgttctccaactgtacttgttccggtatgaaacctggcaaatagcaaaaatcttgaaacaagaagagagtgagagagcggagagaaaagggagggaaggaaggagagggaggaggggaagaggaggaggggggagagaaagtggtgggggagagagagaaggaaaggaggtggggagagagagagagggaagacagaagagaggcagggaggaagagggagagagggggacggagatggggaggaggcgggagggagggagagaaagagagagagaaacatattctgccaccctcctggctaactgaaatgcttgttcccgagattacagtaattactgccccagcatgagttccatacaagcgctaaatgaaacagcacatcaattaaaaaataaacactccattctaggagaaagacagccccctgggacgccctaacaagcgtaaatgaacctgccagg

SEQ ID NO: 18595 - DNA, 1414 bp, Artificial sequence
  DNA replication origin
cccacacaagaaatgtaatggaccagtcattcccttattcgttcaaccaatccatattgtgcatcaaatatgtgcctctcaacgtgacacctgctagaaataagaaagatgggcaaggcaagattcctaccttcacaatccagaggcgaagctctgcgctgcaatggagcagggaaagtgctgtaccagaggatgaatggaatcacagcggcaaaacatagaggcggccctgctcacccatgcgtgggggagaaatgggactcgggaaacaattccaaaaggagatgatgcaggagtttatgtttggaaaataaatttaaattagccggatcagagagataaggaaatgaattccagacaggaggcacattgtgagcaaaggcacagaaccaggagagagatcaaccgatctgttctggaaactgtaagtaggtgtgtgtcactgaagccaggggcataggggttgccagcatgagatgagcatgaggggcaagttatcagggctttgtgtttcagaccaggcctcgatgcacgggaaaagggactggactgaaaaagaaatattgctgcaatcaggtttgtaggcctatggagaatggttggggtgaagggagacaaactggagaacaggaacatcactgaggagggaattgaaatagctgaagtccacacgttcagcaaatattcgttaagtgtctagtatgtgccaagtatggtggtgacatttgtgatgatagtgccaggaagtcatgatgatggtgcagtggtgatggtagcggcagtgctagtgatgatggtggtgatgatggtgggggtggtagtgatggtggtggtgatggtgatggtggtggtgatgatgatgggggtggtagtgatggtggtgtgatggtgatggtggtggtgatggtggggggtggtagtgatggtggtggtgatggtgatggtggtgatgatggtggggggtggtagtgatggtgatgatgatggtagtggtgatggtggtgatgatggtggtgatggtggtgatggtggtggtggtgatgatggtgatagtggtgatgatgatggtagtggtagtgatggtggtgatgatggtggtggtggtgatggtgatggtggtgatggtgggggatggtagtgatggtgatgatgatggtggtagtggtgatggtggtgatgatggtggtggtggtggtgatggtggtgatgatggtggtggtggtgatgatggtggtggcggtggtgaagatggtggtggtggtgatggtggtgatgatggtggtggtggtggtgatggtggtggtggtggtgatagggttggtgatggtggtgatgatggtggggatggtagtgatggtgatggtggtggtgatggcagtgatgatggtagtgatgttcatgattgtggtgttcg

SEQ ID NO: 18596 - DNA, 1460 bp, Artificial sequence
  DNA replication origin
catgaaaataaagtccagtcagagtaagcctagaggttcatcttatccaatcagaacatgtagtccaggaacccccattgcctaagctcattatataaagcatgctgcagtgagtcaggccattccaggctctgttgtatctgcccacccagctctttcctcccagacttagcggacaagaagagggagacacctgctgcacgctggaggctggaggctggagcctgtggcacctcagctcacctcactgccaacaggatgacggagactgtggtgtggccaaagtggtagaatggtggcaagtgtgttaaccaaggcatctcttcccacagcatggggcagtttcggggcctatcctgggctgcactgcccatggcagggactggttgggtgcactatcccgggctgcactgctggcggcagtggggcacttgaggggagctatccagggctgtgttgcccacagtgttgggggggattgggggcatgatcctggatggacagggtctgcttgggtgtgctatccagggcatcacttcccctggcaggaggctggttgagggcactatcctagatggcactgcctgtggggtggggggggcactgtttgggtgcactatcccgggctgcactgctggcagcagtggggttcttggggggagctatccagggctgtgttgcccatggtgtggggcagattggggatgcaaccccagacagccatgggctcgttggatgcactatccagggcatcacttcccctggcggagggctggttgaaggtgctatcccaggctgcactgctgggggcagtggggcattttgggggttctatccagtgctgcactgcctgcagtgggggccctatccggtcttgcaacgcctgtggctgtgatgggttgtgagcaatatgggtactacactgctggtggcagggggcagtttgggggtgctgtaagggttacactgcctgccaggggtggggggatgttgggggcactatctagggcctgcactgctggaggcaggaggcagaggtggcagcgacagcggtggtctctaaggaagggtacgttctcctcttcctagactctgtattctagagggtgacctgttctgctcgttctggagcactggagatgaacaacgtttctgcaggaatcctgagtaaggcagggcccccatacccaccatggtccccaggcctacaccctcttgttgtgttgcaggaaccgcctgggaccccccccacactggcactgggggtcaggggagagtcagggcgggccctgtgggttcaggggtcaggaacaggaactagcacttgggtgtgggggtggctgggtctgagtttctgctactcctgttccccaaggtgtgcagccccagtgggcccgggggttcctgtctagctggacctggccaggactcggtttcagtgaagacactcacacccaccc

SEQ ID NO: 18597 - DNA, 785 bp, Artificial sequence
  DNA replication origin
tcaggggtcaggaacaggaactagcacttgggtgtgggggtggctgggtctgagtttctgctactcctgttccccaaggtgtgcagccccagtgggcccgggggttcctgtctagctggacctggccaggactcggtttcagtgaagacactcacacccaccccaggccccagttcctgaccaacttgggccaaaaggagaggctgaactttggagggtgggtgtgagtgccttcgctgaaactggcccctgccacccagtggccagcatgacaaggtgaggctctaatgctaccactccctgcatcctgttctaggcttttctggctttgcctgtccagctgctccatacccagctagaggaggagaagcaggaagcaccagatgcatgctggaggctggagcctgcagatggcatggctctgtggctcgcctcactgtggttggtggccgtgacagagaatgcaactcgactggagcggtaggagggggccagtggtggccaggtggtaggagccttacagggtgggctggtgcattgagggtaacagcagcagtggttgtattggcgtcagtgctagtggtggcagcaacagcaagtctgggggctgggaagggggaataggagcactgtggggcctggtccagcctggattggggaggaagttgcaggtgctgtactgtgggccttggtggcagtggtgaaggtgcagtcacggcaagaagccctcccccttctcctgcagaatctggagtgtctcttcctcctgctggtgcctgagccat

SEQ ID NO: 18598 - DNA, 2097 bp, Artificial sequence
  DNA replication origin
gggctcacgctgacctctgtcagcgagggaggggccggtgtgacgcaaggggctcaggctgacctctgtcagcgtgggaggggccggtgtgaggcaaggggctcaggctgacctctgtcagcgtgggaggggccggtgtaaggcaagggctcacgctgacctctctcagcgtgggaggggccggtgtgaggcaagggctcacgctgacctctctcagcgtgggagagggccggtgtgaggcaagggctcacgctgacctctctcagtgtgggaggggccggtgtgaggcaaggggctcatgctgacctctcagcgtgggaggggccggtgtgaggcaagggctcacgctgacctgtctcagcgtgggaggagccagtgagaggcaggggctcatgtctctgggcagggtgccagaggcatgagttgggcatcaacaggccactgtgagaaggagctgggccgcatgcgggctgctgggaggcaggcagggacttggccccgggaggccgccgtgggggcaagagctgggcctggagaggcccctgggaggcaagagtggggcctgcagaggctgttctccaaccagtgctgggcctgtacaggccaccgggaggcaggaagtaggcccgaagagcttggctggagaaagttcggggcctagaaaggcggttgggagctcggcagtagttgagccaaaagagcttgcttacttgctgggaggcagggccgggagaggccgacttcaggacaacttgggcctgcagaggtcgccaagaggcccaagcttggcgtggaggagcccaccgactggagaccatttggggcctgcagatgccattggagggcaggagctgagcttggagaggccaccgtgaggcctgacctgggcctggggagcttggcttcgggaagttgtgggtctaccagggccgctgggagctgggcaggaactgggccaaaaaaggctgttgtgaggcagcagttgtgcctgtagacccagccaagaggaagaggtgggcctggagaagcccccataaggcagaggttgggcctgtagacgctgacaggaggcaggagctgggcctgtagaggtcaacttgaggagattttgggccttcataatccaccaggaggcagcagttgggactagagagtctgactttaagttttgggcccggagatgacgtcctgggacaggagttgagcctggagaggccaccgtgaggcatgagctggatgtagagaggccagtgtgaggcaagacctgggcctgtctaggctgctgggagacaggcaggaatctggccagggaaggttgccatgagacaaaaattgggcctggaaagacccttgtgaagcatgagcttggcctaaagaggccactgggtggcaggagctgggtgtgtagaagctgctgaaaggttgggagcttggcttggggggtccacagtgaggcagatgctgggcctgaagaatctgctgtgaggcagatgttgggactgtagaggccgacgggaggcagaggctgtgcctggaggggtcaccaagatgcaggagctgggcctggagaggctgcaaagaagcatgagctgggcctggtgaggtcgacttgagaaagttcagggcctggagagaaggctgggaggcaggagctgggtctaaagaggccattgtaacgacggagctgtgcctgtggaggctgttgtgaggcagtaggctcatctgcggagactgccgtgaggtagggtatgggcctaaataggccattgtgagtcatgagcttggtctgtagaggctgactggagaaagttctgggcctggagatgctgccgggaggtaggagctgggccaaaagatttaagcacgtttacatttattaggcactttatttccattattacactgtaatatataataaaataattatagaactcaccataatgtagaatcagtgggcatgttaagcttgttttcctgcaactggatggtcccacctgagcgtgatgggagaaagtgacagatcaataggtattagattctcataaggacagcacaacctagatccctcacatgcacagttcacaacagggtgcgttc

SEQ ID NO: 18599 - DNA, 964 bp, Artificial sequence
  DNA replication origin
gtgggaggggccggtgtgaggctaggggctcccgcggacctctgtcagcctgggaggggccggtgtgaggctaggagctgaggctgacctgtcagcgtgggaggggccggtgtgaggcaaggggctcaggctgacctctgtcagcgtgggaggggccggtgtgaggcaaggggctcacgctgacctctgtcagcatgggaggggccggtgtgaggcaaggggctcccgcggacctctgtcagtgtcggaggggccggtgtgaggctaggggctcccgcggacctctgtcagcctgggaggggccggtgtgaggcaaggggctcccgctgacctctgtcagcgtgggaggggccggtgtgaggcaaggggctcaggctgacctctgtcagcgtgggaggagccggtgtgaggcaaggggctcctgctgacctctgtcagcgtgggaggggccggtgtgaggctaggggctcctgctgacctctgtcagcgtgggaggggccggtgtgaggcaaggggctcaggctgacctctgtcagcgtgggaggggccggtgtgacgcaaggggctcaggctgacctctgtcagcgtgggaggggccggtgtgaggcaaggggctcaggctgacctctgtcagcgtgggaggggccggtgtgaggcaaggggctcccgctgacctctgtcagcgtgggaggggccggtgtgaggcaaggggctcacgctgacttctgtcagcgagggaggggccggtgtgaggcaaggggctcaggctgacttctgtcagcgtgggaggggccggtgtgaggcaaggggctcacgctgacctctgtcagcctgggaggggccggtgtgaggctaggggctcacgctgacctctgtcagcgagggaggggccggtgtgacgcaaggggctcaggctgacctctgtcagcgtgggaggggccggtgtgaggcaaggggctcaggc

SEQ ID NO: 18600 - DNA, 967 bp, Artificial sequence
  DNA replication origin
agctagctgggcgtggagagtccgctgtgaggccgaggccgaggccgggcctgcaaaggtccactggagggcaagttctgggcctgaagaggccgccaaaagtcaaaagcggggcctgggaaggctgccgagagccatgagctgggctgggctgggctgaaagaggccactgggaggcaggaggagctgggcctggagaggctgactcgaggaagttttgcacctggagaggccgccgagaggatggagctgggcccggagaggctgacttgctgctcttccaggcctaattccaggccgacttgaggacgacttgggcctgcaaaggccgccaggaggccggagctgggcctggagaggccaacttcgggacgttttgggcctgcagaggccgccgggaggcccaagctgggcctagaggagcccaccgaccggaggccatttggggcctgcagatgccatcggagggcaggagctgagcctggagaggccaccgtgaggcctgagctgggcctggggagcttggcttcaggaagttgtgggtctaccagggccgctgggagctgggcaggagctgagtccaaagacgttgttgggaggccagagtcgggcctggagacgcagccgggaggaagagctgggcccggagaggacgctgggaggctgcaagtgggtctggagaggccgacttgaggaggcccggcctctgcctcccacatgggggcctcttcaggcccagctgttcctcctggctgcatctcccggcccagctcctgcctcccagcaaacaagctcttttggctcagctcccgccggcctttgtagaccccgaagtttctgcaaccaagctctcaggcccacatcccgccaccagtagcctgaacagtcccagctccggctggagaagagcatctgcaggccccgctgttgcctcccaggggtgtctccaggcccagctctcgcccca

SEQ ID NO: 18601 - DNA, 962 bp, Artificial sequence
  DNA replication origin
gccgcggcggggggcaaaaagccgcgtcaacggaggacaaaaagccgcgtcggcggggggcaaaaagccacggcgggcaaaaagccgcggccgggaggggggcacaaagccgaggcggggtgggggcaaaaagacaccgtggcgggggctaaaaagccgggtgaggaaaaagccgcggcgacggggagcaaaaagccgtggcggacaaaaagccaaggcagggtgggggcaaaaagccgcagcgggtaaaaagccacggaggcaggggggaaaaagccacggcggggaaaatgccgcggcggctgtggggcaaaaagctgcggcggcaggggggcaaaaacccagggcgggcaaaaagccgaggcggggtggggggaaaaagccacggcggcggggggggcaaaaacctgcggcggcaggggcaaaatgccgcggcggcggggggcgaaaagccgcggcaggtaaaaagccgcggcggcgagggggcaaaaagccggggcaggcaaaaagctgcggcggcggaggacaaaatagtggagatggggtagaaggctggcacagcttggcattgctggagtgtgatgtgataggaaatgtgcagccaaacacaaaaaaagatgtaagtaggcttgactcattgcagctaagaacccagatgttatcttgagggtattaactaataagcagtttaaatcagaatggcacattctgatttgttttttgtgtgttcacatttggcaggcatagatactgtttgaagagagaaaagtcagtagatagcggtaacaaacttaaatatgtgccaagtctagaaacaagagaccagggggataaggacctttcaaaataaaatgcaagatttgaaaactgattggctggaggatgaggaaaaggcaggtctttaaggtcaatccctattttgctttaagttgttagggggtggttttatcacatattgtaga

SEQ ID NO: 18602 - DNA, 1507 bp, Artificial sequence
  DNA replication origin
gggaagtggccgaggggtccggtccggggtggtctgcagagatgcaggcggcagttcggagccgggaaccacgcgttcacccgccaagtcggacaggcctggcggggtgggcgagacactgggaacagcagccagctccagagggcgcgaggcggggtgcgcggggagcgggggggcgcacgcggttggggggcagtgagggtcgccgcggcggcacgcagcacggcgggaacatggcgcatggaactggtgcacgcgcctagttggcgggaccattagctcgaggcggacgcggcccggaccccgtggatatggggcagtcgccgcctccggcgcccgagccgacccaagggccgacccccgcaaggagctgaaggcagcgggagcccgagtcgccgccgacgtcggcgccggtgagtgcttgaggggctcgggccaggagactttctttgtgaaactccggcggtgggagccgggccaggcctcagcggctgaggagtgcctgtgaggcagaaggcgtctcgcagtccgggttcgatcccagctgcgagccgtcaggcggcaggacctggtctgctgcctgcctgcctcagtttccacgggagtgtgtgtgggtgtgtgtgggtgtgtgagggtgtgtatgggtgttggcctgcgcacaccggagggggggtcggtatacagtcggcgcctaatgcgcgcagcgcctcccccctccccccagtccccgtggggcagaacctggggactggagtccaccagagcagtaggcggcacctgcggggagacaggtgtcggcgcagcctcggaggctcaggtgctacttttcccgggtggggtttgtgaggggtgagctcttcgtccccggaggcgagcaagtctgtcagtggctcatcacagagagctgttttggaaagcgttccacccacctcagcttcgtgctgtgtttgggccactagtcagggggaaggatgctgagcgacatggactttagaggtggggctcccgctggacagaatggctctgggctctccagcttacccctacccttgcctcccaaacccgttagagtgtaggaatcattgggagcacctgataaaaatgccacggattgtggctcaccaaagcagggaagccgatttggaacttaagctcccaagttgtgatcagtcgagcttggcaagcactgttttagagagtaggcttcctgcatgcaagagccggttttgtgtatacctcaccatggcatcttggtacctggcatggtgcctggcacacggtagatgatcataaaatatctgtagaaagtctaaattattagggagagtgcagcataggagttcttgagacattttcaggagcttcttgagactaatatctgtcaggtttgttttacagtatatgatttttctcagctcccaacttttgtgattgtttttaatgccatgttttcagtatgttctaggcaaaagcagggtatatgttgcttagtatacactatccacta

SEQ ID NO: 18603 - DNA, 1266 bp, Artificial sequence
  DNA replication origin
  misc_feature (1)..(43): n is a, c, g, or t
nnnnnnnnnnnnnnnnnnnnnnnnnnnnnnnnnnnnnnnnnnngaatggaatggagaggagtggagtggaaaggtgtagaatggaatggaatggaatacagtggagtgtagtggaatggaggggagttgagtgcagtggaatggaatggagtggaatgaagtggagtggagtggaatggagaggagtggagtggagtggaatggagcagagaggagtggagtggagtggagtgaattgaagtggagtgggatggaatggagtggagtggaatggaatggaatggaatggaatggaatcgaatggaacagaattcaatggaatggaatggaatggaatcgaatggaatggaatcgaaatgaatggaatggaatagaatggaatggaatcgaatggcattgaatggattcgaatcaaatgtggtgaagtggactggagtggaatggagtcaaaaggaatggggtggaatggaattgaacgaagtagagtgcagtggagtggaatggagtagagtggaatggactgggaaggaatggaattgaacggagtggagtgaagtggagtggaatggaatgcaatggaatggaatggaatggaatggaatggtgaaatgaaatgtgagctcagattgtgcaccgcactccaacctgggtgacacagtgagatcgtgtcaaaagaaaggaatggaatagaatggatttagaatgtaatgtaatggaatggagtggagtggagtggcgtggagtggattggtgtggagtggaatggagtggtttggatagttatgcaatggaatggaatggagtggagtggagtggcatgaagtggagtggaatcgagtggaatcaaatgggatggaatggaacagagtagagtggagtggagtggaaagatgcagaaagaaatggaatggaatggagaggagtggagtggagggcagttgagtagagtggattggagtgcagtgaaatggagtggaatggagtggtgtggagtggtgtggaatggagtagaatggagtggagtggagtggagtggagtcgagtggaaaggtgtagaatggaatggaatggaaaggagaggagtggagtggagtggatttgagtggaatggatggtagtgctgtggaatggagtggagtggaatggagtatagtgtagtggagtggaatggaatagaacgaaatggaatggagtggaatggaatggaatgcaatggaatggaattgaagggaatggaatggaatcgaatggattggaatcgaacgg

SEQ ID NO: 18604 - DNA, 1920 bp, Artificial sequence
  DNA replication origin
gaaagaaatggaattgaatggatttaaaatagaatgtaatggaattgagtggagtggagtggattaacgtggagtggagtggagtggaattgaatgggaaggaatggaattgaatggagtggagtggaatgaaatgcaatggaatggaattaaatggaatggtgaaatgaaatgtgagctgagattgcgcactgcacttcagcttgggagaaagagtgagatcctgtcgaaagaaaggaagggaatggaatggatttagaatgcaatataatggaatggatttagaatggaatataatggaatggagtagactggagtggagtggagtggtggggaatggagtggagtggaatggagtggagtggaatggaatggaatggaatggaaaggaacggagtggaaagaagtgaaatggagtggggtggaatggcatggaatggagtcgagtgtagtgtagtggaagggagtggagtgcagtagaatggaattgagtggaatggaatggagtggaatggaatataatggaagggaatggaatggagtggagtggaatggagtggagtagagtggaatggagtggagtggaatggagtggaatggaatggaatggaatagaatggaatggaatggaatggaatggcatcgaatggaattcaatggaatgtggtgaagtggagtggagtggaatggagtggaatggaatggggtggaatgaaatttaatggagtggagtgaagtggagtggaatggagtggagtggaatggactgggaaggaatggaattgaaccgaatggagtggagtggaatggtgtggaatggaatgcaatggaatggaatggactggaatggtgaaatgatatgtgagctgagattgtgcactgcactccaacctgggtgacagagtgatatcctgtcataagaaaggaatggaatggaatggatttacaatggaatggaatggaatggagtgtagtggagtggcgtggagtggagtgtaacggaaaggtatggattgttatggaatggaattcaatggagtggagtggagtgctgtggggtggagtggagtggagtggaatggagtggaatggcatgggatggaatggaatggagtggagttgagttgagtggagtggaaaggtgtagaatggaatggagtggaatggaatggagtggactggaattgagtggagtggaatggaatggagtggagtggagtggaatggagtggattggagtggaatggagtggagtggagtttagtggaatggagtggagtggagtggaatggagtggagtggagtttagtggaatggagtggagtggattggaatgaaagggagtggagtggagtggaatggcgtggaatggaatggaatggagtggagtggaatggagtggagtggagtggaatggaatggaatgcaatggagtggaatggaatggaatggaatgaaatggaatggaatggcatggaatggtgaattgaaatgtgagctgagattgtgcactgcactccagcctgggtgagagagtgagatcctgtcgaaagaaaggaatggaatggaatggatttagaatggaatggaatgaaatggaatggaatggaatggaatggaatgtggtggaatggagtggagtgaaatggagtggaatggagtggagtgcagtggaatggagtggactggagtggaatggaatggaatggaatggaatggagtggagtggagtggaattgaatggagtggaatggaatgcaatgcggtgaagtggagtgcagtggagtggaatgaagtggaatggaatggggtggaatggaattgaatagcgtggagtggaatggagtgtagtggaatggaatttcgctgtagataaaaactagtatttccgcctaccattgagtgtacttatagctaacc

SEQ ID NO: 18605 - DNA, 1276 bp, Artificial sequence
  DNA replication origin
aaaaaaccacaaaaagccgcggcggcaggggcaaaaagctgcaaaaagcagcggcagctggggcaaaaagcagcgacggcgggggcaaaaagccgcggcggcgtgagcaagaagcctcggtggcggggcaaaaaagcgcggcggtggcagcaaaaagctgcggccgggggaaaaaccccgcggcggcggggcaagaagccgggtaggcaaaagccgtggcggagggggcaaaaagccgcggcggccaaaacccgtggcagcgggggcaaaaagcagcggcggtgggggtaaaaagccgcgtcggcaaaagccgtggcggcaggggccaaaagccgcggcggcggggacaaaaagccgtggaggctcgggcaaaaagcagcggcggcgggggcaaaaggccgtggcgggggcaaaaggctgcgacggcagggggcaaaaaagccgcggcggcggggggagaaattccgtaaaaagccgcggcggtggggggaaaagccgcggcggcaaaaagcagcggtggcaaaaagcagcggcggcaggggcaaaaagccgcggtgggagaaagccgcggctgcggggtcagaaagcctcggcggtgggggcaaaatagtggaaatggggtagaaggcggcacggcttggcattgctggagtgtgatgtgataggaaatgtgcagccaaacacaaaaaaagatgtaagtaggcttgactcattgcagctaagaacccagatgttatcttgagggtattaactaataagcagtttaaatcagaatggcacattctgatttgttttttgtatgttcacatttggcaggcatagatactgtttgaagagaggaaactcagtagatagaggtaacaaacttaaatatgtgccaagtctagaaacaagagactagggggataaggatcttttaaaataaaatgccagatttgaaaactgattggctgggggatgaggaaaaggcaggtctttaaggtcaatacctgttttgctttaagttgttagggggtggttttatcacatattgtagaatatgtcatttcagttttgaacatcttgacttaaattgtcctaacatatcttatgaatttgattttgttccctgggaagctaatatttcaaaaactgaaagagtatagatttccaacttgtgtccaatttataaaattctctctaagctgctggtttcaggaggaggctcatgaatattctatttgcagagaatatatcaggagttaacaacagcatcaatatttgtggacgaccagtt

SEQ ID NO: 18606 - DNA, 2931 bp, Artificial sequence
  DNA replication origin
cttccttttttctttctctttagtacaattcatattatttaaaaaaaattaagaaagagaggcagaaaaataaagaacactttaatctgcaggtaaatagattatgtctgctgtagacaaaataatggactcacaaaaatgttcatgtcctaattcccggagtctaacatacaaatatgttaggttgcatggcagtgggaaattagatttcaagtgaaattaaggttccaaaggcagcggggacaaaaagccacggcggcaaaaaagcgcggcagcaggggcaaaaagccacggcggcagttggagaaagacgcggcggtggggacaaaaagccacactgaggggggtaaaaagccactgaggcgggggcaaaaagcagcgggagcgggggcaaaaaaaacacaaaaagccgcggcggctgggggaaaaagccgtggtggcagggtgcaaaaaagctgcagcgacaggggcgaaaagccccggcggcggaggcaaaagactgcggcagagggggcaaaaagctgcggcagtggcggttaaaaaaagccacggcggcaaaaacccgcggcggtgggggtaaaatcccgtagtggcgggggaaaaaacagcggtggcaaaaagtcacggaagcgggggcaaatagccctggtggcgggtgcaaaatgccgcagcggtgaggacaaaaagccgtggcttcagggacaaaaagctgcagcagcgaaaagctgtagtggcgggggcaaaaagccacggcagcggcgggggggcaaaaagcagcggcggcgggaacaaacaccgccgcggcaaaaagcctcagtggcgggggcgaaaagccgcggcggcgggggagaaaagccacaaaaagccatggtggcgaggctaaaaagctgtggctttgggggcaaaaagccacagcctcaaaaaaccatagtggtggggcaaaaagctgcggtggcggggacaaaaagcagcaagagcgggggcaaaaaaatcacaaaaacccgcggagacggggggaaaaatccacgggggcaaaaagccgcaaaaagcagcagcggcaggggcaaaaaccgcggcggcaaatagcctcagtggcaggagccaaaagccatggtggcgggggcaaaaagccgtggtggtgggcccaaaaagccgcggtggtggaataaaactgtgactgcaaaaagccacggcgatggggataagaagctgtggcgggggcaaaaagccacagcggcggggagtaaaatgccgcaaaaagccgcggtggcgagggcaaaaaggtgtggcttcgggggcaaaaagctgtagcggctgggcaaaaagccgcggtggcgaaggcaaaaagctgtggctttgggggcaaaaagccgcggcagcggctggggcggaaaaaccacaaaaatccgctgagacagggggaaaaagacgcgggggcaaaaagccgtggcgacagggggaaaaaatctgcaaaaagcagcagcggcagggttaaaaaccgcagcggcaaaaagcctcagaggtaggagcaaaaagccacggctgcgggagggcaaaaagccacggtggtgggaccaaaaagccatggcggtgggaataaaaagccgcggctgcaaaaagcagcggcggtggggataaaaagtcgtgacggcaaaaacccgcggcggtgggggcaataagccgtggcggcacggggaaaaagccgtggcggcgagggcaaaaagctgttgcttcgggggcaaaaaaccacggcggcaaaaagccctagtggtggggcaaaaagcagcgggagcgggtgcaaaaaacaaaaacccggggcgacggggggaaaaagccgcatgggcaaaaagccgcagtggcagggggtcaaaaagccacggcggtgggggggcaaaaagctgcaaaaagcagcggcggcgggggcaaaaactgcagaggcaaaaagcctcagcggcaggagcaaaaagtcatggcggcgggggcaaaaagccgcggcggctaaaacccatggcggcagggtcaaaaaccatggcttcggaggcaaagagccgcggtggcaaaaagccgtagtggtgggggcaaaaagccacaaaaagccgtggcggcagggccaaaaagccatggcgccaagggcaaaaagccgtggcttcggaggcaaagagccgcagcggcaaaaagccacaaaaagccatggtgatgggggcaaaatgccacggcggtgggggtaagaagcctcggcagcgagggcaataagccgtggctggagaaacccgcagcggcgggggcaaaaagcaacagcagcggtgacgaaaagccacaggggcgggggcagaaatccacgaggcagggaaaaagctgcagcagcgggggcagaaatccgcgaggcggggaataagctgcagcggcgggggcaaaaaggcaggacggcgggcgcaaaaagccgcaaaaagccccagtggtgggtcaaagagccgcaaaaagccccagtgttgggggcaaaaagccgcggcggcagtggcaaaaagcagcggaggcaaaaacccacggcggtggcggcaaaaagcagcggtggcaaaaagccgcggtggcaggggcacaatagtggaaaaggggtagaaggccaatgcagcttggcattcctggactgtgatgtggaaggaaaagtgcagcggaagacgaagatgtaagtaggcttgactcagtgcagctaagaactcagatgttatcttgatgttatctatcagctaattttttgtattttagtagagaaggggttttaccaagttggccaggattgtctggatctcctgagctcatgatccacgcacctcagcctcccaaagtgatgggattagaggcatgagccacaaagtgctcaaaaaatctattaattaaaaaatgtgtatgtagccatcttcaatctaccgtgtc

SEQ ID NO: 18607 - DNA, 1053 bp, Artificial sequence
  DNA replication origin
acaaaatgaaaagtctcccatgtttacttctttctacacagacacagcaaccatccgatttctcaatcttttccccacctttcccccttttctattccacaaaaccgccattgtcatcatggcccgttcttaatgagctgttgggtacacctcccagacggggtggtggccgggcagaggggctcctcacttcccagtaggggcggctgggcagaggtgcccctcacctcccggacagggtggctggccgggcggggggctgaccccccacctccctcccggatggggcagctggccgggcaggggctgacccccacctccctcctggacggggtggctgccgggtggagatgctcctcacttcccagacggggcggctgccgggcggagggtctcctcaattctcagatgggacagctgggcagagacgctcctcacctcccagaccgggcggcggggcagaggcgctccccacatctcagacgatgggcggccgggcacagaagctcctcacttcctagatgggatggtggccgggaagaggtgctcctcacttcctagaagggatggcagccgggcagagacgctcctcactttccagactggccagccaggcagagggtctcctcacatcccagacgatgggcggccaggcagagacactcctcacttcccagacggggtggcagccgggcagaggctgcaatcttggcacttttggaggccaaggcagggggctgggaggtggaggttgtagcgagctgagatcacgccactgcactccagcctgggcaccattgagcactgagtgaacgagactccgtctgcaatcccggcacctcgggaggctgaggctggcagatcactcgcggttaggagctggagaccagcccggccaacacagcgaaaccccgtctccaccaaaaaaatacgaaaaccagtcaggagtggcggcgcacgcctgcaatcgcaggcactcggcaggctgaggcaggagaatcaggcagggaggttgcagtgagccgaaatggcagcagtacagtccagctttgg

SEQ ID NO: 18608 - DNA, 904 bp, Artificial sequence
  DNA replication origin
ctctgcccggctgccatcccttctaggaagtgaggagcacctcttcccggccaccatcccatctaggaagtgaggagcttctgtgcccggccgcccatcgtctgagatgtggggagcgcctctgccccgccgcccggtctgggaggtgaggagcgtctctgcccagctgtcccatctgagaattgaggagaccctccgcccggcagccgccccgtctgggaagtgaggagcatctccacccggcagccaccccgtccaggagggaggtgggggtcagcccctgcccggccagctgccccatccgggagggaggtggggggtcagccccccgcccggccagccaccctgtccgggaggtgaggggcacctctgcccagccgcccctactgggaagtgaggagcccctctgcccggccaccaccccgtctgggaggtgtacccaacagctcattaagaacgggccatgatgacaatggcggttttgtggaatagaaaagggggaaaggtggggaaaagattgagaaatcggatggttgctgtgtctgtgtagaaagaagtaaacatgggagacttttcattttgttctgtactaagaaaaattcttctgccttgggatcctgttgatctatgaccttacccccaaccctgtgctctctgaaacatgtgctgtgtccactcagggttaaatggattaagggcggtgcaagatatgctttgttaaacagatgcttgaaggcagcatgctcgttaagagtcatcaccactccctaatctcaagtacccagggacacaaacactgcagaaggcctcagggtcctctgcctaggaaaaccagagacctttgttcacttgtttatctgctgaccttccctccactattgtcccatgaccctgccaaatcccc

SEQ ID NO: 18609 - DNA, 1432 bp, Artificial sequence
  DNA replication origin
tgcggctttttgcccccgccgccgcggctttttgccatcaccgtggctttttccccgccgccatggcttcttgcccatgcggctttttactgccgctgcggcaggtttttaccgctgaggctttttcaccccgccgtcgcgggtttttgcccccaccgccgcgggtctgagggcgggatcgtcagactcggcttccagatctactggcgtcctggctaaggcagctccgagggtcactcctgatctagctctcctggttcgggggttccttgcctagacacccgcgccccaggctccgctcctgggccactgcagcctgcatagaggggcgctgcgctaggccccgatgggagagaagaaggagggcggtggcgggggtgacgcggctatcgcggagggaggcacaggggccgcggccagccgggcgctgcagccctgcaggcagctccagaagctcatcggcatctccattggcagcctgcgcgggctgcgcaccaagtgcactgtgtccaaggacctcacccagcaggagatacggacagtggagataagggggtcggggaccagggttgggctccagcaccagactggacatctccctcggggccccagttcactcccggccgagttgcatgcttgagcccgcgtctctcccttggaggcttctcctccctcctgcactcgctgatgcagcagccggaggacctgggaccagccctcaccttgggcaggatttgtggggtgggtgcgtgttgggaactttgatggaggctcgaggggcccgtgggtggggtgggctgtgcgcggacgtccccttacaccccgaatttccatctggtgcagccttctcatcttgtaggtgaggaaaccgaaggcctgagggagaaatgacttgtcaggaacccctgttaaggaaaattaacaaattgtggttatcaaaggagaactgagttgagattcagacctggagtcccacacccttggttaagacattataccaccttgagtctggcctgttgactgagggtgagccactccattcttgtctgattgtggggtcttgacctcaaggggtttcgtgcagcaataagcaaatgggtttgctttcctagctctgtccagtactttagggaccctgagaagtggagagattcttggagagccatctggtgtatgtcatgggtgggccttgcttgaaggtcagtctgcccagtgggctggctcagcccgaatgaactctcttgaatctttggagttgtctgcgtacttttaagggtttctcatccttgcaccaaaagattccctggaaattaggtgggaaaaccttaacttttgtggagccttgtatttgtcttcaaagttcatgcgcatagccaggtgtggtggctcatgcctgttatcctgtcctggatcccttgagtcaaggagtttg

SEQ ID NO: 18610 - DNA, 1134 bp, Artificial sequence
  DNA replication origin
tgtgcctccctccgcgatagccgcgtcacccccgccaccgccctccttcttctctcccatcggggcctagcgcagcgcccctctatgcaggctgcagtggcccaggagcggagcctggggcgcgggtgtctaggcaaggaacccccgaaccaggagagctagatcaggagtgaccctcggagctgccttagccaggacgccagtagatctggaagccgagtctgacgatcccgccctcagacccgcggcggtgggggcaaaaacccgcgacggcggggtgaaaaagcctcagcggtaaaaacctgccgcagcggcagtaaaaagccgcatgggcaagaagccatggcggcggggaaaaagccacggtgatggcaaaaagccgcggcggcgggggcaaaaagccgcaaaaagccgcggcggcgggcgcaaaaagccgcaatggtgggggcaaaaagccggggcggtggcggaaaaagccggggcgatgggggcaaaaagccgtggcggcgggggcaaaaagctgcggtgatgggggcaaaaagccgtaaaaagccacagcgtcgggggcaaaaagccgcggtggcgggtgtaagaagccgcggcggcaaaaagatgcggcggccgggacagaaagccgcggcggcgggggcaaaaagcaggggtggcaaaaagtcacggcggcggcgggggaaaaaagccgcggcaggaaaaacctgaggcggcgggggaaaaaagccgctgcggcggggaccaaaagccccaaaaagccgcggcatcgggtgccaaaagccgcaaaaagccacggcgaaggggctaaaaagccgcaaaaagccgcggcagagggggcaaaaagcagcggaggcaaaaggccacgacggcgggggcatgaaaccgcaaaaaccctcggcggcaggggcagaaagccgcaacggcgggggcaaaaatcaacgggggcaggtgcaaaaagccgtggcggcaggggcaaaaagcaacgggggcgggggcagaaagccgcggcgaggggggcaagaagccgcggcggcaaaaacccatggcggcgggggcaaagagcggctgaggtgataaaaagctgcggcggcgggggcaggaagccgcgtagggggcaaggagccg

SEQ ID NO: 18611 - DNA, 1034 bp, Artificial sequence
  DNA replication origin
gggctaaaaagccgcaaaaagccgcggcagagggggcaaaaagcagcggaggcaaaaggccacgacggcgggggcatgaaaccgcaaaaaccctcggcggcaggggcagaaagccgcaacggcgggggcaaaaatcaacgggggcaggtgcaaaaagccgtggcggcaggggcaaaaagcaacgggggcgggggcagaaagccgcggcgaggggggcaagaagccgcggcggcaaaaacccatggcggcgggggcaaagagcggctgaggtgataaaaagctgcggcggcgggggcaggaagccgcgtagggggcaaggagccgcggcggagggggcaaaaagcagcaaaaagcccaggcgtaggggcaagaagccgtggcaggaaaaacctgcggctggcggggggaaaaagccgcagcggcgggggcgaaaagctgtaaaatgccgcggtggcgggggccaaaagccgcggcggcaaaaagccacataaagccggggcggcggggcaagaagccgcagcgggagaaacctgcggcggcgggggcaaaaagccgtaaaaagctgcggtgctgggggccaaaagccataaaaagccgcggtggaaaaagtcgcggtggcggaggaaaaaagccgcaaaaaccgcggcagcgagggcaaaaagccgtggcttccggagcaaaaagccgtggcggcgggggcaaaatagtggaaatggtgtagaaggccagcacagcttggcattcctggagtgttatgtggaaggaaaagtgcagaggaagacaaacaaagatgtaagtaggcttgactcagtgcaactaagaacccagatgttatctatcagctaattttttgtattttagtagagaaggggttttaccacgttggccaggatggtctcaatctcctgaactcatgatccgcgcacctcagcctcccaaagtggtgggattagaggcatgaaccacaaagtgctcaaaaaatctattaattaaaaaatgtgtatgtagccatctttaatctaccatgtccatta

SEQ ID NO: 18612 - DNA, 958 bp, Artificial sequence
  DNA replication origin
ggcaacaagccgcgaccggcaaaaagccgcggcggcggggggcaaaaagccgcggcggcgggcggcaaaaagccgcaacgtcggggggcaaaaagccgcggcagtgggggtgcaaaaagccgtggcgggcaaaaagtcgctgcggcggggggcaaaatgccgcggcggcgggggttcaaaaagtcgtggtggcgggggtgcaaaaagctccggcgggtaaataaccgcggcacgtgggggggggtggtaaaaagccacggcggcggggacgcaaaaagccgcggcgggcaaaacgccgaggagcggtgggggcaaaaagccgcggcggcgggtgggcaaaaagccgcggcgacgggcggtaaaaagccgcggtggggaaaaagccgcggcggcgggcagcaaaaagccacggtggcgggtggcaaaatgccgcggcgacggggggcgaaaagtctcggagagtaaaaagccggggaggggcggggggggggggcaaaaagccgcggcggcggagggcaaaatagtggagatggggtagaaggccggcacagcttggcattgctggagtgtgatgtgataggaaatgtgcagccaaagacaaaaaaagatgtaagtaggcttgactcattgcagccaagaacccagatgttgccttgagggtattaactaataagcagtttaaatcagaatggcacattctgatttgttttttgtatgttcacatttggcaggcatagatactgtttgaagagagaaaagtcagtagatagaggtaacaaaaatatgtgccaaatctagaaacaagagaccagggggataagaacctttcaaaataaaatgcaagatttgaaaactgattggctgggggatgaggaaaaggcaggtctttaaggtcaatccctgttttgctttaagttgttagggggtggttttatcacatattgtagaatatgtcatt

SEQ ID NO: 18613 - DNA, 887 bp, Artificial sequence
  DNA replication origin
agggccaaggcagggcagggtcagtgtagagcaaggaacgggccagggtatggcagggcagggacagggaggtccagggccagagtcaggtccaggacatggacagggcagggccagaaatatggcaggaccagaaaggggacagggaaggggcaaggccaaggccagagaaggaccacggtaaaaacatggccagggagggtccaggacaagggcaaggccagggcagaaccagagccagggcaggcaaaggcagggccagggcagggcagggccagggcaggtcaacgccagggtagggtagggccagtgtagggtgagggtagggccagggcaagttcagggccagggcaggactaagatagcacagggccaaggccaaggccctgtactaagatagcacagggccagggcagggccaaaggaggggccagggccaagcatggccagtgtggggcctggggattgtcagggccagggccagggtgaaggctgagccagagacagggccagagcaatggcagggccagggagaaggcagaaccagagaggatccagagaaacagcagggccagggcagaacaaggaccaggataaggcaaagccaaggccagggcagggcaacgacagggcagggcaagaccagggaagggcaaggccagggtagaaaaggccagtgtacagccaggccagggtaggaaaaggccatggtagggccaaggccaaggtggggcagggctagggtagcacagggcatggccaaaaacagggcagggccatagcagtggcaggactagcaacagggccagggtaagtgctggaccagagcatggtggggacaatacagggccaggacagatgatggcaaggcaggtccaaggtcattt

SEQ ID NO: 18614 - DNA, 922 bp, Artificial sequence
  DNA replication origin
gagctcttcgttcccggaggcgagcaagtctgtcagtggctcatcatagagcgctgttttggaaagcgttccacccacctcagcttcgtgctgtgtttgggccactagtcagggggaaggatgctgagcgacatggactttagaggtggggctcccgctggacgggatggctctgggctctccagcttacccccacccttgcctcccaaacccgttagagcgtaggaatcactgggagcacctgataaaaatgccacggattgtggctcaccaaagcagggaagccgatttggaacttaaacaagctcccaagttggatcagtcgagcttggcaagcactgttttagagagtaggcttcctacaagcaggagccggttttgtgtatacctcaccatggcatcttggtacgtggcatggtgcctggcacacggtagatgatcagaaaatatctgtagaaagtctaaattattagggagagtgcagcataggagttcttgagacattttcaggagcttcttgagattaatatctgtcagatttgttttacagtatatgatttttctcagctcccaacttttgtgattgtttttaatgccatgttttcagtatgttctaggcaaaagcagggtacatgttgcttagtatatactatccaataggcggggtgcggtggctcactcctgtaatctcagcactttgggaggcagattgcttgatcccaggggcttgaggctgtagtgagccaaggaattaaaggccagtgtgggaaacatagtgaggctcgtctccgcaaaaattagctgggtgtggtagcatgcacttgcagtctcagctactctggaggctgaggtgggaggatcacttgagctcaggaagtacaagttgcagtgagccaaggttgtgccactgcattccagcctg

SEQ ID NO: 18615 - DNA, 919 bp, Artificial sequence
  DNA replication origin
cggcgcccgagccgacccaagggcccccgcaaggagctgaaggcggctggagcccgaatcgccgccggcgtcggcgcaggtgagtgcgtgaggggctcgggccaggagactttgtttgtgagactccggcggtgggagctgggccgggcctcagcggctgaggagcgcctgtgaggcggaaggtccggcttcaatcccagccgcgagccgtcaggcggcgggacctggtccgccgcctgcctgcctcagtttccacgggagtgtgtgtgggtgtgtgagggtgtgtatgggtgctggcctgcgcactccggaggggggggtcggtatacagttggcgcctaatgcgcggggcgcctcccccctccccccagtccccgtggggcggaacctggggactggagtcccctggagcagtaggtggcacccgcggggagacaggtgtccaggtgtcggcgcagcccgggaggctcaggtgctacctttcccggggggggggggggggggggggggtttgtgaggagtgagctcttcgttcccggaggcgagcaagtctgtcagtggctcatcatagagcgctgttttggaaagcgttccacccacctcagcttcgtgctgtgtttgggccactagtcagggggaaggatgctgagcgacatggactttagaggtggggctcccgctggacgggatggctctgggctctccagcttacccccacccttgcctcccaaacccgttagagcgtaggaatcactgggagcacctgataaaaatgccacggattgtggctcaccaaagcagggaagccgatttggaacttaaacaagctcccaagttggatcagtcgagcttggcaagcactgttttagagagtaggcttcctacaagcaggagccggttttgtgtatacctcaccatg

SEQ ID NO: 18616 - DNA, 1225 bp, Artificial sequence
  DNA replication origin
atttaggagatcccactgagatgtttggggaccctcccctaatttttgtaatattttctggatatctggggcagactgggaaataaattggaggtggagaagtttgcccttctctagattctggatccagactgatatattttagcatggcttcagtgaggcatgataagaaaatggcaggattctcctaggtctcctgtgtaatttctctgagtttttcgtaattaactgccttatgggcatttttgttcatccctgagaggagacaggtaatcatgtcgtcccttcacctgatgccattgtctccctgttggtaagtccaatctgggtctctatggatgattgcatcattggccactggattttgtatagcggctttgttatggagttcatctgtgtgggcttcagctgaacaccagatatgctctttttcatcaggagtgagggtggaggttagaattatataaatatcatgccaagttaaattaaaggattgggttatgtgcaggaattcccggtgatcatgggaggggttttcagagaaagatcctagatgctgtttgagctgcgacaaatcagatatggagaaagggatgtgaacatgagcaatgctttcaaccccagccagttactggagaggaagaatggcagaggtggtttgagtggtagtttttgaacaggtaacaggtggaggaggaggagtggggtctggtgctgaaggcttgggggcaggaggggccactggggcagagggttcagtcagtcaaggagcagatgcaggggatgggaatatggggggagttcatctgccaggtcaaaaggggtttcagaagaaggggttttgatggaaggggttttggaggaaggggttttcagaggagggagagacccggggagggttttaattgagaagaaggattttatgaggggtgcaaacttgacatagggagggtcaggatctaaagttgaagaaagcctgaatatagagaacctcttgccatttgctattcctggttataaagctgtcaaggtccctgagaatttgaaagtcaaaggtgccatttttgggccatcagctgtcattatctaatttttattggggtcaggccatgttgcaatgctttggctaaagactaaatgctttggcttccccagaagccaactttggcaaggttgtgaaggagacagcccagtggagaggatgtaggaatgtgtgattgtttgg

SEQ ID NO: 18617 - DNA, 2058 bp, Artificial sequence
  DNA replication origin
agccccttccccccttctaagcctggcacacaccagcttagcagacagaagcagaagagtctggaatggcctgactcccccttagcatgctttatataccgaggttcctgggttacatgttctgattggatgagagtaagccttaggctaaccaatcagaacatgataataaagtccaatcagaataagcctagaggttttctctcatccaattagaacattggctgcgacgacagcgactgaagcgcagctggagtggtaagatggcggacgagcagctgcagcagctccgtgcggtgctacagggggaggggaaggtggtttctcctgacacaagctggaggccggagcctgtggcaccctggcttgcctcactgaagctggtggctgtgacagggactgcacggctgctggagtggtagaaaggcagcccaggtaggtgagtattctcaactgcactgcccacggtggggagcggcttgggggcgctattccgggcatcactgcctgcagccaggagcgggttggggtgctatccagggctgcactgcccggggatggagtggggcttggggcactgttacgggcgttatttctcccagtgtgggggcgggttggggtctctattgggtgctgcagtgttcgaggtggggacgggttgggggcgctatcaggggttacactccctgggagtggggggtggtgtttgggacactatcgggggctacactgtcagcggcgggttaggggcgcaatcggggctgcactgctggtagtggcagaggtggccgccacagcggtggcctccaaggaaggagccaggctccagactctagaaggagacctcctactgctcagcgggcacacagtgtttccatgggaatcatgggcatggcagggcctgtcatggttcctgggtctgcgtcctcttactctgtgttgagacaacctgggattcctgagcacagtcatggggtagacatggggcacaggcgtcatggggggacagggccctgtgggtggagacgttaggaatggaaaccggcactcggggtgggggcgcaggaggggccgggggttgggcggggtagtagtggctgggtctgagttctgctgttcctgctctccaaggagccgcagccccagtgggcccaacggttcctgtgggtggggagccagccaccttggagtctccagttcactgaaacctgtcactgccacccagtggccaccatgacaaggtgaggctctaacgttaccactccctgcatcatgttctaggcttttctgactttactggcccagctgctctgtgccagaaggaggagcaacctgccacacgctggagggtggaggctggagcctggagcctgggacgtggcggctggcgtcactgcggtgggtggcactttggagcagtaggtaggagggcagccagctgtggccacctgtggcagggctgtggctgtggccagctagtaggggccttgtagggagtgccggtgcatcgagggtgacagcagcagtggttgtattggcattggccttagtggtggcagcagcagcaagtctgggggtcctgggaagtgggagtaggagcactgcggagccacctggcctggcgtgggtaggaagctgtgggtgctgtaccgtcggcctcggtggcagcagtggaggtgccgccagggcaaggaggagtcctcccccttctcctgcagaatctggagggtcccatccttctgctggcacctgagccaggtgtgagtggagcattatcgcaatcttaacaaaatttaggggtgactgtgtatctttttgctctttattgttgttgttgttgttgttgttgtgaaaaagtcttgaactttttcaaatttcatgaatcaaggaggggaaaaaaggtatcataataggccttccgattccctcacgtgttgtttttcctttcttccagtcttttattctcatcatcatcttcttgttcttctttatttgcttatgctgctgcctctatttcttgtttctccttcaccacctcctgcttttgtttgctttttc

SEQ ID NO: 18618 - DNA, 1002 bp, Artificial sequence
  DNA replication origin
cggccaccgggcgggggcacagaaacgaccccggcgccgtctgagcgcccagctccgttcctgccgcggccaaaagacacccgagagcgccggcggctgggggaccacagggccctggaactcaccaggcggcctcgcggcgcaaaagcgggcggagccagagaaggggctcggctaggcggccacgctccctccccggagggcggcgggactcggatttcgcctctggtttaaaaattgtgcctgcggagcccaggacgctgggaggagcgttctgcgctcctccggtcgcggtctccgcactaaaccgacttccagagccgcctctgctccctgtagtggcggaggggcgggcaccgaagtcccaccaagtcgcaggtcctcagcctggggcatgcttgctatgctccggatgcaggggggtactctgcctctctgctccctgggggccaaggcgtgcgctgcaggctggagctgcggctccgaggcttccaggagccccggccccgccgtcggtggagaaacgctgggggcttcgaggtcgcggcttccggaaatccggttactgagcggagttgggggtcaggttccaaagggatagcgccccgggttgtaatcaccatctggcccgccgctcctgccgccgcgagtctacagcggagctattgggtggaccaagcgggtgaggcgcgggcaggcagcggctccgcctcgtaatcctcctccgaccggtgcccaggggctggccccacctttccctcggtcacccaccaacgccgctccctcgatccccagcacccctccaggcccagttcgcttcagaggcgcgagacccggaaaacaaggaagaagcgagctcagcctcaatccccgtccccaccccactttcggggccgctgcgctggagaattgaagggggcggaccccggattaaagccgctcccttcccagcctcgctcctctttccttctgtccgtgatgatttctttattgtcaggcgag

SEQ ID NO: 18619 - DNA, 1337 bp, Artificial sequence
  DNA replication origin
aggatttttaagtatttataggaacatggaacagatcagtggctgacaggcccaaggagcgtgcaggccccttcccagaggtcagcagcttcactcccccttcctgcaccccatcctgatttgacggaacccaggatgacaaagagggagtaggtgagcaaggtatggggtggcagcctccataggagctcaaaggatgtatttgtccatctgccctgggctcagcttccacactccgagtcactcacatccctccaccctagccggagctcacctgtgtgcccacatgaccaagaccacactgaccccaaatgtacagtttcaactctcaacaattcactgtcacactcacgtgtgtacacacatgctttctaaattccacagccacatggatgctcacaggctcacacctttgcacacacacaggctcactcacagacctacggggggcccagatcccggtcattccccacaggtctttataagggttctgggagggaaacttgtttcctgtctaaggtagggtgggagtgtgtgtgtggggggggaacgagagtgaatgtgagagtgcatgtatgttagtgtgggtgtgtatgtgtgtaaggagcaggagtgactgggtcctgagtttagggagtggggaagagaaaggagagatggagacaagcgtggaccaagagacactcagagctgacatcctggaagggaagccaggctgagataagagcaaggcaaagaaatagacaccgacaaggatcaagccagggcggggtagggactggggacagatcccgcccccatgagaagctgtcacattgttgctcaggtggcctgtgacagcagcgccatctccagctggagcctcccctctctggatcttgtcattgtaactttgctttgctacttgggcagccaggagtggtgacaggcagggaatatggtgcccagggcagttagccatgccactccagtccggctgccaacccacctgtcactgcccatctcaacacctgtgggggtgggggtgggtacagatgaaaccggcgatcagcttggctacccttgcctcctagtgccacagtggaggctaggggagcaaccggccttcctccccaaaaggtggtcagggttaaccgcactttgcccaggtcactgaagcctgcagctgagcttggggagaatgggccgtctctgctcccaggcacccaggaactactggagagagacaggaaccagcctatgagacaggggcttaaggaggaggttggagaagacacgcgtttggcataaaccgggggcccctctctgcgctcaccgagccggcggcctgggcggtg

SEQ ID NO: 18620 - DNA, 1721 bp, Artificial sequence
  DNA replication origin
tgttgccctgtttctcagccacctgtgtgtgtgggtcctgaggtggggccatcatggtacacttgaggaggggctccatgtgggactccagggatccacagttcagagctggttcctcagggagtaacgaaaggggtggggaggaacccaatcctgggcctgggaatgggtacagcagaaagtgaaagtcaaaagtgcaagcaatgaagaaaacagtaaaacagcgccaacactgcgcatgttcagtggaaggcaaggcacgccttgcatttgcagtcactaagtcacaccacctcctcaaaaaccctggggagttggtgctgacttcccaaggccacggagccagcagttgcagagcaggatttgtgctttcctcagccaggctgtgctgccctgccacgcccgcgccaggaggccacgcccccagtggaaggccatgcccccacggcttgcaaggctggactgcaggcgggtgaaggactcggtgtcctgtcttgtaatttgtctcttaagtgtgacacaaacacacacacacacaccacgtttgaaatttgctccatgacactcaagttcagaaatctcatgtaactttaatattcaaaatccatgtcaaccccaatcatgtttgtggggttctatggggtctcgaatgaggaatagctagctggattccagtccacaatgggcaccctcactgttcggcagcatcctgggccacagtcctcacgactggctgggccaaagagacccaggacgctgcaggttaaaggccaaggcactggccagccctacgcccaccagctggacccagcccagtccttgttcgtcctcagctcctcctccgcctcagggaagtcgcgtcctggtcaggaggacctgcaacagcccacactgtgtccttagggcgagggggctgtaagagttaaagaaaggaaagaaacatgaaaagtggctcaacagtcaaagacaggtttattttggagaataaacctgaggggcttctagcctatttctgtcaggagcattctgtcttacagactaggagtgttttagggtgagagagcttatcacagatttgaagtgtttctgtgtgggggagaagtttatggcagggttggaatgtctcccgcgggaggggatgttatctcagggctggcatgtctctggtcggagaggggtttatcttagggttgcaatgtttctggtcagagatgtcatttgtggtttatggtcatgctgaccgtagccatcaggctgatgacctttagatttaggcagtttttgatcaaggggaactttaagatggcggtgcttgtacaagatggagatgcccctgctctgtcaggggcgaggagaggcaactctgggtgagaccgcagcaacaacagcagcagaaaggaccaacctgcagctgggcgcagaccagtcggcaggtcctcctgaccaggacgcgactttcctgaggcggggaaggagctgaggactaacaaggactgggccgggtccagctcgcgggcgtaaggctggccagtgccttggccttgaacctgcagcgtcctgtaatcccagcactttgggaggcggaggtgggtggatcatgaggtcaagagatcgagaccatcttggccaacatggcgaaaccacgtctctactgaaaatacaaaaaattagccaggtacggtggcgggcgcctgtagtcccagctacttgggaggctgagg

SEQ ID NO: 18621 - DNA, 811 bp, Artificial sequence
  DNA replication origin
aggcggctgggtggtggaggttgtagcgagccgagatcacgccactgcactccagcccgggcaccattgagcactgagtgagccagactccgtctgcaatcccggcacctcgggaggctgaggctggcggatcactcgcggttaggagctggagaccagcccggccaacacagcgaaaccctgtctccaccaaaaaaataggaaaaccagtcaggcttggcggcgctcgcctgcaatcgcaggcactcggcaggctgaggcaggagaatcaggcagggaggttgcagtgaaccgagatggcagcagtacagtccagcttctgctcagcatcagagggagagtgtggaaagagggagagggagagggagaccgtggggagacggagacggagagggaagggagagggagagggagagggagagggagaactattttccttttgagaaacatctgttcatctgccactaggctgaacgcttaactggggatcaccaagttcccatgtgacctgagctgaccaacatgaactgagttttatctgacccatgaagcatgaggtgggcatgcatggcagcgctccatcatcagaggaaaggggtctgtgtgtgaacaggccccagcaggccctgaaggcataagtcggctgcataagtggcccaaatgcccatggtccccacccctagtacactgccttctctctcccagcctgcaccaatggcctcatggggagttctctaggatcagatgacagagggagagaaggctcaggccttctcttggcccttacagatggttctgtgtgatacccagg

SEQ ID NO: 18622 - DNA, 1256 bp, Artificial sequence
  DNA replication origin
atccgatttctcaatgttttccccacctttcccccctttctattccacaaaaccgccattgtcatcatggcccgttctcaaagagctgttgggtacacctcccagacggggtggtggccgggcagaggggctcctcacttcccagtaggggtggccgggcagaggcgcccctcacctcccgggcggggcggctggccgggcggggggctgacccccccacctccctcccggtcggggcggctggctgggcagaggggctcctcacttcccagtaggggtggccgggcagaggcgcccctcacctcccggacggggtggctggctgggcggggggctgatccccccacctccctcccggacggggtggctgccgggcggggggctgacccccccacctccctcccggacagggcggccggcctggcaggggctgacccccacctccctcccggacggggtggctgccgggcggagacgctcctcacttcccagatggggtggctgccgggcggaggggctcctcacttctcagatggggcggttgccaggcggagggtctcctcacttctcagactgggcggctgggcagagatgctcctcacctcccagacggggtcgcggtggggtagaggcgctcctcacatcccagatggggcggcggggcagaggcgctccccacatctcagacgatgggcggccgggcagagacgctcctcactttccagactgggcagccgggcagaggggctcctcacgtcccagatgatgggcggccaggcagagacgctcctcacttcccagacggggtggcggctgggcagaggctgcaatctcggcactttgggaggccaaggcaggcggctgggtggtggaggttgtagcgagccgagatcacgccactgcactccagcccgggcaccattgagcactgagtgagccagactccgtctgcaatcccggcacctcgggaggctgaggctggcggatcactcgcggttaggagctggagaccagcccggccaacacagcgaaaccctgtctccaccaaaaaaataggaaaaccagtcaggcttggcggcgctcgcctgcaatcgcaggcactcggcaggctgaggcaggagaatcaggcagggaggttgcagtgaaccgagatggcagcagtacagtccagcttctgctcagcatcagagggagagtgtggaaagagggagagggagagggagaccgtggggagacggagacggagagggaaggga

SEQ ID NO: 18623 - DNA, 1262 bp, Artificial sequence
  DNA replication origin
atctctgcccagccgcccagtctgagaagtgaggagaccctccgcctggcaaccgccccatctgagaagtgaggagcccctccgcccggcagccaccccatctgggaagtgaggagcgtctccgcccggcagccaccccgtccgggagggaggtgggggtcagcccctgccaggccggccgccctgtccgggagggaggtgggggggtcagccccccgcccggcagccaccccgtccgggagggaggtggggggatcagccccccgcccagccagccaccccgtccgggaggtgaggggcgcctctgcccggccacccctactgggaagtgaggagcccctctgcccagccagccgccccgaccgggagggaggtgggggggtcagccccccgcccggccagccgccccgcccgggaggtgaggggcgcctctgcccggccacccctactgggaagtgaggagcccctctgcccggccaccaccccgtctgggaggtgtacccaacagctctttgagaacgggccatgatgacaatggcggttttgtggaatagaaaggggggaaaggtggggaaaacattgagaaatcggatggttgccgtgtctgtgtagaaagaggtagacatgggagtcttttcattttgttctgtactaagaaaaattcttatcctgttgatctgtgaccttacccccaaccctgtgctctctgaaacatgtgctgtgtccactcagggttaaatggattaagggcggtgcaagatgtgctttgttaaacagatgcttgaaggcagcatgctcattaagagtcatcaccactccctaatctcaaatacccagggacacaaacactgcggaaggccgcagggtcctctgcctaggaaaaccagagacctttgttcacttgtttatctgctgaccttccctccactattgtcctatgaccctgccatatccccctctgtgagaaacacccaagaatgatcaataaaataaataaataaataaataaaaaggaaaatagttatctgctgaggatggcagggctgtgcaccaaaatcttaagggcctgtgctgcgactcacctataggcgcctgccaaaggctccaaacttatctgccactgatgcttcgagcaatattggatctgctgggtcacatggtccctgtggcagagtagcatgcacggacacctggacctgctgcacggccttctcttgttctcaacaccagcagcctttcaggtcacttgttacatgagctgg

SEQ ID NO: 18624 - DNA, 1244 bp, Artificial sequence
  DNA replication origin
gtcctgaaggtattgggcttctcttctgtccttctcactcccccagagagactgggggttgagtgtagccatagccagcccccctttcatgataatcagatgggctctgagtggagaccactggggctgcaggcacttatgagatgaggatgcagagataaagcccatggtcccttctctgcaggggccagagcccacagttgtgcagagaagggataaagccaggggagcacacgagcccccggcccacctgggagggcccagcaggctccccgagtgagccctggggtaggatgggcagcctggaggggaagaggctgaaggggccacagaccagcctgggcatagagcaggctgcaggtgaccagctcgtccctctgcccggaacctacctgggaaagtgcccatcccagcccaaatgggacggctactcccctggtgggaggcagggtgtgggactaaggggagatgctcagatggcgacaagccacctggagcttagacttggacctatggggtgtggaccaaggaaaggttgggggctccaggcctgggctatgcctggaaggacgatgggcaggggagatggggtccatcaggggcttctttgatgcaggcacagagtcggagccgggcttccggggagtacacaccctgaaaggtgtggagggggcaggatcagggactcggcgctggatggtgttggggtgaggcaaggcttggcccaggtcccggctctgcatctgggtaggtggctgtaggtgggcaactgctcctcatgggaagctgaccatctctgtgccgggctggcggacaggaggtgtccagaacagggcagggctgaagtgcagggggcccaggctggagactccccgattggagggcccccagtgaggggtcatcgaaagcaaagagtgcccctcagtgctcagggctaaaagggccaggtccaggactgctggaggagggcccaagaagtgggtcagggctcagacgccaagaagggaggggggcacagggcagggcaccatcagggccaggaagggacaaggggggccagggtccttcagatttgccagtcagcgttccatgaggagacaagcgtgagccagcaagacggtgggcatggccggtggttctccaaggcttcctcagggcacgcggtgggctgtgtggggtgtcacgtgagaaacggcactgagattagtaggcgtgacaaagctgaattcctcacaaccgctccc

SEQ ID NO: 18625 - DNA, 1141 bp, Artificial sequence
  DNA replication origin
gtgtccagaacagggcagggctgaagtgcagggggcccaggctggagactccccgattggagggcccccagtgaggggtcatcgaaagcaaagagtgcccctcagtgctcagggctaaaagggccaggtccaggactgctggaggagggcccaagaagtgggtcagggctcagacgccaagaagggaggggggcacagggcagggcaccatcagggccaggaagggacaaggggggccagggtccttcagatttgccagtcagcgttccatgaggagacaagcgtgagccagcaagacggtgggcatggccggtggttctccaaggcttcctcagggcacgcggtgggctgtgtggggtgtcacgtgagaaacggcactgagattagtaggcgtgacaaagctgaattcctcacaaccgctcccctcagggcccaccacgggctcctgcaagggcggggaatgcaggtgctgggccccgcgggaggagcagccacagcgggggacagggaggccagagccgagtggagaggagtgcgggactgaggaggcttttatcccccgaccttttctgaagagagaagagatagaagcagagtcatgagtgctagagacgggcagggaaggaaatggattaaaggagctggaggagagggtcccggagtgtacggaggagtgagaccctggccccaccgcctccctgggtgtgcgagtgggagtgtccaggcatgcatgtgcgtgtgggtgtgcgagggtgagtgtgcgagtctgggtacacgcgtgtgtggtagggagtacaggtgggggctggcgcagtgagaggtgggggctggacgaggcaagggtgagggccccttggtcagggccgcccactgcccgcagaagcccagggcagtgaaggcgcccaggagcaggtggttgggttgactcaggttggagaccccgctgggggtcagcagaagaatgaggggtggtgaggggcgctccaggcagggtggtgaggtagagagaagagaggcctttgcattttgcgtattctgttggtggaggaaatggtgagccatcaagggctgctggcagcctccccctaaaccagcccaggaaatgctggaagagagagactcagagcaaatatagacccac

SEQ ID NO: 18626 - DNA, 858 bp, Artificial sequence
  DNA replication origin
accatcatcatcatggcccgttctcaatgagctgttgggtacacctcccagacagggtggcggccgggcagaggggctcctcacttcccagaaggggcagccgggcagaggcgccccccacctccctcccggacagggcagctggccgggcaggggctggcccccaactccctcccggacggggaggctggccgggaggggtctgccccccacctccctcccggacggggcggctgccaggcggagacgctcctcacttctcagatggggcagctgccgggcggaggggctcctcacttctcagatggggcggctgctgggcggaggggctcctcgcttctcagacggggctgctgggcagagacactcctcacctcccagacggggtcgcagccgggcagaggcactcctcacatcccagatggggcagaggcgctccctacatctcagacgatgggcggccaggcagagacgctcctcacttcctagttgggatggcgcccgggaagaggcgctcctcacttcccagactgggcagccgggcagaggggctcctcacatcccagacgatgggcggccaggcagagatgctcctcacttcccagacggggtggcggcagggcagaggctgcaatctcggcactttgggaggccaaggcaggtggctgggaggtggaggttgtagctagccgagatcatgccactgcactccagcttgggcaacattgagcactgagtgaacgagactccatctgcaatccccgcaccttgggaggccgaggctggcagatcactcgcagttaggagctggagaccagcccggccaacacagcgaaaccccgtctccaccaagttttc

SEQ ID NO: 18627 - DNA, 1336 bp, Artificial sequence
  DNA replication origin
gaagttcccaagaaggaaacccccactgtgtgttctcccaggcctcctggggtgcttcctagagcaggtgggaggagcaggaaaagtggcttcaccagcatctcttgatggctgttgatagaaatgttatgcagacgggtgggagtggggagggatacagagccaacgaggcccagcactctcctgagggctaatcttcggagtccctggcaggaggcagggagcaagtaatgaaggagcaacgcccagcaggagggagtcatcggactggagaccaagaaaggcccaaggaggcactcaaatgctgaaggaataaatggtgggctctggactttagttagcattccttacaatgtgttagacgagaaagggtctgggttcaaataggctaagaagtactgctcgcccccagttaaatgtgttcatctgttgcagagcctctcagagcctctctgttcattttcatcagaattgagaggaaaagttggcagtgagtaaagggagctgggaggcgacacgaggaaaggactttgtgggtcattgatccattgacccctctcctgtaaactctgcctgcatggccatcactcaaggacagctgaagggtggcctggaagggcctggaggaaaggtggtcattggggtggaacccaggacagtggctgtgaggatgtgggaggtgggtggccagtggtcaggacagggttctcccttggataaggcctgggccctgcgtggtcaccgtgatcagggcgggccagggcaccttgaagtaaggcaggacaaggaggcccggaggccatgagctgtgggagggacctgcgctcccccagggcttgcagagcactaggtgggcaaacctggccgaggcctcactgtggccctgtcctttggttctgggtatccctggcctttcccgggagggagaagcagcagcagattgtcctacctcggacatagcgggctccttccttccaggggcctgactgacctggcggcactcggggtagcctgctgggcgttgactcttgtcggctcctagccctggtctcctgggcaaacccctgcaccaaaagaagaaaggcccccaccagctccatcctaatctcgacccgcttgtctgcaagaggctaaaggagcctactcgactctcattctctgattttctgtcctcccctaaaacctcaggctcatccctggctccaagcccttcatcttctgctcttattgcctcccggcgcccgggattttgggctttctaacgccctccgcagcctgccaattctctatcacctaaggctgaagaactgcgtttgtgaagagggagtgcatgggg

SEQ ID NO: 18628 - DNA, 1171 bp, Artificial sequence
  DNA replication origin
tgaattcaaggagagcaaacacccaccagctgcaccagccaggaccccaacactgacctggggcatcggtagagtctgtttagaggcgtaagtggggcttaggagactggaaaggacagggaaacgtgacctctttgaggcctgatgggacaacagcaggtgtggctgtcgccttagagacggccctggcaggagcaaggagcaggctttggtagagaaggccacccccacggctgccgcgggggtacctggggagagagctgctcccagatggggtgggacctggagagtgagctgcttccaggtggctctgaaccctgctggtgctcccactgtccaagcccagtgggagctgaggccagagagcctgctgggtgacagaagtgtgtggagtgtggcctccaccctccttggagccagccatggcaggcagcaggagaacaggctaggcccctgacctgcccccagccctggaccctgccaggtttgggggcctggctcagagcttctcccggccccgagactgggtgacatcaggatttacaggctccccattcgatctcagtggggctggtgggcagccataaggaggcagcagtagggagtgggtgcatatctgggcatttggccaggtgccgggagaggaaaacggaaacctgctcctattcctctacagctgttgacgtcagccggtgacataacccggccctgcaggtggagggcgtgagaagttcaaatagcttaagggggggtaggggagtgaatggagtcagcagtggggtctgtgccaggagcgctgatgctgagctctggacggccgctgaaaaggccgggggaggaatagacttgcgcagctgtcgggggctgtgacccctgcgctgcgctcagggaggatccggctgcagctgggctacctttgcttgtgttggggaggaagtgcctgggcacggcgtgcggggtgcagggaagccgcaggtgcaggcccgcttcctccacaggggctcctctcagtaaggctgagacccttccctttcttagcgagggaagacccggttcccgttgtcccgtacaaccgcggccctgctcctcctcgcctgtttccagcctctccccgctaggccgccctccacgcgggatttccgaacaaaagtccaggcgcatcactccattc

SEQ ID NO: 18629 - DNA, 1661 bp, Artificial sequence
  DNA replication origin
tctgcttccttcttgggtgtcctggcctggggcatgttgtccccaaaacaggacaacgttagtcctgtcgccctcagggagggtatgtgagaccctgcctagaaaggcggcacacaacacctggtgcagaggcacaaggacagtgtctgtgacaacagaaacactgtctctgcccacaaggggcacattcagggacacgagacccacgtgcccgaggctccatcctcactcatggcctgggacacacgggtgccactctcttaagtgacactgccagtgagcccatggcccatgggaccagaattctgctggggactccaaaattcctacagagggttggagggctcaggcagggcactccaaagagacatgtgagctgaggctgaggggagagggcgagtcagatcggagggagaaagggcatggggccgagaaaacaacggcaagggcccctggctgcaagctccagccagagaggtgggcagtgcggcccaggaggaaacatggccggagaaggaggggacaggtctcaaagggctgggccttcagaaagaaagcgggctgtatcccactcacagcaggaagctaccaaaaggtgtgcatgacagtgacatgcacacaagtccttttggaaatttcatgctggctagtattggggagggcacaggatggtggtggctccagggggtgatggtaacgatggagatgcgaggggtcccaaggacagaagacctgccatgctgtgggggtggggtgctgacaggacctgccatgctgtggggtattgtggggtggggctgacaggacctgctatgctgtggggggaggggctgacaggacctgccatgctgttggcgggtggagctgataggacctaccatgctgttgggcagtggggcgctgacaggacctgccatgctgtggggtggggttgacaggacctgccatggtgtgggggacactgacaggatttaccatactgttggggcgggggtgctgacaggacctgccattgctgtgggatggggctgacaggacctgccatgctcttgggggcagttgacaggccctgccatgttgtcagtgggggttaacaggatctgccatgctgtggggggttgggctgacaggacctgccatgctgtgagggagcgctgacaggacctgccatgctgggggagctgagaggacctgctctgctcaggagggggaagggggagaagacagagagaggagggtagaggtagtggtggtgggggatgaagtccaggcatgagtgaggaggaggctgggttagtgcaggaagctgtaagtagacatggaagggaagagaggttctggggtagaatcagaatcaaagaacctcagaaagttcagtggagaaggatcctgtggttttctatctcccgaagtaaaatgagaggccagattttacctctaaccgccattcactataacccatccctctataacccctgaagcattccctggagacctcatgggctcatggaacacacattgaaaaccctgcagtgggccagtgggtggcctagagccatgtcatgggttagtgctggagcagggcagttccaggacattagaggccagccctgggccagctccccaccagctgaggctgagtcccaccagcagcatccctc

SEQ ID NO: 18630 - DNA, 1663 bp, Artificial sequence
  DNA replication origin
ccgcctacgtggggagtgagaagctcgcagtggggaggagagcttcacgcccactgctggggccatactcttgagctgcccttccccagaggctgcttgggccaggacttacttctaatggatggaaaaggcagaagggatggctgccacccccaaggcccccgtctgacagaggcctgtgggttgtctcactggtgcctgctccctctcttgccttgcttgcttcgatgtcctcagcagcgctctgggggaccgtgtgccagggacttggggcagcccttgctacaatttgagagggagcccattcctgccttgtaagggagcctgaggtggacccggccctgagatgacccgatccagtggaccctgagtgcagcctatgggagaccctgggctgggggtgggggacgtggcagtgagccatgcccaggctcctgacccgcagaagctaagactgtaatgttctcagaagcccctaaggtttgggctgatttgttcctcagcactggctaaccaacaccagggtgggtgcggtttaagatgggatagcagggcaggagttatttgagaaatgagttgtagaaggaagagagggaatcatgggacctgggggcggaattggatttggggacatgtgtttgagggtgctcaggagaccagggcactggagtacagtgagggggtgagaggaggtggggaccagggcagagaggagaaggggctgtgctggcatctgggcttcagcttaccttagggaaagggcgcctttaagacctccagcagctgccatgttcccaggtccaggtggctgttgagtggtttgggtggggagtggggtggcagtagagatgaccagaggtgtgaggtttatttccaaggtagaccacaggttgggcggtgggggtgtgagggaagagggctgtttttgtacctgagaaggtgatggtgagcaggttttgggtagacctggaggctggggttcacgggtacagcccggaaggtgtatccatccttgaggtggagggtgcagaggtggggcctggtgtcacgcggagtctgtagagtgtgaatagagacgagcactgggtccccccacgggaagatggggggaggtgtgggggatggagaaggagggaggggcctggcagaggggtcctggaactcgggaggatggtgtttcaagaggagggctgagccactgagtcaccactgttgccaagctctgcctcagtttagcgaggtgaggttagtggtcaggtgtcacaaagtctctgtggagggcttcagtggggcaaccccagatggggccacatctctggagcagttttaccatcaagaggagcaaacaaacaagcaaagcagtcaaacacactgtcttaaggacagggaagtaacagtatttttggatacagacggggaggatctggctagagaggaaacccgcatgaggcaggagcaagggatggtggcttggatagtccccagggaggcaggagcaagggatggcggctgggacagtccccagggaggcagagggaaatgactgggctggtgctggttggaaaatcagagcgtctggtcttcaggaagttctagaggatgcaggtgcccctgcagcctgcaatggtcccctgcacaccccgctgcgacctgggggcagcat

SEQ ID NO: 18631 - DNA, 1110 bp, Artificial sequence
  DNA replication origin
attttcccccaaagaaatgatggaaatgatgcgcataaacacatttacccctaatagggagcagcaactggacctgagaaggggttctgggtgaggttggatgtgggctcagtggggaagtcctctgttctcgccccatccccggctgctttttgaggtctggcctgcacttaggcgcagagggatggaagaagggaagcccatgggcccttgaggaggaaaagccagggaacctgggcccagggcacccttgagccagccgctcccttgcttgctgtgtgcagaaccccgccctcttgcctggctgagctcagggctgaataagtgatctgcacatcactgcagatatgaagtcaaagtgaagtcaccctcacaggcaggagggggagctgccaagacagaggctggcttgcactcagccaaccgtgatgtccagacctggcttgctgaggggcaggtggccggggcacaggcctgccagcccaggagagacactgtgggccactggactccggctgcctgccacacccttccagtttatggagctagagttggccacaaggggctcccttgggttcagacaggttccatctctggtgccagtggctacctaggctacacactcaggcctgtgcccagggaagggacctgataggtagggaggggctgggggcatcttttggctacagacaagctcctgtgattgcctcctaggtgaatgaagagagaagtgggtaggcttaaatagccccacccctgcacctcccggggaccaccctggccagcccttggctgacattgatgtctggctgggctctgtgtggccatcttaaggggccatctggggctgtgctcctgcctagcctaccttaggcctttccacgctctcgctccaccctcacccttgggggtcctgagtgaacacctgacactatgagagggtgtcatttactccttggaaaaaggtctggggggccctcacatgggtgtaccctgtacacatgcatacatgcatacacctgtgttcccatacgtggacacacacgcacacagatgcatacctccctgctacgtgcacgcccagggatctgaccaaagggtcgctcagca

SEQ ID NO: 18632 - DNA, 1456 bp, Artificial sequence
  DNA replication origin
gcaacagcagacgcagccccgcggcaccggacgtcgccttcgccatcgcccgtgcgcgctggggccacggctggagggactgcggctagggccggcgggtctggatggcgggtgcggcgctcagtctggccgccccatccccgcccggggcgcggcggacgcgacggacactgggggcgcgacgcacgttccggggcactcagcgctgctgcgcgccctgcttcggtcgcgggactgaagcgaggtaagcgccggctgcgccggaggagcgggtaggggcggggcggggcgggggcggtccaggggtgggccaggcggggccggaggcgggtggggtgcgggaaggggcggggctccagtgcttgctctggctgcgcggggtgcggccggggcgcggcgcgtgtaggagctcagtgcgggacgcgcggcttgggccgggtggggcttggggaggagcggggtgcgggagcggggtgcggccgaaaagggcccggcaggagccgggtgcggaccccgaggtgcgcggcggggatggaacccaggagcccgggtccgcgcacctacgcagagccgctcttcctacccggtgcgcgcccgcttgcagtccctgccttttgccctttccgctgcacagagagggcagggatgctacgcgggatgcaggtctggccgactggctcggggtgcgaccccgcggactcagagaagggcgccccgcctccaggctctccgcggagcgcttgctgcgccatttctcagaggcgagaggcgcagtgggagcgcggcctctgctggggccggaggcaggaggcggggaagagctgagcaggggaagagaggcagaatagcctttttcagcatcctggggtagtagagagggtagggtcctggaagggcagtttgtgattcccccctccagcactggtccaacccttggaaaccggaaactggctccggcgtcctttcagagacctggtgctggtggcccttgcatcccttacacaggagaactctcaggagatgggctggcagagtcggagagcgagtagcgaggaggaggaaagaatccaattttcccccaaagaaatgatggaaatgatgcgcataaacacatttacccctaatagggagcagcaactggacctgagaaggggttctgggtgaggttggatgtgggctcagtggggaagtcctctgttctcgccccatccccggctgctttttgaggtctggcctgcacttaggcgcagagggatggaagaagggaagcccatgggcccttgaggaggaaaagccagggaacctgggcccagggcacccttgagccagccgctcccttgcttgctgtgtgcagaaccccgccctcttgcctggctgagctcagggctgaataagtgatctgcacatcactgcagatatgaagtcaaagtgaagtcaccctcacaggcaggagggg

SEQ ID NO: 18633 - DNA, 969 bp, Artificial sequence
  DNA replication origin
tatctgtgttgagcaatgaaatgccagaaacctttaagagcaacttttaaatgaatgtaacttttagatggaggttctctcactctggttccagcatacctggggctgacaggctatgccctgcaggtatgaggagtgtgtgtccctatatacacacgtggcgtccctgtgtgtatgagtgatgagaggggctggggtccctgtgtggacgtgggtgaggcagggtgtgaaggaaccacgctgtgcatgtccacagccttggcagcaagtgctgtgagaaggggcaggagtgtgtcttggtgatccagtgtgagtgtgcatgtgtgagctgtggaagaaccctcatcctctagagacccagtctgtgcctgtcatcaggcccagccactaaagtgcagcgtccgcaagagggcgcttgaggccgagctgtccccttggggtggttggggagcaccgaggggctcactggggcggtccttggcagctccaagagtgcggctcgaacctccggagctgtggctcctgggaaagagctctgcagcctcttcaaaggccccagctgtctactccagggagtggggctgcctcttcactcccagtgcctccaactgtggtgtccgggttatcccaggggctaggggctcaccatctctggattcgggaagctgtctgtgggccaggggtctgggcacggaaagctacctgcatgcctgctgagtgccacaagccggcccccagagcctggcccccacagcctcactggccaccccaactgaacgcaaggctgtggaagggtgtggggaagtcctctgcccagcacaccagcagcagttcacacctggccccctgcccacaacctcaaagccaaagccacagcccagaatcccaagacagcgtcagagcgccttgtttgcttctgccccgtgtcttccccctgcagcactgggaccccaaagtcctaacactcag

SEQ ID NO: 18634 - DNA, 2015 bp, Artificial sequence
  DNA replication origin
ccttctcccaaacctcagccatgcctggaccccttccccactcacggcagaaggctgcatggcttttaggggtgtcaggaggctcatgtcctggttgcagttctaccatgggtgtgcagcgggaattctgggcttctgttttctggcatgggatggggtgaatgatatctctgttctacagcaggggctcagactggatgtgtgagaagagcctcagttaaggagggccatgttcgtgcgtgcagggatcgtggtgcctcccaggccagggccgggccccatctctcctcctcctcagctgctcttccagctactggccaccctgcctggctggaggtccaagaggagaggtatctgaggagatcctgcactccacaccgggtctcctgcccagcattttggaagaaccaattcttaagtctggtactgaggccgcactgccatgatgataactggtgtcaccaggacaccagggaaggagctgcccttggtgtttactgagcgcccggtatatgcactgagctgtccatcatctgcagagaccagtgttttcttgatggttttacagagagatgcttaaacccagtgaactaagaatgggacaggctgtcagatttttctcaaaggaggtattgacttgttagcgggtacaattaggccgaggaaccaggggctgatgcagtgtgctcccgaagaggggcttctatggactccagttaccagagcctgccccaggattttccttcacacctgctctttatgccagggatcaagcagggttataaatacaacagcgggcaggatgagccagtggtggccctgtgggtcttcacagcccaaatttccttccatggttagtgtaggttaaacctggcaaaaagctgctttcatttggaagtctcaggatgccagcaaagtgatgagagtggtagggatagaggtgagatgggggtggtgctggtgatagtgatggtcatggtgttggtgttggtgttggtagtggtggtattggtgatggtgatagtggaggtcgtgatgatggttgtggtggaggtgatggtaatgttgatggtggaagtcatgatagtgagtggtggttgtggtggtggtggtggtgatggtgaagacggtggtggtggacgtgatagggatattgatggtggagctcataatggtgaaggtggtgatggtggtggaggcagttgtggtggtgatggtgctggtggaggcaacggtgatggtggtggtgatggtgaagacggtggtgggaatggtggtggtggaggcaatggtggtggtgatggtggtggtggaggccatggtattagtgaaggtgatggtgaaggtggtggtggaggtcatgatggtgaaggtggggatggtggtggtagaggcagtggttgtgatggtggtgatggaggcggtggtgttagtggaggtgatggtgatggtggtggtggaagtcatgatggtgaaggtggggatggtggtggtggaggcagtggtagtagtggaggtgatggtgctggtggtagtggtgaggcagtggcggggaaggtggaggtaatggtagtggtagaggtgacggtgatgttgatggtcgtgatgcagccatcttctgtgagcatttgcttggtgccagccactgatctgtgaacttcatgtgcattaattccttctagctcccaacactcctgtgtggtgggagctctgagtctcagtgggtacagaggagaaactgagatacaaatatatgtcccttgctccaggctcattaccactgcaacacacactttctctccatcacccagatggagtccacagccttgcctggaatccacaagcttgcccaaccttcttcttcttcctaagttcatgccctcatggcccgaggagctggcctcctgtctccaaccagcattcacctccggccctgtgctgttgctgctcatctgaactgcctctacctcctgctgcttttcccctcctttcactctggctctgcccccagccct

SEQ ID NO: 18635 - DNA, 1242 bp, Artificial sequence
  DNA replication origin
cacgtgtgcacagggcgcatccacacagctctatcctgccactgacagcctgcccgtggctccagtgcccgtgagaccatgtcacagtatctccccgtcctcttactcccttccccttcccaaattctgaccatttcccaaatgtgcccagccctttcacactcctgtttatgaaaccattgtactggctcgttgattcattgattcattcattggttcataaatttattcattcagctcacagaaagtgagttggcagatgtggcaggaaggtaggcaccctgtaagagtgaggaggaagtgagttggagggcagagggggccctgggagccctgatgaggagctatgttttattctgcaagcagcggacagttaacacagggctccacagagggtgccatgattcagtggaccctggctcctctgtgcgagattgcctgtcctgcccagcatgtggtccagggttggacaggggtggcagaggggacttgggaggtggggtgaggggtgaaagagaaagggatctggggactgaggtgtgtgacctgagcagtgaggtggggccataccgtgatgagatggggaagagttggggacaatttggggtgaggaggggccaaactgaggcaaaggagtagagagagcaaggcatggagatgcccaggctgctgatcagcatgctgcacaccagcatagagacaggattaacagcccagggcctggatatggctggtgagtgagccactgccaccatctggaggacagggtgcagaggaggaaaccagccgagggggtgagcagcctcggtagcatcccagcgacgctggacagcaccaaagacagaggaggtcctgggagcagctgggagaaagtgggttacccaggaggggccggcctgagcatgggccctcagcagcagcagtgaggctgaaagacgggagccagaccttatgtagagtggaggaaaatagctgtccacatggaattctccacccagcaaaaatgggccttccatgaatgacgtcaaaaaatgaggcaagaagaaggccaggcgcaggctcctgctggtgggggtgggacacagtggcaggtggggaggcgggaggagcagcagtgtggccaagcatccagttcagcagggccacgggctccagggtgtttgttcagcataaatgttctgtgaaatgtattcgttgtacatgtcaaatatttgactatagtaagagaaaacgtgagtggga

SEQ ID NO: 18636 - DNA, 1125 bp, Artificial sequence
  DNA replication origin
ccaggcaccttccaccagttccgcctgctgcctgtgcagttcttgtgccccaacatcagcgtggcctacaggctcctggagggtgagtgccgaccttgtggggccgccccacagtgcctgctactgctggtcttgctctgcgagcccttgacacaagccatctggtttattcttcaccttcatgccatcagttcattcaatattccagaagtacctcttgcatgcctgccaggggccaggtactgttctaggagctaaggatataacaatgaacacaacgggttggaatcttgcctgcctgcagctttcattcttgtggggcagacagagcgtctgagcatgccaaggaaatcaggtggcttctggaaggagctagctggggaggaaactgggaagagggaaacgctgaagaggaggggaacagacgaggagacctccattcctctatcgtaaattgggtggtcagggtgggggctagcagagcaaaggtgggagggtgccgggtaggcaggcctagccccttggagggcaccacagtgtgaccctcgtgtgcctggagtgcactgagcgacagggaagagctgaggctgatggggcagaatagttcctggggcagggggcaggtctgggagtggcttgcagggctttctccggaggaacatggggagctatggaagactttggagggagggagtgctggcaggacctgacttagttttaaaaggattagtcagactactgtgttaggaatggtttggggtgggaaggttcaggggcgaagctgggagacaatcagaaggctacaggagaaacctctgaacaggaggatgtggggtgtgatgccgggatacgggtggaagccgaggcatggcgagaagcaggcagctgcagccagtcagagggtgggatgagctggatcccagtggagaggggagaaggcagctgactaggtgcagggaggccccatttgaccatcagaaagtcaggaagtggggctcaaccaggtcacagaggctgcaccgctggcaagtgtgtcctaaattcacactaactttatcacacaaacatggcaagaatattaaaatctcagtaaaggaagacaagccatcacttatgcttccccag

SEQ ID NO: 18637 - DNA, 872 bp, Artificial sequence
  DNA replication origin
cgaatggtcggccacacggttgggtggctacacggacactaaaccgaccgagaaacgaactgtggccggagacagacactgggtagaccacagcacgcgcggacaagcacctccttccgcttgaactccaccacggcgctggcggtgtcgacgcccgcggggaaggtgggcgccgagtcgtcctcgtcgtacacggtcaccgggaagggcaccatcaccacctcctcgcgcgcgccggcgtgcacggtgcacacggccaccagctcgtacttctcccgctgctcgcggtccagggcccagcgcgtgctcacctccaggctgtccggggcgcagcggaagggcagaccctcacctgcgcaccaagcagacaggggccccgcgtgatcaccagccgggaccgggccagccgctttcctcgggaagggggctctgcggtcagagcggggcgcacaccgccgcggccccaggcctcccctcctccgctccacaggggagggcagcgctcggagcacgagtttgcagtttgcagcgatgactgtgcttacgagtttgcagtttgcagcgatgactgtgcttacgtcctgctgcagctgcgtcctcactcgtgctggttgggaagagccaggaccaggcaccctgatcaaccagtagggactgggacacccctccgcccacctggccttgatcaggagtggccttgtgtggggaagggtggctttgcctcagcccaagctgcactgcagccctagagagccagctactggccttggctgctttttttttgtttttgatggagtctcgctgtgttgcccaggctggagtgcagtggcgcgatcttggctcactgcaacctccaactcccgggttcaggc

SEQ ID NO: 18638 - DNA, 716 bp, Artificial sequence
  DNA replication origin
cagtccctactggttgatcagggtgcctggtcctggctcttcccaaccagcacgagtgaggacgcagctgcagcaggacgtaagcacagtcatcgctgcaaactgcaaactcgtaagcacagtcatcgctgcaaactgcaaactcgtgctccgagcgctgccctcccctgtggagcggaggaggggaggcctggggccgcggcggtgtgcgccccgctctgaccgcagagcccccttcccgaggaaagcggctggcccggtcccggctggtgatcacgcggggcccctgtctgcttggtgcgcaggtgagggtctgcccttccgctgcgccccggacagcctggaggtgagcacgcgctgggccctggaccgcgagcagcgggagaagtacgagctggtggccgtgtgcaccgtgcacgccggcgcgcgcgaggaggtggtgatggtgcccttcccggtgaccgtgtacgacgaggacgactcggcgcccaccttccccgcgggcgtcgacaccgccagcgccgtggtggagttcaagcggaaggaggtgcttgtccgcgcgtgctgtggtctacccagtgtctgtctccggccacagttcgtttctcggtcggtttagtgtccgtgtagccacccaaccgtgtggccgaccattcgcgctttcatttgtccttcgcctccgtctgcgccgtctgtcctagggggaggggaagggg

SEQ ID NO: 18639 - DNA, 1295 bp, Artificial sequence
  DNA replication origin
gcttgtccgcgcgtgctgtggtctacccagtgtctgtctccggccacagttcgtttctcggtcggtttagtgtccgtgtagccacccaaccgtgtggccgaccattcgcgctttcatttgtccttcgcctccgtctgcgccgtctgtcctagggggaggggaagggggagtcctgccagcacccagctgggccttgcctcgggaggcaaggaccaggacgaggcccgagggctcgcgtctggggcatacttgtgccgctgcaggcgggcgcggcgcgctgcccgggcggggagcatctgccgggagggcactccctcccaccagcagttagcccccaacgggagggcccttgagtgaccacgagcagagccggggattggagaaggacgggaaggcggatcacctccggcgccgcccgccccgcccttctccggctcgcgctggtggagcgcgaccgccacctgctgggcctcggccttcctgcagccggcccacccagcaggggccgtgggagagtgggcgtggggactgaggtaggtagtacgttgccttgttccgcttctctgggcacaccacgtgcaggtttggcagggaaagggggtctggtcgaaagcacaatttgtgagtaaaggctatgtgggcctccctggggtgacagcagaggcctggtgggcagagccatccaggtgcccagcggctttcctcacaaccccctccagcctggggtaggaggatgcttggaacagagcgctctgatgtacacctggcctcggagctcggctctgccggctgttcctgtgtgaccttgacctgaccttcaccctgtggggcccagcttcctcaggggagagtggaggtgctcatcctgctctctggggacctggatgggacctgccagcagggtgcctgggcatcggctgtaattctccttataagaggtctgcattgtacctgttacacaggcgaggctcagtggctcagggaaggtgacggccaggctggccagtgaccccgtgggaacttgaacccaggtcagactgtccccagacctggctctgacaacacacatctggtccacctatgggctgtgtgggacgtgcagcattctaaggtctctggttttggggggtctgaggggcccatctcgcctgcactgaccaacgccctctgcatcctgcaggacaccgtggtggccacgctgcgtgtcttcgatgcagacgtggtacctgcatcaggggagctggtgaggcggtacacaagcacgctgctccccggggacacctgggcccagcaga

SEQ ID NO: 18640 - DNA, 973 bp, Artificial sequence
  DNA replication origin
tcatcaccgacgtgtttaaagtatccgtgtgtgtgcctccaaaaaccgtttgtggagacagcagagtgcccgaggcaggaaaccgctccggcctggaggcgcccctgcccggactcgtggactgcagcgctgtcccgctcggaagccgatcctgggagtccgagcggggccgcggggcctgcgtggcagccgagtcgagggcttcgggccgcggggctgtggagcgccccttggcgctgggccgccggcagccgtgagcgcatcactgcatttccctggaggaattcctcatctgttgaatgagggagttgaggcggacacgctgggaaatggcttcgagctcacacactgattttcgtgagtggaaagagaagccctttcttaggcgtcttccataccactgcatgttccagggtcctccctgggctctctgtctcccacgccaccgcgagcacggcctaagcgggcgagcgaaggcgcgacggcgccgagagccggctgtggtgggtgccgggcgcgtcaccgcgggctggcgggggaggggacgctgggaagctctccagaaagaggagccgccaccgagcaaattcccatctgccacgcaccgcagagcctcgccctccgccgccagcattttctttctttgttctcctagccctacaaacgctgggtttcctttctcattcgtggacttttttccctggatccttcttactgctcctaccctgtggccgcacgtctggcagatgcgcggcgggcgctgcctgaacccccgaatcctcacaagcctctgtgcagcggccacggccctcagctagcggcggggagactgaagccgcagggtcagggttagttgccacatgttttaaattcctatccaaacttccattataattgtttttatttatttattcatctattttttgagacagggtcccgctctgtcgcccaggctggagtgcagtggagcgat

SEQ ID NO: 18641 - DNA, 1011 bp, Artificial sequence
  DNA replication origin
ctgccacgcaggccccgcggccccgctcggactcccaggatcggcttccgagcgggacagcgctgcagtccacgagtccgggcaggggcgcctccaggccggagcggtttcctgcctcgggcactctgctgtctccacaaacggtttttggaggcacacacacggatactttaaacacgtcggtgatgaatcggtacccagctgccagtggcggagcttcctgggcggggccgcgggcgcgcggcggcttcatttcctcgcgcgcgccggaagtggcctctcaggcgcggcggcgcgcccgggggtgggtggctgaggcggcggcgggcccaaggcgtgaggcgccgcccgggtgtccccgcggcgcaggaggcggtggagcgcagagcgggcgagcgcggtgagtacctggcccggcctcgcccgccggtccgcgactcccgccggctccggcccgggcggtgcgggcgccggggctgcgggctcctgtgtggtcgggtggggtcgcctagcggaccggtcctgcggggggccctgtctctcagggatgagcctgccggagtcggcaccggttttagggaaagcgcggccagagacgattggttcgcttgtcagtgttgggttttgttttgtttcgttttgtttttacctattcatcaccatctctgctcctctcagtggataaactttttaatcagtggtgacctcgtcatcgcgttaaaatagttctgccctcagcccctctttatctgtagatggcagagcgagcgccggtaaagatgctctgtcgtggagggctcagtggggcggaggagatggggagcctctggcgttgtcggagaatgcaccttaaaaatgactctacccttgagcaacgcaggaagcacgacagtgatacttctgtttgtgatgatggtattggcggtatgatagtttgattatacatctgaagcttctcttcctgagtccttggcttgttaaacttggaggtattttctagcgtgcttttga

SEQ ID NO: 18642 - DNA, 1228 bp, Artificial sequence
  DNA replication origin
gcctgcctcgtgggcctgagggcacctggtgaggatgggagggtgggacataggtggcagggcaggtgtaggtggctgtgggctgccggatgcctacctcacacaggtgaggtgtgggcaggagctgggatccttccgaaggtcccagagaagggacatcatgacacgttctggttggcgccgctgggctgggtttggatggggtgcctgcctcaggctggagttatcagtggggccttctttgggtccctgcacagacaggcagagaccctgctgccggcctgatggcccaggtggagggccagacagagtggccttgggggacacctgctggctctgaggctgcatggcgtgccaccatggccacggggtcagcgtgcagggccactgtcccatcttgctgggaccagtgaagtgagcaggaggctgaggccaaaacctacgtcccctgccctgaccgagggtttggtgcttaaggtgacagatgaacatcagttggttttgctcccttcagaaattctgggagatctccagacagatccatgagttcatgacatggacacaggtagagtgtcctttcgagaaggacaagaagattcagagttacctgctcacggcgcccatctacagcgaggaaggtgagggctgcctcccaacgcagcatgcctcccaccccacctgactccttgtccaggcccggtgctctttggggttgccctgggagatggcctgctggctgctccatgccacacagggctggctctgctcgcaggggcgagtgtgcatgagggtgggtcatgggatggatggaagagaaggacaagagactcagtttccagcagccactggagagggtcacatgggcttaggtcaggtgctgcaacacgaggaaccttcctagagtccccaacaggcagcctgagagccccgcacagcagagaactgtgttcagcccagccagaggtcactgtccccttgtgctgggctgtactcctgaagggacagctgggttcaggcagacactgcatggggacacaggctctgagggactttcccatctctcagctctcttcgtcgcctcctttgaaagtgagggtcccgagaaccacatggaaaaagacagctggaagaccctcaggtaggagggcgtcaggaacatgggagtctgtaaggaagagggaggactcagggtgggcacgagggttaccctcctggaaagggagcctgg

SEQ ID NO: 18643 - DNA, 1831 bp, Artificial sequence
  DNA replication origin
tggcttgcatcctggcgcagcgagcaccatggagccctaccaacgtcccaggctggggttagccctatggtggcgtggggcagagagggggagaatcccagcggaggaagactgctaggaggcctgggagagctgctgggaggcggggctcgagccgtgcctcctaggtaggcagggccggggtagcagtaagaggaggaagggcctgcaaggcgaagggaaccgggcaggtgaaggcatggcctcgggaccggcggtgctgggcctgggaggcagccgggccaggtgaagcagcgcggtgagcccccgggggcctgcctcaccctccctccgccctctctccgtctcctgccttcagaggacgtacatcttcacctttctcctgagctcccgggtctttatgccccctcatgacctgctggcccgcgtggggcagatctgcgtggagcagaagcagcagctggaagccgggcctgaaaaggtgaggcggggcctggctggggcacgggcgggggcagggggcaggaggcgaggtcaaggctaggggctggaggcatggggcggggttcacggtagagctgggggatggggtcagggctagagttggggcttggcctggctgggactgtgggatggggtccagggtggggccagggggtggggtcagggctagggttgaggcgtggcctggctggggcagggtcggggtcaaggctagggttgggcgtggcctagctggggctgcagggtggggtccagggtgggaccagggggcggggtcatggctagggttggggcgtggcctggctggggctgtggggtctcggggcagggtcagtgctagggttaggcatggcctggctgggctggtggggcctgggggcggggtcagggctagggttggggcgtggcctggctggggctgtggggcgggtctgagttggggcgtgacgccacaccaggctggggtgaggtctgggctggagctgtgggttgggtccgggttaggggcgtggtgggagcgggtggtggggggcctaggctggcaacgtgggcggaatccgctggtttggaggctgtgcggcgtgggcgaagaaagctgcagagttgcgggctgggtggtgcgggggccgggggcggggtccagcggtctgagtggggctggtgtgggctggcgcggagtcttggctggcgcaggaggggcttggcctgtggtgcgttctgggggattggaggatgggggcgcggcgcctgagcatcgggcacagtcccctctccccgggggcagaggccgcgcgggcatcttccgagagggtcggagtcgtttcagccaagagggccagtccccatgccctaggccctgtgctgggtggggtcgtgcatgcctgtggactagggcgcgggagcgcgtcgcctcccctcggggtcacacccctttcagcgctgtcgccctttcaaccacagggggcagacgggagctctcctctaactggatggcttggcttgggttattttactgtattgcttttatgggtaacttctaattatagcaaatggaattagttttttgtcaccttagagatggggtgggtttttttaatataagtttatttaagtgaaaaagaaagtcaacttaaggggaaggaagaaggaaccaaacaggagtcatgtggcggttcaggtttggccaaaccgcaggtggcacgcagttgggggctgtgcccagcacagggcctggggtgtggcttggggatgtgggaagcttgcaccatttgccatctagtaccctactctgccctgtggggccttactctgtatcccctgctgcccc

SEQ ID NO: 18644 - DNA, 2291 bp, Artificial sequence
  DNA replication origin
ccccgccccgcgttcctggccggcctcgcggcccctctgccccgcccggaccccgcggtccccagcccagcccctcggttccctgcttccggggtcccacccctccagcggaggcgtccagcggcaggggccggcgcaggagtgggtgcttgcttggctcgcgggcagaggagccgccgctcgctggacgccggaccgggcaggacggcgcggggagccggcggccagaatgttcctggagccccaggtagggctgcggcgggcccaggcgcaaggccgcggggcagggttcttgcgctgtcgggctcgggaggggtgcgacggtcccctgcatcccgacccgtgcgggagggtgcccgccctgaggacccgcgcgccgccctctgtgcgtccccgctggagcacctactgcccggtgggcggcgcccagcctgcctctgctcctgccctgcccttcgcggcgcggcccgcggacgccgagagcacagtggctcctgcgagcctggaaggggtggggacgggcgtgtaggagcccggacgacttgaggggcgcagaaccacctgttgctctgaggaggatgtgccgggcgaggggtggtccgcggtgtgtggtctgtgtgaggtgcaggcgggggagggctgcggaagcgcgggcgcgcttattcacggcacatgggagggagcgcagccgtgcctgtgccttgtgagccccacgcgcgcctgtgcgtttagggagagtggagcccaccgtggggcttcgaggagtgtgcgctccagggcgagggcgctgtagggtgcaggcggagaactggtcctggagaggacctgagcatggagcactggcatttcccacgctgtttatggagacccatccccagaggcgtaaggcggtgtgattcgggtgcggcagccccctgggttctgagtgcccacagcgtggagctgagccccggccagccctggccacgtgaaagatgcaggactcatctgtcccttccttctttcacttactcagcatgcatttatcgggcccctgctgtgtgcaggcactgcggttcagcagggaaccaaacaccacagcacggagagtgttgtcctcacggtgcccacacagcagaggaacaagcacaatgtgtaggtaaaatgggtggagtgctacctggtgctgagggctagagaagaagcaatgtaggagagctagcagggcctgtgaggagttcatcggtgagggtagttcaggtcattctgcagcgatagagcagcccccaagtccctcagctcacaacatggtgcagtttccactcactggtgtcagccctggtccaggccaccctcattcagggacccaggctgacggggtcacatagtaggggagtggggagggccctgcactggcatttaaatgccccagcccagtactccagtcactgctgtgagacaggtggaccccacggccccaccccgtttcattcggacctccaatgacagtcctgctcccccagcaaccaggggtctgacacacttggtgcccagcgtgctgaccaccagtgaaggagggggctgtctgtgccttaggtatggtggccagaggagacgtgtgcacaggacctgctgaaggaggggagggagggagctatgcggggggcataccaggaaaaggccagggcagagctttgaagtggaagctgcctgcatgttggggccagattggagactggggcatcaggagcagagcccaagaggaggtgggacagtgaggccagcgaggtggcgtggctgggggagccagtgggggtgacggggctgcagtgggaggtggtggagcaggatgtgctccccgtggggctgccatggcattgctggctgctgctgggaggggtgaagctagcagagtgccaccccagtggtccggggacagatgagaatcccagccttgggagatggcagagaaggaggaggagggaaggactgattctgggggtattctgaaggcaacacctggaggccgtgctggtgggtaggctgttttcattgagatggggaaggtcaggctggcgcaggaaggagggtgttgcccttagaggtgggcaagatggcaggcacagcaggtgggagcagggacagttcaacacttcccaccccagaggtgttgcctggcagtggtgtgggcagtctagagtccagggagaggtctaggctgcatgtgctcatgcagagcctggcttgctccaccctgcaggctccttgctgccctgcctcctggccaccctacccacacctgcacctgctgg

SEQ ID NO: 18645 - DNA, 2118 bp, Artificial sequence
  DNA replication origin
caagaaccctgccccgcggccttgcgcctgggcccgccgcagccctacctggggctccaggaacattctggccgccggctccccgcgccgtcctgcccggtccggcgtccagcgagcggcggctcctctgcccgcgagccaagcaagcacccactcctgcgccggcccctgccgctggacgcctccgctggaggggtgggaccccggaagcagggaaccgaggggctgggctggggaccgcggggtccgggcggggcagaggggccgcgaggccggccaggaacgcggggcggggccgaggctaggagcatggcgcggaggtggggcagggacccggggcggcctggagcgctgtcaggaggagctgcctgggccgggcgcgcgcctggcgctaggtgtgggggcgccgtaggtgccggggtgtgaggctggacggggcgtccgggatcggccgtgccgggggtcggtgctggcgcgcggggccggcgagggggcgcagcgtgggtcggggctcggcgcgggaaggggatgcctcttacccggccccggcctcacctgatcgtagacgtccactacggaactacagcaggtgttctgccagcattcgacttgaatgccttccctgacagggcgctcactccacacagctctggcctgagacaggcgtcgcacagaactccctgtccttccatttcattggaactcgggggacacggcagctgcttttgtgggagggctgatccgagccgcagcgaggggtgggctgggcacatggcacagtgaggctcctcccgcccccagagccccagcctcagaaggaatctgccaggtgatggggctacccctctgcgcattcctgtggtggaccccactccctcagatgatgcggacgggaaagatgcgcggagccgaagagcgccctctctgggggtctggattggagcacccagcacctgagctgggtgagagaccccttgggctctgggggagtccgagttggccggcggggcggccgctagggaggagcagggtatgctcagcttgaacctcacagagaggctctgacaactctggagagctctcaagccacgggctgatggacaatcgtgaccctgacaacatctggccgccccaggatgcccataccctcaccccacctccacccccacggctcttgcccaggccttgccagaggccctctgcctcccagcttgtttgcctgctcacttactagcagcaagagtacctactaggctggctcgatgggcagttgtctctgtcttgggaaagtaggggctgtgctgggttcattcactggcctccctcaagccagctcaagggcctggagacaggagtccttctcctggagtgctgccctctcaccagctcttctctaccagtgagtgttggcctggcctggaaccgcttcccactgctcagagcatgcactatacattactgcgtggtatgcagcgcctgtgggtgggcagtgcggggagtacgaggcaaccaggcagaaatggcacagtggccctccagctttcacaatgtcctcccccacttttgcttctgcatcttgtttcaggccagccagaagatgcgaagctcatggtgaccttggcaggcagacaggtggcatcaggatggtctgggcctgcagggccaccctgtcccttcaggtggcttcatggagagcaccaagaaggtgaaacctggtgtcttgcccctggggaagccttcgaggcacctgcccctgccttcctcagccctgtaccgtagccctgcagaacatctgggccctggggtggccccagtgttgtctcaggaagtccatgtgagcagttggccctgctgcctcctgaccccagagcaagcatcccctctgcctccctgaatgtgacactctagaggaggtggtggatgggtgggcagccccacaagccttcttatgcagtcacagggtcacttcctatcacgctcatcccagattgcaccagtgtcacccaaggaccttgataaggcagacgcttccccgggaggaatggggcccttgcccccatctctggctgacacagatggtgctgtctcctttacccaccagtgtgatctcagcattca

SEQ ID NO: 18646 - DNA, 965 bp, Artificial sequence
  DNA replication origin
ccctgacgccaccatctccctgaccctgtcttgtcctcacactttctctgactgcagcggggaaagattcttcaactttaaggacttgtgaatacaatgggcccacccaggagaatctcccagcagccttaagagcctctgcctaattacacctacagagtcccttttgccgaatacgggaacattcccaggttctggagatcaggctgtgggcatatttgggggccatacccactcttgagagcctaatccctcacatgaggtgagcaaggcagccctccccggggatttgggagtttacagtctggggagctacaaggacctcaaatccacacacggggtagtttggaggttgtggcacccgctgaacacatcaggatgaggtggtggggggtgtggggtgggtgtcaggaaggctggacctggccaggcccctcctgcaggtggccttgctacggtgggcgtggaagtgtgtgggggcacccccgcctgtgggccctccctgggctgggtgtgcacagcccctttgtctggggcatggacagaggagaccatgggggtttgcccacgatgggctcctttgaactcgctggtcctgaaggcgtggggtgcggtgctctgtgaggagagctggggttgttggcagcagattgtgggttccagtggggtgcggacgatgagtgccagggtgcaggggagcggttagtcccagtgggtctgtgtcgagggtgagcaggaggcacagggtcctctctcgggtgctgcctcccgccgcgagccagtcactgggtgtgcagcagagggagcctgcaagcctctgtggaggggctctattgccagtgggagtcaggtgagtttggcagccgagccctgaaaccgggtcctctgtctgtgctaaaaagcccctgagcttaggacatgtgaggggaaatcagaccttcagaaaagaaagtgcactgtgtctg

SEQ ID NO: 18647 - DNA, 917 bp, Artificial sequence
  DNA replication origin
tgaatctgccagcatagccactgtctcgtggctgggctccaacaggcctggtgcagactagaccccaggggatcatagacaagtacacccaaggcggctgctgcagagcagccccgggccccctgcacagcaggaaagttcaggaaggcacccaaggaaggctgggagcctcctggcaggagggagacccagcagaagccatgccctgagtaggggaacagactgctgggtaaggaggccactgcaaatgtcctggccaggggatggtggcccggcccacagaggtggcagtgagcagggagaggcagaaggggcagaagagaggtctagagtggggtgtgctagactggctgacaactccaggcaaagggaagctggcagagggggtgagggagagccagctgcctacctgctcagatggggaacctggggcaggcaaggttcaggggcgtgatgatgtgcatcgtcacccgggaggcgtccagcaggctcacacactgacagaacccagaggacaggtgggggctgatgagagctggaaccggatcagcacggaggagggaacagatgctgtggctgggtagagggtttgagcccaggtcttgaggaacagggactttgagtgtcccaggatgggaggaggagaaccaggggccggccaagcccaggaaatgggtgtctgggaacaaggcagtggacatccacggcctctcaagaagacatccctggactgaaggaggtgtgtgcagattggcgtgggtgggagtgagtgggaagtgaggattcagagtgagcagagaacatgtcttcaaagtcagcccgcacaggcgaccagggtgcggacggctgagcaagtttcgttgtttttaaaaaaggaaaagcacctgtcaaccggacagccacatctttgcatccca

SEQ ID NO: 18648 - DNA, 1641 bp, Artificial sequence
  DNA replication origin
gcccgcagctggcgcagcgcgggggcggccgcgggtgggcgggtgccgcgggcccgggcgccgagcatgagccgccgccggcgccggccgcgcgctgctcggggcccgactgcggcgcgagggcggcgcgggagcgacgctggcccggaccgaggtaggcagcggccgcggaccctcagtgcctcggggcccccgcccgcgcctggggccgtgccctccggtcgccggcgcgggcagggcgcggcgtgcgcgggcccggggtccctcccggcgcggccgtcgtggggccggggcgcgggctccgggcgcggggcgggggacgcgcgcggggagggcggccgggatcccggcgcgcggagttgctgagaactccgccccgggctggacggcgccaggaccccctgcaccctccgccccttcagggcacctggcgggccgggccgggccgggccgggcgtggcaggagcgcacgcggcgggcgggcgtgggcactgcgggcaggttcgctgcccggggcctggcgtgggggtgggggctggggaatcggaggagctcagggctgcgcagttggaagtttccatttgctcttctgcattctgggccccgccgtggtatctcacgcccttgctgtttggcgaggaattggggcttgagctctgcatttgggggagaggtccagggccatgccaggtgtctccctctccctgctgggcaagggtcatttgaaggaccacgctctctttgccccaggccttgccggccccaggaacggggcaggtgcagctggttctggtccgagggtcggtgagtgagaggtgggggcgggagtcccctgctgtgtgtggagggacgcgctggcaggttcctgtgccctgcatttctggctgcctctgggtgctggacctggtggatatttacagagaggccgctgcctgcctcttgggagccacctgggggcagagacctggtggtggccggggctccctccctccctgctcagagcagtgagcttctccctggttcaccctccccaccactgccactcttctcccactgtcctgcgcaggaagggccccgatggccgtcggccgcaggatcctgaaacacaggagtcaggctgggtgcaggggagcctcccagaggccttggttccctctgtccccccagggttctcccgccccctccggatgcagtcttgccagcccagcctgtccacctcggtgccctggactctaagcggctctagggggcctccagccgaaaggctacaggtcttgattcgtgaaccacgggcaggctgcaggcttctgagactcagtttccccatctgtagactgacacggttttgatgacctctgaggacatttccaccctgatgtccagtgacactttgctttggaacctcaggaccccagcccaggaaggggagatccggagcagggggacatggaggaccttggctggatggccagggacacgtgggtgggttctctgcccctccagccagtgtgtgtccttagggctgtgggtggtagtgacccagcgaggcgggtgcagcaggcccacactccctgctcctgagaagggcatgagctgtgtggatcccccaggctctctagtgaagtagagaagctgtgtcct

SEQ ID NO: 18649 - DNA, 2153 bp, Artificial sequence
  DNA replication origin
ggagttctcagcaactccgcgcgccgggatcccggccgccctccccgcgcgcgtcccccgccccgcgcccggagcccgcgccccggccccacgacggccgcgccgggagggaccccgggcccgcgcacgccgcgccctgcccgcgccggcgaccggagggcacggccccaggcgcgggcgggggccccgaggcactgagggtccgcggccgctgcctacctcggtccgggccagcgtcgctcccgcgccgccctcgcgccgcagtcgggccccgagcagcgcgcggccggcgccggcggcggctcatgctcggcgcccgggcccgcggcacccgcccacccgcggccgcccccgcgctgcgccagctgcgggcagagcagctccctccgcagccggcgccggggagcgcgagcgagcgagcgaacgagcgagcgcggagcgagcgccgagcgggcacggagcgggcgcgagagcgcggggagcgggggagcgggcgggcgcgggacgcggagggaggagggtgcggggcaaaggtgcagggggaggtagggcgcgggacggggctcgagcagagggcactgggacagggcgggcgccgggagagggcggccaggctttcatttaaaaaggataaggcatcacgcctgtaatcccagcactttgggaggccgagacgggcggatcacgaggtcaggagatcgagaccatcccggctaacacggtgaaaccccatctctactaaaaatacaaaaaaaaaaattagccgggcgtggtggcgggcgcctgtagtcccagctactcgggaggctgagggaggagaatggtgtaaactcgggaggtggagcttgcagtgagccgagatcgcgccactgcactccagcctgggtaacagagtgagactccgtctcaaaaaaaaaaaaaaaaaaaaaaaaaaaaggatcaggcagcagacaagctaggaggcgatgcggccaccgcatttaaaaggccctctggggactcccgcagagctggcaaaatttttgtcagtggaatcagacggtgaaagcccttctgtgggcaagtcctggccccttgggtcactccccttaaccatcttaatcgccctgtaaggtcggtggtggatttgttcccattggacaggttagtaaactgatgcacagggagtgcggttaccctgcagggtctcagagcctataagtggcagagcaaggctccaaagccaccttgaaagatttcagaaccactaaagcaggacacaggtcttctggcgtccactggaacttcctgtcgctctgaagggtcaccttctcttgaacggacaccctgtggcctgaccccagggtggcccagagtgactcttgcaggcagtcagacgagggccagtgagaaacaggtctggggcgacgatgtccccaggtggaggggtctgtgtgaaaaaatggggaggagccccacagcaccccttgaagaggctgaggaccttgcttactcacttagtccttgtgtcttgaacacctgtatgccaggtgtaagatggggcactgggattcggctgtgaatgtctctgtctggttggagtttgcattcttgtgggaagtaggcagtgaataaaaatacacataaatagttcatgtgtcagatgctgcagatcccacagagaggcccagcagggagagggagccagcgaagggagggggaggggagcttgtagggtgggggattcttttttattttttaaggggaggtgtcactgtgtggcccaggctggagtgcagtggctattcacaggtgcaatcactatgctctacagcctggaacttcctgactctagtgagcctcctgcctcagcctcctgagtagctagaactgtagtttctcaccaccacccttccctgctgggttggggattttattttgggtgatcagggaaatcttggctgaaaggatcatatctgagctaagacctaactgaggcaagctatgctgaatccgaggaatgaacattttcagcaaagagaacagtacatgcaaaggccctgaggtggaggatgccttagaaggaggccaagtggagatgagtgagtgtggtagagaggagcctgcaggagctgccaggtggaccatatcgcgaagagcctggccagccatca

SEQ ID NO: 18650 - DNA, 902 bp, Artificial sequence
  DNA replication origin
aagctcatcccatccccagcctgctgtcaacaggggaggcaggcccccaatagccgggagggatggcagggactcccagcaagtggcaccctccatggctggctgtccactcgccttttaggtccctcctcagagccctgtgaggaggagaggagcggctccacagagctgtggggccaggcaagcagcaactcagggttgctgcagtcctccggggggatctcagggctgagcccagcaggggatgaagccagagtgccctggagtccagctctacctataggtacagggattcggggtgctcaggggaccacacagaggctgcgggcttgagaggtcagtgaaagtggcaaggagggccaaaggagggggtgggtgaccccaggagggggtgaggtgttcagaggagatgagatgttcccaggagggggtgggtgaccacaggggggtgaaatgtttccaggagggggtgagatgaccctaggagggggtggggagaccgtgaccccaggagggggtgggtgaccacagggggtgagatgtccccaggagggggtgagatgaccccaggagggggtgagaggatcccaggagggggtaaggtgtccccaggagcggatgagatgtccccaggaggatgtggtgtgtccacaggaggagctgggtggatgcaggaaggggtggagtcaccacaggaggtagggggaccacaggtcgggtgggtggggtaaccacaggacctcaggtgatctatccattctcacctcaccggaagcagtttctcgaccctgggaagtcccctctgtgctcaccccctgagcctgtctccaggatcaagaaggaggtgcctatcctggttgctggacagacccagacctccccatttctgtctctccctctag

SEQ ID NO: 18651 - DNA, 1180 bp, Artificial sequence
  DNA replication origin
tttggacgtgccagcagttccaaatcctggggggccagccgggcagacagcatctggtgtggagagaacaaagagtgaagctgactgagcacacggtggatttgaactgttgcatgggcgggaggtggggtggatgagacagggaggggtcagggggatgctatggctggagctgaggtgctggacattatgaggggaagaggaggccatgggggaggttttctggtggggaccagacatggctagagcagtgcttgagaaaattccatccaacagaatggatgttaagaggggataattctgcattccctgagctttggctgtaccagtgggggcaaaaaaccactccaacctccaggagtgtcaggagagcgacacaggcacacaagaggcagaaaggcctgtacgaggccaagtgctagctagctgaggtccgaggcagggccacgtggaggggacctgcagggcttcctggctagtgtgtccagggggccctgcccgagggctgtccagtggggaggcgttggcctcatctccaactgtcaggaagggaatgtgactctccaggaggaggagactggcccaaagccacgcagccatgcagcggtggggtcaggacctgcacctgagtcggcactagaaccacctccttaaccaccagtccacactgcccacattgaggtggtcaggaggtcaggaacgaggagcaccaaggagcagccttgacaaaacggcccacagagatgccagggctaggaaccacactgctgcaagaggacagaaggggagatgcacgctgggaacagacactcaggacggaaatgtgtcaagaaggaaagaagaatgcacacggcagcctgaggggctggcagtgtccgacggggcttgttacagaagtggggagagagtccacgccagaggggctggtggggcaggggaggacaatgggcttcagaggggccgtgtgtgtatggaggagagtcataaagacaggaagaaagccaaggggaggagccccacggagaaataagacgggaaattcattcagggtggggtaggagagggtcagggagagagggaggactcctttctgctttggggtagaaacgattagagtggttttgttgttgttgttgttgtagtttttttgagacagagtcttgctctgtcgctcaggctg

SEQ ID NO: 18652 - DNA, 781 bp, Artificial sequence
  DNA replication origin
gagagggtcagggagagagggaggactcctttctgctttggggtagaaacgattagagtggttttgttgttgttgttgttgtagtttttttgagacagagtcttgctctgtcgctcaggctggagtgcagtggcatgatctcgtctcactgcaacctccacctcccaggttcaagtgattctcctgcctcagcctcctgagtagctgggatttacaggcatccaccaccatgcccagctaattttttgtttttttagtagagacagggtttcaccatgttgcccagcctggtctcaaactcctgagctcaggcaacctgcctgcctctgtcccaaaaagtactaggattacaggcgtaagccaccacgcccagcctacgattagagtttttttaagtgctggggtaggaggcagtagacaggagccccggccatgggagaggctggcctggggcattgtgtggggcagtgaaaatgctacgggtagaattaggcgggaaggaagaggagtgtggcagaattccattctaaaacaggatagttagggaaggtttcacaggcaatattagaggaagatgtgaaggtgctgagctatcaagggtgggaaccagtgttaacactctacaggcaggagaggtctggtgctcttggtgcctggtgctatggctggaaaagcaagtgtagctggaacagagtggacaagggcgagaggaagaggaagtgaaggcagagaggggacaacaaacttcacacagggtcgtgggaaatactgtgcagactcc

SEQ ID NO: 18653 - DNA, 1000 bp, Artificial sequence
  DNA replication origin
gccaccacgcccagcctacgattagagtttttttaagtgctggggtaggaggcagtagacaggagccccggccatgggagaggctggcctggggcattgtgtggggcagtgaaaatgctacgggtagaattaggcgggaaggaagaggagtgtggcagaattccattctaaaacaggatagttagggaaggtttcacaggcaatattagaggaagatgtgaaggtgctgagctatcaagggtgggaaccagtgttaacactctacaggcaggagaggtctggtgctcttggtgcctggtgctatggctggaaaagcaagtgtagctggaacagagtggacaagggcgagaggaagaggaagtgaaggcagagaggggacaacaaacttcacacagggtcgtgggaaatactgtgcagactccgggttggattctgaggcaagttggtgccctcagaaggtttgcagctgaggagggacacgggtggggatgactgagctgctgttgacttggctgacaagtgaatgaggagagcaagtgcgcatgcagggagtccggccaggaggctacggcaggaaccagtgggaatgcaggaagcacggactgtgactcatatttctggaagtacctgcagccttgacaagaagtatttgcttgtgggtggtgtgctgggtgtgagagatgaggcgttcgcaagaatcctggctaggtgaatgggatgactggtttgaaggagatcagtggctgtacgttcagctcaaggtgtctaggagatgtccaggtggagatgttgggggaacaaatgcattagagcctggggttgaggagaaaggcccaggatatgaggagcatttgggaactgtgtgccttcaggaagaagggatgaggtcaccaatggcagtggatgttttagagaaaagttccaaccctgacaatcccggggggcatttcaacattaaaagattgggacagtgatgaggaactagtgaggagaccaaggg

SEQ ID NO: 18654 - DNA, 924 bp, Artificial sequence
  DNA replication origin
cgggatctgagctaggtggctggttgtgggtgggtcgggcgggggaacgggggcccgggtgtgggtgggcctggtgcgtggggttgaagcttcagaaactccagtagtgcagaaatgttcccaccaagcactgtctttaatagaaaaaaacaaggaacgacatatatttgcactgacacaagaaacgtctccagtgacaggagagaccgtcgcggtgccggagcgggttgggatggaattcgcggtgacccaggcactgactggcacgcgcggctgcgtgcgggcaccgaggagccgatggaactagcgcgtagagcgctgttcacgcggagctccaaactctacaaggaagccccgagatggagacaatgaaaaacaagcacacggttcacgctggggtcccttcgagccgcaggaaagggagaggcggctcgcggggcggcctgccgcgagttgagatgcgctgagcaccgggcacagcggccgtttggagaagcagacgtgcggctcattcggggagggcgcagaggtgtctcatgggggaggcgcagccagcttctgaagtgggaatagagggattgtttccaggattagcagccatggagagggtgggggtgcaggctggataaggggccgttcttgcggattggcagccagtttgggcagctcggttggaggggttgttctccagtattactggccatggttcgggcagcctggactttatgggggaatgcagggattgtttggagcaatcagcacccataggctgggcaggctcgattctttattggggggtgtcttgctatgttacccaggctggactcaaattccttggctcaagtgatcctcccacctcctcagcctcccaaagtgctggaattacaggcgtgagttgctgcacccagcctgctcagtgacgtt

SEQ ID NO: 18655 - DNA, 1019 bp, Artificial sequence
  DNA replication origin
atttttagtagagacagggtttcactatgttggccaggctggtctggaactccagacctcaggtgatccacccgcctcggcctcccaaagtgctgtgatttcaggcatgagccaccatgcccagccgactccctctcttaaattttttttactaatagcttagaaaatgtgcattccagttcaccacttattattgctaacatttccccccataccagttgccctgaatatatgctccccattgctaatgtgaaagttttggatattgtcaaatttgggaaaacctctttcaagtgtttttcacataggagcagcaagatttcagggctctcacgttctccagtgcagtgcagtcttgaacattctttgaattgaggatgctcattaactacattgctgccaccaaacccccaagagccttggcagagcccctgggtgtgtgtgggtaggggaggtttggggggtgtggagggggcctggaactagggtgggcccagcgctgggcaggggtctgggtgtgggaaggtgaccaaagtgtgacagggaaagctgtgagggaggccctgggcgtgggagagtcagacatggggtggggccgggacgtgggggacgatggctagagggtgtgggggtctggaatgcagggggccaggatactgggggatcgggcattgcagaagttgctgggcacggggaaagccgggtgtgggaggagactcaggccatggggtgcgggcttaggcggccttggggagcggttttgagtgtggggcgggcgtggggtgcagatcatgggccgggatctgagctaggtggctggttgtgggtgggtcgggcgggggaacgggggcccgggtgtgggtgggcctggtgcgtggggttgaagcttcagaaactccagtagtgcagaaatgttcccaccaagcactgtctttaatagaaaaaaacaaggaacgacatatatttgcactgacacaagaaacgtctccagtgacaggagagaccgtcgcggtgccgga

SEQ ID NO: 18656 - DNA, 1799 bp, Artificial sequence
  DNA replication origin
ccctatcccctcccctcccctcccttctcctctccagaaacgtcctcgcttgtccgcctccaccgcctcccccgccagccgtgtcggctctgctccgcgcccagccggccaaccggcggctcagctctggcgcgtcacaatgcgccgtcgcggccccgcccccggacgccggacgcagaaactccgccctgccgcggtccttgcgtccttccggctccgtcgtggaagcaggactgcgccgcgtcttcctcaaggtggggttcggggggccaccgaatcgctgtcacgccggcaggtagcagggggtggggacgcgggctccttgggcttctgtttcctggtgtccagggcaaagggctgagccgggcagtagggcctagtcggggcctggctcgccgggagcaggagggcttccggcaaagccgcgtgcgctcgacgggcaggcgctgaggattggggccggcagcgcgcctgaccccgcccctcgtaggctccgccccgtgctcgcaggcgggggtttccatggtgatggtcaacaagcctcaactgcctctgctacaactgccaagttccccgcgtcccaccctcctctaggtgctccaagggaccaccggggtgcctgatatgagagcgggagtgtagagactcggaggccgaggtgaggggcggccgaagtctccgaggtcgaaggccgcacacccgggacctagcggggaccgggtccccctgggggtggggacggggggtgggatttgagattagggagactatccgaagtccagggccccgtacccggactacctggggactgggcctattggggtggggatcgttgggctggggctgggatttgggatcagggaagagcgatctgagtttaagcgccgcaaacctgggaccgagcgaggactgcacataatgaggggccgtggcgctgagatttgggtgacgggattcgaggtcgaggggcccgtacgtgggaccggcaagaactggacccactgggatcgggagacgcagcgtcggaggtcgagagccgcacgcccagacagtggtcccacgcggtgagcaccgcgggctgagattttggagtcaggaaagcgcggggaaggcacggacggccgggtgcgttagtccggccccctggcggggagctggcgactgccggagggctctgaaagtgagaacaggcctggcgcagtgggaggcccagccgggaggatctcttgagcccaggagttcccgacaagcctgggcaacatagactgtctctactgaaaagtaaagaaaaaaaaattagccacgtgtggtggcgcgcgcctgttgtcccagctactcgggaggctgaggcgggagggtcgcttgctctgaggtcgaggctgcagtgacagtgattgtgccactgcattccagccgggcgacggaaatgagaccttgtctcaaaagaagtaataatagtaataatacctgagtaaaatgaaagccgcgcgctcacgtggctgcaggcgcctgagagttgcacaagacttccttgtggggagttggctccgccctcctcccacgcccggttcccgtagccttagctctcggccccgggccctttttcctcctcggctgcgccgcgtgtcctcggagcgcggtccctgtattggtctcctgctcctagaggtatcgtgtttgtatttggggtgaaaatctgactcgtgcgcgctcttcagcttagtcgtccttttttttttccttttgtttgtttgtattaagtattttcgtcgattccgccctgctcgtaggaaacttgt

SEQ ID NO: 18657 - DNA, 1622 bp, Artificial sequence
  DNA replication origin
gcgagcacggggcggagcctacgaggggcggggtcaggcgcgctgccggccccaatcctcagcgcctgcccgtcgagcgcacgcggctttgccggaagccctcctgctcccggcgagccaggccccgactaggccctactgcccggctcagccctttgccctggacaccaggaaacagaagcccaaggagcccgcgtccccaccccctgctacctgccggcgtgacagcgattcggtggccccccgaaccccaccttgaggaagacgcggcgcagtcctgcttccacgacggagccggaaggacgcaaggaccgcggcagggcggagtttctgcgtccggcgtccgggggcggggccgcgacggcgcattgtgacgcgccagagctgagccgccggttggccggctgggcgcggagcagagccgacacggctggcgggggaggcggtggaggcggacaagcgaggacgtttctggagaggagaagggaggggaggggaggggatagggggagggggaggaggaggagggagtggagcggcgggaaagatccctctgactgcccctgaggccctggaggaaggacactggtgagccccgcaggacactgaaatgtgcgccgaaaggacgcctgatggaagactaggatgggaaaaggaaatgagagccgatggcagggcgtggtggcgcaagcctgtggtcccagtaatttgggaggctaaggcgggagaatcgcttgagcccgggaggtcgaggctgcagtgatccgtgactgctccattgcgtccagcctgggcgacagagcgaggcgctgtctcaaaaaataaaataaggaaagtagtacactgaaggccgggcgcggtggctcacgcctgtaatcccaccactttgggaggccgaggcggacggatcaggcggtcgggaaatcgagaccatcctggccaacatagtgaaacccctactaaaatacaaaaaaattagccaggcgtggtggcgcgcgcttgtagtcccagccactcgggtggctgaggcaggggaatcgcttgaacccgggaggcggagcttgcgtgagccgagatcgcgccactgcactccagcctagcgacagagcgagactacgtctcaaagaaaaaaaaaaaaaaaaggtacactgagtactccggagaccgcctaaaggggtctcagagcagggcgttaggagggatttgtcaggttgaagttgctcaggtgataaattccgtggtgtgagaagcccccaaacctcagaatgtaactcagacccaggtcgagggcaagattttcagtcacagagcacctgaacacacagatttggtggctaatggctaagccagggacagattttctttcttttctttttttttttgatgtattgtagggctaataattgtaaccattttattttggtggatcttcttcatgaagagatgatgtcaaggcactcatcacaggttaagctgaacattgttactattgttattatttccagactgagtatcgccctgtcattcaggcgggagtgcagtggtacaatcacggctcactgcagcctcgacctcctgggctcaagcgatcctcctgcctcaacctcctgagtagcaccacc

SEQ ID NO: 18658 - DNA, 928 bp, Artificial sequence
  DNA replication origin
ggagcccctccgcccggcagccaccccgtctgggaagtgaggagcgtctccgcccggcagccacccggtccgggagggaggtggggatcagcccccgccaggccagccgccccgtccgggagggaggtgaggggatcagccccccacccagccagccgccccgtccaggagggaggtgggggggtcagccccccgcccggccagccgccccttccgggagggaggtgggcgggtcagccccccgcccggccagccgccccatccgggagggaggtgggggggtcagccccccgcccggccagccgccccgggagggaggtggggggggtcagccccccgcccggccagccgccccgtccgggagggaggtgggggggtcagcccccgcccagccagccgccccatccgggaggtgaggggcgcctctgcccggccgcccctactgggaagtgaggagcccctctgcccggccaccaccccgtctgggaggtgtacccaacagctcattaagaacgggccatgatgacgatggcggttttgtggaatagaaaagggggaaaggtggggaaaagattgagaaattggatggttgctgtgtctgtgtagaaagaagtagacatggcagacttttcattttgttctgtactaagaagaattctgccttgggatcctgttgatctatgaccttacccccaaccctgtgctctctgaaacatgtgctgtgtcaactcagggttaaatggattaagggcggtgcaagatgtgctttgttaaacagatgcttgaaggcagcatgctcatcaagagtcatcaccactccctaatctcaagtacccagggacacaaacactgcggaaggccgcagggtcctctgcctaggaaaaccagagacctttgttcacttgtttatctgctgaccttccctcca

SEQ ID NO: 18659 - DNA, 1326 bp, Artificial sequence
  DNA replication origin
acctcccagacggggtggtggccgggcagaggggctcctcacttcccagtaggggcggccgggcagaggcgcccctcacctcccggatggggcggctggctgggcgggggctgacccccccacctccctcccggacggggcggctggccgggcggggggctgaccccccccacctccctcccggggcggctggccgggcggggggctgacccccccacctccctcccggatggggcggctggccgggcggggggctgacccgcccacctccctcccggaaggggcggctggccgggcggggggctgacccccccacctccctcctggacggggcggctggctgggtggggggctgatcccctcacctccctcccggacggggcggctggcctggcgggggctgatccccacctccctcccggaccgggtggctgccgggcggagacgctcctcacttcccagacggggtggctgccgggcggaggggctcctcacttctcagacggggcggctgccgggcggaggggctcctcacttctcagatggggcagctgccgggcagagggtctcctcgcttctcagacggggcggccgggcagagacgctcctcacctcccagacggggtcgtggccgggcagaggcgctcctcacatccctgacggggcggcggggcagaggtgctccccacaactcagatgatgggcggccgggcagagacgctcctcacttcctagatgggatggcagccgggaagaggcgctcctcacttcctagatgggatggcgggcgggcagagacgctcctcactttccagactgggcagccaggcagaggggctcctcacatcccagacgatgggcggccaggcagagacgctcctcacttcccagatggggtggccgccgagcagaggctgcaatctcggcactttgggaggccaaggcaggcggctgggatgtggaggttgtagcgagccgagatcacgccactgcactccagcctgggcaccattgagcactgagtgaacgagactctgtctgcaatcccggcacctcgggaggccgaggctgggggatcactcgcagttaggagctggagaccagcccggccaacccagcgaaaccccgtctccaccaaaaaaatacgaaaaccagtcaggcgtggcggtgcgcgcctgcaatcacaggcactcggcaggctgaagcaggagaatcaggcagggaggttgcagtgagccgagatggcagcagtacagtccagcttcggctcggcatcagagggagaccgtggaaagagagggagagggagagggagctggagcttgt

SEQ ID NO: 18660 - DNA, 803 bp, Artificial sequence
  DNA replication origin
ggaatttaaatctcagcagggaaagacagtaaataagaaagcaagtgaataagaaaataaggtaaggcataagttataagaagaaattaattaaattaaaccaggaaaatgatatatacaggatgctccagtggattagatggtcagtgacatgctttctgaagaggcaacagttggactgagagctgaatcatgaggaatggagagggcagctagtgcagaagctacaatgagtttgatgcagttcaagggcctgctgggtcactggtgctgaatatgatcataagagaggcctaggttggggaggtgacaggagagcctcatgggccaggatgaagagtctggattttactggatggccactgaaaagcctttggagggtttcatgcttggccttgtttttgttttaaaagatcaccttggctgtcatgtggaaaactcatgtttgggggagcaggagtagagtcagaccaaccaggaggttgatgtgggtgagagcaagtgctgcctaggcctagagaggtgacagtgcagggcaggggagctgggtggatgccgatatgctttagcggtaaaggaggtgggtgataggtgagatgtgaggatgagaatgaaatgacatcggggattttggtttgagcaattgagtggttcgtgtggctgtttactaaaatggggatgactggggaagagcagatgctgatggatattgctggagcaggagttctgttggggcctgttaagtgttttgttttgttttttgtttgtttgttcaactcactgcaacctccgcctcccgggtt

SEQ ID NO: 18661 - DNA, 1388 bp, Artificial sequence
  DNA replication origin
gccggggccgccgagacccacggcccggcgggcgggctcgcggggagactcctgggagttgtagtccattccgccggcgccggcgctggcgctgctgcgggctcggcgccggcctttgtctgcgggcacgcgccgctgcggtgagtgaggccgctggccgggtcagagcgccggggcaaggcggggctgcgccatcagaccgctgtcccgggccctccgtgtggccgccttatgccagcggccgccaaggaaatgagcaggcctggccggcccgggccccgagggaggccagccgcgagcggagaggtcggcggtccgcagagcagggtcccgtggaccggagagcgggatgccgaggttcaggacgcagggcgggcccggtgcccggggcccggggcctgaggcgggagggcagcgtctgcggagaggagcagggcccatggcgtcggggcgtgggagggggaggccgcggcaggctcacccggcctccgtgcgggcttcagcgagtgcgggaagccggtgccggccttccggggtgggaggagaggcagcccctgcgggggagagtaggaagccaggcagcgtgtgggaaaccacgctacccacaagctcctaaacctgaaactggccccaggacattttccagaccgccaagtgtacccctcttctcatccgccctccagaggacgccggattttagatcttaagtctggtggtctcgtctgatactcctcttgtttggttctttccttctcattgtcctacctgataggacagtgttagtaacctgtttaataagtggggaagcagagtcagggctgctgggttactcgcccaagatcatatcctgggggagccacggcaagaagccaagactcacggactacttctaagctttttccaaaggatatagtagcctttctaataggaaaatcaatgtttttaattataaagccacttttacaaaatcttggggaaactgcttcctcagacctgtgatctagggagaaaaatatgacaatttctcccttactaatcacggaggtccctgataggcggcggagttgtaacttgaagacctcacagcaggtggagaggcagagctgtgaattctactctaatttctggaatccccggcgacagagtccaaccccaggcagcaggcgccatgtaccccagggacttttaatgtgtgtgcagctgttgagcaagaataccttgaacttccaaatgatgtgctggcatgctggtagggaattcctttgcagcttgtgttccaagttggaagtgagtcctccaaataaaaatttaaatgattctcctggtcatcacagcatgtagcagaatgtgcagttgtcaagaagaaccaggtgcttaggttgacaaaa

SEQ ID NO: 18662 - DNA, 1469 bp, Artificial sequence
  DNA replication origin
tgtaggcaattatgaaaaagcagcagtgggagaacaagggagtgttcttagaaatagaaatggtccacagtggcccaaattaaagcaaaacccactagaggcggtgagtcccaaaatggactctaaaatctgaggcaggaaagactccacctggagaaatccttacggagcagagcaagagtaaaatgtgatggaaatggcaggaaagagcggagagaaggcagatataggattccctcatgcatttagtgagcaaagatccactagatcctcctcaatggtcttagcaaggggcatctagcagtgaagaaaatcagctgggcacggtggtggcacgtgcctgtcatcccagctactggcgaagctgaggtgggaggactgcttgaacctgggaggttgaagctgctgcaggctatgatcacacctgtgaaaagccactgcacttcagtctgggcaacagagtggggccctgtctcttaaaaaaaaacccctgcttgcttgaagcacatgtttagtgagggatgaaagacaataagcaagtcaggacacatcgaatgagagaaagcggtcagggctttggaaacctagagtgaggaagaggaaaagaaggggtggggacgagggagagagctgcagtcttaaataaggtggccagaaggagcctgctgtgcagggagctctgagcagagagctgaaggcatcagggagcaagcggggagacgtgggggctgcattccaagcagggggttggtgctgtggagacccggagatggtggtggcattgcggggagggcttgagctggggagtttggggggccactgtgggtggagaaggggaagtgctcagcagaggaggcccatttgggacatcttaggactctgggatggaaagccattgagggattttcaacaaagaagtgacatgactttcacttaatgctttaacaagaccattctggctgctgtgttgtgactagattcctggaggggtcggtaagggcagaagtaggaagaagagggaggacgcgacatgattctgggagtgacggtggtggcgtgtcctgggctgagcgtgagggaggtgacgagaagtggctgctctctgggttttccttgtaggcaagtccagcaggatttgctgacagtgggtttggatggaggagaagcagggtagttgaagacaaatgagatttggatctaagcaaccgaaagaaaggcaaagaagttcccagcggactgcttttgtttgtttgtttgttttgtttttgagaaggagtcttgctttgtcgcccaggctggagtgcagtggcacaatctcggctcactgcaacctccgcctactgggttcaagcgattctcctgcctcatcctcccgagtagatgggattacaggcacgcgccactaagcctagctaatttttgtatttttagtagaaatggggtttcaccatgttggcgaggatggtctc

SEQ ID NO: 18663 - DNA, 2113 bp, Artificial sequence
  DNA replication origin
tgctgacagtgggtttggatggaggagaagcagggtagttgaagacaaatgagatttggatctaagcaaccgaaagaaaggcaaagaagttcccagcggactgcttttgtttgtttgtttgttttgtttttgagaaggagtcttgctttgtcgcccaggctggagtgcagtggcacaatctcggctcactgcaacctccgcctactgggttcaagcgattctcctgcctcatcctcccgagtagatgggattacaggcacgcgccactaagcctagctaatttttgtatttttagtagaaatggggtttcaccatgttggcgaggatggtctctatctcttgaccttgtgatctgcctgcctcggcctcccaatgtgctgggattacaggcgtgagccccccccgcacccagcctgcggactatttttttatggggggggggggggaatcaggagtttgccctttgtgttttcaatttaagattcggcatttgggaggagctgtctggtggactacaggaaaggcgagtgtggagctggtgtgagaagctggctgggagagggctgttccttggtgactcacgggcggaaaggtggcctttaaacagtgagggtgggtgaagtcatcggggcaggagcgtgcctccagagggccagggactgtgcctgaagctgggctctcctgggctacaggggctgcgagggaggcttgaggggctggggagcgaggggcaggctgagaccctcctgtgggaaagcattgcaagctgggaatgtttagcggtggccagtacctcagagtgcagcagggcgaggcggaaaagagactgaccatgtctgagtggttttggtggagtgctgggtaaaggtgaatgtgtcagggtgtgaaggagaaataggagctgtgcggaaacgggtgctgggaaagggggaggttgctggggaaagaggtgtggggtcctgagggggcctttgaaaggtaacgtggagaattcctactggatttggccttcactggaataccctagaggagggggaagttggaggtgagggcgtggccggtggctgagtagatggcctgggggggcctggcccagagagctcttgggaaggtcttagggcaggaccaggggccgcgggggcagcagatggcacacgggggcggggtgtcggaggcggcctgtgcagatcccctgaccccctgccttctcagggctacagaaacaaggccgtcatacttagaggtgctgggcggctgaggagtggagcgggtgggaggtgcggggctgcagggggattagctcccagcagccgtgggtccccctgaggatgccggggtcataatgcacaaagccaccctctccaaacacctccagctgcccaggcgaggcggcgcgcaggcggagagcaggagggacgcgagggtgaggggctgagccgggggccagggcgtcttcaaggcagcgctttaaggaaagggccatggagttccagctggggcaggacaggaggagccggggacggaggtgagattagtggcctgaagctcccagtgaggccaggactatgggagagagggtacggagggcatcagggtgcggggggtggttagggggtgagggcgtgcgacacagcgtcagaaagcggacggaagctgggggtgagcaggactcgggtgccgtgagtgtcttggtgaccactgtgagccggcgaggtccactgggccagaccctggcccgaggtggccccggagctgtgagcgggaggaagagggaagggcggagtctggagccctcacgccttccgccttgtgcgcggtgcaggctgccgagagcccggccgggcaagcctttccgccgtggtcagtgactcgtttgcacaaggactttttagggaagagagaagccaggccttcgctgtgggcctagcccctcaaaccgcaagctctcccccttggggtcctcgtcgtgaacgcccttctcgtctcccgccgggctcactctttcgcattttgctgcgaaagtttactggaaataggtccattcactggtcgattcagagggacactagaaacgcgatgcccatatctaacacatcctggccttttgaagagg

SEQ ID NO: 18664 - DNA, 1169 bp, Artificial sequence
  DNA replication origin
tatttccgtctttttctattacaaatagtgttgtagtaggcagctctgtgcctgtattgtttgcattttttggtaacaagttgaatgagcttagaaatcatcttagttataatcttccaggggttaggtaagtagaattattcacttaacatataggtatttattgatgtttattatgtgacaaaacctgtgctagttttggtgaaagagggctggacagagtgatgaacaacacaggcatggccctgcccttgtggggcttacaacacagtagggaaagtgtgtgagtaatggtagaaataaatgtttaattacatgtgtgatgaacaacatggggggaatgaaaagagtgagctaagaaggctgagatggtggtgagtggccagagaaagcctccagaaggaatggccattaggtgggtgtctggaggaagaggaagaacagaccaggcagagatgcaaagcaaagcctgccgggccaagccagcacaatgggaaaagttcacaggcaggagaaggctgatgtttcaagcaggaaagggcagtgggtctacctcatgagcaaggagaagggtggcaagggatatggtgtgagggtgtgcagtgcaggtggcaaggatctggggggactgggaatccatcctaagttacaggaagccaccagagagtttacactagtggtgtgatccagttcattctgtaaaatgccattctgacttccgtgtccagaggcactggggagggatgggagcagaggcacaaagaccaggaggggatggttgtgggagtccaggaaactgatgatgacagcttggcttagggtagtggggtcggggtggagaagagggaatgggttgagctcttttagaggaagggtagatcagaattattggatggaactattggattgaatgagagggaaggaggtgtccacaataactccttggtcttgggcacaggaactggcttatggagctggatgactttgaaagaggactgggttagcgtggggtgggaggggccataaatttgggacattttaatttgagatctgtgagaaatccaaatggagacacagggaaagtctctgagtacgtctgttgggacctctgaaggtgtcatgtggaggttgcacgcattggggatgggaggagactgcccaggggcagg

SEQ ID NO: 18665 - DNA, 1230 bp, Artificial sequence
  DNA replication origin
ccactctgtgacttggttggccttagtttccaaacattctgcagctctttataatttcctgatgattttgaaaaatgcaaccttctagtgattctgacaatgtgtaaagcatggcacctttgatagagatatttggacatggaaagagcccatggtctcttcctttagagactgtggagcccggtggggagagtgtggagccatgaggggatggtgagtgtccaccgggctctagcctctgagggaagatgcagaagaaatgcaagacctcattcctctattctcatagtcttgtgagtctagcgttatcgatgcacagagacctctgaagtgagctcagaggagggcaggggccgaggaatcattggcacagttttgcttcagagtccagcatcctcatgttctctgacatgactgtgtgtccaataaggtcaaggcaggtggtgcacctgggaggggtaagcacagggttacctagggggagatgggtggtgcttcagctggctgggtgcttggcaggggagggttaaagtgagtatcagagatgggtagaatttagatgcaggagtacgggccatagctgaggaagtgggatttgctgaggcctggaggaggtgcttctgagcaagtcccatgtatagggtttgcaggaaagttggggggaaggggcggagaaaggtccagagactgcatcctggggaggggctggctctagactaagaaggggtctgaggggaagctactgaaagacagagaagtggcacgattggatgcatgccatggctgcagagtggagagtggactccatgttgggagggaatgaggagatgtgaggaggctgggggaagtagataccggggtttcagaagatcagtgtttgcaatttatctgtgaggtggtttgatcctgggcagtggcaggagagtgacaactgacacagagttccacatgtttggaaccaggctttagaggccgaggttagggaagggtgacagagcaggggaggaagagtggtggccagtttcctgcttggggctgtgtggaggacctggccatctgaggtcagcatccttccaggagagcaggctttcaggtaggggaaaaagcatgagtcctatgttaaagaggctgagtctgccatccctgtgagacatccctgagtgtcccacaggcgatgcggtagctcagagagggggtctgcattgtggaagcagtcagcctgcaggtatg

SEQ ID NO: 18666 - DNA, 1136 bp, Artificial sequence
  DNA replication origin
ttctgtcatgagacaggtgataacacggacctagctccattcttagtgaaggaaaattacctttctatttttcccatcaatatacaccacaacaaacagaagacactaaagtaaaagaaccatcaacacaagtgacatgtcatagcaggagctgacacagcctcaccagcccatgctcggccagactaggtatgctgctgagtctgggttgggaggcgggtgtgggggtagccttgtggggaagcgtgggtggggggcatgagggtggctgggtggggaagcatgggttggtggagtggggtggccatgggggtggctgagtggggaggtgggggtagccagatggaaaagcatgggtgggggacgtgggggtggctgggtggggaagtgtgggtggggaagtgaggtggtagccgagcggggaagaggggtggagggtgtgggagtggccgggtggggaagctcgggggaaggtgtgggggagtggggggtggggaaggtggcaggacccggggagggagcgagccccccctgagctgagctgccgctcccgactctgtggagcatgacaagctttacttgtgcggaagtgctttgagtaaattaagtcccagttaatcaagaaggttctgcttgaattatggtgcctttggaggcactttctttaggaaaggacgctgattctcttttttcaccagtcagcatgatttgggccccgaggttcccggcaagggtgacagcttgtccccactcctgtctgacagggagcatcggccgcttgttccatcctgtgcttgtctgcctgcctctctgtcatgagacgcattcgaagagtcctgggcccaaaagcaactcacagtccaggaagacgtccaggccttgggtgacgctcagtctcagtaaatggccctggctggcaggtggtggtgggagggacccaggttggtccctgtggctgcctttgtgctccctaaatccccttgtctagggtcagcctagggtctggcatggggcagagacaggagtgccctcatctgccagggaaatgctcactgggggagggagcagccggccccccaggccacactccatgccccaccctctaagctgcagagtgcatgtacatcaatggaaca

SEQ ID NO: 18667 - DNA, 996 bp, Artificial sequence
  DNA replication origin
caggggtgcccagagccggggtctgtgcgccgcgggttggatccgggtcacaggctctgggtggacagagtgagaagacaaaatgaggatgtactcctcagatgctcacgaaaggcctccttccccttctttgggaacgacccccccccaccccctccccccaacaggcagtcccaggccgcgccaggactcggccgcaggcaactcggaggagcgggagcccaggggcctcaggagggcctcgggagtggggaggtgaagggggcgtcgggagggccgcgggtgggaggcgggatagggaggcggggagactcggagcggggttggggaggcgaagaatggaggtggggaggtggggaggggggcttcgggagggccgcgggtgggagggggatggggaagcgagaagggggggcggggaggggggcctcgggaggaccgcgggtgggaggtgggtggggaggggggcctggggaaggatggagcccgctgaaggcaggcgatgacgcaggcccagtgtacttctcctgggggctcctttctaggcccacggaagctccgtgttggtttctttgtacccatatcacactcactgtatttcttctttcctttcctctcccagcagctgtaagcgccctacagtttgcatgggaaggcaacagggacttcccttttgcactgtctgcgggtaccgctgttccagccctgagaggacgaggggacgctgcgctgtggggaaagtccgggtggcaggaggtggcggggctcctggaggaggtgctgggatgcgctgctgtggctgcagagaaaggtcccgaggacgcaacccgtcccttcccccgaactgcgaaggagccccgcggggaggacgggcagggtctcccggagggaggaacaggggagcctggagtctcagggttgcggggagcagaggcgttctgggtggtgaacgtccccagcctgccctccctgctcactgcgaggtcgcgcaccggc

SEQ ID NO: 18668 - DNA, 939 bp, Artificial sequence
  DNA replication origin
gaagagagagacaattcacctttcctctgccccattgttctctctgggcccccaacaggttgaccagtgccacctacattggtgagggtggaccttcttactcagtccactgattcaaatgctcatctcttccagaaacgcccttacagacacactcacaaataatgttttaccagccatctgggcatcctcaccgcagtcacgttgacacctaaaattaaccatctcagaaagccaaaaggtggctggggacgcgggggcagcatcagccggctccccgccccctgaccaggagaaggtgcgcaccgtaagcactccaccctcccattcggcctctggccccaggtgcagccactgtggactcaccctgcctggtgcggaacactccctccctgtgatgtgcagtccgcagatggaagcctggagggcccacacgcttccgaagcagggtggccctaggctggcttgtcagcggaagctgtctagcggggatatggcggtggcagaagtgagggggctgaggggcggggcggactttagcaggaggatagaggggaatgtccttgtttcataaagctgaagtgtgcccaagcaatgtcccggtatctctgtgaaaggttggctgcctggtgtgactgagagaccggagatttggccctggaaggtcaagtgtggtggtctttttcttttttccactttttaacctttttctactgtggggagatcgcccaagattactgaatttgctaaccccaggggaagtaggcatttgagtctaacagcgccatccctccctccacaaaaccctgtagagcagtgttcgctctatgacgtgtgaaggtgaaaagccactcaggaaaccagagagatttggcactaaaatatatgtttttcgtaaccagggcaggttgggcttcccttcatcacacaccaacagat

SEQ ID NO: 18669 - DNA, 1372 bp, Artificial sequence
  DNA replication origin
cgaagctataactaaaacacattgagaaataaaaagaaacgtgggtttggggaggccaaagatgagcatagaggtgtttgagagcaggggaggaggggagagctactcggcccacttagaaatgtgttcagtttgaaattcccagaggcatagcgtagctgactcctttgaaacggtagcccgtagagattcaagtttacttcctgactgcatgctgcaggcatttcaccgcctcccagcctcccaaacctttgagcagctagacctctacttcctttcgaggtggcgatcaaaaggtgggggactgtcgaggaaggggaggtctctacctccaccttgtaagggccatggttccgagaagcagggtccaaagaccaggttagaggtcctgaaggggaccgtgctcaccagcagcaaagtgagttgtgctggcacacagggaccagggctggtgggaggggctgagggtggtgggaggggctgagggtggtgggaggggctgagggtggtgggagggcccagggctggtgggaggggcagaggatcctgggaggagccaggggtagtgggaggagctagggttggtgggagggtctggggctggtgggaggggacaaggatggtgggcagagccacgggtggtgggaggggctgaggctggtggaggagacggggctggtaggaagggccgaggatggtgggaagggccaggggtggtgggaagggccgaggatggtgggaggattcatggctagtgggagggaccaaggcttgtgggaggagtcaggggtggtgggaaagacccagtgtctagggactggccaagagtggttgcttttgtttgtttttcctaaagagtagtttagaccagtcatgtttcaacactggaggaaagtgatggggaggaagtggatgggacggggaagacctacacaagtgtcttccattccttggtgtcattatagcaatgaagaggaaaaaagtgattcaaagtaagagtgggaagctgggaaaattagtagtgctggttgttcgtagctgaaggactcctggcagtgtttgatattgctgtaacttccaaggcagcaaaaattgaatgggaaccctactctgccacctgtgagctaggtgctatctctttacctgagaaatggagataagaataatgatcttgctggtaatcacaccactctttcactcctaagaggaagaagttgccttcctgcttcagcatggccactagacatgaagagatccgagggtctgaccagtgaggctcctgcctgagggagccccaggggtctctgcagttctttcttcctaaactgctgccctccccaaaggccaccagtgcctctgtcagcccacagct

SEQ ID NO: 18670 - DNA, 1396 bp, Artificial sequence
  DNA replication origin
tttcatcagctgcgcaggaatggagctggccagagctctgggagcggggagggaggcgccgccaccagagggcgccggagccccagcgctgcggccggtgagcggccaggctccccggcccagcccagcaaaggcctggggacgcccgacggctgccttcttcactggacctcactgccttcagttctttaagagcagggccaagtcagtggggttcccggctccaagcccagtgcccagggtgggtgggtgggtgggtgggtgggtggatggatggatggatggatggatggagtgccggcccacagccatctaacggccaaagtggttttggaaaaaaaatgcacagaagacacctactcccaccagcggagttccggagccctcgcagcctcctgttgaccgctcccgcctaatgcagccgctgaccgcccactccccgacggccaggactccccagggacagggacgtgtccccagggcaggcccctggatggacgcggcgactgaccccacttcgctggacgctgtgctgggaaggacacagagaggtggctggggcagcctgcggtcacaaagcgaggcccaaaggggcgctctcctcacccccacgtctcctgggtgccgacctgcaccctcccttcgccaccggactggggccatctgggatgtctcgggggtatccggagggctaagcaccgccgagggacggctccgtgggaagagttttctggacccagaaggcagacgccagtagtactgtcctaggagtcggaggtcggggtgggggagttctcagctctttgggtcgcacggagcttttcttgggtaaggcagtaagtacttaggtttaaaggacttacttacagctaccatttattgagtactgtctgcttgtcagacacgatgcagagaatttcgcggcgtggggcgggtctcattgaatctcccgtcccactccgcggggtgggcctgtgattagctcatttcaccattgagaggtcggaagtacaaaggctacattcgcttttactgagagccgccggcgccttctgctttgtttgtacaggcgaggaaactgaggctcggctggtggcgccgtgggcttggagtccgagccacgctgactgcaaagacgggtctcattcccgcagatcgagctctgccggcggctgcgccgcaagccgggcaggtggcgagcttgagcccccacgcacagaaagcaggaccccctcggctgccttgggccgccaccgccagcaggccctccgcccgggactaacttgtttgcttttcattggttctcattcagttcccgccatcgaaaggccccgtcccgcagctttccacgcgcgccccactttacgcctaaggtcctcagtctctccagtggggc

SEQ ID NO: 18671 - DNA, 699 bp, Artificial sequence
  DNA replication origin
gcctgaatccctggttcgccctcgactcagcccacgcgggcctttcaggcttctgggacagatcctaggtccagctgcccacctgattttgtggcaaagaaaaaaagaagaagaagaagcgagaggcgatggcgtttgctttggccagatttaagggcaagcgaggctgcgcgcggctcccgcagggtcggatctccgagctccagggcgcccctccacccgggtgtagatttcccgcggaccccttcgccctcccgggtttcatcagctgcgcaggaatggagctggccagagctctgggagcggggagggaggcgccgccaccagagggcgccggagccccagcgctgcggccggtgagcggccaggctccccggcccagcccagcaaaggcctggggacgcccgacggctgccttcttcactggacctcactgccttcagttctttaagagcagggccaagtcagtggggttcccggctccaagcccagtgcccagggtgggtgggtgggtgggtgggtgggtggatggatggatggatggatggatggagtgccggcccacagccatctaacggccaaagtggttttggaaaaaaaatgcacagaagacacctactcccaccagcggagttccggagccctcgcagcctcctgttgaccgctcccgcctaatgcagccgctgaccgcccactccc

SEQ ID NO: 18672 - DNA, 1132 bp, Artificial sequence
  DNA replication origin
tcaggagggttttgtgttagaagaggagcccggccagggagggcataggacgtggactttgaggagtccctgcacacaggaggcccctgtgtgtgggcagccagcttggatgggagggtgatgggacctctgtgaagtctctgggaattcggtggagtttcatgggccaggtttaagatgaaatgtattttaaagagctttttatgatggaaatagcaggaatataaaaattccaccggcttgttggaacagagtgtctacaaaccttttgcgagggcttttgtatcagtcaaacggttttacagtcacaggtgactaaaatccaacagaattaacttaggccaaggtggaggaatgggcggggatgggatggtacaggaagggaagggaaagaggggaggacaggagaggggaggggaagggagaggaggagaggggaggggaggggaggggaagggagacaagactaaatctccctctctcccacctctctgtctattcttatatacttgaaatggaggaggagagccctgcagcctggccccagcctctgaggagggattgtgcactgggctcagccagggcttcagtagagctgggtcatgtggccactgctgcctggtcctggtggagggtccctgcaacttagcttcccccactccccctctcccatccagctgctagaatgaatgcagatgaggcctggggcagggaatgggggagggctgttgttaggggtcagcaaagtttgaagtctgacctaggctctcacagctagccaggggctgccacggggctccagacaagcactggtcccttgtccttattaccggcttttttcaaaacctagtaggatacttgggacatctgggcataggcaatcatgcccttcttctgagtcatcagcctggcaagcccagtgtgggtaaagagtggtgtcaggggttcatatggctaccttgtaagttccagaactccaggtccacaggagcccctcggtcctgagcccacagcaggcagctccagacacagacagcacaggcaacatcagccacctagtccgagcaccacaggcttgcaggcagatgtgctacgaagcccatggttgaccattccctttctcaaccctgtc

SEQ ID NO: 18673 - DNA, 1907 bp, Artificial sequence
  DNA replication origin
aaagcagctactgctgtgtgttaattgattccagggaacaaacattgtacccacttttccttaggattgaggactgaggtcacaggcaactgggaaaaccttttttggcaccatggagtttaaccaggaggaaaagctttgcatttctgagtgttcaagaccctttgtccccaggtcccttttccatccccacttcccctcatgtgctccccggtccccatcatgcacatgtacgtcgtggcttggccctcaggtgcccagtcccttcctcatgctagtccatgctccatgcatttcctcccactctctctctctctcagtgaccatctttatgtctctttccctgatcttacccaggcctccaatcactcttagacctcacgtctctctcactttttacttctaccacattttattcatcacacaaaaaaagcctcgcctttttatgtagtggttcactgtttacgcatctgtctccccgaccagacattgatcttgtcaagggcaggaatcataccatgtcttttctcctccacacttagcgctagacccaggacgtcatgatcagagttgaatatttgctgaattggatcattcttactccttcagcctgggaaatggttcaggagcagctgctcccttagtgcatagatggtgttttggaaaagatcagccgacaggcctgctgcactgtgtccagctataggctctttgggaccccctgacccaaatgtggagccagagcccacaactcaaggcccagctctcacccaggatgcagctcaaatcctagcatgggcccctctgaggctactaggcttattcctgaatctctggttctcaaagagcatctcaatgctgcttcaaacggaatggcctctgcagatggagcggcaggacaagaagtgaaggaggttttccaagccctagacagagtcgttattgtagaggaaggagcctaccttcagtccctgctcaggtgccaagaggctgattgttgggagggggctgtgtcgtggagggtgaggatggggggagggtcgtggggtcctaggcggctgtgtcatggagggtgaggacagggggagggtcggggggtcctaggcggctgtgtcatggagggtgaggacagggggagggtcggggggtcctaggcggctgtgtcatggagggtgaggacagggggagggtcgtggggtcctaggcggctgtgtcatggagggtgaggacagggggagggtcgtggggtcctaggcggctgtgtcatggagggtgaggatggggggagggtcgtggggtcctaggcggctgtgtcatggagggtgaggatggggggagggtcgtggggtcctagggggctgtgtcatggagggtgaggacggggggagggtcggggggtcctaggcggctgtgtcgtggagggtgaggatggggggagtgttgtggggtcctcatgcaagttattctgctcccctggactccagatctgtcatctgtaaaagaacagtcttgcttcctaaaattctaagattctaaatgaaataattatattttcatatgtaaagctgagataacttctgtcctgatccacttattgtaagatgacgttttcttggaccagaaagcatatccaaaataaacccactcacaggcttgcagtccatattgccagaagcaggtgagagagcaccctgtctcccaggtgtagaaagtccagagcctcccgggcctggattttcagcagtgttaaaatctttagggcttaagcccacttatttgcatctaaaaatggagacttcctgttctgcagcatcctgaatttctgatagactcccacaaaagacagtgagataaatttattaaaaagagcccaaagttcacagattcaatctccctataggcatgca

SEQ ID NO: 18674 - DNA, 1160 bp, Artificial sequence
  DNA replication origin
gccaggcccagactacagctgagggcttccaggctgcagctgtgccctgagggggtgggggctaaggcctcccacttcatcagaactagggagaggacaagaaacagtctcatggcagcctccagggaagacaggaaggtgagagggggatgaggggagatggggaggggagatgtggaggtgagaggagagacaggaggagaaggaggtgagagggggatgggggagatggaggtgagagggggatgggggagatggaggtgagagggggttgggagagatggggggtgagaggagaaacgggaaagatggagcttaggggagatgggagagatggagttgaggggatgggagagatgggaggtgagaggggatggggaaatgggagtgagagggggatgggagagatggaggtgacggggggtgggggagatgggggtgaaaggaggatgggggacatgggggtgagaggagaaatgggggagatggaggtgagagggggatgggagagatgggagttgaggggggacgggagagatgagggtgagaggagaaacgggaaagatggaggttagaggggatgggagagatgggaggtgagagggaatggggggagatgaggaggtgagaaggggatgggagagatggggatggaggggatagggagatgggaggtgagtgggattggggagatggggaggtgagagggggatgggagaaatggggaggtgagaaggggatgggagagatggcgaagtgagaagagacacaggggagatagggagatgacaaggtgttctgccaagacttagttcagcagttcaaaccttacctgtgtgtgtggcttatgtggatgtatgcaagggtgccatggttgtaatacacacacacatacacacacatatatatatacacacacacacaccccacacatacacatgcatgcacatatacaaaaaacatgattatgattgaaaatattgttgaactcatggtcaagtagtcttccaaacacatgtatgtgtgtgtgtgtgtatggcacatggcagtgtcatagagtgtgtacagggggtgcctacacagggagccaagtcactcaggtgagcaagggtgcagccaggcgacccttcgtaggcaggtacttacagggcaagccagtg

SEQ ID NO: 18675 - DNA, 901 bp, Artificial sequence
  DNA replication origin
aaataaatgattgatgagatgcgtggatgggtgggtgtatggatgagtaggtggatggatggatggatggataggtgggtggatggatggatggatagatgtatggatgggtaaatgaatagatagatagatgggtagatagatagatgggtgggtgtatggatggatgggtgagtgaatggatgaatagatggatgggtgaataaatggataggtgggtggatggatggatggttgggtgtatgggtagttggatggatggatggatgtgtaggtgcatagatggatggataagcaggtggatggatagatgagtggctggctggatgaattggaagatggatggataaatgggtgggtggatgggtgaatgggtgtgtgtatgtatgtatgcatatatgggcagatggatggatgggtgggtggatggataaatagatgggtgggtgaatagatggataggcaagtggataggtagatggatgaatagatggatggatgggcaggtggatgaagaggtgggtgggtagatggataggtagctggatggatgtgtggatggatggatagatggatagatggatgagtggattggtgcatgaatagattggtgggtgagtggatggatgggtgggctgacgaatggatgggcagatggatggatagatgggtggctggctggatcaattggtggatggttgggtgggtagaaaggataattcattgatttatgggatggtctgcacaaaccaggagctattctagagcccccctcaactcccttcacccctgagataggatggaattcacatgggaaggggactgctctgagttattctgagtagacagatgtagggtgagttgagcagaacttgcaggtcaaaagtggcacatgcacaca

SEQ ID NO: 18676 - DNA, 1403 bp, Artificial sequence
  DNA replication origin
agactccaagccccaccaggcatgcagacaagtgcctgcagtgattgcagcgcctgcgcagcggcccttgttggaagtccaggagtccgcgctaccccgcaaagtccctggccgctgcccgcacaccgaacctctcggggctgagtcgggctgctttctcctcgcgtcccggggcgccctcgggaactcgggagcgcgcggcgagctgaacaatggcctggggacacctggcaggtcgcaggccccaaatcttccccgccgcccctaggccaccgccctgcacccggaacctaccggcgttcccagagcggggcggacggggcggtgccattggccggtgcggagtgaggggcgtgctcggggcgggacggagagaccggggcggcacctttggccgtgccgggcgagaggcggggagcggggcggggcgaggggcgaggggcggggcgaggggcgggcctggccccgagcagctgaagcctggggtcagcaggcgctgcgggcgcagctccggtgcaagcgaggacacgacacatgcagtggcttctggactgcgcgatgactggacggtgagtgatgaacgagcaggagagtgcttgggcgtccatggagcatcccctccgacccaggactgccaccaggcagggacgctgaagcctgggcacttgtgcccttcggccgcagcgcgcagggtccctcccccgccagcctggcgcattgcgggcctcgggctcattgctgagagggggcactgcgcctggcacctctgttaagcaatttaggggctacaacctgagcaagacagatgagcccggccactggctacaccttttttgttcaccttgtccttaaccagtttcctagaagcactgatcctagagttggggagagagcctagaggcctctggcacaactctgatttcactgatggaaatcgaacgccaagataatagcagcagggggggtctgtctcacaatcgctgtctgtagagggctcgccttgctctgggccaagtgctttaacacgatatgcctcttactcctcacagcaagtgagagtcctactttcgttatccccttttcagatgtgaaaactgaggcttaaagagttataaaattgtccacctttaccggatgagttggtgatggagccaggatttgaacccagggcttgttgtgcccctgagtctcttgctcttcacccttagtctccgaaggtcagcctgcctgctgccctgctcttctgggctcctgactccggtcccatcctgcacttcccacttccaaaacatgcctcagtgttttcattaacctggcacggcggagggagggaggcctcctctcacaccagaatcagtgcccaggccagggccagcactttcttaaaacacagtaaggacagc

SEQ ID NO: 18677 - DNA, 834 bp, Artificial sequence
  DNA replication origin
agtggacagcacaggtgagggcagccgtagagagcctccagagcagccctgcagcagcaggcacccagaggggtctgcccctctgcattgcactcccagccccaggcaatcgggatattggacagtgcccattttgagcacgtttggcccgaaaaccatagctaagaagatctttgtttctgtggatcttctcttccataggctagaggtgagcctggttggtggggaagttgaggagtggttcagggggttccaggagcagagaatgtatgtttaaggtgtaaggggggagcaggaggactggaaatggttttcttgtcccaaattgctttgccttgaaacaagggcagaagccagaagtcttgcccactgggaaggctggtctgcgatctacatggctgctcagggccaggctctcagaggaaggggagctgtatcagggaggcctggatgctggactggactcagagagacctgtcagtgagaggccagaaccgcagcggggagtaaaggtgagctgggcctgtgtggtcagtccagggcaaggcgggagtggaggtggaggggagctctgtgcccgcctctcctggactcccctggtctccatcacctccacctggacagtgcagagtcttctggggcagggaggagtgagttgagccagagggatgatggcgggagtggagaggaggggtctggtgattggaactgggcagcaggaggggacagcagtgtggaaggaggtgggagcagcagctgctgagtcgccgcctgccatctacaaccagacagccggctctcaccacaaaaatgcttggctgagggtaccccctc

SEQ ID NO: 18678 - DNA, 989 bp, Artificial sequence
  DNA replication origin
aaggacatttccgggcggtccttttttcttttgagataccagccagcctggctaaagccctttgccatcttcaaaaggcacagattgttccccgttgctcaggctttttgttgtaatacaagcaaaattatcccaaaggcgaggttcatgatacaggaagtcggcgcctcagcctccagagatggcgtccctcctctagcccctcggaagcggggagaaggctcacaaggagccgctggtcccagggcgtgacgctggccccagagcgtggccctgcccaccttcggagaagtgggatgagacagtggaggagaaggcaccccaaaccgtactgctaaggctgccggtgctgcgggtgaggggcagtgacaacacgggggggtctctttcaggcggctctgggagcgcgccccgggtggtgagcccttcgccagcctgagagccccttagcttggggctcaagggcaacaaacagcaccctgtgtccctgagacctgttcactgatactgggtggagacctccaaagcctaatggaaacggtattgctgttttgtaagtggctgtgagcttggggccatggccagcacctttcatttactgcaatgtgaccttggactagagacttaaactctgggagcctccatctctttgcctggaaaataatcattcctatatcaccttatattaaacaaaggagaggcaaagtgcctggtgcattggaggttctctggggaagtgtctgttcctcttgtctgcccagcccttggggcctgtggtgcctgaggagagactggcctgggatggccctgcccctgcagcaagtgcccagtggcccaggaggtcgtggtgggtgcatcacagggtggcagtgagacctggaggggcttggtgccccagggaccagttgtgcctatcagtgtcacagcctaaagcctcgtcttatgtggtaattgcgacccagcaaaaacacacacttcttcaggccggt

SEQ ID NO: 18679 - DNA, 952 bp, Artificial sequence
  DNA replication origin
aattgaaagtcaagtatgtattaaaagtaacatgccaacagtgaatctatagctggtgaaattatataaattgttttatgatactaatctccatggggagacttcttttatatgttcattataattagttgtattacaattttattatcattataatgtgcttatttttaaaactgtggctataattctgcaatgtttttcttatgattaaaaattttctcataatatctgccctcaagaaggttaaaaattatacatcatttatcccacaagttgagagactattcttcggataaacagtatttttcagtgatttatgttgccatggtgaggcaagcgttatttaatcagagaagaatgtttaatggaatattccagaaaattatctgtctgagaggctgccttaaatacttcctaaaatgcttgctgaaaagtccggcaagatgaatatgacttggaggctgggtggcaggccggttttttggaggccggcctagagcctgcctgcatgggagtctggtcgaatgacaagtcttctggcagggggagaggcttgctggaacgctgatcgaaatgctggctgcatggaaggccggtcttcaggctggctggctggctaggaggctgacatagaggcttgctgggagatttgccaagaacccgggtgagaggcggccgactaggaggctggcggagagtccgtgtgagagggtacctcaaattcttgctaattttgcttgctgagggcctggtaggctgagtccggctaagagcctggttgtaccaggctcgcttgttaggaggctggctacaagatcccgtgaaagcctcacggctctactcaacaaatttctctagaaagaggccggagtgtacaagggcttcactagaccacactttttactgatgttgggccggatgtggtggcgattaagggcaagggcgagcggcg

SEQ ID NO: 18680 - DNA, 2055 bp, Artificial sequence
  DNA replication origin
tggggaagggcgagtgagaggagcggcctctctcttaaaaggtggctgcagccatgcagaggctttctgccactgctgtcaagggcgtgacaagcctggagtgccagagagccttcactcagctggtctaccaccaaagactcttaagtcatccactatagggatatcagaaagatgcacagagctgcctcccggggccacgcctggaagcttgcaggggatgatgtgaagacgaggaccatcgacctgaacataaaagatgcgaagaagaggcgccgtgccctgcctgagctggggctgcaggaggaggtgacagctgtgggaggatcgccccttcagcgtggggtgtggtgggtgtccccgggacaaaggcagcaggtggaagagtgggtcggcagcggggcagaaatcttgggccccggtatctgggccttcttcctgggcaggcccccagtcctgggatgggggcgccctgcagggcacagggacaaggcctgcagggcagagggacaaggccaccttaaaatcaacctcaaactttggctgccttctccttcactcccactgaggctgttggaaacgctggctgcaagggaggctggttttgaggctggctagtcaggaggccgcctaagaggctctctaagaggcgtactgggaggctggccacgccattggtggcatgggaggctgattctgaagctggttggctaagcggctggctaacagacttacctagaggctggctggaaggctggccaaggcgcgggctgcatgggaggctggtgtactgaaggactctcttgaaaagtagcatagaggcttgctgagaggctggctcactgggaggctggcctagagcctgtgggagaggctttctgtctgagaggctgccataaacgcttgctaaaaggcctgctgagatcctggcaggctgaatctggctaagagtcggaatgcaagtctggcttgttaggaggctggcctagaagctggctgcatgggaggctaaccaagaggctggcgaggaaactggcagagtggcagattgtctggctgtgcaagaggcttgctggatggctgttaaaaacgctggctgcatgggaggttggtctggaagctgattgtctgggagattcgcttagagactttctgaaaggctggatcggaggctggctgtctaggaggctggccaagagcctgcgggagaggctgtgtgagaggctgccttaaatgcttcctaaaacgcttgctgaagagtccggcaagatgaatgtgacttggaggcctggtggcaggccggttttttggaggctggcctagagcctggctgcatgggaggctaatcaaatcacgagtcttctggcaggggaagagggttgctggaatgctgttcggaatgctggctgcatgggaggccagtcttcaggctggctggctaggaggctgacacagaggcttgctaggaggcttgccaagaattagttcaaccatcgaggaaggaagtgtgttgactcctcaaagatctagaagcagaaagaccattgacccagcaatcccattgctaggtatatatccaaaataatataaatcattatattataaagagacatgcacatgtatgttcactgcagcactattcacaacagcaaagacatgaaatctaccaaaatgcccatcaatgttagactggataaagaaaatttggtacatgtgcacgatggactatcatgcaggcctaaaaagaaacaagatcatgtcctctgcaaagacatggatggagctggaagccatgatcctcagaaaactaatgcaggaacagaaaatcaaacaacacgtattctcacttataagtgggagctgaatgatgagaacacacagatccatgaggggtaacaacacacaatgggacctgttgtgggggcaggaggagggagagcatcaggaagaatagctaatcaatactgggcgtaatatctgagtgatgggttgatctgtgcagcaaaccactatgacacacgtttacctatgtaatgaacctgcacatcctgtaca

SEQ ID NO: 18681 - DNA, 1359 bp, Artificial sequence
  DNA replication origin
gcctgggcaccattgagccctgagttaacgagactccgtctgcaatcccagcacctcgggaggccgaggctggtggatcactcgcggttaggagctggagaccagcccggccaacacagcgaaaccccgtctccaccaaaaaaatacgaaaacctgtcaggcgtggcggcgcgcgcctgcaatcgcaggcactcggcaggctgaggcaggagaatcaggcagggaggttgcagtgagccgagacggcagcagcacagtccagcttccgctcggcatgagagggagaccgtggaaagagagggagagggagaccgtggaaagagagggagagggagagggagagggagagggagagggagagggacaattagcccttattctaagaaaaaacaaacagaacctaaaaaaaacatatttgcaaattttttataaaggattccagaaacaggagaaagattggattagatcaaggagaaggtgcattccttcactgggaggttgtgattctgtttttacaatttcattctggactgagcatccctcagagcctggtggacctgcttgttccgcagagtgtaaatgatcgggttcagcagtggggtcaccactgtgttcacaagagcagcctttctgttggagtccagcctgtccatttgcttcggcttcacatatatgaagacacagctgccatacaccagagagaggacaatgaggtgagaggagcaggtggagaaagctttctgccgctccttggctgatgggagtcgtacaattgtgactactatgttgccatatgcaatgatggttataatgagggatgtaaaaagaacgaatgaaacaaggacaaaggccaacgtttcagtagatctggtgtcagaacaggagagttggatcagagggccgaggtcacggaagaagtgagggatgacatggggtccacagaaagataactgggaaaccttcaccatgagaccagtgatgagagtgaagcccacgacaaagcaggcagtgaccaggtggaagctagtcctcaggctcatgatggtggagtaatgcagaggcttgcaaatggccaggtatcaatccaaggacatcacagccataaggaagaaaactgttgacccaagaaataaaaatgaaaaggactgcatgagacaagtagtaaaggggattatttgcctgcctgaaagaaagatgaccagaagtttaggaataactgtggtgataaaacagcattcacagaaggaaaaactgctgaggaagaaatacataggtgtctggaggtgatggtcagcccaggtgatggtgattatgagcatgtttgccatgatggaggccaggtatgccagcaggtgcacc

SEQ ID NO: 18682 - DNA, 1170 bp, Artificial sequence
  DNA replication origin
ctattccacaaaaccgccattgtcatcatggcccgttctcaatgagctgttgggtacacctcccagacggggtggtggccgggcagaggggctcctcacttcccagtaggggcggccgggcagaggcgcccctcacctcccggacggggcggctggccgggcagggggctgactccccacctccctcccggacggggcgtctcgcctggtggggggctgaccccccgacctccctcacggatggggcggctggctgggccgggggctgacccccccacctccctcccggacagggtggctggccgggcagaggggctcctcacttcccagtaggggcggccgggcagaggcgcccctcacctcccggacagggtggctggccgggtggggggctgaccccccacctccctcccggacggggcggctggcctggcgggggctgacccccacctcccttccggacggggtggcagccgggcggaggggctcctcacttctcagatggggcggttgccaggcggagggtctcctcacttctcagactgggcggctgggcagagacgctcctcacctcccagacggggtctcggccgggccgaggcgctcctctcatcccagacagggcggcggggcagaggtgctccccacatctcagacgatgggcggccaggcagagacgctcctcacttcctagatgggatggtggccgggaagaggcgctcctcacttcctaggtgggatggcggccgggcagagaggctcctcactttccagactgggcagccaggcagaggggctcctcacatcccagacggggtagcggccgggcagaggctgcaatctcggcactttggggggccaaggcaggcggctgggaggtggaggttgtagccgagatcacgccactgcactccagcctgggcaccattgagccctgagttaacgagactccgtctgcaatcccagcacctcgggaggccgaggctggtggatcactcgcggttaggagctggagaccagcccggccaacacagcgaaaccccgtctccaccaaaaaaatacgaaaacctgtcaggcgtggcggcgcgcgcctgcaatcgcaggcactcggcaggctgaggcaggagaatcaggcagggaggttgcagtgagccgagacggcagcagcac

SEQ ID NO: 18683 - DNA, 891 bp, Artificial sequence
  DNA replication origin
agaagtgaggagcccctccgcccggctgccaccccgtccggaagggaggtgggggtcagcccccgccaggccagccgccccgtccgggagggaggtggggggtcagccccccacccggccagccaccctgtccgggaggtgaggggcgcctctgcccggccgcccctactgggaagtgaggagcccctctgcccggccagccaccctgtccgggagggaggtgggggggtcagcccccggcccagccagccgccccatccgtgagggaggtcggggggtcagccccccaccaggcgagacgccccgtccgggagggaggtggggagtcagccccctgcccggccagccgccccgtccgggaggtgaggggcgcctctgcccggccgcccctactgggaagtgaggagcccctctgcccggccaccaccccgtctgggaggtgtacccaacagctcattgagaacgggccatgatgacaatggcggttttgtggaatagaaaagggggaaaggtgggggaaagattgagaaatcagatggttgctgtgtctgtgtagaaagaagtagacatgggagacttttcattttgttctgtactaagaaaaattcttctgccttgggatcctgttgatctatgaccttatccccagccctgtgctctctgaaacatgtgctgtgtccactcagggttaaatggattaagggcggcgcaagatgtgctttgttaaacagatgcttgaaggcagcatgctcgttaacagtcatcaccactccctaatctcaagtacccagggacacacacactctgcctaggaaaaccagagacctttgttcacttgtttatctgctgaccttccctccactattgtcctatgaccctgccaaatccccc

SEQ ID NO: 18684 - DNA, 1568 bp, Artificial sequence
  DNA replication origin
ggggccgggaccggggccagggaccagtggtgggaggaggctgcggcgctagatgcggacacctggaccgccgcgccgaggctcccggcgctcgctgctcccgcggcccgcgccatgccctcctacacggtcaccgtggccactggcagccagtggttcgccggcactgacgactacatctacctcagcctcgtgggctcggcgggctgcagcgagaagcacctgctggacaagcccttctacaacgacttcgagcgtggcgcggtgagcgcgggcggggcacgggtggagcgcgggctgaggtgcgtccgggacccggtttggacggcagaggcctgggcgggggcgccgagggcccgtcggggcggcccggacaggactgggggtgtccaggaccctgtcagggagggcagaactgcggtggggcgtgccctgggctcccagtggccggtgggtaccctggtgggcaagcgtccaggacccctcgcggcggccgcgacccctgtcggaaacggagacttcccgcgtgccgcctgcaaggcgtcttccctgggaggagaaggcccaaggtttcccctccacttcaagatctgggctccgaggctccggagcccccttcactgggccgcgtttcttgtgccacctcttccttaggctccttctgcaggtcgcacagggagggagaggcagatgagtcatgctcacagaactctgagggcacctcggagcagccagctgtgagccgtggggaagggtgcacgtcagcgggtccagaggcctgagttctgtccagacatgaccaccagctcactctaccgtctgtctgggcctcagtttccccagctgaaaatggagggttggcttcagtctggtccatgagtcatgggtgagcccaggcccatctggtggctcagacggcacctgggcagcttacattctcaggacagtccccagaggaaattaaagggaaggaacagaacccaggccaggagaggcttttcctaaatggaggggctgcactccctcccagcagaatgtacaccagggaacacttccacgctaggtgtgaggacgcgagggagccctcagcatttggaagctagttcctaatgctgatctggacctgaattccagccccacgactcttttccatgagcatgggcaggtcgcagttctcactgagcctttaatgaagtgcctaatccagtacctggcacagaggaagcgctccgtaaatgactggtaatagtcccagacatactgcaggtgcgcagggaatatcagttcccttccaccccaccccagctcctaactggaccaaaaagatttagactttaccaagctgccttctcaccatttagtttattatttgatcaaaccttgtgaaattgctcataatggacaaatacaaccggcaagttcatgtttcaactgattactcttggataaaatttgtgttttaggtgtgcagagcctaaagtaagtaaaaactactctttttctggattccaagctctccatgggctcgattcctatccaggagcccataccctcgctgtagcacgaca

SEQ ID NO: 18685 - DNA, 883 bp, Artificial sequence
  DNA replication origin
ggtgcgcacctgcaatcgcaggcactcggcaggctgaggcaggagaatcaggcagggaggttgcagtgagccgagatggcagcagtacagtccagctttggctcggcatcagagggagaccgtggaaagagagggagagggagaccgtggggagagggagagggagaccgtggggagagggagagggagaggggagaggggagatgggagaggggagaggggagatgggagaggagagaggggagaggggagaggggagagggagagctgattcttctcttttcttctttattagtcttgctagcagtctatcaattttgttgatcctttcaaaaaatcagctcctggactcattgattttttgaagggatttttgtgtctctacctccttcagttctgctctgatcttaattatttcttgccttctgctagcttttgaatgtgtttgctcttgcttctctagttcttttaactgtgatgttagggtgtcaattttagatcttccctgctttctcttgtgggcatgtagtgctataaatttccctctacacactgctttaaatgtgtcccagagattctggtatgttgtgtctttgttctcattggtttcaaagaaaatctttatttctgccttcatttcgttatgtacccagtagtcattcaggtgcaggttgttcagtgtccatgtagttgagaggttttgagtgagtttcttaatcttgagttctagtttgattgcactgtggtctgagagacagtttgttatggtttctgttcttttacatttgctaaggagtgctttacttccaactatgtggtcaatttcagaataggtgtgatgcagtgctgagaagaatgtacattctgttgatttggggtggag

SEQ ID NO: 18686 - DNA, 1166 bp, Artificial sequence
  DNA replication origin
tctttctacacagacacagcaaccatccgatttctcaatcttttccccacctttcccccttttctattccacaaaaccaccattgtcatcatggcccgttctcaatgagctgttggctacacctcccagatggggtggtggccaggcagaggggctcctcacttcccagtaggggtggccaggcagaggcacccctcacctcccggacggggcagctggccgggcggggggctgacccccccacctccctctcggacggggcggctggccgggcggggggctgaacccctcccctcccggacggggcggctggccgggcggggggctgaccgccccccacctccctcccggacagggtggctgccgggcggagacgctcctcacttcccagacggggcggctgccgggcggaggggctcctcacttctcagaaggggcggctgccgggcggaggggctcctcacttctcagatggaggggctcctcacttctcagatggggcggctgccgggcggagggtctcctcacttctcagacagggcggccgggcagaggcgctcctcacctcccagacagggtggtggggcagtggtgctccccacatctcagatgatgggcggctgggcagagacgctcctcacttcatcccagacgatgggcggccaggcagagacgctcctcacttcctagacaggatggcggccgggcagagacgctcctcactttccagactgggcagccaggcagaggggctccttacatcccagacgatgggtggccaggcagagacgctcctcacttcccagacggggtggcggccgggcagaggctgcaatctcggcactttgggaggccaaggcaggcggctgggaggtggaggttgtagcgagccgagatcacgccactgcaccccagcctgggcaccattgagcactgagtgaatgagactccgtctgcaatcccggcacctcgggaggccgaggctggcggatcactcgcggttaggagctggagaccagcctggccaacacagcgaaaccccgtctccaccaaaaaaatatgaaaaacagtcaggcgtggcggtgcgcacctgcaatcgcaggcactcggcaggctgaggcaggagaatcaggcagggaggttgcagtgagccgagatggcagcag

SEQ ID NO: 18687 - DNA, 929 bp, Artificial sequence
  DNA replication origin
catcatctgagatgtggggagcaccactgccccaccaccctgtctgggaggtgaggagcgcctctgcccggccgccctgtctgagaagtgaggagaccctccgcccggcagccgccccatctgagaagtgaggagcccctccatctgagaagtgaggagcccctccgcccggcagccgccccttctgagaagtgaggagcccctccgcccggcagccgccccgtctgggaagtgaggagcgtctccgcccggcagccaccctgtccgggagggaggtggggggcggtcagccccccgcccggccagccgccccgtccgggaggggaggggttcagccccccgcccggccagccgccccgtccgagagggaggtgggggggtcagccccccgcccggccagctgccccgtccgggaggtgaggggtgcctctgcctggccacccctactgggaagtgaggagcccctctgcctggccaccaccccatctgggaggtgtagccaacagctcattgagaacgggccatgatgacaatggtggttttgtggaatagaaaagggggaaaggtggggaaaagattgagaaatcggatggttgctgtgtctgtgtagaaagaggtagacatgggagacttttcattttgttctgtactaagaaaaattcttctgccttgggatcctgttgatctatgaccttacccccaaccctgtgctctctgaaacatgtgctgtgtccactcagggttaaatggattaagggcagtgcaagatgtgctttgttaaacagatgcttgaaggcagcaggctccttaagagtcatcaccactccctaatctcaagtacccagggacacaaacactgcggatggccgcagggtcctctgcctaggaaaaccagagacctttgttgacttgtttatctgctgaccttc

SEQ ID NO: 18688 - DNA, 827 bp, Artificial sequence
  DNA replication origin
catttacaagggacgctgggcacgaaggaggctggggcgaagatgagtccaggggttgggttgagagcgctgcgcagccgggctgagaagagaagctgacgagtgactcccgacaagggacgggggagagggaacctgggggcaggcagaggcctagggggtgggctctgagggcagccactcccaccggccctcccccagccccgcaggccagccacatgccccgtgctccagacgacccagctacatggatggcagcgtcctgaagggggatgatcggtagggagtgggtgcggaggctcacgcctgtaatcccagtgttcggggattcccgagcgggaggatcgcttgagccggggaggtggaagctgcagtgatctgcgccactgaactcccgcctgggcggcagagtgagaccctgtttcaaaaggcaccaggggtgtagggaaggagcgatatcccccaggcaaggaaggctgcggaggggccaggccaggagagaagggccctgagctcagtggacgggcagggtgcctgtggaggaagggagggacgtagcagcaggaggaagggtgaggacccaggctggggatcgggagaagtgatggcggaggaaagagaggccggaagaggagggggcctgctggcctggcactggaaagcaaagcgtgggtttgtatatgggaagaagaccacatcccctcttatcgtcatcccaactcagaaaccatttggccccaagtcaccaaagcactcataggaaccacttttcctgtgacacaagtaggattctcccacttttaacttcccaaatgctacccgaaagc

SEQ ID NO: 18689 - DNA, 1322 bp, Artificial sequence
  DNA replication origin
ggcgacacggcgggtcattggtgtaaattcgtcgggcttgctgacccgcggatccgtgccctttgctgtaggagtcaacacacctcgacacgcaacgagcgtgccggtgaagtgggaggcgggcggccgctgcgagccgcgcagtgggtcccgcagaggggcccctaggaacgccaggtgcagggtaggcctgctgggccgggaacgcagcgcttaggccgggggcatggccgctccttctgaagccttttctgtttcctgagtgatgaaggaaagggtgagggtcccggctgcggaggggtcagtatctactctgcctggagacatcccagagcgcccccctgcagctccaccgaccgcgcccgcgcgcaggacccccgggctgcccggcggcacgcaggacagaagccacccacccaggacggcaggagctcggagcctggccaccgccctcctcctttatgtggtgtgacaccagggatgagctctgagcatctgtcgcgatgggcgggggaagcaggggtggggacggggactatccccgcggaggcactcagggcaccttgtgttgaggggggcaggtggagacccttgggttggtcgggcacagtgatgtcttgccttctaggactatggctggatagctggactttgagagctgaagtgaccatcagactctacccagaaggaatggctgctaatccaatcttgagaccacccaggctggtgaaggtgatactgggaataggaggcctgagatttggggccaatgcctgcagcatttctctgttatcccaagcctccctttcatatttctggaaaacgaggggcgggcctacctttcagttctgacattttaggattctgcttctgacagtggagtttttgcctgtctagagtccctgtcccctctaggtcagtgtattccattctcctggccgtgggcactggctcacagaatcagtgaggcccgaggatggcctaagacatctgctgggagcattgggaaacagggtctttcttgctgggagtgggtggtgtttgctaagctggtggaaggtaaatctgaagctgccggtgatcattttttacctccacataaggaaaccctcctaaggaaaaaatcaccagaggcagaggattgagacatggagcgagagagagacagtgcaggggatgatctgagccctggtcccaaatgagttagcattgctttttactgttgcctgagccaatagagttcttggattaaaccagatggagttgatttttgtgatttgaaaccaaagaatccaaatataaagtctaagaactcaaacttg

SEQ ID NO: 18690 - DNA, 783 bp, Artificial sequence
  DNA replication origin
gtgtccaaatcaggctcagcagacggaccaaaaatcaggcctggggaaagagtgatgacctctgggcacccctctccctttcctgcgactcagcggagctcagaatgtgtacttctctcctctgactccaaggctgattgattcacatggaaggtgttcacaggttgtggcagttcggggtaagatgaaggaatggcagcagctcattcggcatttgtggtgtctgaaacctgcttgactggcacgaaagatgagagaccgacccgagtgtcagtttactaagaagaaagaggttaggtgaaatagatgtgacgagttaaatgccaaaaaatgatgctgccggactctacacataagtcaaaactggcgaactcaaccccagtcagagccaggacaggggtctcccttgggaggaagagacaggaagcgaggcggggctgtccgccgggtggggtaggggggctgcgggggaagggggaggggattctgcacgggcaggggactctacaggggttgaggggggtctccaggaggtagggaaggtctgcgggggcgggaatgagcgtgtttcgggagaggtgctgcagaagcagagggggaagggtctgcagtggctggggaggtgggggtggtctgcagggttggcgtgttgtgccctggtctgagactggcgacacggcgggtcattggtgtaaattcgtcgggcttgctgacccgcggatccgtgccctttgctgtaggagtcaacacacctcgacacgcaacgagcgtgccggtgaagtg

SEQ ID NO: 18691 - DNA, 1320 bp, Artificial sequence
  DNA replication origin
tgaagtctgctctagtgctgagcacacgaccctcagtcattgctctcagtgaccctcagtttccaggacccatgcaactctgttgagggcctgttgtgtgctcaggtgagggctggagagacccacaaggagggatcctggtcctgatcccgatcccggcttctgagtgatgcagacacactcacaagctcactggcacatatgtgtgtccacgtgcacacacacacatgcaaatacacccagggggctgggctgtcggtgccacagaggttttgaagaaggacttgggtgctggggtgccagagattggtccacggtgggcattcagcccaagcaggaccaaccagagctgccccccagcactttctgtttagatgcggctgggagataatggccacatgagaacctgaggtggagctactatgatgagctcctgtgccctctcccatgggggcctgtctgcagcaggagagtgtgatgccaacacaggtgaaagagacagaaagagggagccagtgtgcatgcaccctggggcattgcttgagtccctggatccatttctggctgaggcccccgaccctctattgtgtccaggtatttgagataaggcatgtcttgtccagctgcagctggtttgagttgggttttgtcatttgcagcccaaacagtgtctcaacttcagtggtcatctggcctggtcactaatgggctggggaaaggaggaaggttggggcaagggcccatgtgagagtccaagcttggtaaggctacagagggctcaaaacgaggtggggtgctacctgagggatgcgagggctgggcagggcctggagtccccgatgcaggagacagtgggttgggagggttgggacccgggaagcagagtgctggggaggtccaggtcagggtggcaggggtgtggcagattaagaggcagacacaggttcctggtgcgtaggaggtcagggggccataaggagtgtgttccagaggggggtctacacccaggtcccagaggctgggagaggggaggggtgggaggaggggaccaggagccatcagtgagaaggaagacctggtggtgcgcctggaggagtgctcctggctgaatggcacgggctggagacatcaggaggatgctggagccagtgctctgagcagactccagccttcacccttccaggcctcctgaaagggtgtctagatctcagatagggagtgaaggcggccaggctgggctcttccaggcaacaagtagggtaggagggcacccaccttgtcaaagaggccacactcgcagatgagctgctcacgggcctt

SEQ ID NO: 18692 - DNA, 1370 bp, Artificial sequence
  DNA replication origin
tccctgaggaccccagggcccggcgcccaccccgtgcccggattccctgccccaaggccggagggcaccctgggcaggacaccccggaggggtggcggaggggccagcgctgccgactgcgggggagccgggtccggagacgtcccggaggccctacctgaggacttgcggccccgcatgccgtacacgtagacatcgttcacgaagtcctgcagctccgggtcctcctccaccacctggtcgccctcgtagtagatgtctaccacctcggccgtgaacctggctcagggggcgcagccggggtgggcgacccagccaggtctgcggagcggtgcccggcggcaaccccctcacggacgctgggactcccccaccccgtccccattcagcgctagcggtggaggggccaggcccgccccaggtagtcaggcaggggtcccggctcctcccccaggaccaccgccccgcgggcgctcacgtcctgatggcttcccacaccaggagcccgtcgtcccggtagaagtagtaggggatgtcttctttgctctccatgccccgggccttgatggcctcgggaaagcacagggaggcataggtcaggtccttcatggccctctgcaccatctgcacgtgcccaccgccccctgtggcgttggcctggagtgggaggtagagtgccctgagcgggtggctcctcccacagctgtccagacccatccctgaggaaatgtgccaggggaggcgaggaggccaggcaggcagaggtgcaagcccttgtcctgtgagatgggggagggatgtttaacgcagagaatgacaagggcagccgggtggagaggtgctagggaggagcctcccgcccaatccaatgcaagggactgaaccgtggggctgcagagtacaagagggaagggtgcgctcccagccacaggagggcagcaggcgtgggcaggtgtgtgggggaccccagcaccagcgggcctgggctgtgaagtctgctctagtgctgagcacacgaccctcagtcattgctctcagtgaccctcagtttccaggacccatgcaactctgttgagggcctgttgtgtgctcaggtgagggctggagagacccacaaggagggatcctggtcctgatcccgatcccggcttctgagtgatgcagacacactcacaagctcactggcacatatgtgtgtccacgtgcacacacacacatgcaaatacacccagggggctgggctgtcggtgccacagaggttttgaagaaggacttgggtgctggggtgccagagattggtccacggtgggcattcagcccaagcaggaccaaccagagctgccccccagcactttctgtttagatgcggc

SEQ ID NO: 18693 - DNA, 1215 bp, Artificial sequence
  DNA replication origin
tcggtcaagagccgggagcagctgtcggagtacctgaccgtggtgatcttcaccgcctccgcccagcacgccgcggtcaacttcggccaggtaggcagggccgggcccgctgggcagggctcccttctcaaggccgctgcctcctcccccgccccggttctgcacgcgtactgcaccctcggacagcctcggggcctggcacgggacttgcaggatggattctgcccgctcagccaagggcgctggccgcggggaaagaggatggacggactgcagggcccgctggagttggggggcacggggaggacggggcccagggggcagctgggcagcagggcttcgggggtgcccacgcttgctggcggtcgtctccgcagtacgactggtgctcctggatccccaatgcgcccccaaccatgcgagccccgccaccgactgccaagggcgtggtgaccattgagcagatcgtggacacgctgcccgaccgcggccgctcctgctggcatctgggtgcagtgtgggcgctgagccagttccaggaaaacgaggtgaagctgggcagggcggggcacagccccaggtcaccccaggttaagcggttcctcagcctcagggctttgtgactcgggccccaaggctcacttggagcaaaggaatcctgacttccaaggctggaagggcccagaaggctgcagccgccaccaggtcccccggcctcagcctggacagagctcagggtgtgcagggcaggagagcacacagcccaggctttgctcactgtcaccagagggtcgtgtgtgacgccccctccccccagctattgacaaagttcttgcacatgtgttttaccctggtactccagagggaatgaccaagagtttcctgggttccttccggacacgtgcatctcatttaacctaacaactgaatccggtgtgtcttcgtggatgcacccgctttggggtagctcagtactgcatagaatggccggaccagtccaacctgctccagactgctgggtgtctgagttgttcccggccaatgtgttggtccctcactggacatccttgtttttgtggctttgcacatgtgttcagtatgaccgcacacattcctagcagacaaattccttggtcaaagaatattgatactgaattgccctccacaaactaaattcaaaatcccattatcaatagcctatgtttcttggacctt

SEQ ID NO: 18694 - DNA, 1330 bp, Artificial sequence
  DNA replication origin
atgagctgttgggtacacctcccagacggggtggtggccgggcagaggggctcctcacatcccagtagggacggccgggcagaggcgcccctcacctcccggacggggcggctggccgggcggggggctgacccccccacctccctcccggactgggcggctggccgggcagaggggctcctcacttcccagtaggagcggccgggcagaggcgcccctcacctcccggactgggcggctggccgggcagaggggctcctcacttcccagtaggggcggccgggcagaggtgcccctcacctcccggacggggtggctggccgggcggggggctgaccccccgacctccctcctggacggggcggctggcctggcgggggctgacccccacctccctcccggacggggtggctgccgggcggagacgctcctcacttcccagacggggtggctgccgggcgtaggggctcctcacttctcagacggggcggctgccgggcggaggggctcgtcacttctcagacggggcggttgccaggcggagggtctcctcacttctcagatggggcggccaggcagagacgctcctcacctcccagacggggtcgcggctgggcgctctcacatcccagacggggcggcggggcagaggcgctccccacatctcaggcgatgggcggccgggcagagacgctccttacttcctagatgggatgacggccgggaagaggcgctcctcacttcctagatgggatggcggccgggcagagacgctcctcacttcctagacgggatggcggccaggaagaggcgctcctcactttccagactgggcagccaggcagaggggctcctcacgtcccagacgatgggcggccaggcagagacgctcctcacttcccagacggggtggcggccgggcagaggctgcaatctcggcactttgggaggccaaggcaggcggctgggaggtggaggttgtagcgagccgagatcacgccactgcactccagcctgggcaccattgagcactgagtgaaccagactccgtctgcaatcccagcacctcgggaggccgaggctggcggatcactcgcggttaggagctggagaccagcccggccaacacagcgaaaccccgtctccaccaaaaaagtaagaaaaccagtcaggtgtggcggcgcgcgcctgtaatcgcaggcactcggcaggctgaggcaggagaatcaggcagggaggttgcagtgagccgagatggcagcagtacagtccagcttcggctcggcatcagagggagaccgtggaaagagagggagagggagaccgtggg

SEQ ID NO: 18695 - DNA, 906 bp, Artificial sequence
  DNA replication origin
gaagtgaggagcccctacgcccggcagccaccccgtctgggaagtgaggagcgtctccgcccggcagccaccccgtccgggagggaggtgggggtcagcccccgccaggccagccgccccgtccaggagggaggtcggggggtcagccccccgcccggccagccaccccgtccgggaggtgaggggcacctctgcccggccgcccctactgggaagtgaggagcccctctgcccggccagccgcccagtccgggaggtgaggggcgcctctgcccggccgctcctactgggaagtgaggagcccctctgcccggccagccgcccagtccgggagggaggtgggggggtcagccccccgcccggccagccgccccgtccgggaggtgaggggcgcctctgcccggccgtccctactgggatgtgaggagcccctctgcccggccaccaccccgtctgggaggtgtacccaacagctcattgagaacgggccgggacgacaatggcggttttgtggaatagaaaggggggaaaggtggggaaaagattgggaaatcggatggttgccgtgtctgtgtagaaagaagtagacatgggagacttttcattttgttctgtaccaagaaaaattcttctgccttgggatcctgttgatcggtgaccttacccccaaccctgtgctctctgaaacatgtgctgtgtccactcagggttaaatggattaagggcggtgcaagatgtgctttgttaaacagatgcttgaaggcagcatgctcgttaagaatcatcaccactccctaatctcaagtacccagggacacaaacactgcggaaggctgcagggtcctctgcctaggaaaaccagagacctttgttcacttgtttatctgctgaccttccctccactat

SEQ ID NO: 18696 - DNA, 881 bp, Artificial sequence
  DNA replication origin
gtccacggataaaacatgtctcctttgtctctaccagaaaaggaaaggaactgaaattaagagaagggagagattgaagtgtggcgcgaagattgaaaggagaaagagattgagggatagtgagagaggttggagaagagagtaaaaagaggccgcttacccaatttaaaattggtgagatgttgcttgggctggttggtcagaggaccagaggtcgtaggtggacctttctcacagagcaaagagcaggaggacaggggattgatctcccaagggaggtccgccgatccgagtcacggcaccaaatttcactcacgtctgtgaagagaccaccaaacaggctttgtgtgagcaataaagctttttaatcacctgggtgcaggtgggctgagtccaaaaagagagtcagcaaagggagaaagggtggggccattttataggatttgggtgggtaaaggaaaattacagttaaagggggttgttctttggtgggcaggggtcggggtcacaaggtgctcagtgggggagcttttgagccaggatgagccaggagaaggaatttcacaaggtaatgtcatcagttaaggcagaaacaggctattttcacttcttttgtgattctttagttacttcaggccatcttgatgtataggtgcaggtcacaggggatatgatagtttagcttgggctcagaggcctgacattaactccttcaactttgttcttttttaagattgttttggccgttctaggtcttttgaattttcatatactttcatatttcatatacttttatatttcataggcttttagaatcaaaagcctaatttctataaaagtgcctggtgggaatatggttggaattgtgatttgggcagaat

SEQ ID NO: 18697 - DNA, 1194 bp, Artificial sequence
  DNA replication origin
ttcttgtgtgctggagatgtggctggggtttttctcacagtggaggcaaggaattgcaactcagaaatacattgctacttggctgcctctactttattattgtacaccttgaaggagaggttaattaagtcctgttgtggggtttgagggccggaatttaattttaggagttttatttaatgtcaggagctgactgggtgttaaaatgcataattagaatgagatggccttctgacccttcagggtctagggctgtaaagagtcttaagggttgctgctaaatgggccatgaactgggctgggtttttcatatttgatgaaaaagagcctaaacgctaactgatttgggagaggtccgataaagaaaaaggagcattaacctttactatgcctttagctccagccacctttttaagaggaaattgctgggcaggtgggggagggccagtcgcagaacgaaactgtaagctggaccaggtgtgaggagggggaggtgataaaaggattgtagggtggcggggcggaggctgaggaaaaaatggaaagacttgggactgtcttcccaagtccatgaccagcgctggagttttgggtccacggataaaacacgtttcctatgtctctaccagaaaagcagcctggggaggaggggagaggtcagatgggtcagtagaaaaggaagattcaaaagactcagagacgcttggggttgggactgaagggacaggcgggagggaaagaaggaagatttgggacgagttgcattggggaacagagactagggatggaccgatgtgtaaaagaatgcctggacgtcaggcacctcagaccgtttgcctattttacaacaagaattatttaggtcttataggatggagaaatcgaaaatgccgttttctggccatttagagccgttatcgagtttgtattggggttaagtggcattgcagaagaaaatattgcagaagaaaataaggcatttaggttttaggtcaggtgtgagttgaagaggttttaagttcttgagaacacaggctaagggagaagaaggaggaatggagggtggaaggttgcctatagtgaaggaggcaagtccagagaaaagagagggtagagacatggagaaaaggggtgggggtgcttgccccccaggaaagtggagagaaaagagagggtagagacacagagaagggg

SEQ ID NO: 18698 - DNA, 952 bp, Artificial sequence
  DNA replication origin
gtcgatgggactgggtgccctggagcagggggcggcgctggtcggagaggctctggccgcacaggagcccacggaggagggggaggctcaggcatggctggctgcaggtccagagccctgccctgcagggaggcagctaaggcccggcgagaaatggagtgcagcgccggtgggccggcactgctgggggacccagcacaccctccgcagccgctggcctgggtgctaagcccctcattgcccggggcggcagggccggcaggccgctcccagtgccggtccgccaagcccactcccaccgggaactccagctggcccgcaagcgccgcgcgcagccccggttcctgctcacgcctcctccacacctccctgcaagctgaaggtgccggctccggccttggccagcccagaaagggggtcccacagtgcagtggtgggctgaagggctcctcaagcgccgccagagtgggcgccaaggtcgaggaggcgccgagagcgagcgagggcgcacgctgtcacctctcagaaatggaaggaaatgttctactcttgaggagactaaggaacagcaaggaagtcaggtggctagagcaaagcaagtgagaggacgatgggaaataggggctagatcatgcaggacttagagccaaacacttctggattttattctgaattgggaaaatactggggttgacatggttttgaaaagtcactttggcgattgtgtaggaaaaaaaagactgtaaggaggcaaggatggaagttgagagaaatatacagcagtcatccacgtgggagatcctagggctgggctgggctgtagcagctcctggatgatagtcacatgctctcctttctcaaaccaccagcacctctctccctcttgtcatgctcagcttttattttattaaactatcaacaatcgaagagaaattccacatgatacagaaac

SEQ ID NO: 18699 - DNA, 986 bp, Artificial sequence
  DNA replication origin
ggcgccccggcaaccgcccacgtccgggggccaggcctgcccccgcccgcgctgattggagggcagcgaaagcgccgtccagcgattggtaggtggtgtcacaaaggggcggggcgcggcggcagcggagcgttgtcggccagtgccttccgtgaagttgctcgccgggtcgttgggccctgtcgacctgtaggcgggcgagcgagccagcggacaagactgcgggtgaggctgagctagcgagcggccggcagggggggcgcccgggctgcgagccgctgagcccagccgcgctgccgccgccggccgtcgtggggccggaatggcgcaaggccggagtggcgcgggcgctcggcgctgggctgccgggtagagtcctgtccccgcccctcgccttgcggcctgacgccggccgctgctgcccggggaccggagcggcgggccgcctttgcccaggacacacgctctggcgtttgttcctttgggcgtgacgccagcttcaacgggtacgcggctttcccgacgggtgctgatctccgagtcgctgttgtcacgcggactgctgtcctccagattcaggccggtgggtctggggagcccggattggtcttggaggagcaacggctgcgcaggtgactcggtggcctcaagtgtgtaggtacctggatggcgcgaggagatgctggctctgaaatacttcccaattccgcttgcagatgaactccggactagagtttaggctacagacaagttaggcggttgatgtgattctgtagctcgtatttcgaactttagggatgttttgatgtatcagtaaatgtagatctgtgtcacagttttaatggcagcttcacattccggatatctttatgttggggaaaatgtttcaaaggtaactgctcttctgtagctaagcttctttagagcagaggttggagaaaattctgagttactgaaattacgtattcagcgctattgcctgttta

SEQ ID NO: 18700 - DNA, 904 bp, Artificial sequence
  DNA replication origin
cacccatcgtctgaggtgaggggagcacctctgccccgccgccccgtctgggatgtgaggagcgcctctgcctggccgcgaccccgtctgggaggtgaggagcgtctctgcccagccgccgtgtcttgagaagtgaggagcccctccgcccggcagctgccctgtctgagaagtgaggagccccgccgcccagcagctgccccctctgagaagtgaggagcccctccgcccggcagccgccccgtccaggaagtgaggagcgtctccgcaagacagccgccccgtccgggaggtgggggggcagcccccgcctggccagctgccccgtccgggagggaggtggggggcagcccctgccccgccagccaccccgtccgggagggaggtggggggcgcctccgcccggctgccgccccgtctgggcggtggggggcgcctctgcccagccaccccttctgggaagtgaggagcccctctgcccggccgccaccccgtctgggaggtgtacccaacagctcattgagaatgggccatgatgacgatggcggttttgttgaatagaaaagggggaaatgtggggaaaagatagagaaatcggattgttgctgtgtctgtgtggagggaagtagacataggagactccatttctttctgtactaagaaaaattcttctgccttgggatgctgttgatctatgaccttacccccaacccggtgctctctgaaacatgtgctgtgtccactcagggttaaatggattaagagcgtgcaagatgtgctttgttaaacagatgcttgaaggcagcctgctccttgagagtcatcaccgctccctaatctcaagtacccagggacacaaaaactgcggaaggccgcagggtcctctgcctaggaaaaccagaga

SEQ ID NO: 18701 - DNA, 1269 bp, Artificial sequence
  DNA replication origin
aggtcatagatcaacagcatcccaaggcagaagaatttttcttagtacagaaagaaatggagtctcctatgtctacttccctccacacagacacagcaacaatccgatttctctatcttttccccacatttcccccttttctattcaacaaaaccgccatcgtcatcatggcccattctcaatgagctgttgggtacacctcccagacggggtggcggccgggcagaggggctcctcacttcccagaaggggtggctgggcagaggcgccccccaccgcccagacggggcggcagccgggcggaggcgccccccacctccctcccggacggggtggctggcggggcaggggctgccccccacctccctcccggacggggcagctggccaggcgggggctgcccccccacctcccggacggggcggctgtcttgcggagacgctcctcacttcctggacggggcggctgccgggcggaggggctcctcacttctcagagggggcagctgctgggcggcggggctcctcacttctcagacagggcagctgccgggcggaggggctcctcacttctcaagacacggcggctgggcagagacgctcctcacctcccagacggggtcgcggccaggcagaggcgctcctcacatcccagacggggcggcggggcagaggtgctcccctcacctcagacgatgggtggccgggccaagacgctcctcacttcctagacgggatggcagccgggaaaaggcgctcctcacttcccagactgggcagcccgggcagaggggctcctcacatcccagacgatgggcggccaggcagagacgctcctcacttcccagacggggtggcagccgggcagaggctgcaatctcggcactttgggaggccaaggcaggcggctgggaggtggaggttgtagctagccgagatcacgccactgcactccagcctgggcaacattgagcactgagtgaacgagactccatctgcaatcccggcacctcgggaggccgaggctggcagatcactcgcggttaggagctggagaccagcccggccaacacggcgaaaccccgtctccaccaaaaaaatacaaaaaccagtcaggcgtggcggcgcgcacctgcaatcgcaggcactcggcaggctgaggcaggagaatcaggcagggagggtgcagtgagccgagatggcagcagtacagtccagcttcggctcggcatcagagggagaccatggaaagagagggagagggagaccg

SEQ ID NO: 18702 - DNA, 2027 bp, Artificial sequence
  DNA replication origin
gccccaagtgagttgggccaccccatgactattgcagaaatgacacgtgtcgtataaatcccaccacaccagaggggagggcggaagacactccctgagagtgggctgctggctggagaaagctgtggccctcagagcctggcattctgctgcccccaaagcatgggagcaggacgctgtcctctgggctgggggtctgctgcatcctcacccctgggctgggggtccaagctagctctgctctctgtagataacagcaatggcaggcattccggaccatgtgtttgcagtggagaatggcttcaaggccctgagaagcaccattgatgccgtgagtgggtggagatgaggggctgggggcctggctcactctccctgccccgccccacccctcctgtgttccagctcacgtcaaagacctgtcttgatgtgacatcggtggagccttcctctgcgtgtgtaggaggtgagagctgcggaggccctggggtagccaaagggtggtgtgcactagtgcatgtgtgtatggagtgtgtgcatttgtttggtatgtgtgggggaggatgtgtgtggggagtgtgtgagtgtggtgtgtgtatgtggtgtgtatgtgtttggtgtgtgtggtatgtgtgtatgtagtttgtgtgggtgcagtatgtgtagtatgtgtgggaagttgtgctgtgggaagcttgatgtgtgtgaagtctgtgggggagggtaatatgtggtctgtgtgttgtgtaaatgtgtatgtgatctgtgtgtggggtgtgtatatgtgctgtgagtgtggtgtgtgtggggtgtgcatgagtgatgcatctgtgtgtgttgtattgtgggtgtatgtggtgtgggagccgaggaggtatgtgctgtatatgtgtgggggtgtgagtgtgtgtagggggcatatatgcatgcgtgtgtgggttatgtgcagagtatgtggcataagctggggtgctgtggaagtgtgtgggaagggtacctggtgtgtggtgtctagtgtgtgtttgttgtgtggaggagtcgggagtggactgcttgtgtgtggtgtgtgtgtatgggatgtgtggtgtgtgtttgctgtttgtggtgtatatgtgtttactatttatgtgtgtctgtggtgtgtgtgtgtacagtgggactagagtgtttgggcgtgttgtgtgtgtcatttgtgggtgtctacatggggatatcttgtgcgtgtggcatgtagggaaggaaatggtgtaatggcatgtatgtatagtttgtgtgtgcattcagtgggaggtgggtgtgtgtgccatggctgtgtgtgtatggtgtctgtatatgtgtttgctgtttatgttgtgtgtgtggggtgtgctgggtgtgtgttgggggagtggggagtgtgtggtgcatgtgtgatgtgtgtggtgtgtgtatgggatgtttggtgtgtctttggtatttttggtgtatgtgtgtttgctatttatgtatgtgtgtggtgtgtgggtgtgtgtgcttcgggtgtgtggtgtgtggtgtgatgtgtgtggtatagggtgggttgagtgtgtttgtggtccagtgtgcatgggtgggtgggtgtggatgtgtggcccacatgagtgtgaatgtgagtgtctattggtgtggggggagtatgcagaggtggcagtgtgagtacttgtgtacaattagtgtgttgttacctcacaacaataagtttaaccctaaagcaagaaaagacatgtgtgagaagctcacaggaaaacactagcaaatggcatggagcagcagctaacccagaccacagggcaggagcagccagggctcctcccaggaaggccaggcaggtgcagaaggtgaaatagctgtgaaatttaccacatcaacaaaacgggaaacaggaaccaagcggttatctcagaggatgaagaacaagaagtgggggcgtcaacatgccacagcaccctgggagcagaaggaaacctccatagcccgacaaaggtgtccacacaaacaccctcggctca

SEQ ID NO: 18703 - DNA, 1160 bp, Artificial sequence
  DNA replication origin
tgccggggccggagaacccgcaacccggtagaaagcctgtgatcagctgggcagcccagtcctccccgggctcagctcggcagacagccctctgatggctcggactgggccgggcgccggcgcctgcgggagggcgagggcgtcctttgaaggcggctccagctctcgccgccgccctctggctctaggctcccctacctctcgctcctgggccctgggggccgcggcgatgcgccccgtgcctgtggctccctcttcgcggacgacccccgtggcctcccagccctccctccccgcgcgacctggcggccccgctagcggcacctccccagcgcccaagtagcccagatcctccaggagcgccccgccgcctccgctctcctggcccccgctcccctggccccagctgtgaccgcgcagcactttgccaggaaggggggctccgcgacccttacaacacagaggtgtctgggggcttaactgcccctggagggtgggagggggccagggcagaagggccgtggtctggacggaatgactgtggggtgggtggagactgcgctgggactcggaggacctggggtttcccctgcagtgggggagtgagggtagatgggatagagtctcaggtaatcgcagttcttggtgctgttgcaggcaagtgtgcatgggtcacattgcttgagcgtagggtgcaaagcagcttcgtttggagaagggagaattcttcaagtactgaaaggaaaaccaccctgagtccctgctccctcattgattaattccgtcactcagtgggtgttctgacgtggtaggggtgagtgggtgcgcggagataccgtgaggaagcgctgagtttctctccaaggctttggagggtctgttgcaaagatgagatcctcaaggacaaacataagtctgaggaggggaagctgggttcagaacatacatcaaaccttagagatggtcctgttacaggaaagaggtccccatctaaaccccaagagagggttcttggatctcacgcaagaaataattcagggcgagtctgcagtgcaaagcaaaagcaagtttattaagaaagtcaagtggtcagagtgcagctactccatagacagagtgggacgttcccgaaagtaagaggagtaaagcccccatcctag

SEQ ID NO: 18704 - DNA, 912 bp, Artificial sequence
  DNA replication origin
ccgccaggtcgcgcggggagggagggctgggaggccacgggggtcgtccgcgaagagggagccacaggcacggggcgcatcgccgcggcccccagggcccaggagcgagaggtaggggagcctagagccagagggcggcggcgagagctggagccgccttcaaaggacgccctcgccctcccgcaggcgccggcgcccggcccagtccgagccatcagagggctgtctgccgagctgagcccggggaggactgggctgcccagctgatcacaggctttctaccgggttgcgggttctccggccccggcaccctcccgcgccggggccgcccacccacaagccctgcccggaaggcgtgtgcggccaggaaggcggggcctggtgtcctcagggctctggcgccaagttcagagccgcgcgctgggcgcttggcggtggcggccgcgtctgcacctcctccctgcgcgccgcctgacagcctgggagagaagcgccctcaggtcggccaagaccaagaccgagagcaagcgggcgcgggcagcggggcccatctcatttccactgcctttccccacagtagcgctcttgagtcctgactttggctgttgggtccttcccttccctctgtcgccagcttcctcccgcattctcccaggtcctctctgagtcccattcctgttcctgtcccctgcctttctgcctcttgtctccttgtcccgtcccgtttctttctcctctcatctctcccttttttgtgtgtgtctgctttattggctatttctctgtcttgtctcttttccctctctcactgtctttttctctctccctatcctccgctcattttttgcaagcaagaattctccctttgatttatttttctcctagagagacatgttgggccgcggttctctt

SEQ ID NO: 18705 - DNA, 847 bp, Artificial sequence
  DNA replication origin
tggaactcaagaggaggatgggggtggagccatggcctcaggcatcatcccaggggtaatagtgaagccacagatgtgcctgagagctgcccagagagaagccaaggccatccaaggcaaagagcagacactcagaaaaccaggggagcactccgctgggaaagacagggccaggggtttgcaagacacagcagagcgcaggctacgtctgaccagtggctggtgagattcacagacaggggccactttgggccactgcaggatgtggagggtgctgggcgtcaacgggttgccctggagggtaggagggaggcaaacagctcctgtgggcaacagcggtggggcaaggggctggggtggtggctgtactggaaggggtgagggccagaggacaaggagggagcactctgggagtcctggagaggagagtgtgaagacacaggagaaagagggaaaggagatcaggcaggaaagatgagggaggggagtgggagccagggcctgactggagactcgacttctgacttccgacttccgacttccgacctccaacttccgttaggaagtgaaacaaaggcgaaggccctctctgtcagggtactcagaggaaaggtcagggaaccagggcatgtgggagaagagtgggagtcctcccagtgttgtggggaaggtgtctgtttagctggaggtgagattctaggtccggtgtcggggaggtggtgagtgtggaggccgggagattagaattagtcattgtggtgcaaaagggaaattaacctacagaagctgtccagcgccagcgtgagtatcagtcagaggctttgagcaacccagtgctctagaggag

SEQ ID NO: 18706 - DNA, 1656 bp, Artificial sequence
  DNA replication origin
ctctctgtcagggtactcagaggaaaggtcagggaaccagggcatgtgggagaagagtgggagtcctcccagtgttgtggggaaggtgtctgtttagctggaggtgagattctaggtccggtgtcggggaggtggtgagtgtggaggccgggagattagaattagtcattgtggtgcaaaagggaaattaacctacagaagctgtccagcgccagcgtgagtatcagtcagaggctttgagcaacccagtgctctagaggaggtaaagtgaaggcttccctggtctctgacatgaacttgttctgactccccttgtagaggcccaggaatgtgtcctgccttgtccacaggggaaggcctccaccctgctcagcctgcctggcagaaatgtcccccagccctcctggagccttagccccctgaatgtgccccacagcagacagctatcagattcctccacaggtgttcactctgtggccgggcaagtcagccaatttaaaccgtatatgtttgcctgtgtgtatatgtttatgtgcgtgtgctttgggatgtatgtttgcctgtgtgtcgatgtgcatgtgtgtgcgtattatgtatgtgtgtgtgtgtttgctgatgtgtgtgtgtttgtgattgcatatgtttgtatgtgtgcatgtgtgtgtgtgagtgtgcatgtgtcagctttgccgtctttccttcaacctctggctgctgcagatggtggagtgagctgaagatgctagagtgagctgaggctggtggagtaagctgaggctgatggagtgagctgaggatgctggagtgagctgaggatgctggagtgagctgaggatgctggagtgagctgaggatggtggggtaagctgaggatggtggagtaagctgaggctggtggaatgagctgaggatgctggagtgagctgaggatgctggggtgagctgaggatggtggagtgagctgaggatgctggagtgagctaaggatggtggagtgagctgaggctggtggaatgagctgaggctgttggagtgagctgaggatgctggagtgagctgaggatggtggagtgagctgaggatggtggagtgagctgaggctgttggagtgagctgaggatgctggggtgagctgaggatggtggggtgagctgaggatggtggagtgagctgaggctgttggaatgagctgaggatgctggggtgagctgaggatggtggggtgagctgaggatggtggagtgagctgaggatggtggggtgagctgaggatggtggagtgagctgaggatggtggagtgagctgaggctgttggaatgagctgaggatgctggggtgagctgaggatggtggggtgagctgaggatggtggagtgagctgaggatggtggggtgagctgaggatggtggggtgagctgaggatggtggggtgagctgaggatggtggagtgagctgaggatggtggggtgagctgaggatggtggagtgggctgaggatggtggggtgagctgagcatggtggagtgggctgaggatggtggagtgagctgccctgctagacactccttatctgctcccagcacacaacatcctgtttctggtttccatctcggtcagtggggctgcagggcagatgctgctcagatctgtctt

SEQ ID NO: 18707 - DNA, 1495 bp, Artificial sequence
  DNA replication origin
caggtacaatgatgggcaagggtgggggtgctgcagccaagagaggtgcaggcgcaggagcaaggacaggagacccgggtccatccccacagcctctatccccaattccaggctctgcaccgtgggcacatccacacagagctctgagcctcagcctccacacctctgcaaagagaacgggcctccctccctgggggcacttgtgaggtttagagagctcagagaaagacctggctcagaaccagggccacatggggtgtaagcaaccagaactcttctctgggtgttcttcacagtaaagggaacgtgggcagcatccgtgggaatacaggctgcccaggccttccccaaatccagagttctgtttagagagaaagatggggaaggcaggggagggcagggaggggaggggaggggaagggaaggcaggagaggggaagggaagggaggggaggggaggggagaagaaaggaggggagaggaggggagggggcctgtgctgagaacctggctggctgaaggagaggaaccaccgaggctgagcatgaaggccgccggtgaggctggagccccagggctgctcctgatgtgcctgtcactgtggagccgttagtgggtggattcctgatggggaatgtgtgcgttcagcctgctaatccatgcgtggatatgcagggacaggcaggggtagacccagagggaggactgtcaacactggtgcgtcctcacaaataagactggacacaaggtggtggagtgggctcaggcctcccgcctgtccctccagcacatcctcctccctatgcggccctgggccacgctgcccaaagatgtggagctctgaaaagcaggcactgggggcacagcacttccattctcaggggcctctcggagctgagcccgggtcccagtgcccagagcctccccttcagcagcaggaggggacgaaatgcaggacctggtgagggagcagggagggacatctcaggggcccgagcaaggaggagaggcagaaaggaggttcaaggcatctgggcaatgacagcaggttacaaccaggcaggctcaggggccagggtcatgagcaggttcaggaccagatcagcagctggggcaccagttcagtggcacacgcaccctgatggcagtgtgtggaatcctccagagctcctgggcctgggaggtccacgtggagaaggtggacacccaagaggtactggactctaagctcctggcagacagcctcccagcttcaaccacctgtgccagctggaagccgggttggagcagcctcaggtgcctgctgcacacgctactttctgggactgcctggaaactgtctgccctttctgtgctccccagggtgtatctccttctagtgcagggactctggacagtcctcatacgtgtttgcagccccatgctggtactcacacatgtggtgctggtgatgctgacattgctcttgaatgttttgccgttgttcaagctgact

SEQ ID NO: 18708 - DNA, 1709 bp, Artificial sequence
  DNA replication origin
ccagaggggagggtggaagagctccccactccctgagagtgggctgctggctggagaaggctgtggccctcagagcctggtattctgctgcctccaaagcatgggggcaggacgctctcccttgggctggggatctgctgcatgctcacccctgggctgggagtccaaaccagctctgctctctgtagataacagcaatggcaggcggtccggaccatgtgtttgcagtggaggatggcttcaaggccctgagaagcactgttgatgctgtgagtgagtggaggtgaggggctgggggtctggctcctgtggccagaagctcactctccctgccctgccccacccctcctgtgttccacctcatgtcaaagacctgtcttgaagtgacgtctgtggagccttcctctgagtgtgtaggaagtgagaactgcggaggccctgcggttgccaaagggtggtgtgcactagtgcatgcgtgtatggagtgtgtgcatttgtttggtatgtgtgggggaggatgtgtgtggggagtgtgtgagtgtggtgtgtgtatgtggtgtgtatgtgtttggtgtgtgtggtatgtgtgtatgtaatttgtgtgggtgcagtatgtatagtatgtgtgggaagttgtgctgtgggaggcttgaagtgtgtgaagtctgcggggagggtaatatgtggtctgtgtgttgtgtaaacgtgtgtgtgatctgtatgtgaggtgtgtatatgtgctgtgagtgtggtgtgtgtggggtgtgcatgagtgatgcatctgtgtgtgttgtgttgtgggtgtatgtggtgtgggagctgaggagggtatgtgttgtatgtgtgtgggggtgtgagtgtgtgtagggggcatatatgcatgtgtgtgtggtgtgtgtggggtatgcgcagagtgtgtggcataagctggggtgctgtggaagtgtgtgggaagggtacctggtgcgtggtgtctagtgtgtgagtttgttgtgtggaggagttgggagtgtactacttgtgtgtgtggtgtgtgtgtatgggatgtgtggtgtgtgtttgctgtttgtggagtatgtgtgtttactatttatgtgtgtctgtggtgtgtgtgtgtacagtgggactagagtgtttgggcgtgttgtgtgtgtcatatgtgggtgtctacatggggatatcttgtgcgtgtggcatgtagggaaggaaatggtgtgatggcatgtatgtatattttgtgtgtgcattcagtgggtggtgggtgtgtgtgccatggctgtgtgtgtatggtgtatgtatacgtgtttgctgtttatgttgtgtgtgtggggtgtgctgggtgtgtgttgggggagtggagagtgtgtggtgcgtgtgtgatgtgtgtggtgtgtgtgtgggatgtgtggtgtgtctttggtatttttgctgtatgtgtgtttgcgatttatgtgtgtgtgtggtgtgtgggtgtgtgtgcttcgggcgtgttgtgtgtggtgtgatgtgtgtggtatggggtgggttaagtgtgtggtgcagtgtgcatgggtgagtgggtgtggatgtgtggcccacatgggtgtgaatgtgagtgtctattgctgtggggggaatatgcaggggtgatggtgtgagtacctgtgtacaattagtgtgttgttagctcacaacaataagtttaactctaaagcaagaaaagacatgtg

SEQ ID NO: 18709 - DNA, 1212 bp, Artificial sequence
  DNA replication origin
ccttcctggccgcacacgccttcggggcagggcttgtgggtgggcggcccccgcgcgggagggtgccgcgggccagagaactcgcaatccgggagaaagcctctgatcagctgggcagcccagccctccccgggctcagctcggcggacagccctctgatggctcgggctgggccgggcgccggcgcctgcgggagggcgagggcatcccttgaaggcggctccagctctcgctgcggccctctggctctaggctccccgacctctcactcctgcgccaggggggccgcggcgatgcgccccgtgcctgtggctccctcttcgcggaggacctccgtggcctcccggctctccctccccgcgcgacctggcggccccgctagcggcacctccccagggcccaagtagcccagatcctccaggagcgccccgacacctccgctcccctcgccccagctgtgaccgcgcagcactttgccaggaaggggggctccgcgacccttagaacatagaggtgtccagggacttaactgcccctggagggtggcagggggccagggcagaagggccgtggtctggacggaatgactgtggggtgggtggagactgcgctgggactcggaggacctgggctttcccctgcagtggtggagtgagggtagatgggatagagtctcaggtaattgcagttcttggtgctgttgcaggcaagtgtgcatgggtcacattgcttgagcgtagggtgcaaagtagcttcctttggagaagggagaattcttcaagtactgaaaggaaaaccaccccgagtccctgctccctcattgattaattccgtcactcagtgggtgttctgacgtggtaggggtgagtgggtgcgcggagataccgtgaggaagcgctgagtttctctccaaggctttggagggtctgttgcaaagatgagatcctcaaggacaaacataagtctgatgagggggaagttgggttcagaacatatatcaaaccttagagatggtcctgttacaggaaaggggtccccatctaaacaccaagagagggttcttgaatcttacgcaagaaagaattcagggcgagtctgcagtgcaaagcaaaagcaagtttattaagaaagtcaagtggtcaaagtgcagctactccatagacagagtgggacgttcccgaaagtaagaggagtaaagcccccatcctaggt

SEQ ID NO: 18710 - DNA, 854 bp, Artificial sequence
  DNA replication origin
gccgccggggtaaggaaggccgggaggccgcgggggtccacggcgcggagggagccgcaggcaccgggcacagccctcgcccatcgccgagacccggcaggcccaggagccagagggcggcggcgtgagagggaaccgcctccaaaggacgccctcgccctcccgcaggcatagtcgcaggcgccagtcccggtccgagccagctgggggtggctccggggagctgagccgggggagggccgggccgcccaacggatcaataggggggtttctcccaggttgccgtttctctggcccgcgacgccctacccgccggagccgcccaaccgcaagccccgccccgaaggcgggtgcagccaggaaggcggggcctggtggcctctgggcgctggcgccaagttcagagccgcgccctgggctgggcggtggcggccgcgtctgcacttccccccctgcgcgcctctggagagcccgggagagacgcaccctcaggtcggccaagaccgagaacaagcgggcgcgggcagcggagcccatctcacttgcacgaaaggcagcgttcttgagtcctgcctttgacggcggggggttcttcccttccctctgtcagcttcctccagctctctcccatgtcctttccgagtcccattgctgtccctgtctcttgcctctctgcttcttgtctccttgtcctctcctgtttctctcatctctccctttttcttgtgtccgccttgttggctatttctcttttatcctttttccttctctctctttcggcctctcccctcactctccctataggcttccttctctcttgcaagcaagaattcttcttatgtttttcccctaag

SEQ ID NO: 18711 - DNA, 1071 bp, Artificial sequence
  DNA replication origin
gccccaaagggaggcctgatgagcttggccagagggagctccagggagctgaagggctcccggagaccttggttgggagcctgacagcacacagggcaggccggtcagggcaactcacagtacccacctgaccttagccccggctcccctgcatcctcctacccatggctgcaaggttacctgcaggcccctgtgctccagaagttctcagcctcccccacttcacgctcccctgccctctctccgctctgcctccttccctgaaaggtggctgtgaggattcccagggtgcaggggctggcagggcgggggtgtgtgtcctgtgaacacacacctgtgctggctgctgctctgtgcctgttccccctgccctgaccagtgtgggagggagacagggtcaaagctggtggtgggagtagtggggctttagtgcagggatgctggcaggcccagactggggagcccctgggtggggttctgagctccagggcaggctgggaaagtggagggaggcaggaggaacaagctcaggaggctggagcccaggcccagcagggagcacagcagagttcctgtttggccggaggtgagggcacttccaatgcacatgcccggaactgggcccagaggagatgaagcacagaagagaggtgaggacactgaggactggatgggggactgggccccacttgcagtttcgagggaatacagagtaggggagcttgagtctgtgtgtcctgcgctgtgggtttgtcagagagactgggtgggtgtgaggtggtaaaaagcaagtctatgggggaggactgtggcgagtgacccagacggggagcggggtttgggcatggccagaggaaggccagggcatggcctcttctgggtatggatgggtctggcctcctcccctcctgggctgggcaggcagggctctcagagctccggccatggcagggactctctgcccacagtgggaagccatccttcagggtccatgctctgctcagccttgctgtgcaggctcagcctgtcacattgaattagcctgaccctaagtccccagcctgtcccagt

SEQ ID NO: 18712 - DNA, 1258 bp, Artificial sequence
  DNA replication origin
tccccgctccctaagagtgggctgctggctggagaagtctgtgacattcagagcctgacattctgctgcccccaaagcatgagggcaagacactgtctcctgggccgggggtctgctgcatcctcacctcctggtggggagtccaacccagctctgctctctgtagataacagcaattgcagacagccctggccacgtgtttgcagtggagaatggcttcaaggccctgagaagcaccattgatgccgtgagtgggcagaggtgaggggctggggacctggatcctttggcaggaagctcactctccctgtcccgccccacccctcctgtgttccagctcacgtcaaaggtctgtcttgatgtgacatcggtggagccttcctctgagtgtgtaggaggtgagagctgcggaggccctggggtagccaaagggtggtgtgcatgagtgcatgcgtgtatggagtgtgtgcatttgtttggtatgtgtgggggaggatgtgtgtggggagtgtgtgagtgtggtgtgtgtatgtggtgtgtatgtgtttggtgtgtgtggtatgtgtgtatgtagtttgtgtgggtgcagtatgtgtagtatgtctgggaagttgtgctgtgggaggcttgatgtgtgtgaaatctgcgggagagggtaatatgtggtctgtgtgctgtggaaatgtgtgtgagattgtgtggggtgtgtatatgtgctgtgagtgtggtgtgtgtggggtgtgcatgagtgatgcatctgtgtgtgttgtattgtggggtgtatgttgtgtgggagctgaggtgctgtgtaatatgcatgtgggggtgtgagtgtacgtagggagcatatatgcgtgtgtgtgtgtggtgtatgtgcactgtgtgtgtctggcatgagtgggggtcttgtgggagtgtgtgggaaggttgcctggtgtgtggaaggctgctggtgtgtgggaagggtgtctggtgtgcaggtatgtggtgtccagtgtgtgtttgtgtcgtatggggagttgggagtgtgttgctgatgtgtgtggtgtgtgtatgggatgtgtggtgtgtctttggtatttttggtgtatgtgtgtttgctatttatgtgtgtgtgtggtgtgtgggtgtgtgtacttcgggtgtgtggtgtgtggtgtgatgtgtgtggtatggggtgggttgagtgtgtttgtggtccagtgtgcatgggtcggtgggagtggacatgtggcccacatggatgtgaatgtgtcta

SEQ ID NO: 18713 - DNA, 1175 bp, Artificial sequence
  DNA replication origin
caaagacaggtgagggtggaggtgcaggcacaggagcaggggcaggagacccgggtccatcccccacagcctctctccccacttccaggctctgcaccgtgggcacatccacgcactgctctgagcctcagcctccacacctgtgcaaagggaatgagccgccctccctgggggcacttgtgaggtttagagagctccaagtcctggctcagaaccagggccacatggggtataagcaacgggaacagttctctgggtgttcttcgcaataaaggaatcttgggcggcatccgtgggaaggcaggctgctcaggccttcctcatgtccagagctctacttaagagaaggctggagaggggaggggaggggagtggagaggaggggaggggaggggaggggagggaaggggcaggggcctgtgctgggaacccggctggctgaaggagaggaaccactgaggctgagcatgaaggccgctggcgaggtgggagccccatggctgctcctgatgtgtctgtcacagttgggccatcagtgggtagattcctgatggggaatgcgtgcattcagcctgcagatccatgcatggatgtgcagggacaggcaaggatagacccagagggaagactctcaacactggtgtgtcctcacaagtgagactgggtacaaggcagtggagtgggctcaggcctcccgcccgtccctccagcacatcctcctgcctatgcggccctgggccaaactgcccaaagacatggagctctgaagagcaggcacctggggcacagcatctccattcccaggggcctcttggagctgagctcgggtccgagtgcctgagagcctccccttcagcagcaggaggggacatactacagggcttggcgagggagcagagagggacatctcaggggcctgagcaaggaggagaggcagaaagggggctgaaggcatctgggaaatgacagcaagtgaccaccaggcaggctcaggggccagggtcatcagcaggttcaggaccagatcagtagctggggcaccagttcagcagcacacacataccctgacggcagtgtgtggaatcctccagggctcctgggcctgaggtcctggcctagaggtgctggactctggctcctggcagacagcctcccagcctcacccacctgcacca

SEQ ID NO: 18714 - DNA, 1046 bp, Artificial sequence
  DNA replication origin
gctggcaattccagtctccaggcctattcggaggctccttcttcccctcactgttcactccttgtgctaggatctctgtatttcccttccaatgcctttaggtctggtttctggcactccagtcctagattgagcacaggatgggtctaaggagcacctttgctatcacacagggcatggaaacccgtttcttggggtgtccctccaaacactcctggttctccccggtcgcaccatctcctccccaatggccggtgctccccagtcacattgtcttctccccgcagtcctccgtccccaggagcatcccggggcttccaaatgccaatttcacgtgcaggtactgtactcacttatcttgctgactatgccaaattaagtgtgtgtgtgtttatgtgatatatcatgtggggtatgtgtgtggcacatgtgagtatggtgtatgtgcggtgtgtatgtggtatattgtgtggaagtgtgtgtgttgtgtggtatgtgtgacgtattatgtagagtgtgtgtggtatgtgtggtgtgtgaggtgtgtagtgcgtgctgtgttatgtggtgtgtgtgatgtgtgtatgctgtgtgtgtattttgtgtgtgtgttgtattgtgtagggtatgtgagtggcatgtgtttcacgtgtggtgtactgtttggggtgtgtgtatgctgtatgtggtgtgtttgtgctgtattgtgtggtatgtgtatagggtgtactgtatggggtgttagtatgtgtgtctgtatgcgatgtgtgtggtgtgtggggggtgtattctgtggtgtgtgtggtgtgtgtagtgtgtggtgtgtgtagtgtgtgtgtgtggtgcagtgtgtgtggtgcattgtgtgatgtgcatgtgtggtgtgtgaggggggtatattctgtggtgtgtgtgtggtgtatatggtgtgtgtggcgtgtgtagtgtgtgtgtggtccagtgtgtggtgcagtgtttggcatgtgtgtggtgtgtgtgtggtgtattctgtggtgtgtgatgtgtgtggtgaaatgggtggtgtg

SEQ ID NO: 18715 - DNA, 1069 bp, Artificial sequence
  DNA replication origin
gtgtgtggtgtgtgtagtgtgtgtgtgtggtgcagtgtgtgtggtgcattgtgtgatgtgcatgtgtggtgtgtgaggggggtatattctgtggtgtgtgtgtggtgtatatggtgtgtgtggcgtgtgtagtgtgtgtgtggtccagtgtgtggtgcagtgtttggcatgtgtgtggtgtgtgtgtggtgtattctgtggtgtgtgatgtgtgtggtgaaatgggtggtgtgtgtgtgtggtgtgtggcgtctgtgtgtgatgtgtgttctgtgtgtgtgtttgagtggagagatccttcaacctgaaggatcctgagcctttctcttcaggacaggtgaggacaccttagctggtggctgtgtttcctgcgctggggagtcagccgagcggagccccaccatggctaggtgttacatatgttcagtatcacctctgacttcaaaaaagcgagcacccccatttccaggaatcgcctgggaaccgtttcaaaggagtcgtgccagccaggacagagagctgggaagcgggaccacaggagcaactctgaacagtcattggatgcgctctccaaccagctgctctgctcacctcaaagcacacaccaaagagagggagaggctctgagcccatgcgggtgaatcagggtgagccacgcaaatctgctggcccctggcagtcatggcagatgctgccaggaggcctccctcattactcggagtaggcttgaagtcatgctttccagtgtgaggtgcgcgagccaagcaaaggaggaggcctggtcaggaggggggagttccctgtgacaatggaatgaaaaggctgctgcagggcccagctggccctgggcacggtgtggggaggggaatccgcaaaccaggcagagccctccagcccagggcgttagttgttgacccatctttcctccccaccaccagactgggagtcctcatcctttgcgctttgcagtttaggaagcaatctctgaagagcacaaacctatttaacaatgataaaacttcggctttaaagggctgatgtggcacactggcactagagccaggacaca

SEQ ID NO: 18716 - DNA, 1827 bp, Artificial sequence
  DNA replication origin
caggtatacacagcaattctaaatttgctaatagcctcattaaaaagcaaaaggaaacaggtgaaattaattttcataatatattttacttaacccaatatatctaaaatgttaccatttcaaagtttaatttgtatatgactgagatattttgcatttctcttcatgctccgtcttcgaggtctggcatgcacccggcactcacagcacgtctcagtgggaccagcccggcttccaaggctcagcagccactggagacagcacaggtctagtgcagttgctctcaactctgctgtgcattacaatcacctgagagctttgaaaaagtgccagtttccgggctgcctgggaaccccctcatagttacatgggaatctcagggaggggtggggcagacaggggtcactgatcctggggtgggaggtgtcacagccccacggaagggcttcccatcagagggaacagcgtgtgcaaaggcaggggagtggggaagagcaatgtttagggggaactgtgagtggtggtgtgtgtgtgcagttgtgtgtgtgattgtgatgtgtgtgcacatgtgtgtgttgtatgtggtatgtattatgtgtgtggtgtatatggttgtatgtgtgtggtgtggatgtgtttggtatgtgtgatgtgtgcagttgtgatgctgtgtgttcatgtggtgtgtgtgtgtgtggtgtgtgtggggtgtggtgttgtgtgtggtttgtgtgatgtgtatggcatgtgtggttgtgtgtatgtgatgtgtgtgtggggtgtgtgcactgtgtgtggtgtgtggttgtgtgtgattgtgtgatgtatgatgaatgtgatgtgtgtggttgtggtgtgtgtggttgtgtgtgtgacgtatgtggttgtgaatttgtgtgtgaggtatgtggagtgtgtgtattgtgtatggttgtgtgcagtgtgttattgtatgcgattatgtgatgtgtgtggttgtatgtggtgtgtgtggtatatgtgtgttgtatgtatgtgatgtgtgtggttgtgtggtgtgtggtatgtgtggttttatgatgtgtgtggttttggatttgtgtgtagggtgtgtgtagtgtgtgtggttgtgtgtagtgtgtgattgatgtgtgatgaataagatgtgtatggttctgtgtggtttgtgtggtatatgtgtggtgtgcatgtcgtgtgtggttgtgtggttgtgtgtgtggttgtatgatgtgtgtggttgtgtgtggtctgtgtggttgtgtgtatgcgatgtgtgtggttgtatgggtggtgtgtagtgtgtgtggttgtgtgatatgtgtggttgtgtgtttgtgtgggggtgtgtgtattttgtgtggttgtgtgtatgtgactgtgatgtatgtgatatgtgtggttgtgtattgtgtgtggttgtatgcagttgtgtgatgtatgtgatgtgtatggttatatgtggtgtgtgtggtatgtgatgtatgtggtgtgtatgtggtgtgaggtgtgtggttgtgtgatatgtgtgtttgtatgtggggtatgtgtattgtgtgtgattgtgtgtatgcgatgtgtgtggttgtgtgtgtggcatgtgtggttgtgtgtgcgatgtgtgtgtttgtgtgtggggtgtgtgtatcatgtgcaattatgtgtatgtgatgtgtgtggttgtgtgtgatatgtgtggctgtgtgtgtgatgtgtgtgtgtggggtgtatgtattgtgtgtggttgtgtgtgtgatgtgtgtttgtgtgtggggtatgtgtagtatagagggtgtgagttatgtgtgtggtatgtgaacccggctcgcc

SEQ ID NO: 18717 - DNA, 2712 bp, Artificial sequence
  DNA replication origin
tgcagaggcatccccgctgtcagcccaggatgctggtgtgcaggcggccccagtggcggcctgcaaggctgtggccaccagtccgtccctggaagcgcctgcagccctgcatgtgttcccagaggtaactctggggtccagcctggaggaggtgccgtcccctgtgcgggatgtgcgatgggatgctgagggcatgacatgggaggtgtacggagctgcggtggacctggaggtgctcggtgtggccatccagaagcacctggagatgcagtttgagcagctgcagcgggcgcccgccagcgaggacagcctgtctgtggagggccggagggggccactgcgggctgtcatgcagtccctgcggcgccccagctgctgcggctgctccggcgcggcccccgagtgaggagctgtggcccttggagctggcctgggcccactgacttagtcctagacctgggccagggacggtgggggctccgtgccccctggacccaccggcagctgggcacatctctcacctgaatattggctgcctccagaccacaggactgcagcctggggcttccggccctacacagctgggctgttttcttaagggcttgatttccaagggccacatctctgcaccttccgggctctgaactttgagacagggctttagcactgtgcagaggggagatcctgagttttctgtaaaaaatgaccttttgttcactccaccctcagaactctgccatgttgcctcgtcagactcttggtggctttatttgaaatcagtgctgagaaatagtgaattctcgacatgaaatgtgaggccccagtgacagggactgcccaggtctttagggaaggggactgatgttatcagaggcctcctgtgtgccacatactgtgcttgtcctgtcttcacctcttcatcctggcaagccttcatttggcaaggctgtagccgatgtgccccacgctggacagcttgaagaggtgggactgagatccaaagccagggccagctgagccgtgggtgttgccctgtagcatgtgcccggtccagtcagtgcagtcatgtatgaggagaatttactgagctcatactctgtgctgggttctgtggattctgtggtgaatgagacagaggctgcccctgccctggctgagctcatggtgtgggttggggatggcaggggaggatgctgaccattacggagggctgccaggcttccagggtcattgtgtcagaggctggcctgaggaaggggagaatgggtggccacctgccctaatctcagttacaaagcctaaaattgcactattttcacctcattctgtcggctgaaggatttctccccagctggtgcagtttgtggaaggagggagggcaggaatggagggggacagggcaggagtttgccctggccctggggtaggggctgtgaggctgtgggggctcgcttgcccacatgacctgacctaggctaggcagtgggggccaggggccttggagagacagaaacatgggctttggcacagtctgacttcattgcccaaagatttctcgaggcctgtgaagaatgggagtgggcttgtgttcttgtcctgggtctttgtcttgaagatcctaagatcccgtgacacagccccccaatccacccgtgtgagggaccagagggctagtgtggggtcatggcccacgacctggcctgtttctggagcctcttctgcacctaggagcccaggacccccacagtggtggcttacttttccccatcctcaaggacctggtactcattgaggtggaaatgactcatgcaacagttggtgaatttgtaaagcaggagtggcatttcaacaggccacaaggacaaagtgacaaaggcgtgcgtcaggtcagatgcctcctgaagcccaacgatggaccattctcacccgtaaacatgcctttcccatatgcataggtgcaccccttgggattctggggctgtcagtccctttgtgtatggtgccagggcaggcagctcacgttctggggagtgacacatgggtatatgccatcttcatgcctggctccccatggagtctccaggaaccccagcctgttagggccacatgagagagaacaaatggctgtgggtgcatggggagggacctttcacacagggccatagctaagtagggtcttgaggatgcaggggttagacaggtgggtggagagagggcaggacctgcctggcagatggaacagcctggtcagatacttggatgtgcctgtcctgcctgggccataatgagtttctgcagtggcggctcatttggagcgtttgttgggttgggaggtgaccaggggtccccattgtgaagatcctgatgtaaatgaggaaaggaactttaagggaactgtggaaggggttctgaggtgggaccagatttcagtttagaaatatccatttggcttccagtggagatgtgccaggtgacaccaaggaggggcctgtttaggggcaatggagtgggcagctgggggctgggttcatacacgtgcacacacacgcatacacaggcacacatgtgtgcaatggatttggggaggaggcatttcaggatgctgaggtttccagtttgagcaagaggagggtgaggccactacctgggtcaaggtgaatggcatgttcagcaggtgcagaaagggccacctgccacagggtttggctggga

SEQ ID NO: 18718 - DNA, 1586 bp, Artificial sequence
  DNA replication origin
tgctgtggccagggccgaggtggcccagacactttgaccccactgctcccctcatatgctctggacacatggcctctttcctcctgcccactccgctctccacctgaacaccttcttgcttctctcactccaggcctgacttacgtggctggtcctccaggaagccttttctcatctctcaccctccgtgagctctcctgccttggtggtgccctccctcagaccccatttttggcactcagtgccctcctctgtgggtgtgttcttgtatttgcttgttctcttggtcaggcacacagcagataatcctctgagtgccgacgacacatcaggtcagtgctgggtgttggacagccagaggggagcaggccacaggccaggctttgccaacttcaggcctgtggggaggctgacagttggccaaactgttccatgcaggcccaatgctcagtcagggatgaaggctgcctggctggagggtcgggaaaggggccccaggaagagatgcagaagtggaaagggccagaactggctctaggctgcagctgccaggtccagggtggtctttatggctgggggaagtgacagcgatggtacggagggtgggggacaatgaggatgcaggtacactgggcaagaggggattaaatgtcaggcaggataggtctgattgatggtactgggtgggcatcttatctcactgctgcaccgtccccaggggtacagaaaggtctgaatgaatcccatgttccctagccctacagctgggcacgcagtaggggctcaggagatgctgtggaatcaatgaccagatgctgaatgagtccctcatggaaaaagctgatgcatggggcctctccttgcccctggagctagaggtaggagtcagggaaccccagagacatgccagctcagcaaggctaggccaaggaggatgggggtggttgtggaagcccagggtgattctcagtgtcctctggtcattgctccctcgtcctgtgaactttctctgagctcccactctgtaccaaggagaccctgtccacagtgagttggatactgccagtcccaggaggaagtagcccagtattggcctgtccagctgtgcccgttaagaggccatagtgcttccgtgctggttgaccaagagctgttatcccacagccccaccccctagggctgcagtttcacccccaaagccccagcagatttggctctctcccttcccctcccacacaaaccagccagtaaagagttgagagctgatagagtggcggcctccaggaccccaccctagggcagattctaactgcttgagactgatgatgagataatttgcagtgtcatccttgtgtctaatgtgagatgaccttgatttgaagtgtctggtgtcttgtcactcactgccttgcatatggttctgaccagtcaggcaggctgggactgaaggtggctccctggtgaacctagcactgtgggagttcatagtagaatcggcttaggtgctgccacccaactcaactccactccctccctttctctcttctgcaggcagccatgagctccagccgccccgagccgggtcc

SEQ ID NO: 18719 - DNA, 1293 bp, Artificial sequence
  DNA replication origin
gagatggggttttcgccatgttggccaggctggtctcgaactcctgaccttaggtgatccacctgcctcggcctcccaaagtgctgggattacaggcatgagccacagcgcctggcccaagtcccctctagttaagtggcaagcatttggatgatgacttatgtgtccggcaaaaccaaaacaggaaaagcaaacctatatgatcaggcaggaaaactggttctatgttaaaatatggaccttacctctcaaggaccaggcaggaatgcacacagcacaaacccccattgcacagtggggatacagcaccctccaggaggtggtttaatccaccccagagtgaacggggcctgataggaacactcagggccaactctgggcaaagcagcaggcagcattcctaaagggagggtttggaggagacaaaacctgcccttcacaatgaacgtgccttaagggctacatgccccgggtcacaagctgtgccaggaaagggttctggggtaactgtggggtcagtggccccatggatgaggctctgctcaccaggaagaggcctaggcgcccaacagcccctgagcttcctcccctggggaggatttgcccacaatccctggggggcacctaggtggagagggtgccccggcctagaagcagcctaggcggccggtgtgtccctatctgcacgctcacaagcactcatgccccagcctgggacacacaggcccgtatgcagtaacagcgtctacccagctgcactctgcacgccaagcacaggccgcccctgctgcggggccaaaggcctgaaagcaccgcaccacgcagcctcgcccagaatagctcccctcccgcccctcctgcacaaagcccacccggacttagggagaagggggctcaatacgggcccgaaacgaggctacagaccttctcaggagcaaaggcagcgactgcaggcaaatggggctgtgggccggggtaatgatgcgggacaggagaagccaaagggcagcaaggctgggggcggggtaggcggcgcagtaggctgagggaggggaaaaggaagaaggggagagggaggagcgatggcagcaggggtggaggccgaaggagacagggtcccggacagacttgtgaaaatgggaggatgggcagaggagacgtagaagaggggacaggacaggacaatgagaggcggagcgcggggagtgcgatgcggccaccgggggctctgggcgctgggcaggggccaggatgccgggggtctgagcgcaggcagcgggaaggagtgggttc

SEQ ID NO: 18720 - DNA, 1637 bp, Artificial sequence
  DNA replication origin
gcttccttgaaacacacagtgaggttcttggttcttgagatgtcctgggagctgagagccccaggtttggggcctggatctggcaccaactctcagtgtaaccacaagcagtccatcccttcttggggctcagctgacttcactaaagagggaatatgagtaagatgcctaagatgtggaagcagaggtcctaattcctggacaggggcagaagtgggtagtggcctcggcaaacaaatcccctatttgcctcctttaagcaggatccccctaccaggcagtgtgtgatggtgaggcccaagcctggggtctgacgtcgacacccctgtgggcatttggccaaaggcagccatctgccagaatctgagagctgctctcagacctcgctggagagggctacctggggcagtctgagtctctctgggcagactgaggtcctttgctacccaaacggggagaattagagatactgttggctcctgggcactggaagggaggaacgcaggcctctcagcacagggctgggccaacaagttgggggtcccggcacaggggacaacggagaagtgccaacattgggacccaattatgtgatactggggcccagagatagtacaggtgcctcataccacgtggccctgggtggacagcaggaatctattgcgagtggcgggaggccggggctgcctgtcctgcgccctgaagctggccagcggttgtggaaactgggggatattgagggaaccgtaggcccaggtcctcagcctcatagtgtggaacctggcgatcccagggcctgggctggcccccggcgtcacgggaccgggaaggcgctgtggtgctgcggggaattgcggagaagaaggcgggctccagtggaggtggctcatccccgcacggtcactgccctcgcccgctgttggggtccgcggctgggagactgaaggcctcaagtcgggctgggtaggggcacgtgggcagggaaaggggtggtagattaccagtcttcaggggcggggctggagatgcaaccctagggaaggagtctaccaggctgggctcttgaggggcaatggagggctccgggggccaggccaggccaggatcatggagttcaaaggactggagtgaggtttggggtccatgagagtggagctcagaggatgggacggtgggtccaggatttgggacctggggctggaaagtccgaggctagtggagaccaggcctggtatcccagacgaaagggccctataggaaacggggtctcgtgggcgggatctggagccagagaattgtgagaggcggagctaggatggagaaggcgagaggaaaggggtagccgccggcgcggagacctcaatgcggggcgtggtgcggagggggaactggagcgaggggcactggagcgagggggtggggctacgaggaggtggacttgaggggctgggtctggggccggagaatcgtggggagctgcgcctatacacccgggacggtggggttgcgtcggggaagtgggagtcttgggggttcgctgggcagcctggagaacaggcggtcgtggtgcgggcggggccgaaaagaccgaggacagtggggacccggcctgaggaggggtcgggaaggaggggtgg

SEQ ID NO: 18721 - DNA, 1211 bp, Artificial sequence
  DNA replication origin
ggcctgcatctcaatgctcagaacatcaggagcagcaagaaggatgagctccctcctgccacctgcttttatcttcccgtggaggaagattgactcaaaactcagtgggctggctggcagtgtaaggattttgcagatagagctgacaacgtgattttgcagaccccagaagctggtctgcaggaccagggcagggagctcctgttgggccctaaattgtgagcccaggatgtgtatgatgcatggacaatgtgggcagaagctggggcagctcatcccaatggcaagagcccttcatctgccattcagcacagcctcagccctggaggtggatagtggcgatgccaagctgaataagacacggccccctgccttcatggaggccctcggctgccaggaagagtgaggcagcagtctcaggcacagagtcccatattcggcatggtagctgcaaggaccatgaggacaaggaggggatgatgaagggtttcacagaaggcaagatgctgggggttcatcttgaaacatgagcagtggagaaggagggtgggaggggcattgagtatttcagacagggagagagcagcatggtgggagagcccagtgcatacgcagagccgtggaagtagctgcatcagtctgggcacaagcactgcatagagatgggtggtgggggggatgagaatgggaggggagcctggaagacaacagctgggaaggggagtgggtgcagcatggaatctgaagagctgagaggaggcccatgcagagctccagatgagaggtgatggagggctgggcaaggttttttgccatgatagagatggacagaggaggaacagctgtcaggacttggtgacacagagaaagatggggactttggaaaagcacagcatgggggtcgagagatggcagctctgggcctggcactcaggaagtgccagaagggattcccttttcaaaaaacatcccactacccaactccacccccagaacagcctgagtacagctcgggcgcaatcatggaggcagctggtgtggatgccatgccccattggggtggtcaggtgggggtgcatggcagctgggggaaggggtcaagatagctgacgggttccatgtaggggtcccctgagccttgctagctgcctgagtccagtgttgaggcacactgaactctagacagaggaaggggaaatgtaagccacccc

SEQ ID NO: 18722 - DNA, 1815 bp, Artificial sequence
  DNA replication origin
attatctgatgagcctcttatagagaaacgccacactctgagatgaattcagaagtcctttattagccggcaaccgagagacggctagtgctcaaaattctctcggccctgaagaaagggctagattttcttttatactttggtttagaaaggggaggaggagcctagctgaagcactcttacagaagcaaaacaggcaaaaagttaaaagacaaatggttacaggaaaacaaacagttccaggtgcaggggttttaaatccatcacaaggcgatagatgcgggggctttgggtaccatcaaccggacacaaatgtgggggcttagggtactatcaactgggcaaattcctgggaactgcggatatagcttgccacagtatcttatccattaattgcattctttgatgtgctgggagtcagcttgcacaagttaagtccttgaggaaggggggtgggtaaggggctgcaagtgaaggagccaaaatggagtgtgtctggctctctcagctaagggacagtcaattcaggttaaaacaaggtagggtatcacacttacaagagggaggcagaaagagttgatgtgaaatgacctggagtgggagaggttagaaaaggctgtgctgccggctttgaagacaaaggaaagggccactagctagcagcctctaggagctggaaacgctgggaaacagctcccttgcctccagaaggcacaggccctgccaacccagtttagattcccgaccccccgaactgtgagataacatgcatgtggcttaaactactcaatctgtggtactttgttgcaggggcaacaacaaacatacagacatctaactcagacccgaggccttgggtgggacccaggccccatttcctgagacacctgctcccacagcgacctggggtaagcagaagtgggggaggattctccagacaccccagactgtctccaagtagagcggagatctcgccagttaagcgcacagctgaggacagttactgggtgaagtggcctgggtctccgccttctcatgcccccaccgcccagaccctagaaggggagtggctgcggcctctgcaccctggcgctgagggctcccagacccggcccagtggggcaccccagttcaccaccctcctcgccttaggtgagccaaagcccaggcagggtggagcctcacgcacactgactgccccctaggacaggcacaggtgacgcgggggtgtgggacccaggctatgactctggacataaccttcaaggctgtaaaacgagaaggtccatccccccaaaacacgcactcccccacaaccaccccctccccccccccacacacacacactcccctgcaccacagatacacacattcctttcgctccccactcagacgcctcgaggcctcggcgggggaaccataggggcgcgaccagggcgcgccgaggtgtgaccagagaggacacgcagcgaccttactcccgcctttcccgcaaggcgcgttcgccagcctggactagtgggcacgggccctgcgttctaataatcaccataataataggcgctgggtgtacagaggggacccaggcgacgctggcctccatccgataaccaccgtaacaggggctgggccgcgccgctcctccgctctaagtgctctttacatgcttcttaagttaccggcaggccagccgcccttacgagagcccctcacggacattaacccaattgagaagactgaacccagcttacgaacgttaagttgtcccaaatcgcagggctggcgagtgaggagcctgaattggaacccaggagc

SEQ ID NO: 18723 - DNA, 1258 bp, Artificial sequence
  DNA replication origin
cggtgaaggctgtagccctgctctccgggatgggggtggtactctcaccccaccctgccccaagccgcagggagcccctggcgcccctggcgcccgggacccgccctggctggagccctgcggtttccgggagctcacggtcggctctgcgcccctccaccgccgggcctgggcctgggccagggacgggctggggcgggactgcggcctcggggcgctgggtccctgcccctgccgtgcactgcgcggctccccgcgccgcagctgggcaccagcagcaccacggaccgcccctgtgctcgcccgacggcgccccgcggcgctttaagagacggcctggcagcccagccccagccgcccagaccggcgagaccagcctgcgggagcagccccatggcgggtaagcgagcctcgcctccccagcccagccccggcccctctgcgacccttccagcacttgcctccgccccgccgcccccgctggggtgcagcgcctgccctgcccggcctcggcgcgctcttggaggggcactgggatggagtagacgctgaggcccgctcttcgcggtcagttgcggcttaggaggtgtggggggtccggccttctcaccaccccacccagtgcagatccctgagacctgaatgccccgcggccgcacgtcaccctaagggaggcacctttttggcccgccccaggtggccagcggttggaacccagcgtctgagcacccccggggcgaagcctcctaggtcccgcaaatgcggacgtgtgagggccagcagcaacggggtcttgcccccttttcctccccacctcgtccaccgcgtcgcaccaactcccctaagcgcgtgctcaccttgatagagggctaggggagggagcgggtgttagagaagagtccagccttgcagcaggttccagggccccagagggtagaggtttgattgcagaccagggggaaggtacctttcagggctttccttaactgactgcgtccacaccccagctcccctcctggcctcaacaggagcccaggggatatggaggttctggtgagggcaggtttgatttctactcagaagcgcaaggaaatggcttctttaagccagaatcccaagggcagggccagctgttttccaaggaaaactagaaggttctgcccagggctctcagaccctggggtaaacggcttctcctctgagagctggcggaacctagccagcagcatccctcccggaacccatccccagcaggcct

SEQ ID NO: 18724 - DNA, 836 bp, Artificial sequence
  DNA replication origin
gtagggagagacgtgcggggggtagggagggcggaaggaaggtctaggggaaggagcggagggggaagggaggaaggaaggcagcaatggaatgaaaggagaagggaggaaggactcgttgaatgcacagcctccccggtgctgcaccgacaggagcggctctcacaggcatggggcccccaacagaccctaccaggctgcgggaatgttgcggccctgcagggcgtctctgtcttttttgaggtgtctctggtaatatgtgataatgacagtatttttagacatttggaatctgatttaaattttagctccatcaccttctagctgtgggaccctgagaaacagcacatcctcccggatcctcccatctctcttgtccacacgtggggaaggctcctggtgggggggggttgggggggaggggggaagggggggttggggggagggggaaggggggggccttgcagatttaccaagctgatgtacaaagacctactacagcggtaagggctagctcctttctcccactctggcagtcactccactttgagaaacatacatcttgaaataaagctacaagtggagaggggcaggtgatttgggcaaatgattccatactaaatgttaggacaaaacatcctaggcaaatatcacaatccggcgtcatagtggcatactaaattcaaccaagaaatatacccatgatgttgaaagagccaggcttatggaatgtaaacagcaaactattttattcttgttttctatttaccaattcaaacttactctgcaggtcactcctccctgcccctgggataaaatctagggcatgttctgtg

SEQ ID NO: 18725 - DNA, 1717 bp, Artificial sequence
  DNA replication origin
aactgtactttaaacaacatttattgaacaggaattgttcaataaaattggctagccaagttctaatatatatatataaaacataataataattaaccaataataataaatacttaaacctctaatccatagattgcaaatgcaacaatgatagcttattttcttggggaacaggagtgggtggggacagagggaacgggaacaggacttttgctgaaaggagggatgacaggaacacaaggctgtgggtgaaaagaagaacaaatagaagaaacagcagagaaggcggctggctggggtggggcgggcgcctccctggccctgctccaggactcaggactgggtcccgcctgggccgcccctcctgccaagcccctggcctcttcccagggtgactggcccactcctagaccctaggacatctgaagggcaggagtcccaacggcctgagagggtatgggccaggagcagcaggctgacccatctgggcccaaaagccacctgtgtttgggggctggaatgctgtctagaaagagggcgccctgggaaaggggcgcacgagagtttctctcctgagaggcccccatgcaggtcgggtcaacaagggggctttatctgccttgaggcagcgctccctaagtgaagcaggcctaccccagaagcacaggggcttggctggcgcctgaactccctgtgcgaggcagcacctgctcatggagcccctcagcctgcaggtgcacacctggtttccaagtcctgcctggggccttgctaggtgggggacggacctggaacaggaccctaagcccaccccctcctcatacctggcggtccagggctccccgcccagtggagccagcacaggctagccaggcccccctcctgcctgacccccggaggccaagctcctctcctgcagtagtgccgccctgccagtcaggtagctctgggggcaggggcaaaggagaagggagggccgcagccctctgggaatggcctttctgaggcactcagtggctggactggggctctggcaggagttggggcattaataacacccccatcctcccctgggctctgcctcatctgaccctccagaaccccctgccccaagcccctacacacactgttctattcctcagcccctctcaacgccctggcaccatggggcccaatgcatgtcctcccctgagagggaacagctctggggcaacgggcagcggggtgccctccctgccaccaagatttggtgcctagagctggtggagggctggccgcacctctctggggcacaccaggtcctgctcccccagcctatggctttggggcggagcccgaagggagagagcaggggcggtgggtgggggaagaagggtgtttctgcggctcggtttgtggcaagaaagtttttttttttttcaactttctcttgtgtaaaaagttcacgaaagctcggcagcctctgcaaatgtcagcagtgtttcctggggcgggggaacagggaggggccccaggcctggcctgcaacttgcgactgaaggtggcctcttattgcttagaaacgcgtgtttcggtttaaataccagacagtaaaaatagagctcgaggaccgcccgcactgttgccaaatcagtgccagaatgaacagcttaaataaataaaaaatcgaaatatttacttctggataaaaatcgcagtaaaaccatttgcctttctt

SEQ ID NO: 18726 - DNA, 1521 bp, Artificial sequence
  DNA replication origin
cagccgcgtagccgaagttcaggccgcgcgcgggatagcgcgccgggccgtgggtgtgcctgggcgcggcgtccgggcagggcgagggcaggcccagcatggccccgactggctgtccagctttcagagagcttcggggcctcgccggggtcgctgggcccgggccgccgggccgcctgctgggggcgtaggccgacttgatgtccagagagaaggagggcttgaggcggctggtgtcctgcaggtggtccgaggagaggcgcaggctgcgcaggccctgctgcagcgtgctggtggccgtggggggcgccgggggcttcctgcccgcgctcgggccgccctccctggcagccgcactcctggtggcagcggtctctgaggtaggtggtggcagccatggcagtggggccccggccgcagggctggggggaggctcctgcattcctgagggggtgcccgcgtcgccctgcacggcggccagcagcttcgggctgctctggtactccagcagctggcccaggaagttgaagttgggcgagatggacgggcgctggtccttcacaaacctgtaggcgtcttcggaggacatgcccatggtcttcatgatgtaggcgatggcgatagtggcacagcaggagatgccggccagatggtggacgatgacttggcagctggacagcttggctttatcgatgaactcgatggacttgtccagccagggcagcagcttttcacagtagttgtcgttgatggggacctgcaagaagtggctctggtagatgaagtcaggcttggggcaggagttgctggcatagaggacgtagcttattccattctgcgtcatcagatccttgttcaggacgtcttcctgcgagcccaggtagaggtgaggcaggatgagggtcaggcccacgctgggcacgagcaggcaggactgggagaggctcatgggtagcagggcagcaggctcgccctcgcagaggtcggggaagcaggaggagaaggtggcgaagccccccgtgatgatggccatgctgtggaagcagccggccacgctgtggaagcagccatccagcttgctcagcaggatggagaggaagctgtctgcggccgcgtgctctggtcatagaccaccacgtcctgtggctcagtggcctccacctggctgcgtgcagccggctggatgaactccacaatggtcaccttgcccttctgcaaccgccacttcaccagcttggagcagcagatgttgacggagctgagcacatgccagctgttgtactccaggaaggagtgactgtcgatgaccaggcccccccaggcccgccccgcagcaggctggccagcttcttggcgtccatcaccttcctggggagccggtccccggccatgatggggcaatgggtcttggggagggtgacccctgaagtgaggaggggctgctccgacggcccaagtgtggcctcgcactgggaataacctagcacatgatgccggaccttgcttgcgctcacctcgggg

SEQ ID NO: 18727 - DNA, 949 bp, Artificial sequence
  DNA replication origin
ttaggggcttagagggcaggcgtgggtcaggcgagcattcctggagaacacagtcctcagtggttcaggatatgagcatagctcagagagctgttgacattatcagcctggcctgggagagggggacccgcacagggtggtgcacagggcccgcagggaatttacagcggcgtccgcggcgatgggctctcagtgccttggaagaccggtagaggcaggttctgtctctcccggcctggcaagcagagggccgcggcgcagggcagagtgccgcggcgcagggcaaagctccagtgcgcaggctcgcgggcgcaggtgggattggatagcgacgaaggccggcaggctaggcgtggacccaactggcgaggctgctggggttgcagcgggacagttggggcggccccgcaggcccaggtgaggaaaggtggctgggggccaggtgggcagggggcgtgcgggaggccgctgcgccgggctgtgggagggcgggcgtgaagaaggaagatgccgttgacgtgcaggggtcacaaggcgtgggttgtggccctggcccgggagactgcccgggtgggcctgagctgtgaagtagtgtcgctgcagccagagggcaggacgtgattctggccgtgtgatgccagctgcactgtgacgcgtgttggggcgcctatgcgagacgggaccgggacaggaaccctgtggctctgtggtaggggaatgccaccaactccctgaggagcagccgtgtggtatgattggtaagaagccatcatcaggcgctgagacagcccagaacttcccaatgactcaagggcgggtggaggtcgagggacctagaaagaaagaacatgaattcatcaatccattcagcagctattttgaacgcctcctgtgtgccagatgctgttctagaagctcagaatatctatgaacgcgataggcaatgccc

SEQ ID NO: 18728 - DNA, 1130 bp, Artificial sequence
  DNA replication origin
ttgtcctcacacacgcgcacatacacatgcacagagctgtgaacacacacctcaggcccctacccacaccttcacccgcacacaaacgtcttctagcttcttaccccttggatcctatcttggagctgagcatcagcagccataaaaccatgcatccttcctctttccaaaagccaatttggggattgtgtgaggacagccaggtagtctgaaatggaaagggggtgaggtcacatttgctaagggcatgatagtgcatgccaggctccaagccatgagggaggtgtcaccgtagcactgaaaggttaagagcttgcccaagcccacccagagaacacaagactgcaagccccaggctgtgcagctgtacggcctggttcctacaagctccacagactattccatcataaaaaagggtttttctggatcctttaacttccttcttgaactagattttatttgaaatggaatcaacttgactcataattctatttagggtcccgagatgattttctaagtgacagcagaacctgcattctcagcagccattgtctaacctatgctgtcctcctcctccttctcctcccagcaacggtgtgtgtgtgtgactgtgtggtttgtgtgtgcacaaatgtgtgtgtgtggttgtgtgtgtatatgtggtgtgtgtggtgatgtatggtgtgattgtgtgtggtgatgtatggtgtgatgtgtgtgtgtggtgtgtagtgtgtgtggtgtgtgtgatgtgtgtggtatagtgtgtggtatagtgtgtgtggtgtgtgtgtgtggagtgtggagtacttgtggaatgaatgtgtggtgtgtgtttgtggtatatgtgcggtgtgtgtggtgtggtgtgcatgtgtggtgtgtgtaatatgtggtgtttgtggtgtggagtgtgtgtggtgtgtggagtgtgtggagtgtgaagtgtgcatggtgtgtatggcatgatgtgtatgtgtgcatggtgtgtatggcatggtgtgtacatgtacatggtatgtgtgatgtgtggtgagatgtgtgtgttatatgtggtgtgccgtgcatgtgtggtgtgtgtaatgtgtggtgtgtggtgtgtaatgtgtggtgtgtgtggtatgagtgtg

SEQ ID NO: 18729 - DNA, 1291 bp, Artificial sequence
  DNA replication origin
cgggctaggcctgtgcatcctctccccacctccccatttcctcccttcccctgtgccctgggccaagacacagtgccaagcgaggggactgcggttgctgtggaggcaggaaagcccagggcccggctggaaggtcatgtgggaaacttctgcttgaggggagctgctcaaacgggtcactgggcccctcgggtaccagaccttgttttcctgcggcctcctccaatggataaggggcactggggtaggggcttggctccagcagccaaggcgtgaacaatggtctcgctggctgccccgtcatgccccctcctcagccgctgccctcccggaggaccaaagctgccatgtgaaagcgatttctctgaaaggcttctctggggaaactgggcgtcggggcctatgctcaccacactccctgcatccctcctttctgtacagaaccctgagtgtgggcgggagggtggataccacagagggtgttggggcatgggtgcttctgggtgtgggggctcagatgaagaggtgagtggcctggtgggtccatgtgcaatgggaatggacgagggcctcggcgtgagtcttccataggaacgaggggtcagggctgtagggggactctgtgaggctgagtatgcctgtgcaggtggggggctgtgaagatgtgtgggaggctgctgtgaagggtgctttctgggaatggtgctgtgctgctgcagtttgcttagagggcagattgagtgggagtcaggcaggcagggctgcgtctgcaggttgggtctgatcacccaagcctttccctgggctctttctcaaggacagggaagccctggaggttgtggagctggtggtgagaatgctcgagcattcttggcaagagtactggagtgtgggtggtgtgcgggatggatgggtgcaggagagtgcagagataggccacgtggttgggccctgggtatgtgtcctgttgggggcgtgaggacctggttgaggaggaaggcacaaggggcagttctgtgggggtgagagccatgggaggtggggcaggaggactatggcaaattgaacacagagagtggaggtggggagcatccaggtaaggtgagtctgggccagtgtgtgcacactgcaggtgcttgttaatttgttgattggctatgtgattgatttgttggtggtgccagtgggcacagggggtcctcaagagaggtgtcagagcacgtttgtatgttagagaatgagaaatggcccatgcatgcacacccctatccctctcccaccccgcccagca

SEQ ID NO: 18730 - DNA, 1142 bp, Artificial sequence
  DNA replication origin
ctctgaacccatcagcttctatgcattctttctgatggctggaagggcttctctttggggtgtttggggtgttaggaagtgtgagatgctgtgaggctccacggaatgggtggacgggtggcctctacatggtgtggcagaggaagcctccccccaggtggccctgctgtcatctctgcgccccagaaccctggcctaaccccaggactccacaaggcctgctgagcagccaggctgttcccccatcttgagtagccactctgtcaggtcatgcctggcgggaatgatgaactttgtgtcaactgctgattacagaaggctggggcaggtgctggaatgcctcttgggtgaagctagggaggtgctggccctgcctccccaagccaggctcacaggccttttggagtcctgattttggactcccacagcaccccgtgggacctggagatttttttctcttcaacatccatgtgaagatgcttcctgaggaacttccatgagctcagcactagggcaggtagttctggggatgcagaaaataagagcaggggtgtccaaagctggttggggggtggtagcttctggggactgagagtaaggtcagggcacaaggtgaggacagaggggcaggtgggaaatggcagcgatggcagcgctctcactgggggaccctagctgggcctgagtggagaggcccaaaaggcttcctggaggtggtgactgagctgggaaggaagcagcacaggcaaagaaggacaggctttgcaggcagggctcaaagagatggaagaagagaggggagcagccatgagcttcccaggaactgcaagtgtctgggtgaagtgggagttcaggatacccctggacttggaggccttcagacaatcacagacagcaggaccatggcagcagaaccctgggagagaaggaagaggcagtggtttctgctggctgctggagcagagtggtcttgcaggcagctcagaggcccagggactgtcatgggcagaggcatagggatcggtccttgctgaggctgggcactgaacaaggtggtgcatgagacaaagcttggagtccggtcatcatccccctcctcaagctgccaccctagctggagctggattcaggaaacgacagcc

SEQ ID NO: 18731 - DNA, 939 bp, Artificial sequence
  DNA replication origin
tcgttatctcagccaattaatccttcattctcgcttgttcagtttagctttggcttctatcgtccatgatgtctgagtaaatcatggaggagtagcaaatcctgctagaatcataggaaactgacaactgctcagagctgagagtttccggctgtgaacttttctaccctcctgactcatgatcggggctcagaagggaggccagaggaaagaaggcagtggaggggcttcatgccatcgagggcatcacccccatgtgtcatggtccccttcctcccctcccatggtcctggagcaaattccctaactctccagacaccttccatgggacagactctcatcagccactgtccccccatgagcctggggcagaagacagccacctgcaggacagctctgcacagggctgtctggagcaagtcccattcctaaggggaaggaaagggctgtggaggcaggggggcttctgagagggctcctgagggagacaaacttgatcctgggactcttgcaggtggagaaaatcaagggtgggtctgggggatgacatgtcaggctgagagaacggctgaggaggcctgtccttgggaggaaggagtatgtgggcaggaaatgagaagacacgcaggggcctggaagagaggtgtgaaggaggggcagggaccatgtgttggtgtctgacacaggcatcatgccacggaaaggagacaggtgaggtcccacaagcaggagggtggcaggggcacgtctgtcataaggaagattgccctgtagccttgaggaaggagcctgaaggcagtgggcctggcatagcgaccagcagcaagagagcatcaagacctggatgagaaagtgtccgtgtgcagagcaggcagagggggctccaagagatgagcttcacaggactggcagccggctggggatgaggggaaaagaggg

SEQ ID NO: 18732 - DNA, 986 bp, Artificial sequence
  DNA replication origin
ggcagcagggcgctggataccgaggtccgcgcggggcgaggggcttagcggagcaggcacccgggcgcgcggtccgtgggtaccggcggcccgagcccccggccagcggtcacagccgtccggagcagcgcagagccgagccgagcccgagtcggcgcgctgccttggcggactcgcgccgcgaaagtttgtagcccactgcgcgcccggcccggctgcttcgaggggcggggcggggcggccggctgcgccctcgaggggacccggctgcgcgccccggacctctggggctgcagctgacagggtcgtccctggcccggctgccgtgtgcgtgcgcccgtgtgtggcagcgtgcgcgcgccggggtgtgcgcccgcgagtgtggggggcgtgggcgagcgcgctccccgctccccagccgagagcccgagacccagccccgcagccggctcctgtgtgtcggcgccgcagcctgccctggctgcgaggggggctgggcggcagttggaggggggcctgcctgctgggttgcccctgcaatggcatgcgatggctatgtgattgcaagatgacagctcccctgtgaggaccagagaggggatatgtgtgcgcccagttgcctcggagtcagcgtatgtccaaaatgtgagagtgtggggaacagagatcctctctgggctgactccgtaaagaaaagccctcaccccaaagctcatgccacccaagggaactggaacaagatcgtgattaaaactcagaattagctcattaaccagccctttatttgacgagagtaatttcagttgttgaagaaacacatcaaaggtccttattaatctttggacatgtggccttcaggattgcaggaataagacatgctttcaatttgcctttaaaaacatttccaaagcatcagagcaggaagagagaaagcagtggctttcctaagaaggattcccagtgaagtgagggtgtagtgagtccct

SEQ ID NO: 18733 - DNA, 951 bp, Artificial sequence
  DNA replication origin
acggctgtgaccgctggccgggggctcgggccgccggtacccacggaccgcgcgcccgggtgcctgctccgctaagcccctcgccccgcgcggacctcggtatccagcgccctgctgcccgggctctccccgcgcgccctactgccgcgaggtcagtccgcagcctccggtgcgccagcgctcgccttcctcctcctggacttcggccctttgccgccctcaccacgccatggctcatgtccccgctcggaccagcccgggacccgggccccagctgctgctgctgctgctgccgttgtttctgctgttgctccgggatgtggccggcagccacagggcccccgcctggtccgcactgcccgcggccgccgacggcctgcagggggacagggatctccagcggcaccctggggacgcggccgccacgttgggccccagcgcccaggacatggtcgctgtccacatgcacaggctctatgagaagtacagccggcagggcgcgcggccgggagggggcaacacggtccgcagcttcagggccaggctgggtaagtagagggtgccccaggaccccttctcctcattctccaccttcctcacttttctgtctccccacccgtgcacctctacttttcctcttctagccaacgggtgagtggttcattcattctttcactaatgattcactgatctctccatgccaggccctgaacctccagtggggcaccaagagtggcagcaggtggcacagaggtcctgcccctggggtgctcccacattgctggacatacacagactaccccatacacaaggctgtaagcacagagagtggaagaggggacataggccaggggagtatccctgtcatagggtcaattatgtgggcattttacaaatgagaagggcacagccagtgaacataggcagccctgcagaagctccaggcactgg

SEQ ID NO: 18734 - DNA, 1280 bp, Artificial sequence
  DNA replication origin
gccccggcagctcgttgtcctggaggggcccagtggcctgcgcggctcggcgcacgcgggggtccgctgagttgttgggggctgcgcggggctcggggtctccggcagggaaggggtcgtatctctgcagcgtcactgccacgctgttgggctccgagatggccagatcgttggcatagactaggatgtagggcgcataggggctgggccggggcacccccgggtccctctcctcagaatccagctgggcggagaggagcagctcgccatcccggcgggccgccttgacgatgggggagatgtccttggcctgccacaggccgcgcggtgggggcgccagggccatggccccgcggagtagcccctgtgtggccgtgttctgcgagaggctgcggaagagcaggtgctggcgtgtgggcgggcccaggggcagcgggcggcctgaagcgttcttggcccgcggcttgcatagcacctcgagcgctcgaggccaccgaggcggctctgagtagaagtggaaagtggccgtaaggatcatttccgagtcttgcatggaagtcaggttgaagaaatacacggccttctggtcgaccacttctgtgagggaaggagagaccacaggctgtgaagttctcgctcgtgctcctgagggtctcccacccagggctggaggagcaaacgcccaccgatccacactttcaggaccatcctcctcccccgctttgcttccctcctttcgtgtaatcctcacatgaaactgatgagggcgccctttgcaatcctcagtgcacaggtgaggaattaaggttgagattgtcaatatcccgtagcaaacaacaacaacaacaaaaagcaacagcaaagaaataggggcagacagggaggcattcgggcctgctggactccaaagctcctgtttgctccccctgccctctactgcctctgcatgcacaaatgaacaaatgtcactgacaccttcattaagtgctcaggatggcttgggttgggtccaagccctgcatcaaggcagcccctcctgtatttgcacagccctctatttatgcaatcagtttttaaatgcaatcattaaatacacttcacattaaacccaaacattcttccaaaagagacgaaataaataaacgctcatgctttttgagcacctcctaagggaaaccaggatcaaaagtacagccatttaggcatctgctctttgttctgcctgaggacttttaagattgttttaacaagaaaagagcagcatcaggattacacaaggc

SEQ ID NO: 18735 - DNA, 965 bp, Artificial sequence
  DNA replication origin
tgaccagatcttcctcggagaccaccgtggagaagtccatgctggccaagtgctgcagcagggtgggcacacggtccaccagcgtgtagtagtccttcaggacctcctggaggcagtggactacccctggaagggcgctgcgcagagtgaggatggccagggctttctccagggcctgctcggccggagtccccacacagggcagcaccccgctgccctcccacgtctggctgcctccaccaaggggccccagggacctggacacgggcaccgtgaagaagaagtcagactcgcctatcctcagcttccggaggtccagggcccctcccccagtccgctcgcccaccacgatggccctgcgcatctgcttaaggatgtgcgcgatgtcctcggccacgcccctggtctggctgctggtgaggaccaccacatccttgtcggcaccgtacctttctcccaggacctggggcaaggtccagatctccgtggtggtgttggaggggcggttgtagatagtgtccacgtgcaggatggtgttccctgggtgcaggtaggagatgatgtagggaatgccagagacctggcctcctgtgcagtgccggagatccagcactaaggcggaggtgcccatgagattcccccacacgtgggccaccaggaactcccccatcatgctcagcacctcctggcccgggacgctgtccacccgcaggtagcccacattaccctccagaacctcatggcggaggcccctttgcagccaggcaagcagttcctcttctgagaggctggtgagtgctgggacttgtgggggaggctcgggggtgctgggctcataggagatgaccaggcgaggatcgttcagggagctctgcaccccggctgtcagcacactggccagcgtctgcgggtctgagatgctcagaatctcatggctcttgatggcctgctggatggcttcctgc

SEQ ID NO: 18736 - DNA, 879 bp, Artificial sequence
  DNA replication origin
caccagctcgccagggctgtggaacactagcaagcggtggtccccagacacctcctggaggtctgctgtgagctgagaggccagagactccaagtccacagctgtgcggtaggcgccctgggccagcttggcccgcaggagggcactggtctgccccacgacctctggccgagcatagtgggcctccagcaggtgccctgtgccctccaccaaggcccccaggctttggtggaactccagcacttcctgggctttgtccagggcctcctcggccagcacgatggcatcgggcaccactccaccacccagccaggcctcgccgtgattgtcgatgaaggtgaggaccggcacggtgagcgcgaggctgccttcgggtgtgtccagcagcggcaccgtgcgggtgtgcagcaggttgcccgcggtgatctcacctaccagtgtggcccagcccagcgactgcataaggaaggcgaactcctccgcggccgtggcggtgcggtggctggtgagcagatacaccccacgttgggtgctgtagcgtgggcccgggagctccatgtggctgaagtgctcctgcgtgatgttggtgcggcgatcataggtggtgaagaggtgcacggggccggcctcagggccctggaagtaggacaggagcaggggcacagcagaggatggccctccagggttgtggcgcaggtccatgatgaggtgctccgtgtcctgtagcggctcccacacctggcgcaggacatatggggccaacacacccaggacggaggcgtcagcaaaactatcgaagcgcaggtagcccacattgcctggcagcaccgacacctggaacacagagtccaccagtgcttgccggatagcctcgtcctc

SEQ ID NO: 18737 - DNA, 1022 bp, Artificial sequence
  DNA replication origin
gatactaacaggaaatattttccccttggccctcctatctaatgtacataaaatcattactttcaaatgccataattactgccataaaatgtctaatgtctccctcaggagtaattaatttcatttctgtacatcagtggcattggcaactacatattttagaaatttactgttaatttcttatttccaggctccctcaaatgtttcaaagccctggcctcccactgtcttcctacaaccctgctctgaatcctgtcccctccctcccctgcacctggcattgcatagcctgcccagaaggcaggtgtgggtgggaacgccccctaaatgcttctgcaaggcttagcttcctgctgtgctgtctgtgtctattagtaaaggcaaaatgtcaaggaaaggattcaatcaaccccttgtctctaaaaccaggtatgttcttttagctcattctaaaaactcattataatgtgatcatttggtattgttttgtttcccaggaaaggcagtgaacaggatacatgtccagatctttggatataatctgttggagaaaggatctggggctgatgcatggttcttaccctactgcccagcgcaagcccgggctgagaataacagcaacacaggataaaccccgggagagacagtgggagggaggaaaacaactgcagcctgaaagtcaccctaggagaaaaattcataggcagaattcttgagtgctgaaaaaacaggggggagagggagaaggtaggggagaagaataaacaaagagaggaaaagagagagggagagagactgacacagaagaaaatgaaaacaggaagacaataaagaagagatagaggagaaaaagtgagagaagagaaagggaacagaaacggggatgggactcggagacgacgtgggagagagaggaagctggcgacattgggaaggaaaggaccccacagtcaaaggcaggactcaacaaccctgtcctggggaaaggctgatgtggaagtgagatggaccccgccgcccgc

SEQ ID NO: 18738 - DNA, 2984 bp, Artificial sequence
  DNA replication origin
tggtttcaggggttctggggtcacttctctctaggagccagggcaggcctcaaccccatgtccagggcatctcaggccagctgtgaccagccgtggcaggaggtcctacagaagcccaggcctcctagactctgtgaacgtgtggacagcttcccttggctcatgtgatgacctgggaactgatgagaaacttcccacaggtgggatcacacggcagtcacatgctgaagtcccttggaggttgggcctgtgtctgagccccagggctgggcgggcagggagcacttaagggagcacttattctcctgccacatagctgccagaaaccacaaagcagcagcagggtcaggagcagggccggcaggacctggatgattagtgggttgctagtccagccctctggttgacttgcctcctgtgatggaccagtgtcctatgacggcagatgggtgctctctgatgaacaagtggtctgtgatggacgggtgctctgtgatagatgggtggtgtgtgattaatgggtgctttgtggtgaatgggtggtctgtggtggatgggtggtgtgtgatggacgggtggtttgcggtgaatgagtggtctatgatggatggatggtctatgatggatgggtggtctgtggtggatgggtggtgtgtgatagatggctggtttttggtggaagggtgctctgtgatagatggatattctgtggtgaatgggtggactgtggtggatgggtggcctgtgatggatgggtggcctgtgatggatgggggctctgtggtgggcgagtggcctgtgatggatgggtgctctgtggtgaatgggtggcctgtgatggatggctggcctgtggtggatgggtgctctgtggtgaatgggggctctgtggtgaatgggggctctgtggtgaatgggtggcctgtgatggatgggggctctgtggcaaatgggtggcctgtgttgaatggctggcctgtgatggatggctggcctgtgatggatggatgttctgtggtgaatgggtggcctgtgatggatggctggcctgtgatggatgggtgctctgtggtgaacgattggcctgtgatggctggccagcctgtggtggatgggtgctctgtggtgaatgggtggcctgtgatggatgggtgttctgtggtgaacgagtggcctgtgatggatggctggcctgtggtggatgggtgctctgtggtgaatgggggctctgtggtgaatgggtggcctgtgatgaatgattggcctatgatggatgggggctctgtggtgaatgggtggcctatgatggatgggggctctgtggcaaatgggtggcctgtgttgaatggctggcctgtgatggatggatggcctatgatggatggatgttctgtggtgaatggctggcctgtgatggctggctggcctgtgatggatgggtgctctgtggtgaacgattggcctatgatggctggccagcctgtggtggatgggtgctctgtggtgaatggatggcctgtgatgaatggctggcctgtggtggatgggtactcagtggtgaatggctggcctgtgatggatgggggcactgtaatggatgggtgctctgtggtgaatggctggcctgtgatgaatggctggcctgtggtggatgggtgctctgtggtgaatgggtggcctgtgatgaatggttggcctgtggtggatgggtactcagtggtgaatggctggcctgtgatggatgggggcactgtaatggatgggtgctctgtggtgaatggctggcctgtgatgaatggctggcctgtggtggatgggtgctctgtggtgaatgggtggcctgtgatgaatggctggcctgtggtggacgggtgctctgtggtgaatgggtggcctgtgatgaatggctggcctgtgatggatgggtgctctgtggtgaacgactggcctgtgatggctggccggcctgtggtggatgggtgctctgtggtgaatgactggcctgtgatgaatggctggcctgtggtggatgggtgctctgtggtgaatgggtggcctatgatgaacggctggcctgtggtggatgggtgctctgtggtgaatgggtggcctgtgatggatgggggcactgtaatggatgggtgctctgtggtgaatggctggcctgtgatgaacggctggcctgtggtggatgggtgctctgtggtgaatgggtggcctgtgatggatggttggccagtgacagatgggtgctctgtggtgaatgggtggcctgtggtgaatggctggcctgtgatggatgggtgctctgtggtgaatgggtggcctgtgatggacgggtgttctgtggtggatggttgctctgtggtgaatgggggctctatggtgaaaaggtgacctatggggaatgggtggcctgtggggagtggttggcctgtggtggatgggtggcctgtgatggatgggtggcctgtgatgaatgggtggcctgtagtggacaggtagtctgtggtggatgcatgttctgtgatggatggatggcctatgatgaatggatgttttgtgatggatgggtgttctatggtaaattggtgttctgtggcgaatgggtggcctgtggtggatgactgttctgtggtggatgggtgctgtgtggtgaatgggtggcctgtggtggatgagtgttctgtggtggatgggtgatctgtggtggatgagtgttctgtggtggatgggtgctctgtggtaaatggctggcctgtgatggataggtggcctgtggtggatgggtgttctataatgaatgggtgctctgtggtggatgagtggcctgtggtggacaagtagtctgtgatggatgcgtgttctgtgatggatgggttgcctgtggtggatgagtggtatgtggtggactggcaccctgtaggagaaaggtattaacacgcactacacctggtagacaatgcgaatgtcagtggcctggg

SEQ ID NO: 18739 - DNA, 2075 bp, Artificial sequence
  DNA replication origin
ccatggccactgcagaagtgattgaccagcagatcgtataaatcccaccacaccagaggggagggctgaagagctcctccgctccccaagagtgggctgctggctggagaagcctgtggccctcagagcctgacattctgctgcccccaaagcagacagacattgtcccctgagcctgggatctgctgcatcctcaccccctggccgggagtccaagccacctcccatctctgtagataacaacaattgcagacagcctggaccatgtgtttgcagtggagaatggcttcaaggccctgagaagcaccattgatgccatgagtgggctgatgtgaggggctgaggcgcctggctcctatggccagaggctcactctccctgccctgctccacccctcctgtgttccagctcacatcaaaggcctgcactgcagttaggtctgcggagcccccactgtgtgtgcaggaggtaagagctgaggaggccctgctgagggcagaaatgtctgtgcctacgtctgggggtgaggaaaaggctgtggtttgtgtgtgttgcctgtgtatgtggttatgtgtgtttgtggtgtgtgggtgtgtgtgtactacatgtgtgtggtatgtgatgggcatatgtgtgtgcattttctgtgtggtgtggcacatgtgtaagtagtgtgtgtttgtggtgtgtagtatgtgtgtgttgtgatggtgtgcatgtgctgcgtatgatgtgtgtgtgtggtgtgtgtggtatgtgacatgtatgtagtatgggtagctgtctgtatgtgtgtataggggtgtgcagtgtgtgaatttggtgtatttgttgtgtggtgtgtgtgagggttcaatgtgtgtgtgttttgtgtctagtgtgtgtttttctgtggtgtgtggtgcattgtgtgtgctatttttgtgtaatgtgttgtgtgtttgtggtcatgtgtgtgttgggggtatgtgataggtggtatgtgtgtagtatgtatacatggtttgtagtgtgtatggtggctgtgtgcgtgtagagggtcatgtgtgatgtgtgggtgttttgtgtgtggtatgtgtgtggcattgcatgtgtgtgtgtgtagtgggtgcgtgtgataggtaatgtgcatgtggtatgtgtgcatagtgtgtggtgagtgtggtgcttgtgtacatgtatagggctatgtgtgatgtgtgtgtatttgctgtgtatgtgatatgtggtatgtgtggcagtgtcactgtgtatgtgtatcttgtggtgtgttgtgtgtggtgtatggtatgttctgtgtgtatcaagtatgtgtgtctatggtgtgtgagtatgtgtatgtgctgggtgtgtagtgtgtgtggggtgtgtgtgtgtgtgatgtgtgtgtgctgtgtatggtgttgggtgcatgctgggtgtgtgtgttgtgtggcagagaggggaatgtgtgccctttgtgtggtgcgtgtatgatgtgtgatgtgtgtggtgtgtgtatgggatgtgtggtgtgtctttggtatttttggtgtatgtgtgtttgctatttatgtgtgtgtgtgctttgggtatgtgtgtgtggtgtgatgtgtgtggtatggggtgggttgagtgtgtttgtggtgcaatctgcatgggtgggggggtgtggatgtgtggcccacatgagtgtgaatgtgagtgtctattgctgtggggggaatatgcagcggtggtggtgtgagtacctgtgtacaattcttgtgttgttacctcacaacaataagtttaaccctaaagcaagaaaagacatgtgtgagaagctctcagggaaacaccagcaaatggcatggagcagcagctaacccagaccacaggccaggagcagccaggcctcctctcaggaaggccaggcaggtgcaggagctgaaatatctgtgtaatttaccacatcaacaaaacgagaaacaggaaccaggcggttatctcaggggatgaagaacaagaagtgggggcgtcagcatcctgtgagcagaaggaaacctccatagcccaacaaaggcgtccacacaaacaccctcagctcaccttgg

SEQ ID NO: 18740 - DNA, 995 bp, Artificial sequence
  DNA replication origin
ctgctacatgcccctgcccactctcctagggttctgctggggaccccagtgggggcaaagctcaagcctgggaaggatggggaaggtctctgggcacaggtggagaatgtgaaataacatgaattcagcacttgccatgtgccaagcaggatgctgagcacatccaaacccccaggacctaaccatgcttacacgctaggagggaaggcacagagcattccagcctgtgcacagggtcaggactggatgggcccctgggtcctggctgagccgtgctgtccttccattctccagtgctcccggcctccagcactgggtggcaggtgctggcaggctgccccacacatcggcctgccccaggctgcccttgcaccagaagttgctgcttacgggactctaggggactctcctcaaactactcaggaccccagcagctcactggaccctctagctgcatggtggccccagagggcttttgtggtctgacctcagtaaatgcaggtgatgggaagatggtgtggggaagctgtgggtctggcctgaattgtgttccctctgctctgccttgtttgctgggtttctgaggtggaggagggatgagggagaggagaggggaatggggtgaagaggcaaagaattttccagtagagggagaccagctgtgagagctgtgtgtctgtcttcctgcatgctcagcatggagtgtgtgagtgcacatgtgtgtgcatatgtgtgtgtgcggggtgtatgtggtgtgtgtgcatgtgtgtgcttgtgtgtgcatgtggtgtgtgtgtgcatatgtgcatatgtgtgtctgtgtgatgtgcatatgtgtgtctgtgtgattgtgtgtgtgtgtgtgtggtggtgcatgtgtgtggtgtgtgtgtgcatgtgtgtgtggtgagtgcaagtgtctttgggggtgctgggattgtggggatgcagcgagttgccatcctgactctcctttgtgggcccctcttctccac

SEQ ID NO: 18741 - DNA, 1359 bp, Artificial sequence
  DNA replication origin
agatgtagcctccctatgttgcccagattggtcttgaactcctgggctcaagcaatcctcctgcctcggcctcccaaaaggctgggattacaggcgtgatccaccgcttctggccaaaagagggctatagggcacccccagaacgcgagatctccctcgtctgtcatctttacagaggaggaagtggactcccaatccagccatagtccattcgccccgggcacggtgactccggggcggccagaaccaaatgtgtctcctggcttttgcacggcatcaagtaacccgcgccaggccgcacagctgccctggccttcagcaaggactccgcgagcgaggtgcaagctgctggggagtgccacagcaggagctgaggcagcggattccgagggcggggtggggctgaatcgggagggacgcggacccggtggaacgcactgcgcagacggcgccggcgccagcactcggccgttgacgagtctttcttccagctgtcccctgaaagtcatccaggcggcggtccctttttttctgcctttttgtttccctccggcgagtcggcgcgagggtgaatttccgtttccggcggtgtccaagcggacctaaggagtcgcagttgtgaacaggtttggtgccgcgggctggggtaggcggcggttgggtccgtggctctggggcactgggaagatcgcgagtcgtgcgcatgggaaggtcctcccccggtcctccgggtcatctttgctcccgaggagcggcatatttcgcatctgcctgaggtgtgcccgggggtcgttgggagagtgacgggatgaatccctgcagagagcccggactgggagggaaggtgtcggggagacgtcgtttcctggcgacgtggtcccggcaggcgacttagacctgagccgaatctgttgaccccaaattgtgcttttcccaccaagaagaaaagggagagaaacagtacaagttcggcagtaaaatatagtagagaagcaatataacctctgaaatcacacagctattcagtttcaaagcgttcctagtgcccagctctcctaactcccggccagtgttccttgacatatggtgatatataaagactttctgtttccgctcgtgtgtgtgtctgtgagaagcctctgactcacttctgtgctccagtagcaccctctgcagccttgcaatgtagcccttattgcatggcacggaagatactagtttggatttcctctgccaatcagaccatagctatatccattttctggcacagtggctagcacatcatagacagacacaaacatttattaaacggaatgaatacaggaccttaactgaatgaaatggtaccctgccccgctt

SEQ ID NO: 18742 - DNA, 1515 bp, Artificial sequence
  DNA replication origin
agccgaagttcaggccgcgcgcggggtagcgcgccgggccgtgggcgtgcctgggcgcggcgtccgggcagggcgagggcaggcccagcatggccccgactggctgtccagctttcagagagcttcggggcctcgccggggtcgctgggcccgggccgccgggccgcctgctgggggcgtaggccgacttgatgtccagagagaaggagggcttgaggcggctggtgtcctgcaggtggtccgaggagaggcgcaggctgcgcaggccctgctgcagcgtgctggtggccgtggggggcgccgggggcttcctgcccgcgctcgggccgccctccctggcagctgcactcctggtggcagcggtctctgaggtaggtggtggcagccatggcagtggggccccggccgcagggctggggggaggctcctgcattcctgagggggtgcccgcgtcgccctgcacggcggccagcagcttcgggctgctctggtcctccagcagctggcccaggaagttgaagttgggcgagatggacgggcgctggtccttcacaaacctgtaggcgtcttcggaggacatgcccatggtcttcatgatgtaggcgatggcgatagtggcacagcaggagatgccggccagacggtggacgatgacttggcagctggacagcttggctttatcgacgaactcgatggacttgtccagccagggcagcagcttttcacagtagttgtcgttgatggggacccgcaagaagtggctctggtagatgaagtcaggcttggggcaggagttgctggcatagaggacgtagcttattccattctgcgtcatcagatccttgttcaggacgtcttcctgcgagcccaggtagaggtgaggcaggatgagggtcaggcccacgctgggcacgagcaggcaggactgggagaggctcatgggtagcagggcagcaggctcacccttgcagaggtcggggaagcaggaggagaaggtggcgaagccccccgtgatgatggccatgctgtggaagcagccggccacgctgtggaagcagccatccagcttggtcagcaggatggagaggaagctgtctgcggccgcgtgctctggtcatagaccaccacgtcctgtggctcagtggcctccacctggctgcgtgcggccggctggatgaactccacaatggtcaccttgcccttctgcaaccgccacttcaccagcttggagcagcagatgttgacggagctgagcacatgccagctgttgtactccaggaaggagtgactgtcgatgaccaggcccccccaggcccgccccgcagcaggctggccagcttcttggcgtccatcaccttcctggggagccggtccccggccatgatggggcaatgggtcttggggagggtgacccctgaagtgaggaggggctgctccgacggcccaagtgtggcctcgcactgggaataacctagcacatgatgccggaccttgcttgcgctcacctcgggggtg

SEQ ID NO: 18743 - DNA, 1736 bp, Artificial sequence
  DNA replication origin
actgtactttaaacaacatttattgaacaggaattgttcaataaaattggctagccaagttctaatatatatatataaaacataataataattaaccaataataataaatacttaaacctctaatccatagattgcaaatgcaacaatgatagcttattttcttggggaacaagagtgggtggggacagagggaacgggaacaggacttttgctgaaaggagggatgacaggaacacagggctgtgggtgaaaagaagaacaaatagaagaaacagcagagaaggcggctggctggggtggggcgggcgcctccctggccctgctccaggactcaggactgggtcccgcctgggccgcccctcctgccaagcccctggcctcttcccagggtgactggcccactcctagaccctaggacatctgaagggcaggagtcccaacggcctgagagggtatgggccaggagcagcaggctgacccatctgggcccaaaagccacctgtgtttgggggctggaatgctgtctagaaagagggcgccctgggaaaggggcgcacgagagtttctctcctgagaggcccccatgcaggtcgggtcaacaagggggctttatctgccttgaggcagcgctccctaagtgaagcaggcctaccccagaagcacgggggcttggctggcgcctgaactccctgtgcaaggcagcacctgctcatggagcccctcagcctgcaggtgcacacctggtttccaagtcctgcctggggccttgctaggtgggggacggacctggaacaggaccctaagcccaccccctcctcatacctggcagtccagggctccccgcccagtggagccagcacaggctagccaggcccccctcctgcctgacccccggaggccaagctcctctcctgcagtagtgccgccctgccagtcaggtagctctgggggcaggggcaaaggagaagggagggccgcagccctctgggaatggcctttctgaggcactcagtggctggactggggctctggcaggagttggggcattaataacacccccatcctcccctgggctccgcctcatctgaccctccagaaccccctgccccaagcccctacacacactgttctattcctcagcccctctcaacgccctggcaccatggggcccaatgcatgtcctcccctgagagggaacagctctggggcaacgggcagcggggtgccctccctgccaccaagatttggtgcctagagctggtggagggctggccgcacctctctggggcacaccaggtcctgctcccccagcctatggctttggggcggagcccgaagggagagagcaggggcggtgggtgggggaagaagggggtttctgcggctcagtttgtggcaagaaagttttttttttttttcaactttctcttgtgtaaaaagttcacgaaagctcggcagcctctgcaaatgtcagcagtgttttctggggcgggggatcagggaggggccccaggcctggcctgcaacttgcgactgaaggtggcctcttattgcttagaaacgtgtgtttcggtttaaataccagacagtaaaaatagagctcgaggaccacccgcactgttgccaaatcagtgccagaatgaacagcttaaataaataaaaaatcgaaatatttacttctggataaaaatcgcagtaaaaccatttgcctttctttgcattatatataatatat

SEQ ID NO: 18744 - DNA, 2017 bp, Artificial sequence
  DNA replication origin
gatgaacagataattcacacagaaagaaggacggtagggagagacgtgcggggggtagggagggcggaaggaaggtctaggggaaggagcggagggggaagggaggaaggaaggcagcaatggaatgaaaggagaagggaggaaggactcgttgaatgcacagcctccccggtgctgcaccggcaggagcggctctcacaggcatggggcccccaacagaccctaccaggctgcgggaatgttgcggccctgcagggcgtctctgtcttttttgaggtgtctctggtaatatgtgataatgacagtatttttagacatttggaatctgatttaaattctagctccatcaccttctagctgtgggaccctgagaaacggcacatcctcccggatcctcccatctctcttgtccacacgtggggaaggctcctggtggggggggggttgggggggaggggggaagagggggggccttgcagatttaccaagctgatgtacaaagacctactacagcggtaagggctagctcctttctcccactctggcagtcactccactttgagaaacatacctcttgaaataaagctacaagtggagaggggcaggtgatttgggcaaataattccatactaaatattaggacaaaacatcctaggcaaatatcacaatccggcgtcatagtggcatactaaattcaaccaagaaatataaccatgatgttgaaagagccaggcttatggaatgtaaacagcaaactattttattcttgttttctatttaccaattcaaacttgctctgcaggtcactcctccctgcccctgggataaaatctagggcatgttctgtgactttctggatcacaaaattcacatgatttttggatcattctcagttgaccaaaaatgtgtcctgtaacttctagctataaaaataggctctgttcagcatttaaaatgtccaatcccatgtaggagtctaaactttcgatttcattttaagtttaagcttcctcttgattcctcccccaagcctggcccaggcttgcatttggctccaggcattgggcgggtagcagtgtttcctctccatttttcactttcactcttccctccccaactagcttgcagggatttctgatcacctagtagagtctagaggcgtaagggaaggaggtcaccaaggggcaggccaggctttatgtgaatagtgctgttgtgagccaagtacttgagtacttcgaggtccccttctactgcagacatcttccctatggttcctgtgacccaggtttgtctcagagtggggttagcacacggtaccatctccatcccctttaaaagtatttattacatttttctggaaatggaagtctgggaattatatttccctgatagtcttatgagcaggattccaggttgattctgccaaatgtgaggcactcagatgagactagaaagcagaaagatggtttaaaaaatcatcgttttcttcctttgactctgcacttatgacagcaggatgctcgagactcttgcagtaatttgggcaaagatttccacagtgcaaaatagcaaaaacgtaactggcaaatagctgtacaaattacagtccattttcatcatggaatgtcagtttggcaacaatggcatcgaggcccaaaagcagctctgcagtaggggggttcctccttggtgactggatgggcacagccaagcacaaattcctgaagatcccagctccaggaaacatcagcatggttcattgcgttgtccacctgaattcttcacccctccctgtggctgtgtccattgccctgtagtgttgcagttcccctcaggaaaaagatatcatttacttctctgacccttgatttggagcttggctatgtgacgtgctttggccaatgggatattggatgacacaacataaggagagacacagatatgcatctgcacaatgcagcttgcctttttatgcttctgccttcaccatgaaaagagctttccctgggggtag

SEQ ID NO: 18745 - DNA, 2116 bp, Artificial sequence
  DNA replication origin
ccattctgtcctcttggtcaaccaacccatcatcctagagtgggacccagcacaagttctgtacatggcgtgcctgggttccaattccaatctgttgcttacagcctcagttaagactatgtaaaatggggtgataattcctccccctcagagtcatggtgaggtctcactccaaatcagcacccaaggccatatctcaccctcatggggtgcagcaagcacttcataaatgaaagcacccagaaagagtggtccctgggtggtccctggcatccctggctggttcaggttgtgttccggagccaagctggtgaaagcagatggggccacccgagcagaccctgacctctgggcagccctggcaaggacactcaccaaggccgccgctggaggtgtgaggcagcagctctgatgccgggcaggggtcccatggggcatcggcccactctccactgtgcaggggcacccaatctcggccttgaagggttgggggcaccacgaatggcacagctggtggcctgtccagagtcagggagacaacatgtaggtggcaagtgaatggtgtggtctcagagcgctcagccaggacggttgagcaccaggggctggaggaagaaaagccatcgggagccaggaggaggccagggcaccattttctgggcccataccaggcaacacacacacacacacgcacacacacacacacacacacacacagcagtgggatttggagaaggaacacagcacctgacagtgtcagccagtctgggtttggattcctgttctgccacttactaattgtgttctctggacctgttgcttatgtgcactgagcctcagattcctcacctggaacatgggtttcataacacctgcctaatagctgatgtgaggtttctggggtttctttgtgatagctcccagcaccgaagcagcatagaagaggcacccccataaacagaactttccttttcgaccccaccctgagggaaattccaggggcgcacttggccccacatcctgcctcacctgctcagttgggtcctagcatgcggctggcagggcctgtcccgctgcccactggaggcagctgtggtggccatggctggtgtcccaggcagctcctcataggtgagggtggcacagaaccttctccacagacagcagcttgccccgatcaacagcagcagcagcagccccccgatggtgcccccaatcaccagggccagctgctctgggggcagagaccaccagtactatgatgcctgcctgggaaggccactctccctcacagccctggcctgctggggcagaactagggcagcaaccctgcctctgggtttgatctcaggagtgataggagcaggcctgctggggatgggttccgggagggatgctgctggctaggttccgccagctctcagaggagaagccgtttaccccagggtctgagagccctgggcagaaccttctagttttccttggaaaacagctggccctgcccttgggattctggcttaaagaagccatttccttgcgcttctgagtagaaatcaaacctgccctcaccagaacctccatatcccctgggctcctgttgaggccaggaggggagctggggtgtggacgcagtcagttaaggaaagccctgaaaggtaccttccccctggtctgcaatcaaacctctaccctctggggccctggaacctgctgcaaggctggactcttctctaacacccgctccctcccctagccctctatcaaggtgagcacgcgcttaggggagttggtgcgacgcggtggacgaggtggggaggaagagggggcaaggccccattgctgctggccctcacacgtccgcatttgcgggacctaggaggcttcgccccgggggtgctcagacgctgggttccaaccgctggccacctggggcgggccaaaaaggtgcctcccttagggtgacgtgcggccgcggggcattcaggtctcagggatctgcactgggtggggtggtgagaaggccggaccccccacacctcctaagccgcaactgaccgcgaagagcgggcctcagcgtctactccatcccagtgcccctccaagagcgcgccgaggc

SEQ ID NO: 18746 - DNA, 1810 bp, Artificial sequence
  DNA replication origin
agccgcgcagtgcacggcaggggcagggacccagcgccccgaggccgcagtcccgccccagccagtccctggcccaggcccaggcccggcggtggaggggcgcagagccgaccgtgagctcccggaaaccgcagggctccagccagggcgggtcccgggcgccaggggcgccaggggctccctgcggcttggggcagggtgcggtgagagtaccacccccatcccggagagcagggctacagccttcaccgccgcgtctgacacagggctccgcacccgacccctcacacctggtggccaggactgagcccccgccctcccagatcctcctcaagccgaggcccctccagccgcagctccgaccccggctcgggggagccttcccggatcccggggtggagtctccgcgcgggtcccgggccccagcgctgcctgcctgatggccttgggcagggatgcggcgctcgcgcacccgttcgctctcagcggacaaaccggtcgagagcgcaattctggagcgggttccagaagctcctgggttccaattcaggctcctcactcgccagccctgcgatttgggacaacttaacgttcgtatgctgggttcagtcttctcaattgggttaatgtccgtgaggggctctcgtaagggcggctggcctgccggtaacttaagaagcatgtaaagaacacttagagcggaggagcggcgcggcccagcccctgttacggtggttatcggatggaggccagcgtcgcctgggtcccctctgtacacccagcgcctattattatggtgattattagaacgcagggcccgtgcccactagtccaggctggcgaacgcgccttgcgggaaaggcgggagtaaggtcgctgcgtgtcctctctggtcacccctcggcgcgccctggtcgcgcccctatggttcccccgccgaggcctcgaggcgtctgagtggggagcgaaaggaatgtgtgtatctgtggtgcaggggagtgtgtgtgtgggggggggagggggtggttgtgggggagtgcgtgttttggggggatggaccttctcgttttacagccttgaaggttatgtccagagtcatagcctgggtcccacacccccgcgtcacctgtgcctgtcctaggggccagtcagtgtgcgtgaggctccaccctgcctgggctttggctcacctaaggcgaggagggtggtgaactggggtgccccactgggccgggtctgggagccctcagggccagggtgcagaggccgcagccactccccttctagggtctgggcggtgggggcatgagaaggcggagacccaggccacttcacccagtaactgtcctcagctgtgcgcttaactggcgagatctccgctctacttggagacagtctggggtgtctggagaatcctcccccacttctgcttaccccaggtcgctgtgggagcaggtgtctcaggaaatggggcctgggtcccacccaaggcctcgggtctgagttagatgtctgtatgtttgttgttgcccctgcaacaaagtaccacagattgagtagtttaagccacacgcatgttatctcacagttcggggggtcgggaatctaaactgggttggcagggcctgtgccttctggaggcaagggagctgtttcccagcgtttccagctcctagaggctgctagctagtggccctttcctttgtcttcaaagccggcagcacagccttttctaacctctcccactccaggtcatttcacatcaactctttctgcctccctcttgtaagtgtgataccctaccttgttt

SEQ ID NO: 18747 - DNA, 1218 bp, Artificial sequence
  DNA replication origin
atcaggcctgcatctcaatgctcagaacatcaggagcagcaagaaggatgagctccctcctgccacctgcttttatcttcccgtggaggaagattgactcaaaactcagtgggctggctggcagtgtaaggattttgcagatagagctgacaacgtgattttgcagaccccagaagctggtctgcaggaccagggcagggagctcctgttgggccctaaattgtgagcccaggatgtgtatgatgcatggacaatgtgggcagaagctggggcagctcatcccaatggcaagagcccttcatctgccattcagcacagcctcagccctggaggtggatagtggcgatgccaagctgaataagacacggccccctgccttcatggaggccctcggctgccaggaagagtgaggcagcagtctcaggcacagagtcccatattcggcatggtagctgcaaggaccatgaggacgaggggatgatgaagggtttcacagaaggcaagatgctgggggttcatcttgaaacatgagcagtggagaaggagggtgggaggggcattgagtatttcagacagggagagagcagcatggtgggagagcccagtgcatacgcagagccgtggaagtagctgcatcagtctgggcacaagcactgcagagagatgggtggtgggggggatgagaatgggaggggagcctggaagacaacagctgggaaggggagtgggtgcagcatggaatctgaagagctgagaggaggcccatgcagagctccagatgagaggtgatggagggctgggcaaggttttttgccatgatagagatggacagaggaggaacagctgtcaggacttggtgacacagagaaagatggggactttggaaaagcacagcatgggggtcgagagatggcagctctgggcctggcactcaggaagtgccagaagggattcccttttcaaaaaacatcccactacccaactccacccccagaacagcctgagtacagctcgggcgcaatcatggaggcagctggtgtggatgccatgccccactggggtggtcaggtgggggtgcatggcagctgggggaaggggtcaagatagctgacgggttccatgtaggggtcccctgagccttgctagctgcctgagtccagtgttgaggcacactgaactctagacagaggaaggggaaatgtaagccacccctcccag

SEQ ID NO: 18748 - DNA, 990 bp, Artificial sequence
  DNA replication origin
tgtgtgtgtggtgcagtgtgtgtggtgcattgtgtgatgtgcatgtgtggtgtgtgaggggggtatattctgtggtgtgtgtgtggtgtatatggtgtgtgtggcgtgtgtagtgtgtgtgtggtccagtgtgtggtgcagtgtttggcatgtgtgtggtgtgtgtgtggtgtattctgtggtgtgtgatgtgtgtggtgaaatgggtggtgtgtgtgtgtggtgtgtggcgtctgtgtgtgatgtgtgttctgtgtgtgtgtttgagtggagagatccttcaacctgaaggatcctgagcctttctcttcaggacaggtgaggacaccttagctggtggctgtgtttcctgccctggggagtcagccgagcggagccccaccatggctaggtgttacatatgttcagtatcacctctgacttcaaaaaagcgagcacccccatttccaggaatcgcctgggaaccgtttcaaaggagtcatgccagccaggacagagagctgggaagcgggaccacaggagcaactctgaacagtcattggatgcgctctccaaccagctgctctgctcacctcaaagcacacaccaaagagagggagaggctctgagcccatgcgggtgaatcagggtgagccacgcaaatctgctggcccctggcagtcatggcagatgctgccaggaggcctccctcattactcggagtaggcttgaagtcatgctttccagtgtgaggtgcgcgagccaagcaaaggaggaggcctggtcaggaggggggagttccctgtgacaatggaatgaaaaggctgctgcagggcccagctggccctgggcacggtgtggggaggggaatccgcaaaccaggcagagccctccagcccagggcgttagttgttgacccatctttcctccccaccaccagactgggagtcctcatcctttgcgctttgcagtttaggaagcaatctctgaagagcacaaacctatttaaca

SEQ ID NO: 18749 - DNA, 1089 bp, Artificial sequence
  DNA replication origin
aacgctggcaattccagtctccaggcctattcggaggctccttcttcccctcactgttcactccttgtgctaggatctctgtatttcccttccaatgcctttaggtctggtttctggcactccagtcctagattgagcacaggatgggtctaaggagcacctttgctatcacacagggcatggaaacccgtttcttggggtgtccctccaagcactcctggttctccccggtcgcaccatctcctccccaatggccggtgctccccagtcacattgtcttctccccgcagtcctccgtccccaggagcatcccggggcttccaaatgccaatttcacgtgcaggtactgtactcacttatcttgctgactatgccaaattaagtgtgtgtgtgtttatgtgatatatcatgtggggtatgtgtgtggcacatgtgagtatggtgtatgtgcggtgtgtatgtggtatattgtgtggatgtgtgcgtgttgtgtggtatgtgtgacgtattatgtagagtgtgtgtggtatgtgtggtgtgtgaggtgtgtagtgcgtgctgtgttatgtggtgtgtgtgatgtgtgtatgctgtgtgtgtattttgtgtgtgtgttgtattgtgtagggtatgtgagtggcatgtgtttcacgtgtggtgtactgtttggggtgtgtgtatgctgtgtgttatgtgtatgtggtgtgtgtgtggtgtgctgtgatgtgtggtgtgtatatgtggtgtgtttgtgctgtattgtgtggtatgtgtatagggtgtactgtatggggtgttagtatgtgtgtctgtatgtgatgtgtgtggtgtgtggggggtgtattctgtggtgtgtgtggtgtgtgtagtgtgtggtgtgtgtagtgtgtgtgtgtggtgcagtgtgtgtggtgcattgtgtgatgtgcatgtgtggtgtgtgaggggggtatattctgtggtgtgtgtgtggtgtatatggtgtgtgtggcgtgtgtagtgtgtgtgtggtccagtgtgtggtgcagtgtttggcatgtgtgtggtgtgtgtgtggtgtattctgtggtgtgtgatgtgtgtggtgaa

SEQ ID NO: 18750 - DNA, 885 bp, Artificial sequence
  DNA replication origin
attaggggcttagagggcaggcgtgggtcaggcgagcattcctggagaacacagtcctcagtggttcaggatatgagcatagctcagagagctgttaacattatcagcctggcctgggagagggggacgcgcacagggtggtgcacagggcccgcagggaatttacagcggcgtccgcggcgatgggctctcagtgccttggaagaccggtagaggcaggttctgtctctcccggcctcgcaagcagagggccgcggcgcagggcaaagctccagtgcgcaggctcgcgggcgcaggtgggattggatagcgacgaaggccggcaggctaggcgtggacccaactggcgaggctgctggggttgcagcgggacagttggggcggccccgcaggcccaggtgaggaaaggtggctgggggccaggtgggcagggggcgtgcgggaggccgctgcgccgggctgtgggagggcgggcgtgaagaaggaagatgccgttgacgtgcaggggtcacaaggcgtgggttgtggccctggcccgggagactgcccgggtgggcctgagctgtgaagtagtgtcgctgcagccagagggcaggacgtgattctggccgtgtgatgccagctgcactgtgacgcgtgttggggcgcctatgcgagacgggaccgggacaggaaccctgtggctctgtggtaggggaatgccaccaactccctgaggagcagccgtgtggtatgattggtaagaagccatcatcaggcgctgagacagcccagaacttcccaatgactcaagggcgggtggaggtcgagggacctagaaagaaagaacatgaattcatcaatccattcagcagctattttgaacgcctcctgtgtgccagatgc

SEQ ID NO: 18751 - DNA, 934 bp, Artificial sequence
  DNA replication origin
tgaggagaaggcggcggcggcggcagcggcacaataacataaacacgacggggccgcctgccgtcccggccctgcggcgtccgccgcactcacccggcagcgcagcgaacggcgacagggaagcccgccagcggggacaggggccgtccggggtggtcgccgcggccgttacccagcgctgctcgcggctccgcaatccaagccgcgtcgtccggcctcggccgctcggctgagtaacagagacgcgggccgtcaccgcgcacgcccgcgcacgtcatcgcgcagggccccgcccccgcgcctcccgagcggccggcggggcggggcagccccggggcccggattgcgggggcggggccgccgcccggggacggcgctactccaggggttacgagaggacttgcggaggtcgcttggaggcggagccgcggagagagcctccgagggctgtgggtgaggggcgtggcctggagcgggaggggcgggccctgtggcggcacgtggcggcgcgtggccccaggggaccgcatctggttggcggcggtagccaggtcagagcttaagccttcgggcctcgtcggcacagggttgaagggcaggtgcgcttaggcctaacctgcgcagcgaacaggcacccccttccggtacacacacctgagtgatgaagagctggttaccttgaccgacaatatgttccattctgaggacacctgtccgggtcccagaaacctacagagagataagtgttctcttcagctgcccgggaaaagctgcctccagtttttccaaaatccacctcctccgagattccttgcaaatccacctcttcccagattccttgcattacctggtttacttctgaggccccacaaagcgtgtaaatgttacagaagcgataaattgacaagtcctttaaatatccaacaacgggtgg

SEQ ID NO: 18752 - DNA, 1056 bp, Artificial sequence
  DNA replication origin
cgttcgctgcgctgccgggtgagtgcggcggacgccgcagggccgggacggcaggcggccccgtcgtgtttatgttattgtgccgctgccgccgccgccgccttctcctcagccgtaaccccctcctgggagtgggggcgggagcgcgcggtgggcgggggcggcgcgggaacaatagcggcgcggaggcgggggccagccgagggggcgtggggctgcgggacctgggtgcgctccgctgcccgccagcccgcctgccgccgcgagccccgcccgcctgtcctctcgcgtcctcttcgcgtgggtcctgcctccgcggcgggagaagaaaatggagcgggggggtgggtggcaagttctgaaacacttcggcaagggtcggacggaggtgtctttgcggcccgccgcgccctggctgcctccggggcggcggggagccggggagagcgcttctgccggcaggtccccaagcctgccccgcgcccatagggaccgtattttgcttctcgatgctttctttgtgctaacgttctgggcgaacgcaggcagcagcgctgaaaagggccagagtggcctgcagctctgggctgcagggcagagagcccaggcccgtggctcgggtgggaggtgtccatccagcttggcccgagcttcggtggtcagcgcgcatttctcttgagggtcatcggtggtgaccttttgactttttcaccccaccctcccatctctttgtctcgcatttgtgttcccgattcagagatggtagaaccaagtccattttaaagtaccctgatgaacactttccgtttttatttctgaaagttccctgcttggtctttactgcgaatttaataacatgttgactacatggcattgtccagtgattactatttttacctctgaaatccagcgatctttccagtagaattctggtccgtcagtccattgtgttttgagataagcatccagcaagtacctccttggcaattagaacatctgttttttcattcattcattcattcagcagctgtttagtaccgtactcagatgaagagg

SEQ ID NO: 18753 - DNA, 1585 bp, Artificial sequence
  DNA replication origin
ccagggattggctgagtgtccctggcaggatctttgggccccagtgacctcacccatttgtcctgagtattaagtgactcacagtggatgagagcgctcgggaaactttgctgctcgcattgactcctgcctggtggctggaggtaagatgaggttcccagaggaaaagggatagcagtggtagcccttgtggagggactgtactcgctagcagagtggtctgggtcgttgtcttggttagagggagggtctagagtgaggaaggtctctgagcacaggaaggaaggtgagggcattagcacctgtcctgtccagcaggtgattggggaatgtgtgtcctgttctctggaagtatgggccatcgggtggggggtggggtgaggctggccttgtcctggctcccaggactctggtcagagcccctccccagggccctgctgggaagtcagccttccttcgtgcattcccaaaagagaacctgttttctgtgaagtaccagatgctgtgcaggtggccacagttggggtgaaaactgatcaaaatctctgtccccattcttatttgggttgcagggagacaaagaccataagcacgatacatttttaaaaatacacggtgtgttaaaagggagatgaaggaggggaacatagagcagcatggaggggagcggagaggagcctcagggtagaaggttggagggccctgggaaggagaccccagagctgcagccagcactgaccccaagacccctgtagtgggggagagtcaggggctggggactggagatgtgtggggagggggcaatgggtggggccttttggcctgggcaatgctctggtttttcgtggagtgagatgagaatgaagtgagaagccgctggagggtcttggcacattgggcactttgacaggtgcacctgggtgccatgccgagcagagcttgccaggggacaagggcagaacagaccagttaggaggtgtgggggtctaggcctgacctatggggggtgtggccctatggggcagcaggtggaggtgggggaagcggccaggtgctgagcatattttgaaggtagagccaaaaggttttgctaactgatcagatatgggaccgagaaaaagaatggacttaggggaggacatcattgttcagctgagcagctgagggaaggtgttcaccaagagtgcaccagggctgcggaagagtggtctggagatgagggtcaggaccctttaagtcagagatgctgatgaaatggtgcagggtcatcagcgtgtagttggggcttggagtcttgagcctgacagagaaggaagaggggaggtccaggcccgagccaggggcagcagtggggaggtgggtggcttctctctgacagctgtctgtgatcctggtagggagggctcaggccatgcttcaagctcagtgatgaggatggaggcttcgttttggtgggttgaggaatccgtgtttattcatcatgcaccacgtaccaggtgctgtgctggcccctggcatgttccagtccatggttaccagtgctctgaggagcagttaccctctgcatttcactgtggcttgtgtc

SEQ ID NO: 18754 - DNA, 975 bp, Artificial sequence
  DNA replication origin
tgctgactccacgcaagtgggaatgcctgcccagcctgccggggacctttgctgcaggggtggaaacagagtcagtgtgcagtctgcagccagggagggggcggcccctggaggcaggtcccaggcttgtcccagtacaagggctcatagcctggatgctgagtgccaggaagtgcccaggccccaggtcagccaggctggaagtgaggaccccttccttgatgggatcagaatccagtttccctgctgaaccaagccctcgtgtccgcccttgtcacaggatggttgtgctgcaccctgaggcttacaatctcactaacagagggccagagttccagcctcccatgaggaccggggttgccctctgcagtgaggaacctcagctcctggagaccaggttctccagcgcagggcgtttccctcagcatctcagactccttggtccctctggctgcaggtccccgttagctggccgacctgttcacctgggtcccacccactagcagggaattcctttatccattagaggcagtggatggaggtggaaggcattcctgctgcccactctgagcctgtgatttccactgggagctggaatggcagcccttgcccttttgctctgctgacagctgttccctgggtgatggagagtgccaggcatgtacaggcaccatgtctgcaaaaggaagagaaggagagggaccttgagggcagaggcctctgccatgggggaagtcacagcaggcagtgcctgagccagggctggaaggacccataggatggagccgagaaaggaaatagcatcagtagaacccaagggcctccagaaatatagtagaagatgctatctgctgcagatgagctcacagaccaaactacagggtacatgggaactcttaccatacagaaggctgtccatgcagaaggctgggctggaccagctgcgccagttgtgtgctgagtgcctggagctcc

SEQ ID NO: 18755 - DNA, 1627 bp, Artificial sequence
  DNA replication origin
cagccagacttagcaaagggcacaggtgtaggctgccatagaaaagacagcccacctcatagggcccatggaacactgtccccagtggagtatgcatgagagacgtgctgctcagacaggaagcccacagctgaggctgttcttgcccttatcccatgttgagggacgtggcggagtgcttttgctcaagtccgcactttggtcagccctggctgggtctcccaccccagggccccttgaggccaggaaaacacaagctcctacctgcctggtggtacagatgcttgagggaggaggcctgccctgcctgcttcatggagttcctgcttcacctaggttcttggcctcagaattccttccttgacttcttccaggattcctagtcaacttcagtgggagagtccaccctggcactcagccctccctcctaccgggggacctcctagcgtcgggcctttgtggtgagggtggcaggagggaatgaggcagctggatagatgccctggtccttcctgcactgcccacctccgctgcaggcccccaccccaccaccgtaggaactgagtccccaggactgggggctgcatctcaggggccttggcctagacacgggggattgtgtgtgtgcgagattatatgtatgtgggattctggggggtgagcagggtgcactatgtgtgcagttgtgtatgggggaatttggggaggctgcggagggtgcattgtgtgtgcaattgtgtgtggcggattttgggcagtgggtggggttcattgtgcgattctgtatggggggatttggggaggctgggtaggggatttgtgtgttcacttgtgtgtgtgtaggggctttggggaaactgggtagagtgcattgtgtgtgtaattttatgtgtgtgggattttcgggagtgggcattgtatgtgcgattgtgtgttgggggatttggggaggctgggtgggtgcattgtccagttgtgtgtgtgtgtgggactttgggggtggatggggtgcattgtacgtgtgattgtggggggtattttagggggtgggcggggtgcattgtgtgtgcaattgtatgtgtgtgcccccacacaggaaagatggctctattccctgtcccagagccctatgctcccagagtgtggacattcaggcatggcagttgtcagcagcacagaggggtgacgtggggcagccgagagagttctggcatctcaggtcccaggttccagttccaacctgccacctgctcaccgtgcagccttggtgcctgcttcctcaccccaccccagctggagggcgtgagcgcaggcacagtgcttcctccctgcttgcggctctgtgcctgaggaaggcggttctgcggccccatcctgctgtcctgcctggagttggagggtgtgtggtcctttcctctgggcggatgaaggctcccttgaggggcggcctggctctggggacagggccagctcccacgaagctgcagcttctccatgactggcagagcgagcctgggccgagtggctggcagcaaggcccttctccgcctctcttcccggcaggcacttccctcgtccagcacctgatgaccgtcctcatccgcaaacacagccagctcttcacggc

SEQ ID NO: 18756 - DNA, 1313 bp, Artificial sequence
  DNA replication origin
ctccctcaaaggatagcagctgagggagtaaggagagcctggcggccaggagtccatgcagccctaggctccggcccacaggaggctgtcctcagagctcagcagcagggtggcaacccgggagactgacagcccagtgcccaggggacactgtgctgggaaggggcaagtatgggacagctccaggcactgaggcttccaggcctggtgaggctttagcagaagagaagcccaggacctggggctaaaggggaccttcttatagagatgagcaggaaagtgaggagggggcttcctgcggaaggggccaggacagaagccaacaccccagcaggcaggcaggctatggccttggggagagagctccatcccgggaccctctgttggaagtgggtgaggaggagaccctctgttgggggtgggtagggaggggggaccttctgttggggttgggtgggaaggggggcctccctcaggggtgggtggggagggcccctctgtgggtacagctgcagagccagaggagctgccatggaaatggcagaaagtgggaaggatggcctcagataccccaggaggagtttctaaagggagaggaaaccaaagcccagggccaccgtggcagtatgggggtcactgctgagatgggggtggagggacaaggccaacatgcccaccatggagatggccctcctgacacaattccagaagcagggtagaagcagccagagagggagaaggcagacaggggagggcctccaagacatagggaaggctgccccaggctgctgggaggccgagagtcaggtctgcatggaacccaccctagggtgcccagctgcctctcaagggggcttcagcaggcaggccaggtggagaaaggaggctgagcatgccaggaaccacaccttgggagagcaggtgtgcccaggtggagacccccccagcaggatgggagaagcttggcagtgtgggtgaggcgcagacggcctgtgccactccagggagccccagcagagtttgagtaggggagtggcaaggtctgatctgtgtctgcagaagcccctcaggtagcatcaggcactagggcagagcatctgatcctggggagcttccaaaagtctcggctcccaggccttacccaggtgacattatttgaagcaatctgcaaccctaacgctgagacacaggatggaagaggcctggctggctgaggttcagaatggacgacaagctcactgagcgtcaacactgggatggagcttcacaaagctccagaggaagggtcccccgtacctccctgggtggagcac

SEQ ID NO: 18757 - DNA, 1618 bp, Artificial sequence
  DNA replication origin
accctgcaaggtccggagaaagccgcatttcaaagcacttgctcctgggtgcctggtgtggtcgatctcccgtggacgctcacaccccggaaggtggccaagcccagctcagagaggcttaggacagtgcccagggtcatagaggacgcggattggagccagcggactgctctgcctgggcttcctctccggtgtgggattcccggggaggggagtgagggacggctttgccaggggaacgctggcgggggaggcctggcagcaagttcatcaagaggagaggcagcctctgccagtttcccctgcggtggcagagccagtgctctgtaaagagcatgggctgggacctcgaggaacccacacgatggctgggtttccagggagctgacaaacctactggaactagtttttggcaaggctcccctccgagggtgccaggagagctgagggagttcagccaggcgggggcaggccctgccaggctcctgagagaccctgatgaggggagggattggtggggcccctaataagggaggccgggcccagaagccccagcacagggtgcctcccacaggagggccgcggggaaggaagcctcttgggaggctaagctggaatgagacctcacagctcctggcagctcccctccaagggttccagtggccagctgggaatgtggggccagtctgcagcctggtggtacctgggggctgggcctcagggaagtctcgccctcatagcaccccctaaagacaggtgtgatcctcccattttatagatttcatagatggagagactgagccccaggaaagggaggcagctcctctcctcagtgggttagccaggacgtccaccagaccagtgctggtgcagacccagaatctttgtctctgtgacctttggccttgaacatcgcctactttcccgtgtccccacctcagccccaccatgccagggcagggtgctgccaaccatgctccttcacccctgccctctgacgcccatgctcctccatcatgtgccctgcacccccacccgcctacctggcttcttcctgctcatctttagacgttggcttcagcatcacctcctccctgaacctgttctctctagaagtgcccaggaccctgtggatgtccctttcctggctcttccatccctgttttgggaaagtgttcaggaaggcgccatgggggagcagaagggtagtggttgtgctggggctgggagctgcttggatgtgcaggcactgtacaaatggtgggctggcccaggctctgcacccctagggtctggtggagggagtagggcagggccttgcctgcttgccaagtttgggctttatcctgaggacgatgtgtgtgggggaacagggagcaggggaggccccagggagatttatatgtttacagccttcagggcagctctctaattcctagagtggggccaggcacaaagtataggggttatggaaaggtggatggacagacagacagcaggagttttgggggtaggagatgggacagcaggccgggctggagccaagagatggctgggtggaattacccatgctccatgggcttccagagagaattttggaattttttccccatgtatc

SEQ ID NO: 18758 - DNA, 1454 bp, Artificial sequence
  DNA replication origin
gtcctgggcaaagagggaagggattcctgcggtgcccgggaacgtggggcattaggggaaagggtgtgaagtttgacaccggagatcccccacgggggccgacttcgggcgtggcattccaggcaactcacagatcctgggccttccctcgcctcagggtccgggcctggggcggcgctggccggggcgggcgggcggcgggcaagacgctacctgcgcgcgtgccgggcattccagccgccgccgcgccgccgcgataggcgcgccatgggcctgatgccggccgcgcgggcctactccgggatgcagcgcttgcccgcggccgccttgccgcttgcccgcttgttgcgcgcccgccgccccaggtaggggcgggacggggtgcgggcgcccccgggcccgccagagaagctgcgtctccgggccatagaggcgctcgaagctgggaccggcgcagcgggcgagagcgccgcgcatgcgtctcgcgggggtcggcggggagcctgggggagtttgggtgtcaccgcggatctggtgctgcgggacggttcccagggggcgagggtcgtgcgtgtccgagggaagaaacagggaccggaggcgtccttcaatctcctgctggctgtgggcgtcccgcatgtagagacgaggacttagagtctgggggggggcgcagggacttgcaaaggatccctccccaccccgaactacggaggggacacagcgggatccgagcctcgggctctgaccccaagcctacctgggccacaggaaggggtgtgggaccggcggccccaggaggagggaatcacttctgccctggggtggactgcccagggcaggacccttccaggtgagcttagcctctactgtgctcctccaggcctggacgggtggggagcaggagagttttcagctgtgccggctggctggtggatcttaccgcttacagccctgggggcaattctgaagctccctaatacttagcgcagagcctggaagtgacagagttggccggccagtgagtccctgcactgacggacaaagggtggggtggttgcatggaagatggtgagttttggggtacaggggacccgagagcagaaaggcctggagccaagagggaaactgtggaattacccaattacccaaagtttgggagtctctagagagaattttagaattactttcctcattgtgcctcttcccagactatgtcattgcccgctcctgtaagagtgaaaagcaggcatatgactgaagcagacctgctgcgcagctgcactctgctccgggatcagctccaagagggaatcccaggtctcccttccctgatgcggccttcggggtgggactcaggggcaggcagaacctgtccaggaattgaccctgcaaggtccggagaaagccgcatttcaaagcacttgctcctgggtgcctggtgtggtcgatct

SEQ ID NO: 18759 - DNA, 1099 bp, Artificial sequence
  DNA replication origin
tctgtcccctcatcttgcaccagaccagcaacagcattcctgcccaggtccactggcctctgtactctggctgctgggcaccccagtgagcccaagcctggcagagcctatactctgtccaccagcaaaggggcacagggtctgcaggaacccatgcccagagctcatctattacaatgcagtgataaacacagtggactgccactgggatctgctgggtgttgggtaacccaacaataggctggggccagccagcaggtgagctcaatggtttcctgtctctgcccacactctgctcttgctactgttcacaagtacagattctgtgctagtgtggtgccaggccacataggtgacaaagtgatccccagcggcagacccaggctcaccgcaccaaagggaatgaaatgaactgggcccgagggctggggctcagagatggattcgggcacaggccacctgcccaggctcgactgccctcaggcccatttgatggcatcttgagaggaagtggtgtggtgcggaaaccagagaggtggtctggggagcctgggagggggaggggggaacacagtgccagcaaggctgggaagctgagccttttctgcaggcagtctggggccaaggtggggtttgaggaggatcatagtgtctccagagctgtgggtggatgctggcttgggcagtggactagaaggggcaagggtgaactcaggatggccagccaggaagcagtgccatcaaggcgataagtcgagggaatgcacaggtgttgcggtggcctccagggcaggagcacaggagccatcagccattggttgtgagaaatgaagaagagggcagggtcgagagccaggaaagcagaagaggcagtgggagtgcgggactgcactggagtctaatgaggggctctggatctgcaggccgcagacaggcactgcagagcttggagagggaatctcggaggcatttgtttagaggcaatcacagtcatcagggccttgagggagacagctcagaaggtgaacaaacttatagccaaaagccagcagggcagggctgccttcagccctggttctgctgttctgctgcagcattc

SEQ ID NO: 18760 - DNA, 1273 bp, Artificial sequence
  DNA replication origin
cggctcctctccccgcctgccgcctgcgccccggggcggcgcggccgaggtccggcccacgggcagtgcccagctgggcgcagggtgcgcgggaccgccggcccgcggctcccgggccctcacactccaccgcggccccgcgcagcgggcatgccggcctccgggcagaccctgctaatcaataggagaacgcgcagatcgcgaccgccgcgccactgcccgcttttatctccgcgcgccggggcggccccgcgctgctccctgccctcgccggcgccctccccacggcccgttactctcccggggtgccgggccgcgcgctctcccaggagccgccagggggcgccacggagccggggctgcctccgcctccctgggagccaagcaggggtggggggccacaccggcctggcctccccgcgcagaatgggaagaaggggcgccctcgctgtgcaagggagacgcccccaaccccaccagcatcctctgggcagtcatctcaagggtgactttgtcgggggtgttcaggaccaccgagctctcagtttcccagctcacctgtactgtgcagtagtaggaagagggagtgtttgcccaggctaccctcaaacctggcgggctacttatgagctgtgtgactttggataagtcatctcccctctgagactgtttcctcacctgaaaagtgaggaaaatgataccggttcagatgctacttagcacaaattaagaattaagttattcaaactctctctgtgcccagtttccccacctataaaacagagaagataacagaaactgcttcaccggatggttgtgtcaattaaatgagttgatatatacaaggacttagaacccaagtggcctgtaggtaagtgttttgcaagtgtgagctatcatcatcatcaagtcttggagaggatttgggcactttttcatgagagtgtgttcggtgcaatcaccttggaaggtaacatggaagctgctttattaaaactaaaaatgctgctgccttgggagcaagctcatttcttagtatgcaccccatggaaatgtgtccccacatgcccaggaaagtctatggaaggctattcatggcagccttgcttgtgattgcaaaaagttggaaccaccaaaatgttcatcagtaaaagaatcatcggccgggcatggtggctcgtgcttgcaatcccagtactttaggaggccaaagtaggtggatcacttgagcccaggagtttgagacctgcctgggcaacatggcaaaacccct

SEQ ID NO: 18761 - DNA, 834 bp, Artificial sequence
  DNA replication origin
gaaatgattacctttgcatttgacttcttgcttgagggatggggtccccggaggctgtcttggtcttgtggctgagagcaccaggcggcatctgtggtcagggttctgacctccttcagctcctggaaatggctgatggcacaaaccccacccctgaactatggcagctgctctgtgtctgcctgaaaaacagagacttcagggtcctgggctctaatgactcagggctctgattgcattcagagtctgtaaggactcctatgtccaaggaccgctggggcagtaggcaagtccttcacaggggaacgctgtgtgcagctgaaggctactctgcatctctgcttggaaaggatccagccaaggggctagtagagaaatagtgaggacatctcagtaaccctcactaaagtgtctgggaggtaactattagaccaaatgggatggctgtgactgtctgtttgggtccctcagtaaagtgcctgggagataattgttagaccaagtgggatgactgtttgtttgggtcacaggcaggtgctcgctgggtgggctgtgcaggtgaggattgggtggattgtgcaggtgatggttgggtgggctgtgtaagtgatgatttggatgggttgtacaggtgctgattgggtgggttgtgcaggtgctggctgggtagactatgcaggtgatgattgggtggattgtgcaggtgctgactgggtgagctgtgcaggtgaggattcggcttgttgtgcaggtgctgactgggtggattgtgcaggtgctggctgggtggactatgcaggtgatgattggatgggttgtgcaggtgctgggctg

SEQ ID NO: 18762 - DNA, 1651 bp, Artificial sequence
  DNA replication origin
ggcctccagcagagcgggcggggctgctcacctggaaccagggccagccgtctcctcccctgcctcggccgcccggggcctgcctggggctccttcctcgccgcccggcggcagctcttgagctcccggcccgctcctttagccccgcaggctccctggccgtgaccctgtccccggcctccgtgtgatgagcaggcgagcagggccggggggatgcagcctgggccccgcatcctcaggcaggacggagctcccggctgctcggcgcctctgggggggggggggcgggggggggggatgcggcgcagcgggcggtcccagcgagtcagaagggtgcagcagccgggtcggggatggccgggcgaggctgacccctgccgggcagcgcgggtggcgccacgggcggaggcgacttcctgggccctggtgcacggcgccccctggcgggcctcggggaggcggcctcctgcgtgcccggaccgctcgctgcgccttcccgcctggcttccggttacccaacctcatctcgcccgagcctcatctgtagctcaccgtcctgtgcgccctgtgctgttggcagggcgtgtgggatttagagggttttctatactgagtcttcctcggagcaggtgaattctgcatagctggcccagttctgtgtcttaagtatggggagagagtgggggctggagaaatcactagcaggggaggagccctgaggttgccgagggggatcggagctacttcccaaggcgcctacaccgcccgtagactgggaaactacggtcacaaagggtcagcgcattccccaaggtcccagagccacacgcagcatggctggcatttgaaagtcaaagcagaggaagcaggcaggtggctcttgttgaactggcttccagagtctgtgttgggcagagagatccttccccgagagtggagtggcctcgtgctcacctgggttcagcgtcaaggttcacctggaatcacctgcactcttgtccttgaccaaggcagggtggttagccatgggctgatagccttggagagcctgattcagcctttgggtagagctgggtcagtccagcctcagggccatcactcacccgaagcattgtggtaacctgcctgcccctggagaccccgggtgtggggcagggtgaccgtggtggagagtgggagctggcagaggtaaggaggcacacgtctgccacagcaccagagctcagggcgcctgagaagcaaggtcatagcgtcctgttcttggaccccgtcagtctccacagctatagggggctccattgaaaagagtgtgccagaccttctctgtctgtgccctggtgagggctcactcactctccaggcttgctgggggaggaggcacgaacttcggtggaaagaacagaactcaggagccagagaatggagtttgactcctgcctcggacacttcttagccgggtctctagggggctcagagagcctgagcccccttcctcatgtataaagtgaggatagtaatactgctgaatccctgggtctgttagagaatgaagcgaggaaagtcaggcagagcacttaactaagtgcccagctcgcattaagtacaccatgctcatgcccatggccaggatggtgtgttccagctgcaacct

SEQ ID NO: 18763 - DNA, 1075 bp, Artificial sequence
  DNA replication origin
cgaggttggcagccccctgggagcagcgcgggaagagggggtgggggcttcgctcgtggacctgcgagcttgggcaaggtttgacacttttccgtggaggagcttccctcccggctcctgcagagataaatacaggaaaggcctgcctcccttcctctggtgcagatccctcgcctggtcttctctgctgctttacagcccctcccgacagcagcttttgtcagaggggaagcccgggccctgcaggtggggccggctccgcgctccagtggctgcctcgcccgagcccctgcggcctccgctgacgcccaacctcgaacacgccccgccagagcctgtgccctgtgccgtgggcttggcctcagcctccacggtggagaggagccttggggaccctgccccagggcaccgttcccaggcggaagggacaggtcctggtcccgccacccgttgctggagcgggggcaagagggaaaatctttggagtcataccagtgatctcgggggcacggaggctctgttccctcatcagaaaatgaagatcacagctgtttcacagattttgttttcatgagaattcaatagaataagggtgtgaagctggtagacctggaacagcccccttcccgccagggccctgcctgagggcacgtcagtgactgcacagtgcatttacagggcctctagggccagaagagaggggaagccttccctgcccctgccctgccctcagtcactggggaacaaaataccctctcagacagcaattcctcctttttgaaagggattatgagacaagatgggaacattagacattgacttctttttgtcgggggaacaccacattttctgggggaggatacactggggatattggattctctgtcttgattctctgctgcaggagagaaggaacctgccagtgtaagccactaaactgcaggactctgagcagggcactgaacttcctgaagccttttttgtttgtttgtttgtttatacatgtgaggtaatgagaattgaaaaataagaatgtaccatatggcaaagtgcaatgtttagcactttgtgaatt

SEQ ID NO: 18764 - DNA, 770 bp, Artificial sequence
  DNA replication origin
aacccgcccaccgatatttgaatatctcacctcagcggccagcgggcggaagccccagagcagcctccagcactccctggcctcttgctgatcgaggtttctcaccaacaaccccaggggccagtgttggcatccaccccagccctgcggagagagatgctttctgctcatgcacctcagtttggcccagtgaacacctgcaccacccaagtgccgtggggtgggatctggccggtgatggtgatcaggtgactgggtcagtgggggtcagccccctagtcagagcaatcgcccaaggccaggactccagctcccagtgaacaaacctggctgttcccgccacaaccagggaggcacctgggagaggccctgcgcggggcagcctagacgggtctcagccagggacaggagccagacgctcctgcccctaagagggccccttacagcgggtcattgagagactgcccagggacacacaggagggggcacgctgagtgagaagacgccaaggggactatgggccacgctctctgggcctgggaggctggggctggtggggacagagtgctgcgtgaggtcgaggttggcagccccctgggagcagcgcgggaagagggggtgggggcttcgctcgtggacctgcgagcttgggcaaggtttgacacttttccgtggaggagcttccctcccggctcctgcagagataaatacaggaaaggcctgcctcccttcctctggtgcagatccctcgcctggtcttctctgctgct

SEQ ID NO: 18765 - DNA, 1036 bp, Artificial sequence
  DNA replication origin
atggggctgttgaaaggagacgccacagatcctggagcgaaccgatcgcgcggcggctcccgcgcccggtgcgggcctcgggacccagcagccccggccccgcgtggcaggcggcccaaggggcgggccgggggcgggcgcgagcgcgggcccggggcgggctggcggcggccgggccaggcggcggcgctctcccgcgtcacagcgccgggcggcggcggggagatgcggctgctggcactggcggcggccgcgctgctggcgcgggctccggctccgggtaagcgcggcggggccaggcgggagcgggaagggtgggggccgggcggccgcgccggggaggccggggctccgggcctggtggggaggccctgccacctccgggcgcgggcggggggcggcgctgtcactgtcgccagcgcgctccggtgggctcgccgagggtctggcgggcgcagcggcgcctccccaaggttcagaggacgcctcccgtgagcgcggtccccgtcccgacctcgcctggggctgggtactctcgcagcagccgagatcttcccagcggcaggccccgaggggagatgcagcaggagcgcagcccaagttggtggttcgctttccttttttccacggcagtcaggacacacagctcttggcagattcctcggagcagcaacttccctttcactctcttcggagagttactccgaagacaagtcaggagcggctggatctgccttggccaggaggtggggaacggggacttgatcgtgggccttttgaggtgaccaggcctggtgagaggggcatccacggctggatgcagcgacgcctctccaccagcaccctgctttgaggacaacttcttggtccacactaatggctttcattcgggttttactgctcccacttgtaagtgtcttaagaattttccctctttattccccagaactctgtctggctgcctcagggcagcaggggccgtactggctggaataatagtaataatacaggtatcgatggtcactttccctgggtg

SEQ ID NO: 18766 - DNA, 1556 bp, Artificial sequence
  DNA replication origin
gcgagagtacccagccccaggcgaggtcgggacggggaccgcgctcacgggaggcgtcctctgaaccttggggaggcgccgctgcgcccgccagaccctcggcgagcccaccggagcgcgctggcgacagtgacagcgccgccccccgcccgcgcccggaggtggcagggcctccccaccaggcccggagccccggcctccccggcgcggccgcccggcccccacccttcccgctcccgcctggccccgccgcgcttacccggagccggagcccgcgccagcagcgcggccgccgccagtgccagcagccgcatctccccgccgccgcccggcgctgtgacgcgggagagcgccgccgcctggcccggccgccgccagcccgccccgggcccgcgctcgcgcccgcccccggcccgccccttgggccgcctgccacgcggggccggggctgctgggtcccgaggcccgcaccgggcgcgggagccgccgcgcgatcggttcgctccaggatctgtggcgtctcctttcaacagccccatttcccagatgagaaaactgagtttctgcaaggtgatcgctggtgactcacagaacacacagctgcagtgcgaccggcggtcctctgcccacagatgcacttattcctaagggaaggcgggatctgggagccagggggtgggggcgcgtccagggaacctctggcctgagactcacctgctggtcgtgggcctcctgcgctcactccacaggaccctcgggagccaacaagcagctgaggggggagaagccccttctgctgccctgaaatggagggcggggtccgaggtgctaacccttggaaaactgagagggtccacacagaccagcccagaatatgtggaaactattaacaaaagtgcccatttacagtgcctcagccaggcctgggctaaagtgattttccagatgctactgaaccccgccgcggtcaggcctgggacagttctgtaatctccatgtgcctcagtttcctgcacctgtaaaatggggaaatgggcccaccccttctggggtgtttaggaagaccaagttacaccattcccattaacgcattgccccagcacccgattcacgggtgtcagtgaacactactattattactatacataaggaagcagaagcagccacatgaaagagacccatgtcacacaaccacagagccctgtcactctgagccaatgcctggtctctttgccactgttctaaacttagggtctgagcctaacccatctccaagcaagaaaagcacatgttaggtctattctgtgtgtgtctatcaggagaggtctttgtggagttccagtgaggggtagcagcagctagcaggtgggccctggttgggagtgggtccctgtaggaggaggaggagacagggccctcatctccttccctctaagggagtgaggaggtgtgggtggcatggaaagagggtgcagcccactagtgtgagccccagggcattccccagagggaccatcctcttcaggcaccccaggccagtgggtgcaaaggctctg

SEQ ID NO: 18767 - DNA, 1804 bp, Artificial sequence
  DNA replication origin
ccctcctgtcccccgcagtgagatgagggcgttgggagggactttccaggaggggagcgccgggtgcgccctagggctgggcgggagcgctggcagagggagacttgaagctctatcgctgtttgctttgcagccaggcaggagcaacgcgcgcgggtccgttctgctgccaccctcccaggtctcggccgtccagccgatctgacagccggcgatgttttatttccactgcccgccacagctagagggtaagtaagcgctgcgccccagggtctccatgaagccagagccggccagaaagggccggagcggcagcagggctggtgggtggctgggtccccgccctgcggggggcgcagccgcctgccggtgagtaggggcctccctggacccctccctacaccccactccaggcccgctccagctccccgccccgtcgccacctgcctcccagctccctccccgcctgggccaggacgccccgggctaggcgtgccgcggggaccggccgaatcctcccagcacagatgctggtgtcacgcctctaattggggctccgcaacccagggggccgcatcaatctttcacggtgcttctgcaaacatcccagaaagcaaaggcgagtggacccgccgcgtcctggcccagatcacgagctgcacgagcctacaagggcccgtcgctgggctgctctcactggggccgctggcgagaacactgcaggggcctcttccgccctggattctgggcagctcaattcccttcccggcctcctggccgtccctggaaccaggtggccctgcccaccacctgcccggactgacctagcatggctccttctctgtgactcactaaccctaaatgtcgaccactccccactccccaggccagaatttccatctttgagtgtctccaggcctgagaagaaatttcccctcaggatccccagtctggcttctgcacccagttgttagtgggggcgtgggttggtgagaaggggacagttgggacctcagcatgcccctgctcaggacccgagggatccaaggatggggtcttcacatcagggggccaattagtagccatcaggtgagccaatgccacactgtgggctttaatggggccttctgcagagcagcagtctcagcactggggtattgggacttttgtaaccgtcggactggcatttggcaacctactcgtttgatttattattgtggtgggagaatttgggaagccaagtagttgtgggagacaaggggcagggtatatgttgtgaggcgctaggagacctgagacttcaggtgatgcttgtcagtcttgctgcaggctgccctgagcagtggctgagcctcagaaagtttgtttttgtttttctcataaaagctcttaagagtccaataggattttctaaaggaggctaatgaggaccagtgtttaagccctgctagctctgtcagcattcctaggaagggaaggccacacatttgcctgcatttcacattttatccccaagttcccatgcagggtgggttttatggaagggtgggagacgtgcatcccctgacagtgtaccctaggggatgagggagactttctgtatgttaagggtgccttctctgtgcatctgaaccaggggtctggactaattgccagccagtgtcccacccttctggtcaaagtgggtaaggcagaagtttgggcatttggcaggtaggggacgtcatgaatgtctgtctgcggggtggactgcagcagtgagttagggagagtcctggcctggcctgcggtgaccccagctctc

SEQ ID NO: 18768 - DNA, 1257 bp, Artificial sequence
  DNA replication origin
ctgttgagtgagactgaggccacggggaggagagggaggcagtgccccacccctgggaaatgtgctgaggagtcctgttatggcctggctatgccatgcaaggtcatggccaacagagtcaccaagagcagagcagtgaggtgttggggagggcagagggcagtcctggagaggtgggaccgatgtggatgggagtgggctggtcaggtggggagacggagggccctgctgatccaggattgcaagagcatgacagtgaagtcacagctgagaagtattcactgtgtgtgtctttgcgtgtgtgagagagtgggagggggagagagagaggagagagagaaagaagggagggagagaaagagaaagggagggaaagaaggagagagagaaagaggagagagagaaagaagggagggagagaaagagaaagggagggaaagaaggagagagagaaagaggagagagagaaagaagggagggggagaaagagaaagggagggaaagaaggagagagagaaagaaggagagagagaaagagagagagagagaaagaaggaaagaaaggagagacagaaggggagagaaaaaaggggagagcgagaaagagagacagaaagaaggagagaaagaagagaatgagagagaaggagagagagaaagaagggagagagagggagagggagagaaggagagaaagagcaagagagacagggagagaaaaaagaggaagagagagagggctggaaagagaaagaatgaagtggtgaaaggaagaaagagaaacggggagagggaaagagagaaagaagagagagtgctgggggcagcgagaataacctactgatgcctggatcaagtactgacaggcagaccttgtcaatagggaggtttaagaggccagacttgaccccaagttctcctggttgaaaacccaaacgcctcctgctgcagctatgtacataatccaagtcttagaaatggaaaagattcattgtgtttgctaattattcatgtagcaaacttacttcattccttccgtggtaatttccattaaattccacacatttatcgagcacttaatatgggcaattgaacgtgcgttttgtttgaggggagccatgtcctatttagggggcagcagccgggggtgtcgggctggggatcaggaggactggccgccaaccctgcctctgctgttcccagtcccctctccatgtaccacagctccattcaagtcatatgaatgcacccaaagag

SEQ ID NO: 18769 - DNA, 954 bp, Artificial sequence
  DNA replication origin
gagatattccaagggaccagaacctccgccagatgcattccgtgcaattgttttcacattttagaaaatacaaaacgactctaatactgacactggccaaacaactcaatgctcccactggctggacagccagaaggtaacctttgcctaaagtaagaaatgagggtccccttcccttcaccccttctgcattcctaccccccaactccaaacacaatttcctggttaaaggggcgaggacatgagagccaaggcaggtgctcctgggagagccattgcagggaatggggagtaggcattacttggacacagcagagtttagcatagatgttgccagacagagtctggacctgggtggggacaggcaggaggagaaggaaaagggggaagagggacagaagggaggggagagggaaaggggtgaggagagagggagagggagtgggagggaagggaaagaggaagggaaggagggagtggaggggagagtagggagagagggtgggaaaaagggaagaggaggaggagagagaaaaggaggaaggagagagagggagagagagaaagacggggggcatttcaggagtgaggacagatatgcagatgtggaagggctgcccccctcctctgttttctgaaaggctgtcacagttgctaaccaccaccatcagctgtggagaatgttaccatttcacacagtagttcttccatgatgggaatccttttggctttgcagatgggaaaaatgatgctcaaaaagctaagacaaccaaagagctggaaagcagcaataaggatttgggacatgaagccccatatccattctatgacttcagctgcagagtggtgggagagtagccattgggatggtttgtgggtgcagtcaagagaagcaggctagggagaagtgccttcccactgctgcagcctttcctgtaagactggagagggtgt

SEQ ID NO: 18770 - DNA, 1166 bp, Artificial sequence
  DNA replication origin
gccgctgccgccctcccgcactgcctggccacattccccttgcctggaatccccctttctcctttagcggtctggtcccccagctccgcctcttctctccccgccgccgcaccccctccccactctaactcctcccaggcactcttcgcacccgaccaagccctccctcggctcctgccagcctccgccccctgttctgcacactcccccatccctcattttccagagcctcctccaagccccgggtgggctctggagtgactgtggctggggtcctctcttggaactgtaagaaacccttcttgggtgccgcgcccactccccggagagcgcccagccgcttcgctgtcgtcaggggctccagggagactcaccttccttctgagagggccgcaccccttgaggcgcccgtgctcagctgacaggctgagctgcccaggctgtgcgctgggcctgacgcgtccccagagcggcgttgaccctggatggcacatggaacccgtgttccagtgggcggactggcgggagagaggctccagggcggctgaggttggaggtggggattgtgttgttgagattacggtttgcgtctctcttccagagtcagaggggagccttcccatttttctggcctcaaaagtaaagcagcattagacgcagatgcttctcccattgtgccccccaccccgcaggaagtgccgcgatgcagtgcaaagagtgtggtctttcgaggcagacaaccaggatggctcccagctctgccacgtactcattagagtacctgcagggaattactttgcctctctgtccctcagttagtttctttgtaaaattgaataataatagtacctactgctaagggggccgggcacacagtaagagcagtataaggacttgctatgttgttatcgtgtgtagaatgtgcggtttatcctcatttttcacttgtgggtcttgtgaagaacagatgaaagacacagggggcacttggctagctggctgatccctctggctaggtgggcattgtgactccaggctctgtctgggttggtggaggacccggagggcattggaatgtctccatctgtccctgagatggctgtaggatgaggggatggggaccaatgtgtcagggtgagaggcggcagcctggccacctgttgctc

SEQ ID NO: 18771 - DNA, 1187 bp, Artificial sequence
  DNA replication origin
ggtactattattattcaattttacaaagaaactaactgagggacagagaggcaaagtaattccctgcaggtactctaatgagtacgtggcagagctgggagccatcctggttgtctgcctcgaaagaccacactctttgcactgcatcgcggcacttcctgcggggtggggggcacaatgggagaagcatctgcgtctaatgctgctttacttttgaggccagaaaaatgggaaggctcccctctgactctggaagagagacgcaaaccgtaatctcaacaacacaatccccacctccaacctcagccgccctggagcctctctcccgccagtccgcccactggaacacgggttccatgtgccatccagggtcaacgccgctctggggacgcgtcaggcccagcgcacagcctgggcagctcagcctgtcagctgagcacgggcgcctcaaggggtgcggccctctcagaaggaaggtgagtctccctggagcccctgacgacagcgaagcggctgggcgctctccggggagtgggcgcggcacccaagaagggtttcttacagttccaagagaggaccccagccacagtcactccagagcccacccggggcttggaggaggctctggaaaatgagggatgggggagtgtgcagaacagggggcggaggctggcaggagccgagggagggcttggtcgggtgcgaagagtgcctgggaggagttagagtggggagggggtgcggcggcggggagagaagaggcggagctgggggaccagaccgctaaaggagaaagggggattccaggcaaggggaatgtggccaggcagtgcgggagggcggcagcggccaggctaatattcgcgaccccgactggggcgcggcaacttctgccctcagtccccacaagctcccggccgcgattcgcggccgagaaattctgcggaggggccggtgggtcagagccaggccaggcagttgctgagccttcccctcccctcctggcgggagtgtgtgtgcaaggggccagggggcggagtcggagaaagggttgggggtgtccgtgtccagcgctcctccggacgcggctccacaatccagctgcgagaacagatggacgcagcggcggctcacctcgggggcttcctgctcgctgtgcgccgaggtccaggctgaagcggagatcg

SEQ ID NO: 18772 - DNA, 1485 bp, Artificial sequence
  DNA replication origin
gctgcgaggctcgccgtcctggccagacacaggacgctcacgcaggcgcaccgcatcgtacagaccttgcggtggctcatcaagcagcacatcgcgctcggaacgggagcgcgtcaggaggcccacgttgcggagcagcagcaagacgggagcatagagcaggttggccagtcccatgccaaggctgagctgctcaaagcccagcgagtgcacaatgtggcctgccactatgggcccgagcgcgtaggccaccgaataggagatgtcggcgatggcgtagacgctgccatagactgagacatggcgcacgtccaccaggaaggcgagcgtgggcagcagtgctgtgtcgactagggctatgccaaaacagaggccgcatagtgagaccactagcggcgcgaaggagcggcaggcgggcacgatgcacgagctggcgccgatcacagccagcccaagcgcgccgtacagccactgcaggtgtgggtagcgcgccgccaggcgcacggtgaggtagacgcccagcacatgaggcacgaaggccggcagccaggccatgcccatctcccactcggaagccgccatcgtatgcttcatccacgtggcaatggtgggttcgaggaaggcgaggggaatgttacaggtggtgagcgcgccggccaccacggcaatgtaggggtctagcatgaggcggtggatgggagtgcccactggcaggttggcccgagcccgtgcagccgccgagaagggtttggccactgccagcagcaacagcgcgtcaaagagcgacacggcagctagcaccaagaagggcacgcgcttgccggcgaactcatagaggatgcccccgaagggcggggccactaggcttccgaagctaatgaaggccagcgccacgcccagtgcacgactgcgctccggctcctccgggtacttatcggcgatcatggctatgccagacgtgtcggcgaaggctgagcccaggccctgcaggctgcgcgccgcgaacagcgtggcgtagtcctcggcgaaggcgaacaggactgtagaggcgaacatgacgcccaggccgatcagcagcggcacgtcgtagctcatgcggtcgatgaagggcccgctcaaggggttcactagcagctgcaggatagccttggaagcaaacagcaccccgatcttcacgtcttcgctctccgtagggtagcggggccgaagggctgagcccgctggccacgcagctgtcggggacgccgaggtgttggccgtgtaggcgctggcattggccggagtgggcagcggcagggtgggctcccacacctcgggagtccgggtggggccctcgccgcccccgcgcatgtgggcgatgtagtcgggcactatgggcacgatgaccatgtacagcatgttgtccagtaacagcgccacgcacacgataacaagcaccaggcgcctctgccgccggggctcctgcagcgccgcgcccacagcctc

SEQ ID NO: 18773 - DNA, 1163 bp, Artificial sequence
  DNA replication origin
acccaaccctctccaggattcagcagcagcaccccaaggctggaataatggggttggggaagtgcggtgactgggaaatgctgagctaggggcaggaggcatgggcgggacagtgttctgtgcccccttctagagcctaaatttgttgcccgagttcctccgggaagcgctccgggtagattctgggggccgggagctgagatccctgggcggggagctggggaagggatggggctgaggacagcgaagaagagggggcttgggggaggggggaaatggaagagagaggagggaggaggtacaagaggaaggagagaagtgcggccagcttgctttctccagtcgggtggccgcggggacccgggcgacgtcggaggccctgccgggaacccaggctgcagcccccacccccgcgctgcgacacgccccccaccccttccggctcacacccccgcccacactcctgagtggtgcggtgcagcgtcggccgaggcagcagagccgaggagagcaggtgagaagaagggctgggctgggctggcggagcgcggtgccgggagcaagggcggcggtcgggggctctatccagggacagcaccggggccgagaggccccaggactcgtggagtcctctgagtcctgcgcagcagcggccgtcgggggtcagctaggaagctgcaggattgcgttgcttcggtgcctgggcttggggaggcttaaccatcagggcttcgggactccaagcgcatgttctcacttcacttggcccagcatctgctaagtgaccaggtccgcgctttctgtgtctagtcggagggtccttgggtctgacccgactcgcctgaattgctggttggcaaccgcttctcccgggagcagggggtggggaaggaggagcagtggctggtggcaagtctgagccaggacatagccgatgacagcctgtgaatgaccggccagactggggttggaccttcggggcagagcaggcagcccttggaaagccaggctggcaggagcatgggtgggaggcacaaaacacaaacagacatatatacacatacatcctctaggcatctgcccaggagtgatggaggaagaagagttggtaggtgggaccaccaggaaaccatcccacccagctctgccttcttcaagctcag

SEQ ID NO: 18774 - DNA, 1149 bp, Artificial sequence
  DNA replication origin
gtttagtctgtcaacacaatttgtcagctctgccctcaaagtacgcccagaattaatccctcttaggcctcctgactaccccctctgcattttttgtccacccgccatcatctcctgcctggattactgccctggcctcctgacttccctgcaaccctcatctgcttgcagtttgttctcagtaacacagccagctgataccggtaaacctgaatcacatgaaacagcatgacctttacccctgagaacattccaggggcccccagctcactcaggggagaagccaaaggctcacatggccctctaggctccttatggcccccctgatctcaccccctcatctcaccccctcctgcttctgcctatcctctccctggcccgctgctgcagccacagccacctcctgcagtccttcaatgatcctagccagctcccacctcagggcttcacagccgctccgcctggaacgctctttcctacgtggtcttcagcttcattctctcagtctcaagatattcctcaaaagtcaccttcatgggcaggccttccttgggcatcccaacaaaaatgtcaacacttccctctgcctccctcttcctgatctcccttccctccttatttcttcttcttgctcgtaattacctacctcagcacgcactcacctgtataccttgttacccttctcccccacttggaggcatgctttgaggagggaaggggcaggagttcttttctggttctgttctctgctgggtcccagcccagagctgtgcctggcatattgtaagaataaacattagttaagaaaatcaacctgcgtaaagccgaatgctagaaccacaggaggcaagactgcggaggaagcaaggaaagacaggactggagatggcaggatgatgagacagccccccgagggcagggtgtgttaagaggagcagcctgtggaggagcaggggcagagggaggagagaactggaggcataagggggcaagcgatggcatttcaggaagaaaattaccagtgggctccaaactattgagtagaggtgatttctaggagagaagaattcatggctgatgaaagactgagaaaaaaagtattttcctaatttaccctcggcgggagagtaaattgaactgtcaccttta

SEQ ID NO: 18775 - DNA, 1394 bp, Artificial sequence
  DNA replication origin
cactcctttcccacaggcctctctcgcattctgcggggccgtgcggacatgaccaagaaccggacggtggactgggcgttggcagagtacatggcctttggctccctgctgaaggaaggcatccacgtgcggctcagcgggcaggatgtggagaggggcacattcaggtgagcgcagtggggctcagcatccgcacaggagacctggagcagaagctgggcctggcttggggatcccgagggggcctttgttggggtgggatcttcacagcatccctagcccctgccctcaggtggcatcatcagatggccacctcgctgaccccccagggcaagtgtgcagagctcactgctgggcccaagctgtccactaaggtcaagctggtggccatctgtggtcctcaggatcatgtgtgtgtggggggtgtgtggtgagtgtgggcgagttgtgtgtggtgtgtgtgtgtggtgtgtttggtgtgtatgtggtgtgtggtatgtggtgagtggggggagtgtatagggggtgtgtgtggtgcgtgtgtgtggtgtgtttgttgtatgtgtggtgtgtatgtgtgtatggtgtgtgtggtgtgtgtgggggtgtggtgtgtatttgtgggtgtgtggtgtgttgtgtggtgcatgtgtggtgtgtgtcgtgtgtggtgtttgtggtgggtgtggtgcatttgtggtgtgtgtggtgtgtgttgtgtgttgagtgtgtatggggtatgtgtggtgtatgtgtggtgtgtgcgtgtgtggtttgtgggggtgtgcgtatgtgtgtggggtgtgtatagtgtgtgtggggcgtgtatggtgtgtgtgatgtgtgtgtatgtttggtgtgtgtgtagggtgtgtatgtgtgtaatgtgtgtgagggtgtttgtgtggtatgtgtggggtgtgtggtgtgtagtgtggtgtgcgtgtgatatgtgtggtatgtgtcatgtttggtgcatgtgtggtgtggtatttgtggggtgtgtgtggttgtgtgtgtgtagtgtatgtagtgtgtgtggtgtgtgtgattgtgtttgtggtgtgtagtctgtgtggtgtgtgtgttgtgtggtatgtgtggtgtgtgtggtatgtgtggtgtgtgtagtgtgtgtggtgtttggtgtgtgtgcatggatgtgtgtggtgtatatgtgtgtggtgtgttttgcatgtatgtgtggtatgtgtgatgtgtgtgtatgtggtgtttggtgtgtgtggtgtgtgtatgtatgtgtgtggtgtgtgtgtatgtatgtgtttggtgtgtggggatgtgtatgtgtgtgtggtatgtgtggcatgtgtatgtatgtgtgtggtgtgtgtgtgtactgctgttaagtcagcccctatcttgcttgtttg

SEQ ID NO: 18776 - DNA, 1437 bp, Artificial sequence
  DNA replication origin
gacgtcacgacgcgcggagtctcaggggcgcgcgcccgtgggcggctgcgtcacgtgacccaggtaattggcacggcgcgcgcgcaccccttccgcgcagccccctgacctgcagcctccggacctcgctgcagcgcggacccggcccgcccgcccggtgagcgcggcggcccgccccctcccggtccctgcgccgctgcttctcctgccgtcctggggaccggccccacagctcctctctcctgggtcctggggcgccgctgcccgcagccctgagtctggccccgccggggggagggggaggaggaacagactgtgaccttggctctgaccttggctggccgtggcctcccccgggacccccagcccatcgcgcgcgtaccacccggctagtccagggtcctgcgcagaggagcgggtgctcgcggtgggtttctccagcccgaggacttcagactgccccgcgccttccgtggccaggggagggcccggagctgcgagggctgtgcgggggatggggagggtcagcgctgtgcacctggcgggacccataggcagcttcggactaccaaggagcctaatagacggttttaaccgcggtctccgattacagatgagaaaactgaggcctgagagagggcggcatggcctgaggtcgctgcttgcatgggatgcgcttcttccgccccccgggagatgtgggagggggacggggtaatcccgaggccacagcaggctgcagtacgcattcgccgaaccggagagaccctttgacgcccctcggccacctggctcaagcaggccctagcagcccctccccagtgtcttggaacaggccccaactaaatagaattgcggtttgttgctgagcaaaagctcatctgcttctcagaaagtggggtcagagtagacctgctgctgagagaatccaggctctgctgctgcccagcttggagggccctctggggagaacccttcccggcctctgtttactgatctctgcaatgggtgcattagggagtagtcctcactagggcaccccagacagggttgtgtgtgtgggagtcttagtggccatggtgtcggcagttttctggggttgggttgaggttctgaggttgggttggggatgctatgtgaccttgtcctcagagaagagacccccaagagatacccagggcaactctgctggagtctggactgggcagggggttgcacagggcacctgactctcactccttgttgctgtccttgactgtatgggcaggaactagtagggctggcttgggctctggctctagatactgagccctcatgccctgctgggatgcaggtgggggtgggtggcaggctgccctcctgccaggctgggtcaaggtcacaacagtgcccagtggccaacccagactgtttagtgtttataaaacagtgttcctg

SEQ ID NO: 18777 - DNA, 1333 bp, Artificial sequence
  DNA replication origin
ggaccgggagtccccgcgcgtcggatctccggccaaggtggccgcccctagccggcgggcagcccaggcccctgcacacccgccctcccagcccctccccgccgccccaggacacgaccccgcgttccctcgcgcggcttctgtctgcgctcggacagacaccgccgggaaaacttgttcagcgcccaggaatcctcgcccagccgagggcctcccagcgcagggtttcagagaccgatgtcggctgctcccagctcccagttcagcgcgcaggcggcggcgtgagctcgccctgggtcgagaggtggtgacccggggtgcctggccacgcggagtcgaaacccggagtggcgacgaaggagacgcagacagaggtgtcctgagagccgggctaggcaggcgcgggctccccgccccttggggactccgcaggagggcacaacccggccaggcctgctcagagaggggcttcccgccggggccctgagggctggggcgagggccggagcgtgcagccgcctgtgaggggacgggcagggatgcgtggccttcagcccgagggcaagcgatggcctggatgctgtttcctgaagtccaaaatcttggctgtgctctccttgggggttcgctccgagaggtgggaggcctcagttgctgcaggggaggcggcagcagaggtttaaggggctgaatttgcctctgaatcctgccgcctccaaacggaaactcgagtccctgctgtctccatgtcctgtcccacctggactggggctggtggaaaggccggctgcaatggagctggaggacaggagcagatggttgccctaggggctccatctttcagggaggaaaaccatgggtattctggaggttgtggcccaaaggccaaggctgggagcagaagaggcctgtgggaggcagtggtggaagcgcagagcttgtcagagggcagccttgtggagaagctgaccagccgggcctaggatcaacacctgctgtatcacaggcttatcagaggaggcgccttctgcacttcggggcacccacagaagattttcagtatgatgcaggtcttggatcaacttgatattcttaaggtggtaaaattcccctttcaaaggtttctttgtcagataatgaaatgttctaaaattgcacagtcggttgcacaactctatggatatgcttaaaaaagaattgaatgatatattatatcacgggtgaattgtatggtatgtgaattatatctccataaagctgaacccagtaacagacccgcacaaatgtgctcaactgattttttgacaaaagtgcaaaagcaattcaatggggg

SEQ ID NO: 18778 - DNA, 1036 bp, Artificial sequence
  DNA replication origin
actccgcgtggccaggcaccccgggtcaccacctctcgacccagggcgagctcacgccgccgcctgcgcgctgaactgggagctgggagcagccgacatcggtctctgaaaccctgcgctgggaggccctcggctgggcgaggattcctgggcgctgaacaagttttcccggcggtgtctgtccgagcgcagacagaagccgcgcgagggaacgcggggtcgtgtcctggggcggcggggaggggctgggagggcgggtgtgcaggggcctgggctgcccgccggctaggggcggccaccttggccggagatccgacgcgcggggactcccggtccgcgctcctccagcaggccggatccgcgcggcagtcctgggctccgctcctcatcctcctgccgcggccgcgccccgctggggaaggtgcgaggtgcggcggacgaggacgattcttgacgctgagcctgtgggccaggcccgcgcccaccacaggaatctctcccgggaaagcccggaaagatgccagcggcccctgaagcagggagacccctgcgcgtgcgcttctgaggcagatgcatcagggaggccttcctgggcgagagggaaaggataatggagtgaggggagtgttgtggaccaaggcctggagggcgagcaagggtctggggtgtctggcgatactgggtggagggaagggggttctctgtggccggcatcaggtgctccagggcagggcttggagatagccaggcccagccaagggtctcaaacgttctacctgacgtttcagtcctcaaaccgctgtagggcctcttcagggtttcagcaggagacgcagtcagattttgtagaaaagtcattctgaccaggcgcagtggtcacacctgtaatcccagcatgctgagaggctgaggggggcggatgacttgaggtcaagaatttgaaactagcctggccaatatggtgaaaccctgtctctactaaaataaaaaaattagccgggcgtggtggcgcgcccccgtaatcccagctactcag

SEQ ID NO: 18779 - DNA, 1181 bp, Artificial sequence
  DNA replication origin
tttcttagtacagaacgaaatggagtctcctatgtctacttccctccacacagacacagcaacaatccgatttctctatcttttccccacatttcccccttttctattcaacaaaaccgccatcgtcatcatggcccattctcaatgagctgttgggtacacctcccagatggggtggcggccgggcagaggggctcctcacttcccagaaggggtggccgggcagaggcgccccccacctcccagacggggcggcagccgggcagaggcgccccccacctccctcccggatggggtggctggcggggcaggggctgccccccacctccctcccggacggggcagctggccgggcgggggctgcccccccacctcccggacggggcggctgccgggcggaggggctcctcacttctcagaaggggcagctgctgggcggcggggctcctcacttctcagacagggcagctgccaggcggaggggctcctcacttctcagacagggcggctgggcagagacgctcctcacctcccagacggggtcgcggccaggcagaggcgctcctcacatcccagacggggcggcggggcagaggcgctcccctcatctcagacgatgggtggccgggccgagacgctcctcacttcctagacgggatggcagccgggaaaaggcgctcctcacttcccagactgggcagcccgggcagaggggctcctcacatcccagacgatgggcggccaggcagagacgctcctcacttcccagacggggtggcagccgggcagaggctgcaatctcggcactttgggaggccaaggcaggcggctgggaggtggaggttgtagctagccgagatcacgccactgcactccagcctgggcaacattgagcactgagtgaacgagactccatctgcaatcccggcacctcgggaggccgaggctggcagatcactcgcggttaggagctggagaccagcccggccaacatggcgaaaccccgtctccaccaaaaaaaatacaaaaaccagtcaggcgtggcggcgtgcacctgcaatcgcaggcactcagcaggctgaggcaggagaatcaggcagggagggtgcagtgagccgagatggcagcagtacagtccagcttcggctcggcatcagagggagaccatggaaagagaggga

SEQ ID NO: 18780 - DNA, 1785 bp, Artificial sequence
  DNA replication origin
cagggcgagtactgagaccccagcctcgtcgccagagtgccaccctggctgtctcctggggagatggtggtgtcctcacagagggcctgcgtgcagatcccccactctcctggcactttccgctgcctgacgcccttgcagctcagctacaagtcggtggactcattcctgcaggcagatggccccagggagcgaccccaggctgccttcccctagtgcacgcacatgtgacaccggctctgacatgcccctgactggacgcttgtccccatgggccgctcactgaggcctccgagaagctcctgggctcccccgcccgactcgcgcttaggggttcagaactcccaaagctctgcgcctactccggcagagccgcactaacgcgaacccgcgaacccgggccggggcctgggcctgtgtggccatactgtgctgctgaagctggcattgctgccacccttgtgccaagcactgcgcacgtcctgggggcgggagagacgccgctgtgacactaggccgggaaatgccggtgttccaaggcttgaagctggcttccattggaatcgctgccagagaaaccgaggcccgcacaaaataaatttgcaaaagtgatgccccaggcaagactccaggcccctcccagccctgcgcctctccctgctgacggtggggtgcgtccagagtgccaggacttagggcctgaccctggagggtggcaagtgggaggactaaagagagattggtaaaggggggagaaaacggggcgagcaagagggagagaaggttttgtgaaaagacagtggggagaaaagacagtggggaggaaagtttttgggtagatggagcgggaaaagagggtggcgagcaggaggcataaaagacggtggggagaagagtgggggaaaaggttttgggtagatggaggggggaaggtgataagcaggaggtgggaaggagggttgggaaaacgacgatggaaaaatagttttggggtagatggagggtgaaaaaagggtggcatgtgggagaggggacaggagtggggaagaagagggtggtgagcaggagcagggagaaggctttgtgaaaagatggcgaggggggaaagacagtgaggaaaaaatgtttttgggtagatggagagggaaaagagggtggagagcagcaggggtcaaaagagagtggtgagtgagggagacaaggttttccgaaaagaccgtgggggaaaatgtttttgggtagctggatggggaaaggagggtgacaagtgggagaaggaaaaagagggtggcgagcgggagggagagaaggttttgcgaaaagacagagggcagaaaagaaagacggtgcagaaagaaaaacggtgggtaaaaagcttttgggtggatggaggggggaaaagaaggtggcaagtgggaggagaaaagagggtggcgagagggaggtaggaaagaggattgggaaaaagacgatggggagaatagttttggggtagatggagggcaaaaagagggtggcaagcaggataggggaaagaagagggcaagcgggaaggcgaaagggctttgtgaaaagacggtagtgttgtcttatgtggctttacacatataaaatatgtttctgttcctttccttctgaaaatttttaagtagtcacagtaagtctactcgtactataagaaatgaatctggtggggggcacttgtaatcccagcactttgggaggccaaggcaggtggatcacctgaagccagaagttcgagaccagcttggccaacatggtaaa

SEQ ID NO: 18781 - DNA, 1800 bp, Artificial sequence
  DNA replication origin
aggggggtggtgtcagggcgagtactgagaccccagcctcgtcgccagagtgccaccctggctgtctcctggggagatggtggtgtcctcacagagggcctgcgtgcagatcccccactctcctggcactttccgctgcctgacgcccttgcagctcagctacaagtcggtggactcattcctgcaggcagatggccccagggagcgaccccaggctgccttcccctagtgcacgcacatgtgacaccggctctgacatgctgctgactggacgcttgtcccgatgggccgccagctgcggcctccaagaagctcctgggcgcccccgcccgacccgcacctagggagaactcccaaagctctgcgcctactccggcagagccgcactaacgcgaacccgcgaacccgggccggggcctgggcctgagtggccatactgcgctgctgaagctggcatcgctgccgcccttgtgccaagcactgcgcacgtcctggggcaggagagacgccgctgtgaacacctgccaggccggaaatgccggcttgaagctggcttccaatggaatcgctgccagggaaaccaaccgaggcccgcacaaaatggatttgcaaaagtaataccccaggcaagactccaggcccctcccagccctgcgcctctccctgctgacggtggggtgcgtccagagtgccagcactcagggtctgaccctggagggtggcaagtgggaggactaaagagagattggtaaaggggggaaaaacggggtgagcaagagggagagaaggttttgtgaaaagacagtggggagaaaagacagttgggaggaaagtttttggttagatggagcgggaaaagagggtggcgagcaggaggcataaaagacggtggggagaagagtgggggaaaaggttttgggtagatggaggggggaaggtgataagcaggaggtgggaaggagggttaggaaaacgacgatggaaaaatagttttggggtagatggagggtgaaaaaagggtggcatgtgggagaggggacgggagtggggaagaagagggtggtgagcaggagcagggagaaggctttgtgaaaagatggtgaggggggaaagacagtgaggaaaaaatgtttttgggtagatggagagggaaaagagggtggagagcagcaggggtcaaaagagagtggtgagtgagggagacaaggttttccgaaaagaccgtgggggaaaatgtttttgggtagctggatggggaaaggagggtgacaagtgggagaaggaaaaagagggtggcgagtgggagggagagaaggttttgcgaaaagacagagggcagaaaagaaagacggtgcagaaagaaaaacggtgggtaaaaagcttttgggtggatggaggggggaaaagaaggtggcaagtgggaggagaaaagagggtggcgagagggaggtaggaaagaggattgggaaaaagacgatggggagaatagttttggggtagatggagggcaaaaagagggtggcaagcaggataggggaaagaagcgggcaagcgggaaggcgaaagggctttgtgaaaagacggtagtgttgtcttatgtggctttacacatataaaatatgtttctattcctttccttctgaaaatttttaagtagtcacagtaagtctactcgtactataagaaatgaatctggtggggtgcatttgtaatcccagcactttgggaggccaaggcaggtggatcacctgaagtcagaagttcgagaccagcttggccagcatggtaaaatcccatctc

SEQ ID NO: 18782 - DNA, 1853 bp, Artificial sequence
  DNA replication origin
ggcaagtcgaaagcgttcgcaccagcggggcagcggctgcgggcggcaggcggcgggcaggtcgggagtgagaaggaccggcctgggctgactgctctcccctcgcgcctagggagccggtcggagagcgcgattggggtgcggagccccgacgctgccctgccccggatttcattccgcggcgggggctccgcgagcggaattccggcggctgccgtgactccagtgcaagtgagtcgtggggcagggacagacagccggcctcacggttgcgggggccgatcggacacctgtctcgcgggcccggccttatgccggggagcagcgggcgggctgctctggggcgagggggcgtgagcgcagcccgcgcggtgccgcgcgcgtacctggcgggcagtcctccagagctgctgctcccgtgggtggtcacagcggggaggtccggcggccgggatccgggctcggagggggcgggccgccggcggggctccccggctaagttggggcggggaggaaggaggaggcgtcagtgggcaccttttcagagctactgcgtgcgggctggaaggctgcctggtgtcggattggggcgatcgggaggcggggagcctttgggcagtagcccgcccggggtccggagacccccacccaggggccgactccaatcacggctccacccccacagcctaggtggcggtgtgacagttggtaccttcggtccagatcgcagccggccaggcgcccactatttcgggatccccccaccgtagcccctcgatgccccctgacgacaaaacaggtgggaccccccctccccgaggagcgctccccttctctccaggccgcgtaacagcccgccaggctcgcgggcggctctgagaccccgcagggctgcccccgcggggcggggacgtttaggggcaaggcctggaggggaatcggcgcagcccagaactggacagtctctccaggacgccgcttttccgtgacagagggggtctgcgctatcccccagcgacgtgtcaagggcaaaacagcagcagcagcggctgcctctcccaccgtcttaacccgaactcgggcttgtggcgtcctcccgtgggccggatagagtgccctagtccagctaacggattcagcctggagcgttctggtgaatgctgctttcctctttggtgccgcgaagtagaaatcgggataagggttgtcatggccggagggagcgaagagaatccaggcaggtgcttctcagatgtttcttttcaccttcaaacagtacagacttcagcggtacacgcttacgaaaccaagtgaaggctgctttctgaaagggaagtttattttctatgttctggggcctgtcgactattttagctcccttgacatttatcttcctggacctttaaagctgtttggacaggttattttgcttttaggtttggggatgtttctagttggctccctggatgtggaagtggcgaatgtctgatgtgctgtgctgtgaactccccacgcttcctggcactgggggttgaaacattcaggggggactgagtgggccgaaggagaggagtgggactggtgacgtaggaacgcgatgggtgttgcctagagctgcccagatggaaaggggttggcggctgttttggcctgtgcagaaggggagagggcggggcgtttcattggtcggggtgtgaaacgtccacgggcgaaggctgcgggggatgggtgcctgtctggtcagtgctccaagggaagcccagggatgtttggtgattcagcaggtggcagccttccagctctgaagacatgccgtggccaagcaaagaagcaagcaagcaagcaagcagcag

SEQ ID NO: 18783 - DNA, 1256 bp, Artificial sequence
  DNA replication origin
cttccgccgcccctccgagctgcggcgaaaacccggagagcggctaggccggggtcggagcccgcgcatgcccagtagccccacgtggtgcaagtcgcctgaaggaaggttttcctctgctccccgagcgaagccccagcgcccaagttaggatggacagcggggagagctggccttcccgccccgatgcccgccgtccctggccggcccgcgccgcacctcggtggcctacaggcagcccgaggccgtgcctcccgcggggtcggggacttggcgagcgggggaaggggcgcggctacgggcccggcgtaccacgtgactgtccgcggcgctccgggcagccatcttccgcccggccatcgggccgcgggcgctcggaaccgacctgggagctggcgggaccgtcctcccccgccacgccctcccatcgggctttgggcgccggactctggccaccgctcggcacctgcctccgcctcgccttggggtataggagtcctgtaccgacccctggcttgcccagaggacaggttctcgcccgggccagaagcaaactgcggcgaaatcgagacaacagaactcaggtggcggagggtccccgcttttccccagaggcggaagttggcgagggagtcctcttccgttatccagcgagagcgctgctctggctgcctcccggttctaacctagtccctgcagaggagtgatgtaccggcagggacattggacagaggccgtgctcttccctgcagcgcataccccgcggcccctgctggtgggccgcttcgatggtgctgaggttcatagtgaatatttattgagcgcctgcctcgagtcccttgggtttcctgttgtctcgggacctgccgcgtcactatcaccctagaatttgttagaaatgcacgttttcggccccacctagacctacagaaccagaaactgcgggtggagtcctgcaatatgattaacaaagccctccgggtagttgtcatggacgcctctatatttcagctaagcagtccattttaataagctaggcagtgaaaatttccatagttttccccaaagcacagtgaggagtcagggattcaaaatgaggcaatctgccccaatgcaggcgttttattgcaccctccactcctggctcctctggttttttcgcccgtaagacacagtactgctcttctcaggaagattaggaaagtacatttgtcacatacgcttttcaagcacggctttaaaataacaactgaaat

SEQ ID NO: 18784 - DNA, 2088 bp, Artificial sequence
  DNA replication origin
ctccgctgccggctgccgtcccagccgccgccgccgccgccgccgccgccgccgcccgagaaaaagtttcgcggaggggctcagtgaaaaaatgagcgagctagaggaagactttgccaagattctcatgctcaaggaggagaggatcaaagagctggagaagcggctgtcagagaaggaggaagaaattcaggagctgaagaggaaactccacaaatgccagtcggtgctcccagtgccctcgacccacatcggcccccggaccacccgggcgcagggcatctcggccgagccgcagacgtacaggtccttccacgacctccgacaggcattccggaagttcaccaagtccgaaaggtaggcgcggaggccgtgggcccgggcgctcgtcccggcccgcggcgcagaggctgggggctctggccgcggcggcgggggcgggtcggcccagggcgccccctgctcgctgcggcgcgcggagtgggggtggccccgcggcccgggaatgggaagtgtttatttttatttctgcccatcacgtgctgtgcttgtctccgccgggctgggaaaggcgagctgcacggggagacgcgcccctgtggcgtgggggtggggaggaggaccgcggaaagtttactcgcgcgggctaacttgtgccctccacacatggctgcagtcgcgcggctgtccttcgtgcgccccgctgggagcgtccacgcagggacccaaccctgcccatccaggggcctggagagcttcccagcggcgaccccccggactcaggccactggacatgctcagtggggctgtccgagcctcctagggaggggcgactggaggctggacagggttgggctcaacttagggactgaacttgcccagaacccgagctctgctggcggatgcggggacagggagaggcgggacaggggcttgtctctagggcagggatccagcctggagcgtgggggcgaggaggggagaggtttattcacagggtcactttcaaggcagctgtgatgtcagcaagacattgcaaagaaaccccaccttctggacgtttctttgctctgattgtgcctcttccagaagttcaacacctaaggctgctctaggtttggagtccgctcagtgaccttgcacctgaagcagatttgaggctgctcgtcagccctgtcccaaggtggatagtgcgccctccctttttgttttcccctgagtccctccctggaaaagttgggatgaagaaggcggaggggtgagggtaggctgtttctccggacgcctctgggctccttcctttcctcctctccggcactttaagagacaaatcctgccagttcaaagttgtatgtcactcctttggggtgtgcagaggaggctgggtggattttggccacaagtaggaagcttttgcactccactcgtcgccttcaccggagaaggctgatcgattggctgcagcattaaagcgcctctggacattagggagaggaagtgcagactccaaagccattactggcttttagtccctggaagtgcagggccgaaaatgcatttctcaggatattgaatattccattaggagtgccttcatgcccgcctacctctcttaatctttccctcttcttagatcatttgctgtctgagtttggggccctcaggggactcctaaactagtccccctctctccgtttagctctctcacttttgaggcaagctcttctgaagagcatgtcctttccactgtccccatccaggtcagctccagggcgcttagtgtctgccactggcccactgcacctcctccgtgtctgcctctggagtccctcttgtgtattgattatatgggatggggagccagggaggctgagcagcggttcagagttattagaagaagaccaggagctgggagccagagtggggagaaaaacaggaatcaggcagaaaggactcctcttaaggaattgtgggaccttctgaacagccatctcagaagacagctttcagatttcctgagtgacatagtgacattccacttacgaattaacactgtgtacatggcacctttgggcccatcttgccttg

SEQ ID NO: 18785 - DNA, 908 bp, Artificial sequence
  DNA replication origin
tctgagaagtgaggagcccctccgcccggcagccgccccgcctgagaagtgaggagcccctccgcccggcaaccaccccgtctgggaagtgaggagtgtctctgcccggcagctaccctgtccgggagggaggtggggggtcagccctcagcccggccagccgccccgtccgggagggaggtgggggtggtcagccccccacccggccagccgccccgtctgggagggaggtgggggggtcagcccccagcccggccagccgccctgtctgggagggaggtggggggtcagccccccgcccggccagccgccccgtccgggagggaggtgggggtggtcagccccccgcccggccagccgccccgtccgggaggtgaggggcgcctctgcccggccgcccctactgggaagtgaggagcccctctgcccagccaccaccccgtctgggaggtgtacccaacagctcattgagaacgcgccatgatgacaatggcggttttgtggaatagaaaggggggaaaggtggggaaaagattgagaaatcggatggttgccgtgtctgtgtagaaagaagtagacatgggagacttttcattttgttctgtactaagaaaaattcttctgccatgggatcctgtggatctgtgaccttacccccaacccggtgctctctgaaacatgtgctgtgtccactcagggttaaatggattaagggcggtgcaagatgtgctttgttaaacagatgcttgaaggcagcatgctccttaagagtcatcaccactccctaatctcatgtacccagggacacaaacactgcggaaggccgcagggtcctctgcctaggaaaaccagagacctttgttcacttgtttatctgctgaccctccctccattattgtcctatgacc

SEQ ID NO: 18786 - DNA, 1248 bp, Artificial sequence
  DNA replication origin
cttctttctacacagacacggcaaccatccgatttctcaatcttttccccacctttcccccctttctattccacaaaaccgccattgtcatcatggcgcgttctcaatgagctgttgggtacacctcccagacggggtggtggctgggcagaggggctcctcacttcccagtaggggcggccgggcagaggcgcccctcacctcccggacggggcggctggccgggcggggggctgaccacccccacctccctcccggacggggcggctggccgggcggggggctgaccccccacctccctcccagacagggcggctggccgggctgggggctgacccccccacctccctcccagacggggcggctggccgggtggggggctgaccacccccacctccctcccggacggggcggctggccgggctgagggctgaccccccacctccctcccggacagggtagctgccgggcagagacactcctcacttcccagacggggtggttgccgggcggaggggctcctcacttctcaggcggggcggctgccgggcggaggggctcctcacttctcagacggggcggttgccgggcggagggtctcctcacttctcagacggggcggccgggcagagacgctcctcacctcccagacggggtcgcggggccgggcagaggcgctcctcacatcccagacagggcggcggggcagagatgctccccacatctcagacgatgggctgctgggcagagacgctcctcacttcccagatgggatggcggccgggaagaggcgctcctcacttcctagatgggatggcggccgggcagagatgttcctcactttccagactgggcagccaggcagagggactcctcaactcccagacgatgggcggccaggcagagacgctcctcacttcccagacggggtggcggccgggcagctacatgatgaattttcatctacattaaaagtcaaggtgaccaaacaaaggtggtattttaatataattaataagaagcaaaggagaccaagatcagtgccttatctacagaaatatgaatgtgatgatcattaacaccatggcaaaaagatgaaattagttgtggggtgaggcaggtggcattggctcaggactcataatcccaaagaatttcacgttttgacttctgtcatcttccaaaggagagcagtgctactatcacgtaggtatagcagcagaactaaaggaagaagacattagtcat

SEQ ID NO: 18787 - DNA, 791 bp, Artificial sequence
  DNA replication origin
accccctcacttggggggtctggtgactgggtacccaactgtatgcagaggggagaggcagctggtctgtagcccagccagccctgtggaaccagcctttccttggcccttctggaagagaaggtctcccttaaccctccccgaccgtcccccacctccaattcaataggcagttcactctcaatcaattcaacgcactctcctccagggtctctacttttctgtccaggacagactcacctgtatctccatcttcctattctagagaggtgtttgtggggattgattgggttcctctgaggtaagtgggtctcttaaagctgcgctgggctgggggccgatgtggatgtgttgtgcttgaggagggagggaaggaggggaagagggagggaaggaggggaagagggagggaaggaggggaagagggagggaaggaggggaagagggagggaaggtggggaggagggaagcagggaggggaagagggagacagagatgggaggagggaggcagggaggggaggagggagaagcaaggaagaaaggaaggagggaaagaggaaaggaggaagggaagaaagagggagcccagcctccagcctctgggcccaaagccggcaaggcccacccctctgccttcctttgctgctcagctttgccgcgaggccgggctggagggacccttgatgtcacagctgcagacaaagggagcacacagggcctgtggacttaccgtgtgcacgacgatgcggacacacctactgtgccaggcatcaaaggactctcagctcc

SEQ ID NO: 18788 - DNA, 1367 bp, Artificial sequence
  DNA replication origin
tgtctcacagtggaggcaaggaattgcaacatttttctattattgtacaccttgaaggcgaggttaattaaatcctgttgtggggtttgagggccggaatttaatttttggagttttatttaatgtcaggagcagattgggtaataaaatgtattttgagaataagacggccttttgaccttttagggtctagggctgtaaagtgtctcagggttgctgccaaacacgtcatgaactgggctggatttttatatttgatgaaaaagagcctaaacgctatctgatttgggataaagaaaaaggagcattaaccttgactatgcctttggctccagccacctttttaagagtaaattgctgggcaggtgggggagggctagtcacggaacgaaactgtaagcccgaccaggtgtgaggaggggaggcgataaaaagattatagggtggaggagcagaggctgaggaagaattgggacctagctcggcctggcgaggagcagcctggggaggaagggagaggtcagatgggtctgtagaaaaggaagattagaaagactcagcgatgcttggggttggtactgaggggacaggcgggagggaaagaaggaagatttgggacgagttgcattgggcacagagactaggaagggactgatgtgtaaaagaatgcctggacgtcaggcacctcagaccgtttgcctattttacgacaagaattatttagatcttgcaggatggaaaaattcaaagtgccattttctggctatttggaactactgtcgagtttgtattggggtcaagcggcattgcagaagaaaataaggcatttaggttttaggtcaggtgtgagttgaagaggttttaagtttttgagaacacaggccaagggagtagaaggaggaatggagggtggaaggttgcctatagtcaaggaagcaagcctagagaaaagagagagtagggaaacagagggaaggggttcgggggttcttaccttccagaaaagtgggaaaaggggttggggcacagagataagaggtcggggcacagaaataagggatggggcacagaaataaggggtcggggcacggaaataaggggttggggcatggaaataagggattggggcacagagatacgaggttggggtgcggaaataagggattggggcgcagagataagaggttggggtgcggaaataagagattgggggttcttgccctgtagaaaagcgggacttgctgctaagggtgaaagaggaggggttgaggggtacttgcccctctcccagaaaagcagagaagggttagagacaaggagagaaggggttgaggtacttgccccttccccagaaaagcaggacttgc

SEQ ID NO: 18789 - DNA, 1344 bp, Artificial sequence
  DNA replication origin
atgtggctggggttttgtctcacagtgcaggcaagtaattgcaactcttctctattattgtacaccttgaaggcgaggttaattaaatcctgttctgggatttgagggctggaatttaatttttggagctttatttaatgtcaggagcggattgggtaataaaatacatattgagactaagacagccttctgatctttcagggtctagggctgtaaagcatctcagggttgctgccaaatgagccatgaactggactgggtttttatatttaatgaaaaatagcttaaacactaactgatttgggagaggtcggataaagaaaaaggagcattaaccttgactatgcctttagctccagccacctctttcagaggaaattgttgggcaggttggggagggctagttgtggaacaaaactgtcagccagaccaggtgtgaggaggggaggtgatagaaggattatagggtgggggagcagaggctgagatagaattagagcctgattcagcctggtggggagtgacctgaggagcagtctggggaggaggggagaggtcagatgagtcagtagaaaaggaagattgagaagactcagcgatgcttgaggttgggactgaggggacaggcaggagggaaagaaggaagatttgggacgagttgcatgggaacagagactggggagggaccaacatgtaaaagaatgcctggacgtcaggcacctcagaccatttgtccattttacaacaagaattacctagatcttgtaggatggagaaatcaaaagtgccgtttttgggctatttggaaccattgttgagtttgtattggggtcaagtggtattgcagaagaaaataaggcatttaggttttagttcaggtgtgagttgaagaggttttaagttcttgagaacataggctaagggagaaggaggaacggagggtggaagtttgcctatagtgaaggagtcaagcccagagaaaagacagggtggagagaaggggtggggggtgcttgcccccaggaaagtggtacttgcctctaagggtgaaggatcaaggcggctgtccccatggtgatcagacatctctgaaatgtgggtgaataatcaagcaggcgtccccacagtgattaaacaccaagggaagactgtcctcccaagtctgtgaccaatgccagagttttggttcatggataaaacgcgtctcctctgtctctaccagaaaaggaaaggaattgaaattaaaagaacggagagattgaagggtggtgcagaaattgaaaggagaaataagctgagggatagtgagagaggttggagaagagagtaaaaagaggccactta

SEQ ID NO: 18790 - DNA, 821 bp, Artificial sequence
  DNA replication origin
gggcggaggcgctccccacctcccagacgaggagcggccgggcagaggcaccccccacttcccagagggggcggccgggcagaggcgctcctcacttcccagacggggcggcctgggcagaggcgcccacttccccgacggggcggctgggcagacgcgctccccacctcccagaccaagggcagccgggcataggcgctcctcacctcccaggtggggcggccgggcagaggcgctcctcacctcccagacggggcggccgggcagagacgcccctcacctcccagacagggtggccaggcagaggcgcccacttcccagacggggcggccgggcagagacgttccccacctcccagacgaagagcggccgggcagaggtgcccctcacttcccaggcggggcagccgggcagagacgcccttcccctcccagacggggcggcgcgccaggcagaggcactcctcacatcccagacgatgggcggtcgggcagagacgctcctcacttcctagacggggtggtggccgggcagaggcgctcctcacttcccagatggggcggccgggcagagggtctcctcacatcccagacgatgggcggccaggcagagatgctgctcacttcctagatggggtggcgggtgggcagaggctgtaatcttagcactttgggaggccaaggcacgcggctgggaggtggaggttgtagcgagccgagatcacgccactgcactccagcctgggcaacattgagcattgagtgagcgagactccgtctgcaatcccagcacctcgggaggccgaggcgggctaatcaccc

SEQ ID NO: 18791 - DNA, 847 bp, Artificial sequence
  DNA replication origin
cctcttcccccgcgcttcatatccaagcttgacagaggccgtgggtgggctggccctcggcagtgaggctcagaggttactggccgtcatctgtcagagactgaccttgaaaacagagaaaagccctcagtccctgacaagacagccctgcccacgtgccagctggatccagctcgccaacacagcgatctccgagccccttttctacttaaaaaaaaaaaaaagtctgctgagtccattccttgagaatcacagagaaaacaattccttccttactccattcaagaaaaaaaaaaattccctttctcagaataaaaagagtaagcctcttgtccacctctcgtgcagcgggccactttgctgggaggagacgaggtgtctgggtttgagcccttcctggaggtatgaactacatgcgagccacgtccatggcgatgcctgcgaaagacgggcatgatttcttctccaagccttctttttcctcttcctcacgttcgagcttgtggaaccaactggggctgtgagtttcagggtgtagggtatgtatgtaaacagcggaattgtgtatgcgcttagtgtgcgttcaggactctgctgtgcttgaacttggcgtgtttgtgtttgtgtgtttggaggattatgagagcatgtagggggaagagatttgtatgtgtaagtgcagaaaagtagtagtgtgtgtgatgtgtgtgtgtagacaggaattacgtggatactccatgtgcgttcaggagtgtgtgtgtttgaggagctatgaaagtgcatgtatggaaaggatttatacgtgtaagtgcagaaagtggcagtgtgtacgtggtgtgtgtgtgcg

SEQ ID NO: 18792 - DNA, 1334 bp, Artificial sequence
  DNA replication origin
gcgcgcgcgagtgtgtgagcgccaggggccgcccgcccgccgcggctccccgtgggctggccgggccaatgagcgcgcggctgtaggggcggcgggcggggagggggcgccgagccctgcggatggaggcgcgggcagcgcggcgcgctcattccgcgcgggcgttgctggcggggggcggcgcagccactggacccggaccggggccgcgacccggggtggcgggtggcgtgggcggcgcccggggctgggatgcgccgggggctcagtggcggcggcggcgttggcggtggcgtcggcggctgcagggggacgagctagcgccgcggcgctgggagccagttgagcccggccggcgagcggaggcggcagcgcaggcagagcggcggcggcagcgggagcccgagcgctgcgcgcccaccatggccgcccagggagagcccggctacctggcggcgcagtcggaccccggctccaacagcgagcgcagcaccgactccccagtgcccggctccgaggacgacttggtcgccggggcgaccctgcacagcccggagtggagcgaggagcgcttccgcgtggacaggaagaaacttgaggccatgttacaaggtaggcatccctcgtgttctcggactctccgactgagcctctaactccttttcggacatccccaccgcgcgctccggcgcccgctactccagcctacggccggccggtttagctccaggcccgctcccccgcggagccggaggacacccagggactggagacttcgcgggactccccacccttccacgcctctcagatttccaggcgctgggggccctgtgcgaacttgactggcttcagaaaagccgaaggccgagtttgtactggcgcgcccaagttgcgttctggactttggagatgccaactttagcccggacacctgggctgtgccatccggaccactcgggccgcacagagtatgcgtgaccctccccattccctggcagcctcgagttctgtctctctccgtctgtttcactctctccccttgtcagtatccacttcctccagctgaggggccttgtctcactattgggaaacgctctgcagatgtcaaggcttaagacaggagctcccgcccccacccctgtggtcaaggagggccaggatcggggtgagcagccaaagcgaggggggagtgtggaggcagtgctgctgtgtttgaggacagtgttcatctcttgacaggcttataaaacacatcttgagttacattcagtccataaaaatcttcctatgctatgggtgtctgactttgtctttcacaacttagaattattttt

SEQ ID NO: 18793 - DNA, 1194 bp, Artificial sequence
  DNA replication origin
gcggcacctccatttttccaacccactctgaagcccgcctgcttcgtatccaggctctctctgccggccgggtgggcaagaagagcgggaaagggagggggagtggcagagggagggaaggaggcctgggacgcggtgatgcggcgccgaggctgaggcgcggggctggagagccgccgcgaaggcgacggctgtggcaggagctccgcggagtgtgcggctctgagagaccgagcaggacccggcgcgaggatgggaggcgcgcgctcccggcggggaggggacgctgctctcggggaacgtgatgtatagggcttcgacgcgcgcacgcgcgcgggagaacgcgcccacctgctggcgcgcggtggtccctcccccgcccttctgcgcgcacgcgcccccacctgccctccagccactgccaaggcaacctcgcgcgtgaggcgtcgggcgaccgagcgcgcgggaagggcgagcgctatacgccgcgcggctgcctcgccctctctcctggtgatagccatttggcgtcttctgtctgctctcggtgcctggcgaagcccgagttggccctgaggcgtctgcacggggaggcgagggcgagcatgtttgttgtttaccaagaattggaaaaataagggcccggactcttcggactctctgtacggtattggggtgtgggagccacctcctcccctgaaggtcccaggatactcgctgcccgcaccctgcgggctcggccggacattcctcggaaacagctgcgtctgtgtgagaaatgagcggattacctgaggcgtggaggggtttagagacagcattttgccagtccacgacactgaagcggggcaaacgtgggaactccttactgccagaaaggtgagggaatgaggagatgcagcaagcctgctgaaaaggcggcagacatgctgcggggccagcagccacgggaccagcagccacgcagtctgccttcgcagcgtagcttcattcattcatgcgcgtagcaaataagtattcaatgctcaccctatgccattgttctgggcgtcaatgaagggagtataaacagcacctgctcccatggatttggaaggaatctttgctacaatagctaatgaagattgacttgtgcttcctcaagctactctataacttgtatgcccattgattttaattgcatttaagattctg

SEQ ID NO: 18794 - DNA, 1112 bp, Artificial sequence
  DNA replication origin
tgggagcccatcattctgttttgcatagtggcagcaccattttgcattcccatggcattatttgttaatcttcagggtagttttgctctttttgagaggtcactgatttccaatgtccttcagtaggaaacttgcctagaatctttgtttgcctcccagctgcttgtttactaaatagtaaatcctcccagaaacttggtgtgcctgttccttcagcagctcctgtcaacaacctcagttcttgcttccacactcagctgctgggaaaacttcccagaatggaggaggaagccaaaaaaatggcccagtcccacacaggtgcttcacgtgagctatgggctcccagacagcagccgctgagctcttaggaggtttgcgccgggtcccaccccatctccaggcatggcagaggtgtgatcctgagcctgcctaggcacctgctcctttcagaatggtgaagagacaacagattttagacatcccttggtgggcagcttgtaaaacactactgtaggttcatactcacatcaacagaatggatcaagtggtgtgtgtgggactcgatcttgcatggaagggaggagttggggtgtgagagatgttggatagatgtctatgtgaggagaggtgtgaaggtgtgtatggagcaggtgtgtgtgtgtggacagtatgtgaaggcatgggaattggatgtgggtgtgtgtgaggtgggtgtgcatgggtatgtgtggagtaggctgggaggtttcgggggctggatgtgagggtatgaggtatgtgtggggtaagggtgtgtgtgtgtggaaggtggggtgtttttaggtgtggggagtagggatgagagtatgggggtttggtatgagcgtctgtgtggagtaggaggtgagggtaggtatgagagtgcatgtaggatggaggtgatcactaggggctgagggtgtacatacgtgtgtgtgtgtggagtagggggtgagggtgtgtatgtggcaggggtggggctgtggagtgggagtgacactgtgtgggggaaaggatatgcagagggtagggtgtgagtaggtgtgtgtgtgcctgtgtgtgttggagggtcctagcagggaaaggaccagtgg

SEQ ID NO: 18795 - DNA, 1199 bp, Artificial sequence
  DNA replication origin
cggcagccatccgatttctcaatcttttccccacctttcccccctttctattccacaaaaccgccattgtcatcatggcctgttctcaatgagctgttgagtacacctcccagacggggtggtggccgggcagaggggctcctcacttcccagtaggggcggccgggcagaggcgcccctcacctcccggacggggtggctggctgggcggggggctgaacccccccacctccctcccggacagggcggctggcggggcagaggggctcctcacttcccagtaggggcggccaggcagaggcgcccctcacctcccggacggggcggctggccgggcggggggctgacccccccacctcccttctggacggggcggctggccgggcggggggctgaccccccacctccctcccggacggggtggctgtcgggcggagacgctcctcacttcccacacggggtggctgctgggcggaggggctcctcgcttctcagacggtgtggctgccgggcggaggggcttctcacttctcagacggggcggttgccaggcagagggtctcctcacttctcagacggggcggccgggcagagacactcctcacatcccagacggggcggcagggcagaggtgctccccacatctcagatgatgggcggccgggcagagacactcctcacttcctagatgggatggcggccgggcagagacgctcctcactttccagactgggcagccaggcagagaggctcctcacatcccagacgatgggcggccaggcagagacgctcctcacttcctagacggggtggcggccgggcagaggctgcaatctcggcactttggggggccaaggcaggcagctgggaggtggaggttgtagcgagcagagatcacgccactgcactccagcctgggcaccattgagcactgagtgaacgcaactccgtctgccatcccggcaactcgggaggccgaggctggcggatcactcgcggttaggagctggaaaccagcccagccaacacagcgaaaccccctctccaccaaaaaaatacgaaaaccagtcaggcgtgggggcccgcgcctacaatcgcaggcactcggcaggctgaggcaggagaatcaggcagggaggttgcagtgagccaagatggcagcagcacagtccagcttcggctgggcatcagagggagac

SEQ ID NO: 18796 - DNA, 969 bp, Artificial sequence
  DNA replication origin
ccgccccgtctgggatgtgaggagtgtctctgcccggccgccccgtctgagaagtgaggagaccctctgcctggcaaccgccccgtctgagaagtgagaagcccctccgcccggcagccacaccgtctgagaagcgaggagcccctccgcccagcagccaccccgtgtgggaagtgaggagcgtctccgcccgacagccaccccgtccgggagggaggtggggggtcagccccccgcccggccagccgccccgtccagaagggaggtgggggggtcagccccccgcccggccagccgccccgtccgggaggtgaggggcgcctctgcctggccgcccctactgggaagtgaggagcccctctgccccgccagccgccctgtccgggagggaggtgggggggttcagccccccgcccagccagccaccccgtccgggaggtgaggggcgcctctgcccggccgcccctactgggaagtgaggagcccctctgcccggccaccaccccgtctgggaggtgtactcaacagctcattgagaacaggccatgatgacaatggcggttttgtggaatagaaaggggggaaaggtggggaaaagattgagaaatcggatggctgccgtgtctgtgtagaaagaggtagacatgggagacttttcattttgttctgtactaagaaaaattcttctgccttgggatcctgttgatctgtgaccttacccccaaccctgtgctctctgaaacatgtgctgtgtctactcagggttgaatggattaagggtggtgcaagatgtgctttgttaaacagatgcttgaaggcagcatgctcgttaagagtcatcgccactccctaatctcaagtacccagggacacaaacactgcggaaggccgcagggtcctctgcctaggaaaaccagagacctttgttcacttgtttatctgctgaccttccctccactattgtcctgt

SEQ ID NO: 18797 - DNA, 1074 bp, Artificial sequence
  DNA replication origin
ggcagtgccctccctactcctggccgggccgggagcagcgggagcaggcgcagcgcccctaccgcccgcttttccgcctccatctcctccgcctcctcctcctccttcccccaaccacccgcgcagtcacaaccggttcagactggccggggtgccccgcaaagagagacaagggagaaaaagacagcagggaaaaccccggggaggagaaggcgaaagagaaggtggagctcagagaagggggccggctccccagctccatgtggccgccgccgctgcgggtctgtgggggcagagggcggcggctcccggggcagcgcgtagcgggaccgattgcctaatactccggcaggggccggggccgcagctggctcggataaatagccgcccggctggcccggagctgcaggggagagcggcggccgcgatccccaccacaccaccagcccggccgcacggggcactgagccgggtgctgagcaccggaggccccgccgaggccgggactcaggtaaagggctggagcttgcggggagggttccaaaggtgggcagcagcccctgctgcccagcgtcctagaggcaagaagtaactccgactcggagcagtaggagggggcggtggagcagcatggaaccgggcttttgtctggggtgtgtgccgggggcttcgagtgtccacggtgcgcccgcccctcgccgccccctttttgatggggtgcttctacaaagtgggcaagttttcccgggaatccgaaggcggcattttgtacggagttgaaagagagggagggggtcctgggggtggtacggtggccccccagagagctgcctctggactccagagagcttccagggttgctggtggaagagcagggagaggtgcatgtgatgcaggtgggcctccatttcccagaggaccgaaaggcctccaactgccttggtccggagcgcgagcaaccaggtgcccccggagggttgggaatggggcgccgcgggtactcctgacctacgtggagcgcagcgcgcagggccggcggattctgcacgttggcgccaggttcagcaccacccg

SEQ ID NO: 18798 - DNA, 1516 bp, Artificial sequence
  DNA replication origin
cccgcagcggcggcggccacatggagctggggagccggcccccttctctgagctccaccttctctttcgccttctcctccccggggttttccctgctgtctttttctcccttgtctctctttgcggggcaccccggccagtctgaaccggttgtgactgcgcgggtggttgggggaaggaggaggaggaggcggaggagatggaggcggaaaagcgggcggtaggggcgctgcgcctgctcccgctgctcccggcccggccaggagtagggagggcactgcccgagccgcggccccggccctaccaggcctggagccaccaaagccacgagagaggtgggcgccgtcggccaggcgccctctcggtgcgcacacacgcgcgtccccaggcgccgctgtgcccccgccgcccaccacgtgccctggccaagcccgccaagggccgtgcgcgtttggggggagccggggtgtacaaatgaatgcgagtgttccttggtctccctggctcccggggccgctggcgccctcctggccggagctgtatgctcagctggcagtggtcccggagaaacgggcaccagaactttgtggagtccgtgatcctgggaagtgaggagtgaggatgccaagtacagtcctttgtgacagctccgcgggaaaggagggcgtcctgcggtgcacacacacacacacacacacacacacacacacacacacacacacacacaggctgcttctaaggacgttcagtctgtcctgcagttgaactgcactaacaatactaccattggcaatactatctttggtaatgggcttgcgcgcagagatggatggctgttttatccctcagtcactgcagcagctgggggctgtccataggtaccagtggttcgccggccgtgggaaacctccaaagtgatatgcactttttgtgttcctctgtgttttttctgggaagccgcaccacactttctacttcttaaaggggactgcggccatcaaccaccttgatgagaacttcctttatacactgaagtgacaggtcctggcctagacgaagactctacacctggcaaagggttggtttcagaagtgctgatcaagctgctgagcctctgtttccttgtctatgaaattacaagaatcttgcctgtatcatggagtttgtgtgagatgagagtttaaaaaacctgtggagcctaggcaaccatgtcatgttttcttacagcacaaatgtggtggaggttcagcccttttggcccccatcagtcctttctactcaatttattgactttcaggttagagtgaagagaatgaccactgctagtcaatagtattttgttttgttctaagaaggaaaaagagaagaggggaaaagtaacagtgagaatgagagcaacatggtcccaagaataagttctggaaggaaaaatggagaaactgtactgtcaacaccataaaaaacttacttctaaagaggcaagggaacacaataggggattcttaggctgtatttt

SEQ ID NO: 18799 - DNA, 1233 bp, Artificial sequence
  DNA replication origin
cggagttgggggtaaggttatagattaacagcatcccaaggcagaagaatttttcttagtacagaacacaatggagtctcctatgtctacttctttctacacagacacagtaacaatctgatctctctttcttttccccacatttcccccttttctattcgacaaaaccgccatcttcatcatggcccgttttcaatgagctgttgggtacacctcccagaccgggtggcggctgggcagaggggctcctcacttcccagtaggggcggctgggcagaggcgcgctcccccacctcccagacggggtggcagccgggcgggggctgccccccacctcccggacggggcggctggccgggcgcggctgctccccgcctcccggaaggggcagctgccgggcggagggggtcctcacttctcagacggagcagctggtcagagacactcctcacctcccagacgggtggcggcggggcagagacactcctcagttcccagacggggtcgcggccgggcagaggcactcttcacatctcagacgggacggtggggcagaggcgctccccacatcctagacaatgggtggccgggcagagacgctcctcacttcctagacaggatgacggccgggaagaggtgctcctcacttcccagactgggcggccaggcagaggggctcctcacatcccagatgatgggcagccaggcagaggcactcctcacttcctagacggggtggcggccgggcagaggctgcaatctcggcactttgggaggccaaggcaggcggctgggaggtggcggttgtagcgagccgagatcacgccactgcactccagcctgggcaacattgagcactgagtgagccagactccgtctacaatcccggcacctgagaggcggaggctggcagatcactcatggtcaggagctggagaccagcccggccaacatggcgaaaccccgtctccaccaaaaaatacgaaaaccagtcaggcgtggcggcgcgcacctgcaatcccaggcactcggcaggctgaggcaggagaatcaggcagggaggttgcagtgagtcgagatggcagcagtacagtccagcctcggctgggcatcagagggagaccatgcaaagagggagggggaggcggagggggaacgacccatgattcattttcaatgtaaatccaagcaccatgtgactcataattttaatccacagtaaaacctgggtgt

SEQ ID NO: 18800 - DNA, 775 bp, Artificial sequence
  DNA replication origin
gaaaggaaagccggggggagaaggaaaggaaagccggggggagaaggaaaggaaagccgcggggagaaggaaaggaaagccggcgggatgaaggaatatgaaatgccggggggagaaggaaaggtaaagccgcggggagtaaggaaaggaaagtccggggtagtaaggaaaggtaaagccggggggatgaatggaaaggtaatgctcggcgggagaatggaaaggaaagccggggggagaaggaaaggaaagccggcgggagaaggaaaggaaagccgcggggagaaggaaaggaaagccgcggggagaaggaaaggaaagccagggggagaaggaaaggaaagccagggggagaaggaaaggaaagccggcgggagaaggaaaggaaagccagggggagaaggaaaggaaagccggggggagaaggaaaggaaagccagggggagaaggaaaggaaagccgcggggagaaggaaaggaaagccgcggggagaaggaaaggaaagccgcggggagaaggaaaggaaagccggcgggagaaggaaagccagggagaagtggtgacatggaagtggtaaccttaaacattagtgaaactggccaggagcagtggctcacgcctgtaatcccaacagtttgggaggccgaggcaggcggattatgaggttaggagatcgagaccattctgggtaacacagtgaaaccccgcctctagtaaaaacacaaaaaattagccgggcgtggtggcgcgcacctgtaatcccagctactcagca

SEQ ID NO: 18801 - DNA, 1609 bp, Artificial sequence
  DNA replication origin
gcccggcgcccactcattcgcagcccggccttcgtcgccgccgcctccctgctgctcctcctcctttccccagcccgccgcggccatggcggacagcgccagcgagagcgacacggacggggcggggggcaacagcagcagctcggccgccatgcagtcgtcctgctcgtcgacctcgggcggcggcggtggcggcgggggaggcggcggcggtgggaagtcggggggcattgtcatctcgccgttccgcctggaggagctcaccaaccgcctggcctcgctgcagcaagagaacaaggtgctgaagatagagctggagacctacaaactgaagtgcaaggcactgcaggaggagaaccgcgacctgcgcaaagccagcgtgaccatcgtgagtgccccccggggacgcgccgcagcgccgacctccgcccgccccgggaggggctgcacccgaatccagccaccccccaagtcttccccagattcccggggaccctctgagagcacactccctgcggggacctgctggcttccgggaggagagggaggtatcccttcggggccacgcgggtctgtcctcctcgggggtctgaggacccttgcgcggtgcgggggaaggctactgtggcaaccattcatggtcccttttagcctctggagaggaggcccctccggggctgggctggaggctggcggcgtggctggggggcggggtaggacttttttcagccctagcatgtttgaggggtgcgtccagaatctggggaaccccagtcctggaagagggaggaagctgggatctcttactgggtcctggctcggagtgtgggggttcgcagctggactgggcactaagctggcatctggactgcgctagctggatcgcccggggagggggcgggagagagtggccgggaatccgggaagtggagttttctggccgggatcgagagggaagggcgggtacggcgctaatgctcccacctctgttggaagctctttgctttgggttgggagggtggacggtttacagcgaggagagtgcagcatccacgcctggacagggctggggccgaaaccaggggaagggtagtgactgtgactccctggctgagccagaggtacgtgtgtttgcttcattcgtggagtggttagaagtatcttgcttctgagtctagatactggagaacaggccatctgttctgtttctacctgtcccctggaggctgcccagaaacgggtaagcttgggtctgtaggtctctctcctggtgtggcaggcgtttagaaaggcccctatagcagtgatgaggcgaaacgtaactagaaaaagtacactgtgtactctcacctatcatccctgccagctcaccacatcattaacatgaaggatccccacacagacaactgtattcaaatcaaaagttccccagccagaagcagagaagatgatgtcaagaaatcaagggggataaatggccatagctgctgcaaaatagcggattaggctgaactttgaaatgaagaaaaagggatgaatttggggatagagggtcacaccttggaaatggagcaagtttaggatgccccttgtgccaggaaatgccttc

SEQ ID NO: 18802 - DNA, 746 bp, Artificial sequence
  DNA replication origin
agctggtggtgcgggggcagtccttggctttcccgcacccgcagtgcctgcgcgttcccagcccgcccgtggtcaccagacggcggcgggcgggtcccggagctttcagccagctttgctgggcggcctagggagcgcgcccagcccggctggagcgagccccagtgcaatactgcccaagcccgggcggggtctctgttctctggcagaggaggtcccttggcagcgggaagcgccctctctttctctcgccgccgctccgagtctgcgccctggtgccaggcgctcagctcggcgctcccctgtgctcgcccggcgcccactcattcgcagcccggccttcgtcgccgccgcctccctgctgctcctcctcctttccccagcccgccgcggccatggcggacagcgccagcgagagcgacacggacggggcggggggcaacagcagcagctcggccgccatgcagtcgtcctgctcgtcgacctcgggcggcggcggtggcggcgggggaggcggcggcggtgggaagtcggggggcattgtcatctcgccgttccgcctggaggagctcaccaaccgcctggcctcgctgcagcaagagaacaaggtgctgaagatagagctggagacctacaaactgaagtgcaaggcactgcaggaggagaaccgcgacctgcgcaaagccagcgtgaccatcgtgagtgccccccggggacgcgccgcagcgccgacctccgcccgcccc

SEQ ID NO: 18803 - DNA, 1074 bp, Artificial sequence
  DNA replication origin
cgccgccgcctcccccgccgccaccgccgccgcccgaggtcgacgagcaggacgactgcatggcggccgagctgctgctgttgccccccgccccgtccgtgtcgctctcgctggcgctgtccgccatggccgcggcgggctggggaaaggaggaggagcagcagggaggcggcggcgacgaaggccgggctgcgaatgagtgggcgccgggcgagcacaggggagcgccgagctgagcgcctggcaccagggcgcagactcggagcggcggcgagagaaagagagggcgcttcccgctgccaagggacctcctctgccagagaacagagaccccgcccgggcttgggcagtattgcactggggctcgctccagccgggctgggcgcgctccctaggccgcccagcaaagctggctgaaagctccgggacccgcccgccgccgtctggtgaccacgggcgggctgggaacgcgcaggcactgcgggtgcgggaaagccaaggactgcccccgcaccaccagctcgccagccacacgtgttccaagggagggcctccgagccccctgatctaagcccacggccgcccagcctcttccgggctcgcgcccgccccgagaaaaaggaaacctgatgccccaccagcctcgcaggtgccggggacacgtggaaaggtcagccgggctccggcacccatcctctaccgtgttgtggccccatcttccgccgactgtgtgtgcgcgtgtctccctctatctgtttcacacatacacgcagttttatattctcaaaagcaaggtgtttttgactaggaaggcttggataaacctaagagaacaaagttcctctacaagaggccgaggaggatgaaacaacagcagccacaggttaaccttgttaagtaagaatttgcaggagagacacacatctcctttaataacctcataaaccacactgcgctcaattgtttaaacaaggtgcaactgtttttttctttttctctttgcattttgcaaacatttccagcacatgtctcgtagtaggattaagacagtaacatttacctaatgaagaaaaa

SEQ ID NO: 18804 - DNA, 1254 bp, Artificial sequence
  DNA replication origin
ctggccgactggatgtgatcgccgggagctgggtgcagcgcagcctcggcctccggcccagccgcgcctttacctgagccgggcccgcccccggcgcaccggcccgcgcgggcacctggcggtcgcagcggacacagcaggaggaggataggccgcgctgggcgggcgtcgcggggccgcgcttggtgttcctgagccgcggccgaactttttcccaagaagtcccacgtttggaggcccgaggagcgggacggggaggagagactggagttcctggaaggagcagcagcagcagccccacaacatggcctcctccgcctcctcctctcccgcgggcaccgaggactccgctcctgcccaggtgagcgccgcgccgcccccctacctgcggctgccttcacccaggggcatgcggggacccgggcgggcgggaggcccgggccggggggccccaggagtcctgccctcctgggggtgccaggcggcgccgcgaggctccgggagggcgagtggaggggacccggttcctgcggatcgtgggagtccagttgcgcctggaagttgcggcccgggacagaggcgagagctcgaactcggtcccagtgctggagcatccccaggagagaggggggcccgaggacttggggcttctgcttggaaacattcgtctggaaaaagaaaagcgggccccgggctcaggacgccctcacctcggtctctcgtcttggggcttctctgctcttggctcgcccctccaactccgtgccaggctgaacctttcctaaggacacgactgaagcaggctgcagaggctgcacgtttggcggggaggaaatcacctggttcggaaatcacctggctctgaaagttaccttcagactctgaaagttaccttcagagttaggcgtttttttgttgttgtttgttttgttttgttttcttttttgaaagtgagtcgatttaactccatgaaagtatagaacatacttcatagattgagacagaaacgtgcagagcagggtggctatcgtggcagtgccagggggtggctttggtggatttaccttctcttcgatctccgatctccgagagccttgtaaaggcatgcaaacaaaaacaagaagtagaaatcggttgcctgacgagcaaaaccgctgcatcaagatagtctccttcttcccaccccacacccctcagcagattgccacctttacgcccggaggcgtttaatagcaattttggtgctgccacggt

SEQ ID NO: 18805 - DNA, 1384 bp, Artificial sequence
  DNA replication origin
ctgctaacgtcacagtgcgagcggcggccgccacggcggcggagcgaggtgccgggtgctccgttccgcctggctgccccgcctgggagcggggtgggggcaggcgaaggggagggctgcgggtggaaaggggcgagcccctctcgcccgggactgggaagagcggccacggcgccgggcgaggcggcagggcgaggcagtgccatgctgcctttgtgcaaagttgggcggcgggcggcgcgccgcgcgcaggggccccgcacacccgcgaccgcgcgcagccgtggctgctgctgagtggcgggggcccccccgctccccccggcccttgaaggcggagagagctcgcgtctcgctcggcttcagggtaggttctgtgtcgtgagtgctctatgctatgaaacttctccgagcagccgctgcggagcccccaccgccccggccccagcgggtggcaagtgggggccctgggccgtgccacgaggccagcagcgccccgagagagagttgtgggaccgagccgctaggggggcctccctcgcctctctgagaggccggggaccctcccatcagaggcaagcacaagagatttctaggagcgcccgcacagccgcacccctaacttggagctgagaaaatgtacaacaggcacccttagcaggctggctgcgccagggagggggtggtgccgcgccgacgagaaggcgcttccccttcgaaggccagtatggggaggccgggcggggaccggaggacccggacaggggaatacgctagcccctttggcgcttgcaccctcttgagagttgactggccagcccacagtcgctcccctcccctcccccgcaaccccgtgtctatggagtctgttgtgagttgctgtgacaacaggaggagctgccatgaggggcttgcagagcaccttaccttgtctgtgtgtgctcagctttggggaaaacaaccaaggggtgatgtgcagacaggagaatccagccctctgccccccgaaaagaagtggaaggcaactatgtagaaatatatcattagatcctactgttagctgcaccgtttccatccccagcagtatcaaacatctcaactgaggagcgatgtcaatatttagacttggacaagccagaaagttagaagggagcgccaagcacagggttttgacttcgctttgcacgttagcacacaagctgtgcctttggagctgactgtacacaattgctgggggcaaaaatgcatgaaggttaatatatacacagaggcacccagatctaggaaaatctaggaagttaagaccagaagagtcgccctgactttgaacttccccatcctgtgctgttcactgagccttgttgaactccagccagacgctcag

SEQ ID NO: 18806 - DNA, 1085 bp, Artificial sequence
  DNA replication origin
gggccctgagcggagaatggcgaggccgcaggcactggggccacaggggccaggtccaaagaccggggtcccagtaggagccccacgcgccagcgggtgacagccctggggggcggggggaggcggcccagggctcccgggaccgcctaggcgttggggccccgcccgcaggactgtccggcaggccgcgaggatgtggagggacccgtggtccccgccccgcagggcggcggctgccgggccgggagcgaggtggcggaacggggactgtggcccgggatgcaggcgggggaggcggccgaggtgggagagggcggggtcggcggggcggggcggggtcggcgctgtcccggcggctttacaaagcccgcgccagcctcggccgcccggcgggacccagagccgccgcgggagcttccagcgtccccaggtagcgcgggcgtcgcggggcgtggcggggcgggagcgcgcccgggaggagccgcgccagggtgggcgggattatggggggtctctctgcccacccgcagtccccacatccgcaggctcatggggacgcgagagcttggagcatccctttgcacccttgaaaggagggtgacctggttacctttcgctgacctcctcacagctagcccagctgctctgacaaagcacagggccccagagggtgcttgcttccagaatactttgggtgtcttgagcagcctcctacctaagcgtcccccagcacacacacacacacacacgcgtgcgcgcgcgcgcactcacacacacacacacactggcggaggcgggggtggccagagggattagagagataaagtcactgtcagtcagaaaagataagaatctgggctggacgtgccacactggggtcttctgaaagtaggcgcagcatctgcagctcctcatgcccggccctaaggtgatgcgggattgatttttcttggtttgttagccgtgaaagccccgggctgtaaaaaggtttgggtcaagaactagactttgatttattgaggcttgctttgccctgctatgccacaccttgtggtgtctggagatggggtattttggagcactca

SEQ ID NO: 18807 - DNA, 1084 bp, Artificial sequence
  DNA replication origin
aaaaagatccttagatccttacacctacctcgaaagctcgagagcctggcacagcactagctgccctcaaaagtctgtttgattaccctgctctcgctttggcaacacaaagcctcgccaggcggcagtgcgccctccctccccgctgcgccgtgggcacagactccccaaaatagttcccctcggtaggtaccacggcgctgaggtcggtcagctgaggaggggagcccgcagaactgcggtcacacatgaaatgacagagccgaagggaggcggccgccccggcgcccagtgacagcgggctcacctccggcgtcctcccgggagcgcggcgagcgcccccgcggccgcccagaaacgtgccggggaggctctgtcccctccccgccctccccgggagcgccgtctgggcacggagaacgctggacccgcagggccagtgggcgagcacacacccctctgccctcccctcccccgcccccgtcccacacacccccaaagatcgcgcaggaggacgtccactttgcgtggagtaattgcaaactagaacatcaaatggcttgtccggggggagggggagtgggcgagagatagttgttaatgcttaacgtgtttgtgcctgttacaccaccgctttgaaatccgcccgggcagatctgcaagttatttgaatgtattattccagtacctgtcatttatcactttattcaacacgtctttgccaactcaatagcttttgatctcattctgcctccatttcgtaatttccgccctcttaaacatatcaaatacttactttgaaaaaagaacaatatcgaaacccaccgaaagaaatccacccagacacgaccgagccagacacgaaggtaaattttcaaaaggcaaaaaatataaaaagcatgtgatgttcaagaggcaatagcaggagagcaaatgaacacacacacacacatacacacacacacacacacacacacacacatccttgaacaaaacccttctcgaacaagttatttgatcttgactaaaatcagcagttggatcctctttgtaaagctgacagccaaactctgacaatggcaaa

SEQ ID NO: 18808 - DNA, 1523 bp, Artificial sequence
  DNA replication origin
cccgagacaacatggcctccttgatccaacggatcgcccgccaggcttgcctcaccttccggggcagcgggggcggccgcggcgcttccgatcgcgacgcggcttctggcccggaggcgccgatgcagccgggcttccccgagaacctgagcaagctgaagagcctcctgacccagctccgcgccgaggacttgaacatcgccccgcgcaaggccacactgcagccgctgccgcccaacctgccgccagtcacctacatgcacatctacgagacggacggcttcagcctgggcgtgttcctgctcaagagcggcacgtccatcccgctgcacgaccacccgggcatgcacggcatgctcaaggtgctgtacggcaccgtgcgcatcagctgcatggacaagctagacgcgggcggcgggcaacggccgcgggccttgccgcccgagcagcagttcgagccgccgctgcagccccgggagcgagaagccgtgcggccgggcgtgctgcgttcgcgggccgagtacaccgaggccagcggcccctgcatcctcacaccgcaccgggacaacctgcaccagatcgacgccgtggaagggcctgccgccttcctggacatcctggccccgccctacgacccggacgatggccgggactgccactattaccgggtgctggagccggtcaggcccaaggaggcctccagctcggcctgtgacctgcctcgagaggtgtggctcctggagaccccacaggccgatgacttctggtgcgagggagaaccctatccaggtcccaaggtcttcccttgaagccactggcgcccaggagcggtgggccgaagacgtgccctaccctaccacaagggctgtgtctctaccccctagcctgggcgttggatctactggaatgagcagcagccgcttcctcggcagccttgggaagcacgggcgactggacagcagccgccgggcacggttatgggggcggggtgggcggggaggctagattgtttcctggtactgtcactgccactggggctttgatttggaggaatggggcaggggactatctgaagcgcttccatcctaaagccataatgaaaatatcttcctctcttccccattctatacaaaatactaagtggttttcttgctcccactccctaccccttagttaaatagggtttattttccactcatgcccttatgcctttttttcttatagttttttaacttattgactgtgcatgacccagtggtttgaattgtttttagttcaagtcattggtaaaaactaggtttaaggagatgagctactgtttaaagtgagctggcctgcctaattaattccttgtgaaaactaaatgattttttcagtttggggatcattctcacaacataactatgcatgtagaggacaagatttattttctttcctccctttgcccagtagccacatctggtttactcaggcagcatctactaagaaattcagcacctgcatatctctgtgacatggtcact

SEQ ID NO: 18809 - DNA, 1158 bp, Artificial sequence
  DNA replication origin
gagcagatattgctatgttcctcccatcacattgcacttctgttctctgagtttataatacatattgcttcaagggttgagacaactagatatgctctgattcaccattttagggccacagagtgtggcataaaggctatacttcactcactgtacaatgtcccccaaatcagtcccaagccataaagtgcacatcagttttgcttgtctttttgctgtccccacttgaagggatcagcatctcccaacctattgtagaaaacgtcttagatcaactctgacatccagggtcaaaaacctgtgatgggtcaaaataaggggaagtggggtagcaaaacctagtcaaacaaccctttaaagcagggtcagacctcagccctcttggccaggggtccccacaccacctccttctgagcctcccctttgccttgggttgatagtcaactcacctaagagagactagaatgggctaagttttaggaagaacctgcttctaggtggaaagggggcagtgctagctccaccaaagccctttgcccaacaaagggagagagggacaggaaagggtggtagtgtttgttgtgcagctccagtggacaaagggcctccgggacctttgggagctggtgtatcagcctgagtctcatctcaaggtgtccgggtccgagaggagcaaggggcgagcggccctccgccaagactgctgctgttactgctgcacagggtacccccaggctgcacgcccccagagcaggaggctgtagagggggctggcaccgatgcagagggggcactgcttttccgctctttctgtctcaggtggatcttggtgtggcgcttcctctcatcactccgggcaaactttcggccacagtagtcacaggcgaagggcttctcaccggtgtgggtgcggatatgggtggtgaggtggtcactgcggctgaagttgcgcatgcagatccgacactggaagggcttatgcccagtgtggattcggatgtgccgtgtcagctcgtcagagcgggagaaccgccggtcgcagccttctgctgggcacgggtagggcctctcgtgcaccggcgtcttgctgggtctgttggggtacttgcgaggcctcagaatgggccgcagtggcaggtggtgtgggttataggcggc

SEQ ID NO: 18810 - DNA, 1391 bp, Artificial sequence
  DNA replication origin
cggcggctgctgctgctgctgagctgctaccaggcagccggggtccctcgctgcctccactggcccctggtccggtcaccccagcactggggccccccagggtaaagttacggattgtagagagtggagtgagtggagggggcacccgcagggtgtccagtgggcagggaaagggcttacggtctgggccagctgtaccatgtaggtctctctggcactgagatggaaagaatccaggatagtctgggatcattgggaagagacctgggtccgtggctggcttgggggatggataggaaggaggtggtgggtaggccagagaggaagaggtggaggtggtggctgctgacaggaacgcagaagggtcctggtagaggtctcctgcacagccagaataaggaggaggaggcggtggcggagagtacaggtggtccaggtcaggctgggtctgggacatggtgcacacacccaggggtcctgtggccagtgggttgggggaggcagaggtgacgctggatgaggctgtggttgaagctggggaagtgaccccttgcaagatgcctgcactcacaatattgattatgccttctgggtagcagctggcaccagggtactgagggtcaatggagaacttgcccatgtaagtgaaggtctggtttctaggtgcagagacgggagcaaagctgctgggatatgggagatccaacgacctcttctctccagtcatgtcaatgttgatcatgccatctggggaggggaaaggcagaatggaggtggaacaatgaaaatacagccaggactcccttctcacccccgctcacataggtccatttccaaggccgagagtctcagcactgtagagctgtggcaaagtccaaaaggtggggaaattgaggcccacagactgtaagaagaggccagcccaactgtggcaacccattgacagtatggaactcaagaactacctccaaaaaagcagaatgagcttttcccaactcccctccacccccagccatctgtggctctagtccccaataaaaaacacccaataatagcaacaacaatattttaaaaagcctcatccgcccggagcttttctccctcttttttgcctgggggttccacggctgaggcaccaagacaaacaccacccaagaatcgacctatcccagtcagtgccgtgatggtgccaaaccgagaggagagcccgagaagggggtgggtgatttcccggctgctccccatccccggcgccttgtgcctttttctccctccctctcccgctgcgcttcagccgagggctgctggagcgaatgggggatgtagaggaaggagtccgtaggtttccgtgccctcccaatcttctccgcctttcccgacagccgcgcgtc

SEQ ID NO: 18811 - DNA, 1316 bp, Artificial sequence
  DNA replication origin
actttccacagcatcgccaaggaaaccggcgtcgccggtgcccccgcgggcctccctcggcagtccgggggctgcttcccgccgttgcgcgccctcctccaccacccactcgctgcctccgccggccggagcccccgccttactaaccccctcaacttcgcgggcggcgggcaggtgggggcgcgcctccaggccgcaagaagggagcgctccgagattttcccggggtcggctctgcccaggagggagctaccgacgctttcccctggcgcttctccgccgctcggctctccaggcgcgcagctctccccgagagccccgaactttaccgtcactttgcccctgccccgggagaggggaggtcgaagtgctgccggccagagggcctacgcaagcctcgaaacccggggggacgcctcttccacccccatccctgcgctcgcccggggctgggcgcgccggggcgcacgcacgccggtttgctggcgacctggcgcatctgcccgcgcgccctggtctcagctgtcgcaggttcctcctgcacccacttccagtcttcaaagccagtgcagtcagcaccgtccacctggagccccaatcctctcctgcgattcccgcacacccactgcaccccatccaccacctccgggccgcgcaggtccgggcctgcgaagacacgcggcttacctccggccactccgttcatctggtcaaaggggcctcccagttcggcattgggaaagatggtcaccgacgtggcggcgaggtcctccaccgggtagatgttgtcagacagctggtgcacaaaaccactgagagttactgggattttgtctacggccttggcggtcatcatttgctcctcgcacaacctggagacccaactccctcgctacctggagtgtcagaaaagccgttttggagaggggttggactgagcctgggatggtatctccttttgccctccacacttaaaaacaaccaccacacacaccaagaaaaaaaaatcaacagaaataaaagtagcaaacaagttgctgttttttaagaaataagaaaaatgtctatttgccactgactctctcctgtctgtgttccggctgctgggaagccaggagttgctggtgtagtgttattataacagtcagtgagtcccctcgccgagctattaatcaattgctcctcgctcagttagacggaaagtgttgctctaagtatttatgggcaggtcttcaatacccgtgacgtcgctgcccatatatggactgaggaacagggctgggccaggcggcttttgccgtcacatggctgatttg

SEQ ID NO: 18812 - DNA, 1346 bp, Artificial sequence
  DNA replication origin
gctgttttggagggagggggagaagcagcgcttcagtggaagagcagagggagagaccgctcccggcagcctcagggccctgaccgcggtgcgctgggcccggcgagagctggcgcacggctgcagcggtcgaggcaggtgagcggctgaagacccgcctgcagcgccgcgcttcctccacggcgtggcgccgtggctcccgcccgccccggcccacactaagctagggccgctccgggcccggggtgaaaaagggacaggacaggcctgcgaggctgaccctgcgcgttatccctggcctccgcggctttggagcgggaaagggctctggggcagttcgcaacctgcacaaacgaccatgaatgagtcatgcaggcggcggtgcgctggacttgggcacccgggaccagcctcctgtggggccccggacaggcccggctatccattgcgggctggggcgcactgggaggtagaagctttgcgcccagcaagccagaacctgctgctatttggactttggaaaagtttttaaaaattgctttgggaacgaaacagaagggtttctaccggggtctcgcaaagtaaaacgagtgggttgggggatggggatggcgtcttgaaagtgattagagatgctttcggccgtcactgaggaccgcgctgggctcaccgaggtgttttttggggagggagagaaaatatttattctagtacgtgtattctggctcgggtgcgggcagggcgcggtcctggatcctgggctatgggggtcagggggattctgtggctgcagggaccggtagtgaaggttaggccagtgtcttcatagaacctcctgtccagcgagcccggagcccgctctgccgccgggacactgctggcaacgacggcgcgcggacgcagtcaacagggaggtgtgtagtgtaaggtgtgtgagcgggtgtgtgaagagggcagcgggggcgggagtgtgtagcggaagtggagcgagtgtgagtgtgtgtgtatgtgtgtctggaggggcagggtgagtgtccaagcttccatctggacgcccccacgcagccgaccgcccagacgcgccgggaagggcgcccgctccgcgcagcagctgaaggggggcggggagcgcgcgggcagaggaaggagggtgtctccggctgaggatttctctcgaagctccccacagtaattctgctcctcctagggtttaccctcccagtcccaaggtgcccaaaatacttaaacaaacaaacaacccaaacctgttccgttttcgctcctgtataaatagaacagactttccaaaaaagcaatacgcattcactcttatcaccagccacttc

SEQ ID NO: 18813 - DNA, 1188 bp, Artificial sequence
  DNA replication origin
accccagcaaaaatgtgcaaagtcctatttctcaagaaagaaagaaagaaaagaaaagcaagaaaagatagctgcgttcttaccacgtgcgccagcccactccgcctgcgctctggcgggtcccgcggcccccgcgctgaccatgggcaagacgacgcctcggaagggagtccgactcgcatctcgggccctgagtccgaaagaacgggggaaagccgaattatgcaaatgcggatccctgcgatggggctcgggttacggcccccgccggccccttaggtgaggcacccaccggcagcaagcgcgggcgaggcgactgctcgcgcttcgctcctctctgcgcacgtgggcggaccggcaggcgggcgagttgcccgggccgccccgcgactggcgctgctgccaaacccgccggcggtcgccgcgcgccaccccgagggggagctcctggacgcccgagtgcccggccagcagggcgcggagggcaggaccggggctgggggcggggcggggtgcctgagcgagggaaaaccgcgaggtcttcggctgccacctttcccggaggaggatgccagtagaaggcgggtggaggagggggccccatcaaggagtcttgaaagcacattagagtaaatgagagtgactgaccctctgaaattcttgtgagctttccaaggactcacacctccccctaagagctacgctgcatcagcctggggtgcgcagggaatggagtgggggcggggacgggcggcagctgcggggaggccagggaatgcctggggccagtcctgggaggcctttattgaacctccgctgaaacaagtcagtagataactctcgtaacctttgtttttttgagtgtctcttgaagtaccaacccttaaatatgggtagtgcagataatggaacagaatcaaggcgcaccctttcaagccagccaccctgtggataagctcagaaagctaaagtggcttgcctaaagtcacgtagctggtaagtggtcgtgtccaaacttgcagctgggtcttctgaatccaagtacagcgcacagtggtcgctacatcgtgccctcaggaaaacccaggtctgaaaagtgaacacttctttgaggattgggagcctgactcagcccactagggaagaatcaggccgcctccgccaatttcatctcctttctttgccatt

SEQ ID NO: 18814 - DNA, 1367 bp, Artificial sequence
  DNA replication origin
cggcacctcgggaggccgaggctggcggatcactcgtggttaggagctggagaccagcccggccaacacagcaaaaccccgtctccaccaaaaaaaaccgaaaaccagtcaggcgtggcggcgcgcgcctgcaatcgcaggcactcctcaggctgaggcaggagaatcaggcagggaggttgcagtgagccgagatggcagcagtacagtccagcttcggctcggcatcagagggagaccgtggagggagagggagagggagagggagagggagagggagagggagagggacagggacagggagagggagagggacagggagagggagagggagagggagagggagagggagaggctcatgcctttaatcccagcactttgggagaccacggctggtggattatttgaggtcaggagtttgcgaccagcctggccaacatggtgaaaccccatctctacgaaaaatacaaaaattagctgggcatggtggtgcatgactgtaatcccagctactcaggaggttaaggcacgagaatcgcttgaacctgggaggtagagattgcagtgagccaagatcgcaccactgcactccagcctgggtggcagagtgaaactgtgtctaaaaaaaaaaaaaaatcaggccatctgccttcatcgagaagtgctaagacccagcccgtttctcaatgaaactgcagttcagtcagggagagaaaagtaacacctgcaacaaccagagaaaaggaataatgttcatggcagggataatgacatgctacatcatgtggtactgaccagatgtgaactcaatcagaggagggcaagtcagaacagactggagctgccagaaatgattgaaggaggcaagaggtagctgcaaaaaaggagggctcagatcctgactgtggagtggagtggagttagggtggaggagggtgtcagcgggcacagggaagtagcataagccatatgtctgtgggtggacattccatgtgtgaatgagtgctgagtgtctctgcactgaacttatagtccacttggacagacaagacatgcagagatgaaaatgcatcagaaatggactgcaaggcatgacatggccaagagccaaagaaatgtcctgagaaggaagagttctttacaacctggttgaggggtgagttggctggagcacatggaacagaatagacatactgaaaaatagtgagcattggagtggtttggaaacgaggctggcaaagccggtgggccagatgatgagaggtgtgaacctaggcttgcagtagggaatgaaggtacttttcaaacttcttttgggaatggcagcttatttttgagacagagtcttgctctgttgcccaggctaa

SEQ ID NO: 18815 - DNA, 1202 bp, Artificial sequence
  DNA replication origin
cccagtaggggcggccaggcagaggcgcccctcacctcccggacagggcggctggcccggctgggggctgatccccccacctccctcctgaacggggtggctggccgggcagaggggtcctcacttcccagtaggggcggcccggcagaggcgcccctcacctcccggacggggcggctggcccggctgggggctgatccccccacctccctcccggacggggcggctggccgggcggggggctgacccccccacctccctcccggacggggcggctggccgggcagaggggtcctcacttcccagtaggggcggccgggcagaggcgcccctcacctcccggacggggcagctggcccggctgggggctgatccccccacctccctcccggacggggcggctggccgggcagggggctgaccccccctcccccctcccggactgggcggctggccgggcggggggctgacccccccacctccctcccggacggggcggctggccgggcggagatgctcctcacttcccagacggggtggctgccggacggaggggctcctcacttctcagacggggcggttgccaggcagagggtttcctcacttctcagacggggcggccgggcagaggcgctcctcacatcccagacagggcggcggggcagaggtgctccccacatctcagacgatgggcggccaggcagagacgctcctcactttccagactgggcagccaggcagaggggctcctcatatcccagacgatgggcggccaggcagagacgctcctcacttcccagacggggtggcggccgggcagaggctgcaatctcggcactttgggaggccaaggcaggcggctgggaggtggaggttgtagcgagccgagatcacgccactgcactccagcctgggcaccattgagcactgagtgaacgagactccgtctgcaatcccggcacctcgggaggccgaggctggcggatcactcgtggttaggagctggagaccagcccggccaacacagcaaaaccccgtctccaccaaaaaaaaccgaaaaccagtcaggcgtggcggcgcgcgcctgcaatcgcaggcactcctcaggctgaggcaggagaatcaggcagggaggttgcagtgagccgagatggcagcagtacagtccagcttcggctcggcatcagagggagaccgtggag

SEQ ID NO: 18816 - DNA, 941 bp, Artificial sequence
  DNA replication origin
aggggcgcctctgccgggccgcccctactgggaagtgaggacccctctgcccggccagccaccccgttcaggagggaggtggggggatcagcccccagccgggccagccgccctgtccgggaggtgaggggcgcctctgcctggccgcccctactgggaagtgaggagcccctctgcctggccagccgccccgtccgggagggaggcggggggggtgggtcggccagccgccccgtccgggagggaggtggggggatcagccccccgcctggccagccgccccgtccgggaggtgaggggcgcctctgcccggccgcccctactgggaagtgaggacccctctgcctggccagccgccctgtccgggagggaggtgggggggtcagccccccgcccggccagccgccccatccgggaggtgaggggtgcttctgcccggccgcccctactggaaagtgaggagcccctctgcccggccacgaccccatctgggaggtgtgcccagcggctcattggggatgggccatgatgacaatggcggttttgtggaatagaaaggcgggaagggtggggaaaaaattgagaaatcggatggttgccgggtctgtgtggatagaagtagacgtgggagacttttcattttgttctgtactaagaagggttcttctgccttgggatcctgttgatctgtgaccttgtccccaaccctgtgctctctgaaacatgtgctgtgtccactcagggttaaatggattaagggcggtgcaagatgtgctttgttaaacagatgcttgaaggcagcatgctcgttaagagtcatcaccactccctaatctcaagtacccagggacacaaacactgcggaaggccgcagggtcctctgcctaggaaaaccagagacctttgttcacttgtttatctgctgaccttccctccactgt

SEQ ID NO: 18817 - DNA, 991 bp, Artificial sequence
  DNA replication origin
ctccttccccttcccacagctcccctgggcctcgcgccggctgcagggcgcagtgagaggcacttacaccacggctctggagatcatccaggacaccatcttcacgggggcttgggccccacgtccggggcgggtgggcgcagggcgctgcggaccaggccgccaacggcaggccgcgcgcttcgccggctcctcgcgctccccggggccgcgctggcgccctcaggagccgggcccggtgtgtgcgcgcggcggcctgggctgcgcagaggtcggtcccccgcccgtccccgcccgcccccgcccgccggcccggcagcctagtccggacagcaccccgcccctgcgctccgctgataggcggtggcggcggcgcgttggcccgggccagggctggggccaggcggccgggctccagggctgggctggcgggatcctagcccgcgctggacggcctcgctgccgcggccttggcccctgcgctctaaccaaccttaccctccttagctctttgggacgcccacactcgcggcgagagtggggcaggaggctgaggaagggtactggagggtagggattggcagtgcctgtgtgaaaagtgagatattcgcaggaactcggtgtccaataaaactctcgaccaggccctggttttggagagccaagactttgaggtgtgcctggccacatccggtatcctcagtgtttacggaggcccagcaccaaaggcgtccttatattaccacattttaaaggaatcgtcgagaggttcttgcacaggcctccgtgtgtgccacgagtctcgtggtgcaatgcagggagggacagaggaggatttcatgtttgcagtagtgggtgcagtgataccactgttctgggcctcttagggcaccttttcatcagagcatctgcaaagactgtttacagacacgaatctccattatttccctgaggcctgccagatgttcaaagtaaaggctgggtctaggat

SEQ ID NO: 18818 - DNA, 876 bp, Artificial sequence
  DNA replication origin
ccccgtctgaaaggaggagaccctccgcccagcatccgccccatctgaaaggaggagcccctccgcccggcagccgccccgctgaaagcgaggagtccctctgcccggcagccgccccgtctgggaagtgaggagcccctctgcctggccagccaccccgtccaggagggaggtgggggagtcagcccccaacccggccagccgccccgtccgggagggaggtgggggggtcagccccacgtccgggagggaggtgggggggtcagccccccgcccggccagccaccccgtctgggagggaggtggggtcagccccccgcccggccagccgccccgtccgggaggtgaggggtgcctctgcccagccgcccctactgggaagtgaggagcccctctgccgggccagcccccccgtccgggagggaggtggggggctcattgagaacggtccgcgatgacaatggccgttatgtgggatagaaaggggggaaaggtggggaaaagattgagaaatcggatggttgccatgtctgtgcagaaagaagtagacatgggagacttttcattttgttctgtactaagataaattcttactgccttgggatcctgttgatcgaccttacccccaaccctgtgctctctgaaacatgtgctgtgtccactcagggttaaatggattaagggcggtgcaaaatgtgctttgttaaacagatgcttgaaggcagcatgctcgttaagaatcatcaccactccctaatctcaagtacccagggacacaaacactgcagaaggccgcagggtcctctgcctaggaaaaccagagacctttgttcacttgtttatctgccaaccttccctccactattgtcctatgac

SEQ ID NO: 18819 - DNA, 1125 bp, Artificial sequence
  DNA replication origin
aggggctcctcacttcccagtaggggcggctgggcagaggcacccctcacctcccggacggggcggctggccgggcggggggctgaccccacctccctcccagacggggtggctggccgggcggggggctgacccccccacctccctcccggacgtggggctgacccccccacctccctcccggacggggcggctggccgggttgggggctgactcccccacctccctcctggacggggtggctggccaggcagaggggctcctcacttcccagacggggcggctgccgggcagagggactcctcgctttcagcggggcggctgccgggcggaggggctcctcctttcagatggggcggatgctgggcggagggtctcctcctttcagacggggtggttgtaggcagagggtctcctcctttcagcggggcggctgggcagagacgcccctcacctcccagatggggtcgcggccaggcagaggcgctcctcacatcccagacggggcggcagggcagaggcgctccccacatctcagacgatgggcggccgggcagagacgctcctcacttcccagatgggatggctgccgggaagaggcgctcctcacttcctagatgggatggcggccgggcagagacgctcctcactttccagactgggcagccaggcagaggggctcctcacatcccagacgatgggcggccaggcagagacgttcctcacttcccagacggggtggtggccgggcagaggctgcaatctcggcagtttgggaggccaaggcaggcggctgggagatggaggttgtagcgagctgagatcacgccactgcactccagcctgggcaccattgagcactgagtgaaccagactccgtctgcaatcccggcacctcgggaggccaaggctggcggatcactcgcggttaggagctggagaccagcccggccaacacagcgaaaccctgtctccaccaaaaaagtacgaaaaccagtcaggcgtggtggcacgcgcctgcaatcgcaggcactcggcaggctgaggcaggagaatcaggcagggaggttgcagtgagcccagatggcagcagtacagtccagcttcggctcggcatcagaggga

SEQ ID NO: 18820 - DNA, 1039 bp, Artificial sequence
  DNA replication origin
ggctcggcatcagagggagaccgtggaaagagagggagagggagaccgagagggagaggggagaggggagaggggagagggaagggagaggcaaggcagagcgcagaggcagagcgctttattctttttttggcaattgtgaatgggattgccttcatgatttggcttttagcctggctgttgttggtgtgtaggaatgccagtaatttttttacattgattttgtatcctgaaactttgctgaagttgtatatcagctgaaaggagtttttgggccaagactatggcattttttggtattgaatcatatcatttgtgaagagagagactttgacttcctctcttcctatctggatgctctttatttctttctcttgcctgattgctctggccaggacatccaatactaagttgaatagggtggtgacagagggcattcttgttctgtgatggttttcaaggggaattcttccagtttttgcctattcaacatgatgctggctatgggtttgtcatagatggctcttattattttgaggtatgttccttcaatacctagtttactgagagtttttaacacaaagtggtgttgaattttagcaaaggccttttctgcatctattgagataattgtgtggtttttgtctttagttctgtttatgtgatgaatcacatttattgatttgtttatgttgaaccaaccttgcataccagggataaagcctacttgattgtggtggattagtttttgatgtgttgctgaatttggtttgccagtattttgttgaggatttttgcatcaacgttcatcaaggatattagcctgaagttttctttttttgctgtgtctctgccatgttttggtatcaggatgatgctggccttatagaatgagctagggaggagtcatttcttctcaattttttggaatagtttcagtgggaatggtaccagctcgtccctgtatatctggtagaatttgtctgtgaatccatctggtcctggactttttttggtttgtaggctatttgttactgat

SEQ ID NO: 18821 - DNA, 1421 bp, Artificial sequence
  DNA replication origin
ttcggccacacgtgaactagaggcaggcaggccggggatatgccggccccagccgtgcactgtgggtgcgatcccccttaaggtcagccttggtggccacgttgctgcctccaccatcccgcccccaaagctgggcagcacagtgcagagagcgactccgtccgctggggaaggggaaagcgctcagtgcaggactttgtcttggaactcagcactggcccccacgagccactgtgaaatccgacattggctggtttcctccgtgtggcagaaccagataaccccaggctggagcctgcggacggagtcgcttgggggacccgcggcccggtgtggcggcctcgtgctctgggccgcctcggcgccagctgcctcggtggcaggcaggccacagccgcgtgagcctggggagtagccctgtgctgggctggtctcggaagctgcggactccgggtgtggcccagcgtcggtcagctgtggtggccacggcgctgccgtcccatccctcccccaaccccaggccgccgggcacaaagagaggcagcgtctgcttagggaaaggagagagaagtagcctcaagacgttgccttggagcccagtgctggacccaccaaagtgaagcccagagctaggcagaactctgcagcgccggaatggagcatctggacctgccccagcctaaggcggaaactcaccgaagctttttaggtccctcggaaacaaggtcacaggcacacctgggctcagcgcgccctctagtgctgaaaatgtggcaacacacaaaccacggacttgtggcaaacgtgggcttagggtgccatctagtgctgaaacagcagcagtgaaagaggttcagagacggtaacagaaggcttagaggctctggaaggacggggacaacgtcagtctttgaagactggaataaatacctagtctttcgacacacagacttgtcacatgcccacaagtatcaataataatattcagggaaccaagacctcaccaaatgtacaaaataaggcaccgggtgctatatgaacaggtgcccaacatcactcatcagggaaatgcaaatcaaaactgcagtgagacatcacctcactccagtcagagtggctactatcaaaaaatcaaaagataagtgttgacaaagatgtggagaaatgggaacccttacacactgctggtgagaatgcaaattagcacagccattacggaaaccagtatggtggttcctcaaaaagctaaaaataaaactaacatatgatctagcaatcccactgctgggtgtatatccaaaggaaatgaaatcagtatgtagaagagatatgtacattcccatgttcattgcagcactattcacaattgccaaaatatggaatcaacttaaatatctatcaatacctgaatcgataaagaa

SEQ ID NO: 18822 - DNA, 968 bp, Artificial sequence
  DNA replication origin
acgagcatgctgccttcaagcatctgtttaacaaagcacatcttgcaccgcccttaatccatttaaccctgaatggacacagcacatttcagagagcacagggttgggggtaaggtcaaagatcaacagcatcccaaggcagaagaattcttcttagtacagaacaaaatggcgtctcccatgtctacttctttctacacagacacagcaacaatctgatttctctatcttttccccacatttcccgcttttctattcgacaaaacctccattgtcatcatggccagttctcaatgagctgttgggtacacctcccagacggggtagcagcctggtagaggggctcctcacttcccagaaggggcggccgggcagaggtgcccccacctccctcccggacggggtggctggccgggcgggggctgccccccacctctctcctggatggggcggctgctgggcggagacgctcctcacttcccagacggggcggctgccgggcagaggggctcctcacatctcagacgatgggcggccaggcagagacgctcctcacttcccagacggggtggcggccgggcagaggctgcaatctcggcactttgggaggccaaggcaggcggctgggaggtggaggttgtagctagccgagatcatgccactgtactccagcctgggcaacattgagcattgagtgaacgagactccgtctgcaatcccggcacctcgggaggccgaggctggcagatcactcgcggttaggagttggagaccagcccggccaacacagcgaaaccccgtctccaccaaaaaaaaaaatacaaaaaccagtcaggcatggcggcacgcgcgcctgcaatcgcaggcactgggcaggctgaggcaggagaatcaggcagggaggttgcagtgagctgagatggcagcagtacagtccagcttcggcttggcatcagagggagaccgtg

SEQ ID NO: 18823 - DNA, 1618 bp, Artificial sequence
  DNA replication origin
gcagaggcacccctcacctcccagagggggcggctggccgggcagggggctgaccccccacctccctcccggagggggcagctggccgggcggggggctgacccccccacctccctcccggacggggcggctggccgggcagaggggctcctcacttcccagtaggggcggccgggcagaggcgcccctcacttcccggatggggcggctggccgggtggggggctgacccccctacctccctccctcccggacggggtggctggccgggcggggggctgacccccccacctccctcccggacggggcagctggccaggcagaggggctcctcacttcccagtaggggcggccgggcagaggcgcccctcacctcctggacggggcggctggccaggcggggggctgacccccccacctccctcccggacgaggtggctgccgggcggagacactcctcacttcccagacggggtggctgctgggtggaggggctcctcacttctcagatggggcggctgccgggcggaggggctcctcacttctcagacggggcggttgccaggcagagggtctcctcacttctcagacggggcgaccgggcagagacgctcctcacatcccggacggggcggcagggcagaggtgctccccacatctcagacgatgggcggccgggcagagacgctcctcacttcccagatgtgatggtggccgggaagaggcgctcctcacttcctagatgggatggcggccaggcagagacgctcctcactttccagactgggcagccaggcagaggggctcctcacatcccagatgatgggcggccaggcggagatgctcctcacttcccagacggggtggtggccaggcagaggctgcaatctcggcactttgggaggccaaggcaggctgctgggaggtggaggttgtagtgagccgagatcatgccactgcactccagcctgggcaccattgagcactgagtgaacgagactccatctgcaatcccagcaccttgggaggccgaggctggtggatcactcgtggttgggagctggagaccagcccggccgacacagtgaaaccccgtctccaccaaaaaaatacgaaaaccagtcaggcgtggcggcgcgcgcctgcaatcgcaggcactcggcaggctgaggcaggagaatcaggcagggaggttgcagtgagccgagatggcagcagtaccgtccagcttcggctcggcatcagagggagaccgtggaaagagagggagagggagaccgtggggagagggagacagagacggagagggagagggagaggctgtagcaagactttctagatgaaggaagcactcattaacttacattctggtacaagctccttttctcatcgcagacctgcagtttgagtagcgttgcttaagttacactgtataaacatttatctcctcttgagaggtgaagctggctaggcttcagggtcaggtggggacttggagaacttttctgaatagctaagggattgtaaatgcaccaatcagtgctctgtgtctagtctagctaaaggtttgtaaacgcaccaatcagcactctgcaaaaatgcaccaatcagcgctctgt

SEQ ID NO: 18824 - DNA, 880 bp, Artificial sequence
  DNA replication origin
ccaggaggtgaggggcgcctctgcccggccgcccctactgggaagtgaggagcccctctgcctggccagctgccccgtccgggagggaggtgggggggtcagccccccgcccggccagccaccccgtccgggagggagggaggtaggggggtcagccccccacccggccagccgccccatccgggaagtgaggggcgcctctgcccggccgcccctactgggaagtgaggagcccctctgcccggccagccgccccgtccgggagggaggtgggggggtcagccccccgcccggccagctgccccctccgggagggaggtggggggtcagccccctgcccggccagccgccccctctgggaggtgaggggtgcctctgcccggccgcccctactgggaagtgaggagcccctctgcccggccaccaccccgtctgggaggtgtacccaacagctcattgagaacgggccatgatgacaatggcggttttgtggaatagaaaggggggaaaggtgggggaaagattgagaaatcggatggttgccgtgtctgtgtagaaagaggtagacatgggagacttttcattttgttctgtactaagaaaaattcttctgccttgggatcctgttgatctgtgaccttacccccaaccctgtgctctctgaaacatgtgctgtatccactcagggttgaatggattaagggcggtgcaagatgtgctttgttaaacagatgcttgaaggcagcatgctccttaagagtcatcaccactccctaatctcaagtacccagggacacaaacactgcggaaggccgcagggtcctctgcctaggaaaaccagagacctttgttcacttgtttatctgctgaccttccctcc

SEQ ID NO: 18825 - DNA, 1213 bp, Artificial sequence
  DNA replication origin
tgggcctcttgctccccgcctgccgccgccgcctctgcctccgcctcccgccacagcgccgccgccgccgcacccgggcagcccctggccgccgccggcacctcacgctctggggccgccccaccgggctcgcccgggctccgctcgaggccgggaccatctctccgcggcctcttgcggagcggctccccggcgggggacgacgcggcctccctgtcggcccccgccgccgagggggagccgccgggctgaagggcgagggccgcctcgtccgccatcttccaactgcctctctggccctcctccctcgcctcctctgctcccgctcgacgcgcggcactggcgcccccgcggctccggctgcgggagatttaaaccccatcacgtgacccgccccatcgccgcccccgccctctcggcgctcccgccacccacgcgggccagaccacaacactacgggtcacgtggcgggcggaggctgttgcgtctaccgctccgcctgggctggaagcgcactcggccccggcggccggcggcccttcctctttgtggcgagcgtgtagtgcagccaaattcgcccctcggccgctttctcaacttctctttcaaactgacctcaaatcactaccgccggaacagctcaagttttggtccgccctgggaatttccacgtcttcctgaagtgtacacctggcctgccttagccttgtctatatttagctaagggttaaaacacagctgaagctggctaagacttagctccctgaaatacgttggatagtcgttctgttttgttaataagtaggaagagaggcaaaaggaggcggctcctttcccactctcctcacaccgttctgacagctcctcttttgctcctttttctgctccttgcttttctccttagtcggttgcttttttcccctctctcccatcacttgtagggtggtatacattgtaaaatccttgaaggcatatgtcctcctgggaagacctttgacgtggaggtttggagatcagccgatctactttctggccccagcttggcttcaaacgtgtgtgaattccctcctccgggcctcagttttctcacgtgcagaatgggtttgttgggtcagtatgagagcatgggaaggaaatgacttggcctccatgcacatctgcccttggttaaaatttggagtccttcctttctagcgtgagctatctagccgtt

SEQ ID NO: 18826 - DNA, 1175 bp, Artificial sequence
  DNA replication origin
ctcccgttcttccccgcccgctccatccgggtcgctgacggctgtctctggactggacagcagtggcgtccgcttttctctaaggaacccggtaaagtttcccaggggccggggaggggagcagcggagcagcggcacagacgccggaggtgccctggtgatcgtcgccactggctgacagaggagggtcccaggagccggagacgtgcttcagcgaccgcgctgccttgctctctgggcaggggccgccccccgtcaccttgggcttcccctaccctgaagggcttgggcgagttgtggccccagcgggttcgggggcgtgtgacggcgttagggaggggcaggccgggctgggcggatgcaggccggcccggcatagggcgctttctccgcgcttcctgggggtgaggggcgtggggcgagggcagggctgtggctccctggccccggggctggaatgtctcatctgcctggggatgggcttctctcaggttgaggccgcgcactgccaagcctcggccgccggcctctgaagctgttgcgagcggccggttgcggtagtcgtctgcttggctgcgaggttgggtgtgtgcagatgatttctctttcccagtccccatgagctgatctgggtgcacgttcagggaaagacgggactaaactgcttctcatttccctacctgttgctggcgagaggacgcctctgtgttttaaagaaaagggtggttaaacctcgcgcgctgaagtcggggtattttcctgtattactcttattttgtttttaaatatgggaagacaatgcagaactcttgggaattatcgagttctgataccccaaaagaatgaaatcaaacttctgttaatgggatgatgggtcgtggaatgggacaccttgggcacttgctaacaggaacataggaaaattggagttgaaacttcgcaggctctgtaagaatgtggatgactgctacagaataaggctgacttcctgtaattatgatatttagtaacgcgatgtgtttaaaagtctacgtatgtatagatgaagtggactctgttatttgtgtctttctttacaagtgaggaaatattcagtcagtgtgctggaaagttctacagatttcgccatcagactatccattcctattcttgaaaaatctgcagtgctggagtta

SEQ ID NO: 18827 - DNA, 827 bp, Artificial sequence
  DNA replication origin
tggcgtgatcttggctcactacaacctccatctcccagccgcctgccttggcctcccaaagtgccgagattgcagcccctgcccggccgccaccccgtctggaaagaagtgaggagcatctctgcccggccgcccatcgtctgagatgtggggtgcacctctgccccgccaccccgtctgggatgtgaggagcgcctctgcccggctgcgaccccgtctgggaggtgaggagcgtctctgcccggccgccctgtctgagaagtgaggagcccctccggccggcagccaccccgtctgggaagtgaggagcgtctccgcccggcagccgccccgtccgggagggaggtggggggacagcccccgcccggccagccgccccgtccgggagggaggtggggggtgcctctgcccggccgccaccccgtctgggaggtgtacccaacagctcattgagaacgggccatgatgacgatggcagttttgttgaatagaaaagggggaaatgtggggaaaagatagagaaatcagattgatgctgtgtctgtgtagaaagaagtagacataggggactccattttgttctgtactaagaaaaattcttctgccttgggatgctgttatctatgaccttacccccaacccggtgctctctgaaacatgtgctgtgtccacttagggttaaatggattaagggcggtgcaagatgtgctttgttaaacagatgcttgaaggcagcatgctcgttaagagtcatcaccactccttaatctcaagtacccagggacacaaacactgtggaaggccccagggtcctctgcctaggaaaa

SEQ ID NO: 18828 - DNA, 1402 bp, Artificial sequence
  DNA replication origin
tccttcacgttcctttccttctcctcgcggtcccagcggatgcgaggaggcttagagacggcgggcttctctcccgcccgccgcagggtccgcgggtccccgccccgcccggggcgccgctccccctggggccgcccgggcgccctcccgccgccgggggcgctgtgggctgcagcgggcctggctgcagatgcggtggtggccgccgagcgcctggaaggagctgctggacaggccgagggagcctccgcccgagaccgcgcagccgccgccgccatgggtaaggcgagcgggccgaaaccgaacgctaggccctcagtcccgggctgagggccgcggccaggcggggtggactgggagctgggggagacgccgaggccgccagtcggaactggggcccgaacccaggatgggcggggactgcctgggactcgggggctcccggggtcgtcatggcaacgcgccccctcccttgttccggcccgttcccgcccgggttctgaggcatagtggccgagggctcgaggtgccacggcgtccaggagcgaggacagggccaggcagggtgtcactcccgggtcggggagcaggcggggaggggcgatgacttttcaggtttgggggtggcggagggaagacgcatctcaggttttggcctgggtgcctgacgccgagggcgggagacggggaatgctgacgcgcaggagcctgggtgagcccgccgcgatggtcctggggggcccccaggcctctgggcagccttgctggggggagggggcaggaagagaggcagggaaggggctctaggccccggcaaggtgcgggcactggccctggtactccttgcgcgcctgcggccgggtttgggggtcgcgtacgggccggagaagtcctgtagcgcagccggggcgtggccgcggtgtgaacgcccctcggcgtgggaactgccggtgcccagcaccgatctgcctcccagcagctgcaaaacaccctttgtgtggttgtcgcatcgcacgttaggaattatgatgggctgtgttaaaaatgagagttgccacggattatgaaacatgaagtggtttcactcccgaaaaatagtgggagtcagaccacgatgcagatttgaaggaattcgtgtgtggacatttttccaccaggcagtttggccatagcagttgtggctgtttgcattttaggttgcttaggattcagtgtcaggcttcatgcctagctatctagaaatcggagctggaatactagatcattggagactctgggttttttgttgttgttgttgttcagtgaaggaaaaacgggcacattgattacttgtaaatttgtcagagattatgaaatgttatactaagtgcttcgtttttccacaccttagttttgtcatctg

SEQ ID NO: 18829 - DNA, 985 bp, Artificial sequence
  DNA replication origin
ctcgggggctcgggccttgactgtgctgggagccggtaggcgtcctccgcgacccgcccgcgcccctcgcgcccgccggggccccgggctccaaagttgtggggaccggcgcgagttggaaagtttgcccgagggctggtgcaggcttggagctgggggccgtgcgctgccctgggaatgtgacccggccagcggtgagttggggccggggcagagggcaggggtgcggggagcgaggactccgacgccgaggcccgaggggggtccgggaggcggcgctcggcgcgggctggatgtggccggggctctgcgtccttggctctcccgctgcctcaggggtgggctcgttccccgcctcgaccccccaccccgggacgctcgggacgcttttgttgccggagataaacaatgcccccggccggaggtatcggccacccgctccggaggccccgccacagcgccgggttgggggcagcgggggcgcctggggctctgaccccgggctgcggtggaagcggggctgggggagggcaagtgtggcgtgggggagatggctgaatataccagcggttggttccctggcccctttggggagttggaggtcggggcgcctcggggtgaggagaggctagagtctgtgcaagttgtgagtggggagtccgggctgtcccgtgctcaagcgtaccccctaaacaagttttctccctccccccatatatatatgagagacaggttggtagggaaacgctttggcgcctgtctccccgagagttttgggacggcagctccagggatgaaacgtttggagtggaggcagtggtgcagtcttgctaggagttggctgggagttgtaaggatcagggaagaagggaagagggagtagagtgtgttctgtcaaaatggcatttaagaaactcatttatgagcaccactgggtcgctggacgcgctggccttgcgatcccatcagtccccgtctggcggga

SEQ ID NO: 18830 - DNA, 1040 bp, Artificial sequence
  DNA replication origin
cgcgttggcgcgacggaaagcgcggaacaccgcgcgcccaccaggctcctccgcggcccccgccgccttctgcgcctccagccggcacagcactagcgccagcgagcccggcgccagctgcacgggccgggccatgctttcgccggcggccgggagcccgcaacgcagggcctcggcgagcgcggcggctacgacgccgctcgctcggcgggaggatcggccgactgcgcgcgggtccgcggcgctggctgccgggggaacggagctccagggggcggggccgactgcgcctggcgggccgggggtggggcggccgtgcttaggccggcggagcgctctggaggagaatccagagcccagcgttcggcttcgttctccacacccgggcccaactcggccccctggcgatgccctcgacttccagccgcctcgaggtcccgagctccccttcccccaggggcgcgctctggggtttttccaagtcctggggctcctcgcagctccctggagaacctgactgcgtccatccgccgtgcgaactgcagcgccaggagtccccagggcggggagactcgccttcgacctggctttggggccgttccaagttagcaaccacgaggaacagcctgagggtgtcagcgggggcctgggaggtgtgggggttgagcaggaaacctaggtttgagtctcagttctgcgcctaagctagttgtttgtttctatttttgttttttgagtcgaggtctcgctgtgttgcccaggctggagtgcagtggctattcactgagttctgggctcaagcgatcctctgatctcagcctcccgagttgggactacaggtgcccgccacatcgcctggcctgctcccaacctgttcattcaagttatttcccttctctgggcctcagaaatgtcccagctactatttcacaggataataaactaaggaccctttcatccatgactttctttttttttttttttgaggcggagtctcactctgtcgcccaggctggagtgcagtggcgcgatctcggctc

SEQ ID NO: 18831 - DNA, 1399 bp, Artificial sequence
  DNA replication origin
ccggaggggaggggcgtcccggcccgtgcagctggcgccgggctcgctggcgctagtgctgtgccggctggaggcgcagaaggcggcgggggccgcggaggagcctggtgggcgcgcggtgttccgcgctttccgtcgcgccaacgcgcgctgcttctggaacgcgcggctggcgcgcgccgcctcgcggctggccttccagggctggctgcggcggggggtgctgctggtgcgcgcgccccccgcctgcctgcaggtgctgcgcgatgcctggcggcgccgggccctgcggccgccgcgcggcttccgcatcagggcggtgggtgagtgcgggacccggaggggaggggcgtcccgcgccagctgtgagcgcggagctccgcgctgcaggggcgagcgcggccccgtcttctgccacagaggctaggcgctgctctgagggcccgggggctgcggttgggcggccggtccggggggccaagacgccccggagacgttccctcccgctaggacactgcagctatagtccccaaggtgtgcctggccgctgctagtactggctccgggctgagtccgttcctcaactcttaaagcccgtggagtgcacagaaggaactttctgcttagaaaagtgatgctctggatagagaggctttgggctaggggccactgtctaggctccaccggggcggttaggaagggtaccccaggggaatggccagagtttaccatatctggcagctttattattattattttttgaactacagatctgcagcgaacggcattctggttttcatgttctgcagtgtggtggtcttgggtcgggacctagcagctttggggtcgttaacttcttggggaaaacaagtagcgtctcatccctttagctgaatagacaggattccaccttcccagtcttttcaaacttaactgtttgttagacaacagcagctttttgccttttttcataaaatagcttctcatttgagaaactaaaccaccgcacccgtgagtggtctctgactctgggcactaaacccaggcaggtgtgtcagctccctgtaacaaccttgttcttgtctgcatttatgtgaggctgcaagggccatttgatggtgtgttgacaagtcaccagttgttccgcgcttaattttcattcttaccaaggaacccctctgtattagtccataaatcatcctcttccatccgaggagaaggagtcgcaaataaaaaacatttgtttggccaggcgcggtggcgctcgcctgtaatcccagcactttgagaggccgaggcaagtggatcacctgagttcaggagttagagaccagcctggctaacatgctgaaacccctcaggagttcaagaccagtctggctaatacggtgaaaccccg

SEQ ID NO: 18832 - DNA, 672 bp, Artificial sequence
  DNA replication origin
ggaactaaggactccctgtgggttggggtcttcctgaggatccagggagtaactgtcaaggagccttagcagggatctaagagctatgcaagagcaaaaagaggcaaattattaaggaaattagtgaagtcagcactggaacaacagagaggggacacagcagtgcagcatgggccctggcctcaggaagctgtctgattggggcagataggaccagccccctagaagacagtcacccatatcagttaggcagtcatgactcagtgttacttatctgaggcccaggttgcatgaggggttgggggtgggatggacagagcactggctgggcatcaggactaggctggagtcctggctcaaaactctaccacaacctgacactgggcaagatggcccacctgtggcatcccaggttcctgccctgtaaagaggagtctgggtgtatatccagatggactgtgagcacagcctgagtttgccctgtcgaggtgctgaggcctgggagattggggtgagtagctgtggtccagggaaggttggcaagctgggccttagatgagaggggatgcttggtcaggcagaggtgagtggagaaggcagggcaaggaagggaatatgagcggcgaacaaatggagtggacatggtgggggcagaggatggtgggaagtggc

SEQ ID NO: 18833 - DNA, 1191 bp, Artificial sequence
  DNA replication origin
ttccagccctgtgagcttggcagatctgcagaactcaaatgaaatggcagttgagaacaaccatcttgttctcattcactccattttgcttaacggccatgtaggtagttccaaatgtttgatgtgtaccagaaaatctctctcttcctggtttataattatgatccagggcaaatccaggttttgttgggcttgaaaattaaataaattggcactctctatggaaaataattcaaatataaatatacaaatatcacactgctaggccctcccagggcctagaagggtaggaatgaaagtgagagtccctgaagctttaaccgcattaacttttcagtcagttctatgatacctgccattccttaagtgtgtattatgtgcacgtattttgcgtacagtattacacaacaatcaaggggaggtgaggtgggcattagtgtcttcatcttatggatgaagacacagtctcagaggtgattcaagatgcccctctgcataggccctaaggcagggggtggggactgtgacctggacaggaagctggggcctcaggactgcatctaagctcctccttttctgtgggtgatggtggctgtcaggcccctgaacctacgtcatccctccctctgatttgactgtacctttgctaggcctggtcaagggctagggactcctaaagtcaagagctagggtagaggttgggggttggatctcagggcaccatatggtgcagacttggttgcaggaaagtgacctatttaggcagaggggctctatacaactgggaccacagcaaaccctagaggtgagcacctgcttcaaagactcacagatccaagctgtgatcctagatctacaacttcctggctgtataaagtccagcaagactgaggcctcactgagcttcaatttccttacctgtctaaccagaatagcaacaacttgtttgtatatttgagctcattacatgtcattttgtaaggcactaaagctcctggaggcttccggaacacagaaataattaatctaagaatcctaaagtggctgtcctggtagcacctctagggagtcctcccatcctacgtaacttcctctgggaaagtagaaaacacggcacctgggaaggggcgctgaaccgtgccccaagtcccagtgggcctggatgcccaagagcaagaggaggcccagagg

SEQ ID NO: 18834 - DNA, 1581 bp, Artificial sequence
  DNA replication origin
cctacgtgggggacgtgcaggatgatgcggggtcgggggggatttcgctgcgtcgcccgccccctttccggcgcaggagggagcggccgccgcgtccccgctccccggccgggacgccaccgccgggcgttgcagaggcgcgccgcaaccaatgggcgtggaggaggtgggtcggctggcggctgtcaccctccaggggacgggagcgcggagaccgggagcgcgcgagctgtcgccgcgccccgggccgagggggaggagccgggggaggaggaggaggaggagccgccgagcagccgccggaggaccacggctcgccagggctgcggaggaccgaccgtccccacgcctgccgccccgcgaccccgaccgccagcatgatcgccgcgcagctcctggcctattacttcacggagctgaaggatgaccaggtcaaaaaggtgagcccccgcccgcgccgccgctggtcctggccgcagccttgcgttccggcatccgctcgccgcctccgctgcctccatcctccggcgcccggccttctccgggccagcatcgagttggactgcagggcgcaaggaaagccttcgccttcgattctaccggcattgtcagtgtctctgtgtgtgtgcgtttttgggaggggggcaatcgggcggaagacccccgagaccgggctgcctgctgcagtgtccttgaaacgggccctggatgtcagataggcccccgggctgtgcggggaggtggccggtgggcccttccgcagggcctgttcgggagggtccgagcgccgtgggaggaggtgtgatcatggagatgctggggaggtgatcgagcagcaggcgggggtgctggctggaggccaggcctcccatatttggggttcctggcggagggtgtcgggtgccccggagaagctgtcgccgggctctcccagttgtttgagctgctcgttaatctgaggacgaggtgacccgcccggcttcccggaacggggaggggcggcgaggccaccggaaactttgctcataggcctcgtgtctggagcggcacgtctgaatggaattttttattcctcttaagctgtaatttctagccagcacaggagctcaaataagcgactggtcatttgagttgggtggacgcctgtggcatgcttgttctagcacttggacgcatgcatcctcctgtcctgaggtgttgttgcctttgacatcttagtgtaaaatactgtccgctggcaggtcttaaaggtgtatttgtctcttctgccagctgtgctaccatattttaaagaaacagcctaagctgtagggaaagacgcccgttttatcagtgccaggtctggtacaggctccaggcccacccaccctgaacgtggtgacgttattgctggggttagctgggatggactggcaaagtcatcttgactttggcgttcagacaggtggagttctacaggtgaaaggcaggagtgacaggccttgattttctgcccggcaagccatagggtgttccatcctcttcctgtgcatctaagatgactccctcatctggcaccataggaaacaggcctactgaggg

SEQ ID NO: 18835 - DNA, 1216 bp, Artificial sequence
  DNA replication origin
agacccccttcaccctccttcagtccaagcttgtccttgcccccttcctaccaggcaacaggggaggtaatgggttaaccacatcatgtagccaggtcaaagccatgcttctcacccaaaagtaggcatctttcacagggtggttcggggagatagctgcacatgggcgccatctggtgcccctcatggagcactggcctccatctgctccacactaggggtctcaacccagatcctacgtgaggatcagggtgcccaggagcccccagaccttttgtaattggcatgctgggctgccaaacggagcaggagtgtgcctgcaggggccaggctctgaggagggggaggtccaggagctgacccgtgggcagaggcaggggtccctggttggaaccttacagcccacagagagaagggctgtgccgatacggatcccagagagggggcgtcctgggaacgcatagctgacacaggggctcccccagggatggggttaggagagagagctcagccactctccagggagggggagctgcagtgaatgaaggggtcccagacaccttttgtaggaagtggccattgagctgggcttcaaggagtgaggacttcaaaggaaggatggcagtatgggcagagggacctgcctgagcacaggcctctgaggttgggggctcaggaaggtctgggcaaaacatgctcagaggcctgagtaatagagctaacggggtctgtgtgtggagcagttcccaggtgggtgcaaggggtcctctgtgtctgccctcggagggctggggctggggcttgggcactaagaagtaacttgagcctctcctggaccagtttgtgaagaccatggtgctggtggtgctgacgtttgccatctgctggctgccctaccacctctacttcatcctgggcagcttccaggaggacatctactgccacaagttcatccagcaagtctacctggcactcttctggttggccatgagctctaccatgtacaatcccatcatctactgctgtctcaaccacaggtgagcccccactccagccccaccctctgccctcagggccccactgcccagccccaggtgggctcccctgcacagctcaagcatccatcctcattcctgccggaacctgtggccctgtgcccccagcctacatgagaaagccgtcctcacactcagcccccagcacaataatccctctg

SEQ ID NO: 18836 - DNA, 1047 bp, Artificial sequence
  DNA replication origin
cagaggcctgtgctcaggcaggtccctctgcccatactgccatccttcctttgaagtcctcactccttgaagcccagctcaatggccacttcctacaaaaggtgtctgggaccccttcattcactgcagctccccctccctggagagtggctgagctctctctcctaaccccatccctgggggagcccctgtgtcagctatgcgttcccaggacgccccctctctgggatccgtatcggcacagcccttctctctgtgggctgtaaggttccaaccagggacccctgcctctgcccacgggtcagctcctggacctccccctcctcagagcctggcccctgcaggcacactcctgctccgtttggcagcccagcatgccaattacaaaaggtctgggggctcctgggcaccctgatcctcacgtaggatctgggttgagacccctagtgtggagcagatggaggccagtgctccatgaggggcaccagatggcgcccatgtgcagctatctccccgaaccaccctgtgaaagatgcctacttttgggtgagaagcatggctttgacctggctacatgatgtggttaacccattacctcccctgttgcctggtaggaagggggcaaggacaagcttggactgaaggagggtgaagggggtcttgggcacagagggctacatcaggaccttcgggggaccctggatggcagggagtagggggacactgccacttccggaagaaactggagacagatttgatgaagctggacaactatctggtctccacgacctccggggtccgcagttccagcctttgagggctctcctgtgactgtcaggcaccttctatagttctgtggggcttctcaatttcaacattctgattattcaaaaagtctaagattttaatattttatcattctaagattcttgggggtatctgaattctacggggctttaggagtccctgactcccctaacattctgggaagttaatttttttttgtcttttttttttcttcctttttgtggagaacggggtctcgct

SEQ ID NO: 18837 - DNA, 1311 bp, Artificial sequence
  DNA replication origin
tcggggtacatagaaatgcaagctttcctcttgtcaagagggaaaactttgggaaaagggcaagaattaatcgcccaggtgttgaaagtgcaaatgagtgtgctaaacgtgaatggaataaggaagtggagttgctcggctcaggaaggctcagggaggcagaccagggtggggctaataggcccccatggagctggagtctgaagtttgctcgtgaaacagatctgctgaaggccttcaccaaacgacctcggaagtccccttcttttgccaggtgataacccagccttgggaagggttcctcccgggaaaccccatcttcaaactaggttgaaggcctggcgcggtgactcacgcctgtaatcccagcactttgggaggctgaggagggcgaatggcttgagccccaggagttcaagaccagcctgggcaacatggcaaaacgccgactctataattaaaaaaaataaaaagccaggcacggtggcgcgcctgttgtcccagctacttgggagacaggcgggagaatcgcttgagtcagggaagtcaaggctgcagtgagccgtgattgtgccagtgcactccagcctgggagacagagtgagaccctctctccaaaacaaaaacaaaaacaaggccgggcacggtggctcacgcctgtaataccaacactttgggaggccaaggcgtgcggatcacttgaggtcaggagttcgagactagcctggacaacgtggtgaaaccctgtctctactaagaaatacaaaaaaaattagccgggcagggtggtgcatgcctgtagtcccagctactggggaggctgaagcaggagaatcgcttgaacccgggaggcggaagttacagtgaaccgagatcccgccactgcactccagcctgggtgacaaagggagactccatctcaaaaaaacaaaaaacaaacaaacagaaactataggtgagggaggcagctccctctcttgcacatagccagccactaacccagcctcctcccacctggccttttctcagcctgggaccagaggtggctgtgagcctgtctctcatgctagatggtcccagctttactcactgttgtttcctgtctcccaagcctagctcagcctgggacttgggagccagacaatccctgctgtggccttcagtaattaaatccatggcagaggtcataagctctagcagtgctgggtggggtccctggtggtgatttcaggaacgacactcttatacaagtccccagtcctgggttcccagggctcctgcatacacaaactcaacagagaaggacagact

SEQ ID NO: 18838 - DNA, 977 bp, Artificial sequence
  DNA replication origin
aaggagtccgcgcgcgctcacccgcgcactccctggagcggctaagtgtggacccaaccccgggccagtgagggggcggccggattgtgggtccccacccccatccccgggccctactggggtcactcacccagaacacggtggaatagatgataagtgaaaacttgagccagaggtaggagaagcgcgcgcagtagcgcacctgctccgagtccccgcgcggcatcctgggcgctccccgcgcgggttacgggggctccggggctctccggctcggtccctcagccagcgctcgtggccccacctgcggctgccgggctaccagccccgccaccggcgttctctccgggactgacactggagcgcggcaatcacagccccagccgggaagcctgccagccctggcggccaatgggaggccgcggctgcctagcgtctgggagggggcgggccaggggcggggctgctgccctgggccctagaggggaccaagaagggatgggagggggagacggtcttgcaaatgagctcgcgtgcaactctggaaacgcctgtgctaatgcagggggcgtgggagaggtgaaccagaggtgctctaaggagagagcgagcgtgcctaatcggggtacatagaaatgcaagctttcctcttgtcaagagggaaaactttgggaaaagggcaagaattaatcgcccaggtgttgaaagtgcaaatgagtgtgctaaacgtgaatggaataaggaagtggagttgctcggctcaggaaggctcagggaggcagaccagggtggggctaataggcccccatggagctggagtctgaagtttgctcgtgaaacagatctgctgaaggccttcaccaaacgacctcggaagtccccttcttttgccaggtgataacccagccttgggaagggttcctcccgggaaaccccatcttcaaactaggttgaaggcctggcgcggtgactcacgc

SEQ ID NO: 18839 - DNA, 1021 bp, Artificial sequence
  DNA replication origin
tgaacacctaccacttgctaagtattcaagggacacagcgatgtcctggacatggcccctgctttcaagccacgactctaggcccagacaaccagagtcctacctgagggatagagtctgtgtcaaggggacagaggcgtagccatccattctaagtgggggagtccaggctgagcccctggtgcactcggggctggaccctgctctgccactatctctgttgtgaccctgggccagtctcttctcctctctggccttcagcctccacagctgtgaaaccaaagaatgggactcagtggtctctgaggccgtttccagcctgggcttgagggagttttcttcctggagtccttttgagctgttgctggctttttgcaaccactttttaaaagcagtgagtgagaagaggcggggtgggggtggagagcacgggaactgtaaagaaattctcagactggtctgttgctttttgtgtgtggaccagggactaggaagtgctagggggagggtggggggagaaggccagggatggagtgaggagggggagaggagggtgcctggaggggacagaagaatgaaataaaggcaatccaacaaaaggaagtgaaaagtgaatgacaagtttgaggctgcaggctctaggccggctaggcctttagcgggaagaatggagacaaacgagctggattttcatgcttggtggacgtgaatgaaggagcatcttttaaaaccctatcaggaactctttggattgtcattagatctggaaaggggaaaagacggagggaggagattgctgaatttggcccctgggtgtgaaaagctcccagattcttcactggcggctgggggcttcatgctctctccttgccagagccaggcacacctgggcccctgaaagctttcggtagattatttgtcattctgagggcccttgaaattcagtggtggtctccttctgctcttggtgggtgaccccacactggagctacaaggaagtgggggctgggggtggactggg

SEQ ID NO: 18840 - DNA, 831 bp, Artificial sequence
  DNA replication origin
ctgcgcttcgcccacaactacatctgggcgctgactcaaacgctgcgcatagcggaccacagcttgtacgcgctggagccgccggcgccgcactgcggggagctgggcagcccaggcggttcccccggggactgggggtccctctactccccagtctcccaggctggcagcctgagtcccgccgcgtcgctggaggagcgacccgggctgctgggggccaccttttccgcctgcttgagcccaggcagtctggctttctcagattttctgtgaaaggacctgtctgtcgctgggctgtgggtgctaagggtaagggagagggagggagccgggagccgtagagggtggccgacggcggcggccctcaaaagcacttgttccttctgcttctccctggctgacccctggccggcccaggcctccacgggggcggcaggctgggttcattccccggccctccgagccgcgccaacgcacgcaacccttgctgctgcccgcgcgaagtgggcattgcaaagtgcgctcattttaggcctcctctctgccaccaccccataatctcattcaaagaatactagaatggtagcactacccggccggagccgcccaccgtcttgggtcgccctaccctcactcaagtctgtctgcctctcagtctcttaccacccctcctccaatgtgattcaatccaatgtttggtctctcagcgcttactccccttgccttgctccaaagacgctgccgatctgctctactcccaatcaggtccgggatttcagggcgcctcactctgccttaaagccacgaaggcgaccctctgccttctcctcg

SEQ ID NO: 18841 - DNA, 897 bp, Artificial sequence
  DNA replication origin
agccagactgcctgggctcaagcaggcggaaaaggtggcccccagcagcccgggtcgctcctccagcgacgcggcgggactcaggctgccagcctgggagactggggagtagagggacccccagtccccgggggaaccgcctgggctgcccagctccccgcagtgcggcgccggcggctccagcgcgtacaagctgtggtccgctatgcgcagcgtttgagtcagcgcccagatgtagttgtgggcgaagcgcagcgtctcgatcttggtgagcttcgcgtcgtctgggaaggtgggcaggacaccgcgcagggcgtccagtgccgagttgaggttgtgcattcgattgcgctcgcggtcgttggccttctttcgccgactccgtcgctgcttgctcagtgccaactcgctcttaggccggctgcgtcccccgcgccgtgcccggagcttcctcggggcccctcggcagcctccctcttccgcctctgcgcagttcccccgtgtgcgagtggggctgggcggggcggacgtggggcaggtcacttcgtcttccgaggctctggggaaggaccgctccgtctcacgggtcacttggacagtgggcgcacccgagggttgaggcgtcatcctacggcggggtcagagggaagggtaagtttgagtccgtcactgggcgcagtccgcgattccgaggctaggtgggaaaaaacaaaaacagccatcctcccagcccccgctgggtcagaggatccctctttcccctgcccgtccctcggaggcctccaaatattacctttctaccggcgcaaaagaatagagagcgatgagcagcgagggccgtggggagctcagcgggcttctggtcgccaagttcagctgagctgcaggcgcccccgc

SEQ ID NO: 18842 - DNA, 1124 bp, Artificial sequence
  DNA replication origin
acaaaaacagccatcctcccagcccccgctgggtcagaggatccctctttcccctgcccgtccctcggaggcctccaaatattacctttctaccggcgcaaaagaatagagagcgatgagcagcgagggccgtggggagctcagcgggcttctggtcgccaagttcagctgagctgcaggcgcccccgcctgggagttgccccagccccaaaggagaaaagaagagagaatggggtccgaggcctctgtcacgctctctctcgaggcgcggcggtgagaccgcagggatttcctgagcagcaagtcgtgtgccccttggcacgctttatctgcttcgcccgggccaggagcgtgcctgcccggctgctgcccgcgccaccggccaatcagcgccggggccctggggccgcgccacgcgagcccgctcctcccccgcagggcacagctggattccggacaaagggccggggtcgggggaggggagcgccgctctgtttgctctctcgagggcgggctgggtcccagcaactctcggttcctcaaagagcctcgcccagtgagaagagcctcgtgtggctctggtcaggccacctcagacggctttgctcctagcctatctttccttagcatctgtcctggaggggactttgatgcctctagggtacaatgcctgcacgttacacatggggaaatttaggcttagtgagggaggtggcttgtctgaaatcgcacaggaagatagtggcaaagacaaccacgagctcattgtcctgactagcagcctggagaagggtccaggaattctaaaggacgccctgctctcctggtgtttcactgcctctcttcatcctggaagacaggggacatcactgagagagatcctgcctatgtcccttccattcgcagaccttttgggggtgtccgagcctctgccacaccctgagatgctacctcacactccccagaggcgcttagaaccccacccccatagatcccactccagaggcaggggttggctgtgcggggacccctcaagcggacattccattactacaagcctactacagcttgtagatagtatcccagcgttctggccaggaaccgtgacaggaagagttctggga

SEQ ID NO: 18843 - DNA, 1273 bp, Artificial sequence
  DNA replication origin
acatgtatgccgaaaaaggtcaggagccctgtggtcttgcccgtagcctggagcccgggacaggcgcgtccccctcctgaagcccgctggccctggcgcaggccgagcggatggtggtcgcgcgcagtccctttgtgctttgtcatcgcgcccccgcccggtgggccacccgcgcgcccggcccgcggcgcacctgacattccgggccgggggcgggagggacgctgccccggccgccagccccagcctctggagcccgacaccggctccaagtcccggcccgggctgcagcgagggatgcgctccctccccggcgcggcgactcacctgcaggcgcgactccgggcctcggcggcgtccactcccggcggctccaggcggtttcctcccacctgacctcacaggaagcgcgcgccggaggggcgcggcccagtggcggcgcacatcgccctctgtaggccgcctgaggaattgcacctgcccggcccagggttgggggcggcgcggggtgctgggggtcggggagatggggcgtgggaaggagtgggaggtggggatggagagaaaagaggatgggaggagaagacacgtggaaaagaaggagaagaaggaggagggagaaaagaaggaaaaggaagcggcgtccacggaggaaaaacccagggggtgggggcgccctggcctgggaggaagggcgggcgcaggctcagatgaccagtgttatgtttgctgacccagctccgtggatgccccttgagtaggacccaaccctgccctctaggagttccaagttcagtggggaagatgaggcaggaacggggcagaaccctctgtaggcttccaggagaagatgcgtttgagctggggcaggagggtaggtaaggatagagaaggtcactcttggcagaaggaaccacctgcagggagtgaatgatccacctctgcctccttcctgatgttttaaaatccacttctcccccaccaccttcataagctgctccctgtggacctgctcaccagtgggggagaatgagctgtgcagtcccacagtctgggttcaggttctggactctagcaagttacttagctgctcagtgtcacaaagcaggtgtaatcatagccttacaggacttctgtgaagattaagtatgatgtctctggcacattggcaatgttgataaacgttagctatgattatcatttaataaatgtttgtgggagtggcagatatttgttgagcatttattagaacccagattctgctagctgctgg

SEQ ID NO: 18844 - DNA, 2014 bp, Artificial sequence
  DNA replication origin
gtcacaagctctcagagcacagaacatgccagtctatattcctcacatcaggcccaggacagaggagagaggaagtggttgaggcaggttggactacagggcatggctctagggccagcatttttaatactcatcatcactcctttctttttttttttttttttttttttgagacggagtctcgctctgtcacccaggctggagtgcaatggcgcgatctcagctcactgcaacctccgcctcccaggttcaagcgattctcctgcctcagcctcctgagtagctgggattacaggcatgcaccaccacacctggctaattttgtatttttagtagagatggggtttcatcatgttggtcaggctggtctcaaactcctggcctcctgatccgcccacctcagcctcccaaagtgctgggattacaggtgtgagccaccgcgcccagccacccctttaaaatgattattctgtgcccagggctcatctcctccacttcctctccagcttctgtcatccaacccactcttaaaagaaagacgctagctccagtgaggtttgctaaccaagttaaaggagagagagctcttggctgtgaagtctggggaggcgcctggagaaaggagatctggggaggtagacaataagccactgcatcttccccagctctctgcaaagagggcttcaggctagaaaaggttagtgaccagcaagagagacttctggaagctaggagtagccagtacacaggaggccatctgtcccactccacaggaaatgagtacctacctgtcgaggaatgctacctcttggtggctgggtagtggtcctcactcgggggtcgtcatcctgcacgatttccccattggccaagatccgcaccatcctcccaggcgctgtgggtccctgatgggctgcacctgcattgtgtggtcagggtgggcaggctaatggaagccaagtggcacagaagttctccccaccacaaaacctttagctgttagtgatctgggaccagactcgtgaagatctgtggaggattttccccctgacctcaaaaagcttgaaggaaaaaatttaccagaaattgagggaggcttgcagtcagtgatgttcacagaggtgacccacgctgagtagatgctgtgtctgattaacaaaaaggggagaaataaaggcaagttgtttgccaggcaaaaagatttcagacattgagtccaccaggaaaactatcaaaaagatccttggcaaaggaagttttactgccaatcactacactgccaacagcacaactgggactagagcctctgctgtggcccacgccccgtggaaggcccatcctgcaaggctcacctcactcaagcctcacaacactcccccgaggagggtactagcgcggccattgcacaggcggaggcacagggagacttaagtggcctgcccgggatcacacctacggacagcagagaaggaacacgaggccagaagctctggttctagggccctccctgggtactaaactgggagtccagggcaccagcatccccagtggggttccaattcccttccactaaaaaatgggtcgagtgtgttgctcccccagggagtcaatgtcaccacctgggccttccccaggaacacccagggagatgagggtcacttcggggttactttacaaccactgcctggtagcggcagaccatcctagccatcatgcgcctcggaagagcacacctttgctgcagagggcacgcccctcacctgtccctcacttcgcagggaacaccagtccaaccttggctaacgggcgcagggcccagccttcccaaaatatgggagggggttgctgcggtggccctcgaaaggctccactccgcggacccctggactgcggggcccctccacgcctccccttgagtctgggtaaaggccattcattctcaggagatgagcctcagtgtccacctacattccagatagcactggtgacatgtatgccgaaaaaggtcaggagc

SEQ ID NO: 18845 - DNA, 1005 bp, Artificial sequence
  DNA replication origin
ccctgcacccttctatcgctcccttctgccttcctttctctggcatgttcagtgctggaagtgctgcctatctcgctagggcctctggaacttcatctgctggggaccccttcagcctggctcctagttttggaaacttactgtctttccaacagttttgcggtagaaggggttaggaggtacaggaagctacctcgtcttctcccagaggggcaggtctggagccaccaggggcacagaggcacactctctcaagtgcccccaccccgtctgctctgctctcccctgacccgaggataaaatatctccatccaagtctgaagcctctaaaataattcttggatagtcctggaagagctggcaagcctgcctttcttggagcttggatggagtcggatctggaaaaagcggctctggtttatgaagtggggatgtgggcaggctgggcacagggtgggcgggctggcacttggctgatgtcgcaggtgagtagtcagggacccggggcagttaggggctgaattcatggtggggaggtccctgggtaccgagtgggctcaccagcgagtgggtgggtaggctgggggctagataggagtaggcctgctgactggggtgtgggtgcagactagagatcgccaggaagggtgtttatgtggggtaggccaggaggttgtagtggagtggggtaagtgtactgggtcaggctgggggttggggagcacgctgagtgctgggtaggctgggtattggctgggtgagttggtggtgggatgggagggatgggaggctggcaggttgggggtgtggctggtgaccagctgttgagtggcagggtcgggccagagagtctccatgctccactccatcttctctttggcactggatacctggcagctgctgtgtcaaatgcctggctcctccgttgcctccttcgggacagaccagcctccaggcctccactgcttcccacccaccaattagcctgctctgtgctgagggagt

SEQ ID NO: 18846 - DNA, 1119 bp, Artificial sequence
  DNA replication origin
agtagggggaatagagccaaaagcaagtcccagcccccgagggaacagggcagatgtgctgagggctctggtagagcacagggcagtgggctggggtgggaactttgtgagtatgaaggaatggctccagttcctggctgggcacaggcagctatttgccaagtggcctggccatcacagcacaggcttgttagcttccaaggactctgggtctgttcagggcttagggccagtgctgaagaggtgccagatgctgcccctacagcttccctctttgctcccatcctgtggccaaggactagaagtctagctccttgaacaagtcaactttcttgtttccagagacagtaaattcctgcagggctggagatttcttcaaactcatatttgtgtagttcaaatgtgaagttcaaggctgggcacattatagttctcagaaaaagagtgatgatggtggcggtggtggtggtggtggttatagtggtggtgatggtggtggtgatggcagtagtggtgataatgatgctggtggtggtggtagtggtggtgatgcagtggtggtggtgacggtgggtggtggtgatggtgacggcagtggcagtgatggtgggtggtggtggtggtggtgatagtgatgatgatagtaatgatagtagtggtaatggtggtggaggcggtgatggcagtagtggagataatggtggtggtgatggtggtagtggtggtgatggtggtggagatggtggtgacggtggtggtggtggtgatgatagtgatgatgatggtaatggtggtagtgatgatggtggtggtagcagtgatggcaacagtggagataatggtggtggtggtgatggtggtagtggtgataatggtgaggtggtgatggcagtggcagtgagggcggtggtggtgatggcagcggtgctggtggtggtgctggtgatggtggtgaatgggatgtatgtcaacgtaaagtagagtactcacctgttcaccaagtttcccccagttgccatgtttttactaggcacacgaccaagcagggtcaatcacagaaccacacatttctagccactatgattggcccaaaggatggccaagtgaaaccaaccaggg

SEQ ID NO: 18847 - DNA, 1372 bp, Artificial sequence
  DNA replication origin
aacgttccaagtccaggaaagttaggggaatctgaccggctctccttctctccgcccagtctttcccttcaagtgtctgcagagcagttggtgccgcgctgtcagtccttctgggcgcctcgtgtctcccgggccagtcagtttcagtccccgggcgaaggggcgcacacggagggccccatgggcagaggtgggtcgtggcggctggcgaggagcgcaggggccgattccggcgcctctgtaacttgacacactccctgcggcggcacggatcggatgagcaatccgtgctacttcccaaactaatctctccctcccccctccctcctcctcctcctcctcgtcactcctcctccacctcccgcggggccgacggcttggatttgtttatttatgcaaactcgcccagggtggggggcgtggtgagcaggtccggcggccccagcccgccggcccgggagcccctctgccgcgctccccgtcctctttgaagtgacacttggggttatttataggcaggaagggggtgtggagtggagctggcgctgcacttccctctctttctccggattcacaccgagggctcgtttggccttccacggaggcggtgaggcgggcaccaccttccatggacgcgttggggcaggcaccactccacctttcccagcccttgagaccctccaggaactcgactgagttattgtcagggcttgtgggtggatctccacgtcctgatcaggactacctgatcccttcagccaccgctcctctactcccaagcccccaacctctttccccttccttctcccccgacaaccgactccccgggggctctgtacctcctgagatctgcagctcctccagtgccgggcggccaaccacatctttactctggggtgaaaagtcagccctccagggggcagcagagctggcagcccttcctctcaggaccaagacctgaggtagtatgagacactgaaaacggaggagatcttattccaggtatctgagaggtggctcattggggccgcctgccagtcctgacatctccccttcttgcctgccattaatctgagacccatgccatctatccctgtgtggtgagaccagcctgcctcaatcatcccagtcatcaaaggtgagcaattcctacacaaactcaggttccatccctgcgggaggcttagggctaaccaggctctctcctgttgtcatttcctatattccactagagaaaaactggtggcctgaagggcatttggtagttttctctcttctcttgtcacctcctccaccccccacattaagtagcatttgtatcccaagagactttatctccttgtgcctgttgacattcctgtgaatgaggtgg

SEQ ID NO: 18848 - DNA, 1907 bp, Artificial sequence
  DNA replication origin
ggagcagcaaatggagacggctattttgggacgagtcaatcaactgctggacgaggtctgtgctctttgttgctggcttttatccctccccgcggcgccccctcgcgcagcctccagactgttcagccggtgtccgcgggcgctcgctctctgcgagccccaggttcgcgcgagttgcctgcgggaggggtcggggacacggacagacgctgccctaccagggattcggaggacctggtgggcaagagcatgacccagcgactcccgcctcgggcaagcgcccccggcttccagcgctgggagcgccctgggcacgccgggcaggtggaggaaggctgggcgcgcggaggctcgcggaggcgggcaagctccactcctccctttcgggacccggccagggtggtgtgacagccgccccgcgcccgcgcagcggcaagcgcgcccagaggcccaggccgaggcttactgagcccccatggccctccccctccaccccttaaggacccggggggtgcggggagaggggacagttcttgcagggggtggtgccctggtctctgctcactggcccaggccgctagggtccaagtgtgggtcgcctggctctgctgtccttggccacaaattagtccacaccttctttttcctaaaccaggtttcttatttttctggagaaaggatgctttcttccattctccaaatttttttgatccaagtagattaaacactactagcgtgtcaggtagctatggcaatcttcggaatacaggaaaaggctgtcccctccccaggaaggagggacatgcagcctctttgtgccaccagaggaaaggctgggccttgacagggtgaggcttgatgatctgtgggaatctggacagcacaggggattcagggcccagatagagaggaggacaggcaggtgggggccgcagcagtctgggaagaggtcctggagcaggtcctggccatggaaggtcctggccatggaaggtttccatggggaagaaatgggagaggatatcttacttagctggagggagtgtgcagcagtaaagatcacggtggtagaggccagcaaccctgggtttttatccccactctgctacttggaagcttgggacaaacgctccaacccctctgaacatgcgaaacagtgctgatgtagcaaacactggagcacagctctaactgtggtgggtggggtgctgtgagcattttggcaagatgtacctattccctatagccaggctcttctcagctgcccctgccaggctggcacctgctggagcagttctccagggtggccaaggaggagattgcagggccagagcagagagagcggtcacagggcaagcgtactggtgctagtggtgcacccatgactgctgctgtcagctcattcccacgccctgccaggctccagggaatccggagaactccatcgggccgtccatggttccctgggcctggggtggaggtgcagcatctctgggctcaggcagaatgagcccagactggctgggtggtgaagaaggtgtcagggcagtgagagctcctccaggtatctcgggggtcctggctgctgagggataagcatctgattttcagggtttagcacagcccctctctccatgctttccccttcccagaccttcctgctggcctgaccatgccctggccttttctagcttcttgcttccactgcttcagacttagacatgccaagtcgcatactctaggggccttggggctaactattgtatccgacatgctcactccttccctccaagctgcagctccatatttaccctactgaatacaatcttttcaactgctagatatgaaagttatcccagagagcatctgaactgaaccccatttttcagatggggaagttgagccca

SEQ ID NO: 18849 - DNA, 831 bp, Artificial sequence
  DNA replication origin
ggaagctgcccagtgtggtttgtaggtgggaaggctctccctggctggaaacccacaaaagctactcttgctgtgtaagagactcatactacatgctgctctcaagcacctacaccatctaaagcaaatggttaatgctagcagtcagggagaaacctctgcaggtgtatacatcttggtctgtttgcacttctcattttaggacaaattacttgtcccagtgggtggttttgcctggattgtacatcgagcatacaccaggcattacgttaacatactcatcaaacagcagaactcatggccgaggccaagtggggaggagaggatggaaggagctgcagggatgatgtagctgacatggaggggtgaagagttcactaggtagaaactgagaacaaagataccagaatagcatgagttgtgtgcaagtgggacactgtaagttctggcaggggagcagcccagttttactgaaagaaaagcaggacagcggaagactggtcagagatcaggctagagagacaaagtgggcttatctttgggatggggggtatgagcactgaggagccatggatggtttttgagcagaggagtggagttgacagaacctggctgatggagtgcagtgggtgaaggcgaagggggcactgatgttgctattgtgggtttgcacctgggtgtctgggaggccagatgggacatgcggtggggctgcaaagtcaggaggaagagatgggggtggggaggactgaggctaacatcgcaggggaaagcacaccactctggctgcagcagaacaagggggagtctgaatattgacgagaacagcaa

SEQ ID NO: 18850 - DNA, 977 bp, Artificial sequence
  DNA replication origin
cctggcaaccgccccgtctgagaagtgaggagcccctccgtccggcaaccaccccgtctgggaagtgaggagcgtctccgcccagcagccaccccgtccgggagggaggtggggggggtcagccccccgcccggccagccgccccgtctgggagggaggtggggggatcagccccccgcctggccagccgccccatccgggaggtgaggggcgcctctgcctggctgcccctactgggaagtgaggagcccctctgcccggccagccgccccgcccgggagggaggtgggggggacagccccccgcccagccagccgccctatccaggaggtgaggggcgctctgcccggccgtccctactgggaagtgaggagcccctctgcctggccagccgccccgtccgggagggtggtgggggggtcagccccccgcccggccagccgccccatccgggaggtgaggggcgcttctgcccggccgcccctactgggaagtgaggagcccctctgcccggccacgaccccgtctgggaggtgtgcccagcggctcattggggatgggccatgatgacaatggcggttttgtggaatagaaaggcgggaagggtggggaaaaaattgagaaatcggatggttgccgggtctgtgtggatagaagtagacatgggagacttttcattttgttctgtactaagaaaaattcttctgccttgggatcctgttgatctgtgaccttatccccaaccctgtgctctctgaaacatgtgctgtgtccactcaggtttaaatggattaagggcggtgcaagatgtgctttgttaaacagatgcttgaaggcagcatgctcgttaagagtcatcaccactccctaatcttaagtacccagggacacaaacactgcggaaggccaaggccgcagggtcctctgcctaggaaaaccagagacctttgttcacttgtttatctgctgaccttccc

SEQ ID NO: 18851 - DNA, 1311 bp, Artificial sequence
  DNA replication origin
attccacaaaaccgccattgtcatcatggcccatccccaatgagccgctgggcacacctcccagacggggtcgtggccgggcagaggggctcctcacttcccagtaggggcggccgggcagaagcgcccctcacctcccggatggggcggctggccgggcggggggctgacccccccaccaccctcccggacggggcggctggccaggcagaggggctcctcacttcccagtagggacggccgggcagagcgcccctcacctcctggatagggcggctggctgggcggggggctgtcccccccacctccctcccgggcggggcggctggccgggcagaggggctcctcacttcccagtaggggcagccaggcagaggcgcccctcacctcccggatggggcggctggccaggcggggggctgatccccccacctccctcccagacggggcggctggccgggcggggggctgaccccccccacctccctcccggacggggtggctgctgggcggagacgctcctcacttcccagacggggtggttgccggacggaggggctcctcacttctcagacggggcggttgccaggcagagggtttcctcacttctcagacggagcggccgggcagagacgctccccacctcccagacagggctgcggcccagcagaggcgctcctcacatcccagacagggcggcggggcagaggtgctccccacatctcagacgatgggcggccgggcagagacgctcctcacttcctagatgggatggcggcggggaagaggcgctcctcgcttcccagatgggatggcggccgggcagagacgctcctcactttccagactgggcagccaggcagaggggctcctcacatcccagacgatgggtggccaagcagagacgctcctcacttcccagacggggtggcggccgggcagaggctgcaatctcggctctccgggaggccaaggcaggcggctgggaggtggttgcagcgagccgagatcacgccactgcactccagcctgggcaccattgagcactgagtgaacgagactccatctgcaatcccggcacctcgggaggccgaggctggcggatcactcgcggctaggagctggagaccagcccggccaacacagcgaaaccccgtctccaccaaaaaaaaacgaaaaccagtcaggcgtggcggtgcgcgcctgcaatcgcaggcactcggcaggctgaggcaggagaatcaggcagggaggttgcagtgagccgagatggcagcagtaccgtccagccttggctcggcatcagaggag

SEQ ID NO: 18852 - DNA, 723 bp, Artificial sequence
  DNA replication origin
caggtgctgtcgggcagggaatgagaggaacttcgggaactgcgggttgggggaagggctgcctaatctaacagaagtgttgttaagacctaaaccaggttgtcaaccctgcattttctcgtatcgattgatttcaaatcctgatgcctgggtcccacccccgagactctggggtattttctgtgcatcaggattcttaaaagctcccccaaatgattctgatgggcagccaggtggggaagggagtcagccagattcagactgggggggcgggtgaactaggggaagatagtaagggaggtggggagtaagggagaagactccaagtttaaaagagtgtgtggccctttctaatgtgccgagagcagagcttggaaatgggaggagtgagagatgaaatgggggcagggcagcaggcgctagactgtgacggcccttgaaggccacgttgagggttcgcgcgcgcgcgcgcacacacacacacacacacacacacacacacacacacacacggcagaggaggcatcaaagagaggtggcagcatctgcaaggcatcactctggctttaggtagagatcagttgtcaaggagcaagatcagattccaggagaccagtggagttgttttagtgtcactttgtgaagaactgacagtggccaggaccaagggtgcacagtggggatggtgagaagaaatggaaaatctgggagctttctggaggg

SEQ ID NO: 18853 - DNA, 932 bp, Artificial sequence
  DNA replication origin
gacgcgtgcagtccacctggaactgaattagtggcctatattggggctctccttccaacaccacctgatcaacacaccctacctttccctacaaggagagtctttttgaccctggaatttaaggtgaggatggggagtggtgaggtctcttgggggctgatgatcctgtaggaggacaggcatagggcagagagtcagatatagtttgggatgggacttgcaggtttctggactgtgcacctgtgttcaaaagcctgtatcaggttccagtgtgcgtgcatgcacctgccagagagccccgggatctcagatcacacctgccctcaccccagcacctagagaggagttctccaaggagcacagtgtgtcaccaagaagagggcactgagccccagccagggtgggctgggcaggcttagcactacctagcccagaagtgatgggctgggcaggccggtggactccagggccagcctgacttttgtctggtggccaaatgaagccagcgtccaggtacaggtggtgggcagaccatggggaccacaaaactggctctgaggaggatggacaaattgcttggcctaggttttctgtgcgggagtgaatatgacatccagatgaacctgtctgccccagagctgccctcccctggggataaaaggaggctgcctcccttagactttgagtcccttttcagaaactggtcttttgggggttctgttcttcaagtagtccctgaggggctggccatggagtgtcccaggaagggaggccgcccaaccgtctccatcctgctgtgtcccgcaggtggaggaaacctccatggtgctgtgagtcgtgctgtagtggccttcttatccgggacggccactctgggaatgtggctctccagaggctgatgttgaaacctaccctttgtgtgagccatgacg

SEQ ID NO: 18854 - DNA, 1323 bp, Artificial sequence
  DNA replication origin
ctctctctctctctctctcttttttgctttaaagtatgctgaaaggacactttaaaccaagtctgaatggctcggcaggactggggcgcgggtgctggcaggagccggagaggcgacatctggccatgggagcatttgtttcaaagttcaaggccgttcgctcagggtcaaggttagtccggcgggccgttcggagaccagccccagcgtgccaggaccgtttccggggcctggccggggcgttgccgcggggtcggggaccagcacgagtgctgagtcacgccccgcccgggagcgcctcgggtcagtaactcgggaagacgaccaagcgggagcgggagcgggagcgggagccggagcgagagcgcgcgggcgcggccgacaggtgagatcgcgccgccaggcgggctctcgagaccccgggcgccccgggcgggaccgggacccggaagaggggcgagcggattagaggcctggctcacgccgcgtctggcgtggggaggtcggtgcgcgcagttgtggcgctgcgaggagagggatactcgactcaggcccgcccctctctgtctcccccaaaaaacgcaacagggagatgtgctcctggccgagggcaaagaaaactccaccctcctggtttggcccctaaatccctgctaagttttcctaaggaagatgggcttaggccgggaagggcgaaccggggaagagggaacacggggcgggtgtaacccggatcttgcgaggaccgtccgagggtccgctgggtagaagcggccggtccggacagaagcaggtgtgagaggaaagggagaaacctcagtctctaagaggaaagaaactggagtcaacccagtgcccataggctcgggggagctggggggtgcagcactaggaagtctgcttctcccttcccgaagccctgggtgctgcagggacaaagaccagcggtgagtaaactaactctgatgggacgcgtgcagtccacctggaactgaattagtggcctatattggggctctccttccaacaccacctgatcaacacaccctacctttccctacaaggagagtctttttgaccctggaatttaaggtgaggatggggagtggtgaggtctcttgggggctgatgatcctgtaggaggacaggcatagggcagagagtcagatatagtttgggatgggacttgcaggtttctggactgtgcacctgtgttcaaaagcctgtatcaggttccagtgtgcgtgcatgcacctgccagagagccccgggatctcagatcacacctgccctcaccccagcacctagagaggagttctccaa

SEQ ID NO: 18855 - DNA, 1139 bp, Artificial sequence
  DNA replication origin
ctgggctggtttgcgctgctgggcgtgcggctaggccaggaggaggtggaggaggagcgcgggccagccatggcggtgtcgcctctcggggccgtgcccaagggtgcgccattgctggtctgcggctcccctttcggcgccttctgccccgacatctttctcaacacgctgagctgcggggtgctcagcaacgtggccggcccactgctgcttaccgacgcacgctgcctgcccggcaccgagggcggcggcgtgttcaccgcgcggcccgcgggggcgctggtggcgctggtggtggcgccgctctgttggaaggccggcgaatgggtgggcttcacgctgctctgcgccgccgccccccttttccgcgccgcccgcgacgcgcttcaccgcctgccgcacagcaccgctgccctggccgcccttctgccgccagaggtgggcgtcccgtggggtctgcccctccgagactccgggcccctgtgggcagccgcggcagtgttggtggagtgcggcaccgtatggggctccggagtggctgtggcaccccgccttgtagtgacctgtcggcacgtgtcccctcgggaagcagccagggtcctggtgcgctccaccacccccaagtaagcccgcagggctgacgccacttcatccctttccaggtctcagatctgggtccagccctaatactcttgagtattgtgcaggcctttcttgtgtcacgcggatgctttgggcgtgtagtgggtagagacctggaaccctcccctcatcctttatacccagaacccctgtggggagaatctggggcaaggtgtcaagctcgaagcagctctggatttgggtactgtgggacaccctgaatccggaacagggcatctttgagctcccctcaaaggctgagtttcttctgggcagcttcactgtctgatagccctgcacgccatacccctcggttctctggccctttgaacagagattccctaaccctgctgcttctcctctgaaagtgataaggtcccagaggcccaggatggtgctctcctggggtaaggagatgggtatgttaattttatccatcttttagtgcttagccagagcttcccgtctgagtgaaacgtgagtttctacgtaatcag

SEQ ID NO: 18856 - DNA, 947 bp, Artificial sequence
  DNA replication origin
gttccgctgcctcgtccccgaagaggcgcgcgaagtgggcccagaaggccgggcagctcagcagcagcagcagctcagcaggaagccggggctgcaggggacgcccgcgggacggggcaggtgggccgggctcgaggctcgcgcactggggcgtgcacagccctgggcggccccgctccgcgccgcccccgggacccgcggccgttggggcccactgcacgtgcaggcgcaggtcgtccctgcaactgtcgccaggcaggaagacggcgccggccgcggtcaggacttcgctgccagctcgcaggaaggggacgaagatgcccccgtggcaaagcaccaggcccgggctacggctcaggattaccccgctgcagctccacgggcccgcctcgggctgtccggcccgggaggcgctcaccatgcagcccgcctgctcggccgccctcatggcagacccccactgccttctcatggcctctaggccggacactcgggagcttctccgagaaacagcaagctagcgagcgaggacccctacccggtccggctgaagctgcctagcgccacccacagctggaagcgagaggcgcaagctctgactcacgtcttcctcatcgagcccgattggctaagccccaattgacccgacccgattggctgggcttgtaccgagctctgattggcttcctattctgattttttttttcctttccccgccctcgttagtttgtccaaccggtgggacataatctgccccattcccccggatgagccccggggagagtaagaggagtgcggcgtcacgaggaatcagaggagaggagggtgggtcccttcaagcctagtctcgtttgctggaatgtgggaaagggaatagaaatgagcgctgacgtgcctagatttgcccaggccacgacagtacctgtgagcatctgcccaggtctagg

SEQ ID NO: 18857 - DNA, 926 bp, Artificial sequence
  DNA replication origin
gtgaggccggccaggccccacaacgcgcccgaggagacgggcccgcgtcggagacctggggccgagcgcgggccgcaccctcccggggaggcaaggcccgggaatgaatgggcggacgggcgcggaggggccacgggccgcagacactcactgaggaagactcggtactccagggagaagggcgcggcgcgctcctcggtgctgaagccgctcatagtgccggagtcctgccgccgccgctgccacagagccaccagcccgcacgcggcgccgactgacaaggagagagccccacgcctgcgcactgcgagcactggaccggcgggcggggcggggagcgcctttaacgcggctctgctagtgttcccacccccgccgggccaaccccgtgcgcaggcgcactccgccaggcccgggtgtccgcactccccagccccgcccctcgggcccagcctccgcgatggcagctagggctcagaggctgggccacgtggctgccgccggcgctggttctgttccttcggctttgggctctgacccgggagggcaaatgcgcaggctctaagcttggactagctaggagttgaccgccgaccacgcacacagggaactcacctttgattctcacacactcctccccgcagtcctattccttatctcaaaaggcgttgataagtcacctgcttccccagacaggctctgcttgcggtcttaaaggtgagcatttttctgatccgtcgtaacaaagttgagccatattactgacacccctagtggctactagtaaggtactcgcttctccactttctataatctctctcactccgttgcttatctgggaagtgaagataataatataactatttcatgagttactgggatgattacccgagttaatacacgtcaaatgcctgaagcagagcctg

SEQ ID NO: 18858 - DNA, 1343 bp, Artificial sequence
  DNA replication origin
cggggcagccgggcagagacgctccccacttcccagacggggcagccgggcagagatgctcctcacctcccagacggggcggccgccaggcagaggcactcctcacttcccagacagggaggccaggcagaggtgctcctcacattccagacgatgggcggccgggcagaggcgctccccatttcccagatggggtggtggccgggcagaggcactcctcacatcccagacggggcggccgggcagaggcgctcctcacttcccagacggggcggcccggcagaggcgctccccacttcccagacagggtggctgccgggcagagacgctccccacttcccagacggggtggctgtgcagagacgctcctcacttcccagacggggcggctgctgggcagaggcgctcctcacttcccagatggggcagctgccgagcagaggcgctcctcacttcccagatggggcacccaggcagaggtgctcctcacattccagacgatgggcggctgggcagaggcgctccccatttcccagatggggtggtggctgggcagaggcgctcctcacatcccagacagggcggccgggcagagacacttcctagacggggtggcggccgggcagaggctgtaatcttagcactttgggaggccaaggcaggcggctgggaggtggaggttgtagcgagccgagatcacgccactgcactccagcctgggcaacattgagcattgagtgagcgagactccgtctgcaatcccagcacctcagaaggccgaggcaggcagaacaggagctggaggtcaggagctggagaccagcccggccaacacggtgaaaccccgtctccaccaaaaatacaaaaaccagttaggcctggcggtgtgtgcctgcaatcccaggcactcggcaggccgaggcaggagaatcacgggagcccgaggcagggaggttgcaatgagccgagatcacggcagtacagtccagcctcagcaacagagggagaccgtggaaagaaagagagaagagagaagagaggagggagggggagggggaggggaaggggggagagggagagggagagagttgtttgtttgagacggagtctccctctgtcaccaggttggagtgcagtggcgtgatctcagctcactgcaacctctgccctcctgggttcaagcgattctcctgcctcagcctccctagtagctgggattacaggcgcacgccaccacgcccgctaatttttgtatttttagtagagacagggtttcaccatgttggccaggatggtctcaatctcttgacctcatgacctgcccacctcagcctcccaaagtg

SEQ ID NO: 18859 - DNA, 1488 bp, Artificial sequence
  DNA replication origin
gcctgggggccccactgctagggcccgactcagagggcagcccggagtcgctgggccgcaccaccacgaagacccgcctgtgcagaagcccgccgggccgctcggagtaggcctccttgtggctccccgacgggcgcgggcagaggcgggcgcggaaggcggcctggaagccgcggcggaagttctcgttgaagtagccgtagatgatggggttggcgctgctgttgaagaaggccagccagtgcgcgaaggggaaggcgtagacggtgaccaggtgcagctgcggcgcgctgagctgcccgtagtcgatgagcagcagcagcgcccagagcggcagccaggacagcgtgaagaacagcgccaccatgaccagcatgtgcaccacgcgcgctctgcgccgcgatgctcgcgggtccgcagcctcctcgcccccgggggccgggcccggggcctggcagagcttgcgcgcgatgcgggcgtacatgaccacgatgagcgccagcggcgccaggtagatgtgcgagaagagcacagtggtgtagaccctgcgcatgcccttctcgggccaggcctcccagcaggagtagagcgggtaggagcggttgcgggcgtccaccatgaagtggtgctcctcacgggtgacggtcagcgtgacggccgagggacacatgatgagcagcgccagggcccagatgacggcgatggtgacgagcgccttccgcagggtcagcttctcgcggaaagggtgcacgatgcagcggaacctgccgcggggagagagacaggcgggatctgggtgggtcctagggcccctgcgaggggacggtgggtgggatgcgggcacctgaccttcatcatcgcatctagggcggcgtcgaagaacagctcagacctgaattggctgagtagtcaaagaacaaaggcagctacaggatttatgagaagggaggaggaaaccgcagatcgtgtgggaacaatgaatcctgtgtgcacttttgcacttttctccttttttttttttttttcctgagacagggcctccttctgtcgcccagtctggagtgcagtggcgcgattacggctccctgcagtctccacctcccgggctcaagtgatcctctcctcccacctcagcctcctgagtagctggaaccacaggaatgcgctgccacctcgccggctaatttctttcaatttttggagagatgaggtctcactgtgttgcccaggctagtctcaaagtcttgggctcaagctatcctccggcctcggcctcccgaatttctgggattatagatatgagcctccttgcggggccatttgtgtacttttgggggtcaactgattagctggcagctagcagagcgatcagagtgcgcagtctgtcctcgacaaggacgattaggtgcgtcaaataacacagtttctgtttatggattctccagaaaacctcaggaggtcagatgtagagcctacatgtcaggctgt

SEQ ID NO: 18860 - DNA, 1125 bp, Artificial sequence
  DNA replication origin
gtggagctgggggcgggggcgaagcggccgggcaccgaggcgccgaggagttagaggaccgcggcgggacaccgggcgcggcggacggctggccggcgctcacctcccggtgtggtggagaagagcgtccccccgggcgtggtgcaatagtcatgaggtagctgcgcggcgtcgctgatggccacggtgcgggtggggatggcgcggctctggctgggctggtggccgctgccggctgacgaggacatggctgtgggcgcgggctctcggctttgtccggcgggcaggcggcggcggcggggccggggctgcttcggctcctcaggcggacggaaaagcgcgctctgcgcgctcctcgctcgcttcctcccgttccctcgtcccgctccgctcccgccgccgccctctcagccgccgccgccgccgccgctcgatcctccggcctcagccagcagcctcaggagcaacagcagcggcagcagcggcgacgacgacgaccggaagcgggcgaaggcgggagccagagggagttggggaagctggtcggccggaggtgacgtcgccgcggggcggggcgaggcagtgaggggcgtggctgaagttgttgaagggggcggggacgaggggcagggctgaggaagagagtggcttaaccccagcgagcgggagaagagccagagggagcgcgagctaagtgtttgtgagcctggtgaaggcggacaaggaaaactttcttcttattgtttgtcattgtcggttaacaccactttacttgagcagacttgagtttctcatgcattcctatgcattaaaaatgtaattttacttttaattgttcattattaattcaggcactacatgcacgatgtactgtattttaaaaatcaaacagagcagaaaggtttatggtgccactttctcccagtttccgaactcccctcaaccgctgtaccagttaattgtgtatccttccaaagaccatcactatatacacacataaagcaagatctaaacattaggaaaaggaagaaaccaagagccactcatggcaacaagaatgagtattattgtattagagttaaaatgaggcacaggagagggcttagaccatgaggtacctgaaaa

SEQ ID NO: 18861 - DNA, 1008 bp, Artificial sequence
  DNA replication origin
gggagggaggtggggggggtcagccccccgcctggccagccgccccgtccgggaggtgaggggcgctctgcccggccgcccctactgggaagtgaggagccctctgcccggccagccgccccgtccaggaaggaggtgggggggtcagccccccgcccggccagccgccccgtccgggagggaggtgggggggtcagccccccgcccggccagccgccccgtccaggaggtgaggggcgcctctgcccggccgctcctactgggaagtgaggagcccctctgcccggccagccgccccatccgggagggaggtggggggtcagccccccgcccggccagccgccccatctgggaggtgaggggtgcctctgcccggccgcccctactgggaagtgaggagcccctctgcccggccagccgccccgtctgggagggaggtggggggggggtcagccccccgcccgggaggtgagcggcgcctctgcccggccgctcctactgggaagtgaggagcccctctgcccggccaccaccccatctgggaggtgtactcaacagctcattgagaacgggccatgatgacaacggcggttttgtggaatagaaaggggggaaaggtggggaaaagattgagaaatcggatggttgccgtgtctgtgtagaaagaggtggacatgggagacttttcattttgttctgtactaagaaaaattcttctgccttgggatcctgttgatctgtgaccttacccccaaccctgtgctctctgaaacatgtgctgtgtccactcagggttgaatggattaagggtggtgcaagatgtgctttgttaaacagatgcttgaaggcagcgtgctcgttaagagtcatcaccactccctaatctcaagtacccatggacacaaacactgcggaaggccacagggtcctctgcctaggaaaaccagagacctttgttcacttgtttatctgctgaccttccctccactattgtcctgtgaccctgcc

SEQ ID NO: 18862 - DNA, 1024 bp, Artificial sequence
  DNA replication origin
agaggcacccctcacctcccagatggggcggctggccgggcggggggctgaccccccacctccctcccggatggggcggctggccgggcagaggggctcctcacttcccagtaggagcggccgggcagaggcgcccctcacctcctggacggggcggctggccgggcggggggctgacccccccacctccctcccggacggggcggctggccgggcggggggctgacccccccacctccttcctggacggggcggctggccgggcagagggctcctcacttcccagtaggggcggccgggcagagcgcccctcacctcccggacggggcggctggccaggcggggggctgaccccccccacctccctcccggacggggcggctggccgggcggggggctgacccccccacctccttcctggacggggcggctggccgggcacagggtctcctcacttcccagtaggggcggccgggcagaggcgcccctcacctcccggacggggcggcttagccaggatggtcttaatcttctgacctcgtgatctgcccgcctcggcctcccaaagtgctgggagtacaggcgtcagccactgcgcctggctgtaatcagtggatttttaacatgagggcttatttaatatctttataaggacatggtgccgttgcagttggatttaatcactattacagcaatgaatactgtttaggtgttctttacttactgatttaacttccccctctgacggtttgtgtatctctaatgctacattcatcttcctctcatcatgtaattttatttccctcaaccagggtgcaatagtttgttatctggccacctccagactcctggattaatatggttaggtatcgttagtaaattttgtgtgcccaggggagtggttcgcacaaaaggggacaacagacaaaagtaggaaatacagtccttggtctgaacaggtttaaattcttgatttgggggtaggggcagacagataagatttttagttctgaaagagtagagt

SEQ ID NO: 18863 - DNA, 1059 bp, Artificial sequence
  DNA replication origin
ccggaggggggttatatgatcttaaagcttccccagagggaggaaaggtgggggcggggcggctgctgaggcccaggatataagggctggaggtgctgctttcaggcctggccagcccaccatgcacgcccactgcctgcccttccttctgcacgcctggtgggccctactccaggcgggtgctgcgacggtggccactgcgctcctgcgtacgcgggggcagccctcgtcgccatcccctctggcgtacatgctgagcctctaccgcgacccgctgccgagggcagacatcatccgcagcctacaggcagaaggtaggcagtgccgcgtgccgcgccctgctgggcacccccggggcgcctccgccgcgtccagccagcggactcgggaagtgctgtgggttgggggctgcggctccgagccgggtttgcagccgcccgggcgtcccgagcccagggcctagctctgcgggtgtctccgcgtcagcaggctcggggtgcagcgttggtggctgggggcgtatccacggccgagtcgggaagggattctagcgttcagggtgtgtcctcgacggggaccattgtctctgggttttggtttgggattgcgcggagcgcagcgcggaagggtgggagcttctaatctccagtcttgtgaagttgcttatcccggagcctgggtctgcgcatctgtaggataggtgtaataaataacacctcgcctatcagactgtggaaagcgcgagatgacaatgcgcgcgaaacgctcagcgcagtacccggcacagccacagtcaacggtcgttggtattactgtaatggtttggtcttggcgatttttttttctttctgcgagtgagggtgaatgggtcccggggtgtgacgtcgggagtatcggcagctgagctggtaacatcggggattcgggctcacggcccggagatcagggatgggctgtcccgaagtcgcgaactgtggcagccttgggtcctccagccgcgccggggaagtgtcaagtgtctcgcttaaccccgggttcggggccatgatttgcagggga

SEQ ID NO: 18864 - DNA, 1466 bp, Artificial sequence
  DNA replication origin
agcccaggtctcctgaatcttagatgaggcctccagctatgtgggacagcctcctcccctaagacagaggacaaaggcttggagctcctagttgagcctgctgggcctttctccattttctaacaacctgctcaggtcgcagcctatggttcttttgttgttgttgttgttgttgttgttttgttttttgagacagggactcactcggttgcccagactggagtgcagtggcccgatcttggcttattgcaacctttgcctcccaggctcaagcaatcctcccacttcagcctccagaggagctgggactacaggcgcacaccacaaaaatgcctggctcatttttgtatttttgggtagagacagggtttcaccatgttgaccaggctggtcttgaactcctgagctcaggtatctgccagcctcatcctccctaagtgctgaaattacaggtgtgagccaccgtgcctggccagcagcctatggttcttttgagctagaggcatcctgtgaaagaagtcaggtgtatagagcacttagcactatgcctggcgcttagtaagtgttcagtaagtgttggccagcagctaagtgcttgtcaaggctaggtaggtggggggagctaagaagagaaagagccctcaggtgtaaaggaaaacggatggggccagacactggggcagggatttacatttctttaaaagtcattccagccctgatttgactttgcacctggaagggaggaggccagacaagatcactcttgtgcaaataaggaaagctgagcccagagatcaaagtgagtggccctgagccgacacccaggtcttctgtggccctgccacaccaggcagggattgggggatgtgggcaacaagggtaacacctttcctcctgaaatcactggggtgatgtctgcctgtcggggaagagcctgatgaaccaggatcaccccgttggctccatctggctccagcttctgctgaacactcccttttcaggtggagaagtcatcgtcctggtccctcctgccttctgtcttccccaggaaagcacttcagtatttggtagggccaggggtgctccccgaggccatctagacagtggccagggaggctgcgccggccagattgtgtcaaagtctgcctgagagccacgaggatccctcggcattctcttcctgcttcttgaggagcctgcggtccatttgcagcctgagtggagaggatggggcagggatcccaggtgaggtcgagtaaggaagtcgcagttctgacctgggaatctgccgggacaagcctgctctgtctcagcatcaaggcgtttggtacctagaggagcagggtgccagggtgtccagaccgggcaaaccaggagccctagatcccgtccctggaactaggtcctccgccagctttgcgggcctcctccgcaccaggctcaggtctcgcccatccccagcagga

SEQ ID NO: 18865 - DNA, 1267 bp, Artificial sequence
  DNA replication origin
gtcagcaggaggaggctgaggcagaggaaaagagcactggacttggagtcggcgtgcctgcctgcctgcctctagcttcgcaatcttgtttgcagcgaaggggcatagtggtctgtgcggcgcggtgcccagtcccgcccgccccgccgcgcctggccgggcgcctggcacagcccaggcgctcagcggaggccccaggcatggcaggacctacggagcccggtgaggtgagcgcgccaggccggccggctgggctggaggcagaggcccaggcgcccgccctcgtgggaaagcgcgcggagggcgacccgggtgagtcagccgaagagcagacgggctgcggagcaagaagaccgaggctggaggcggcagtgagtgttcccgccgggcgggtggcgttgtcgccgccaagggggacccgcccctctcccctgttccccgcactgccggtcccgccgccggggccgggacaagagcctagtgagacagagacgctccggcgcgagctcctgcccaggccctgtggtcgggcggggtgggggttacccagggctctgccctcagcgggatgtgtcccctcccatctgtcccgtcccctcgctgggcttctgtccagtggcctcattctgttgctgctggtgggaagggtgggatgtgcctgcttggtaaattgtggggcgccaccaaacgcggggggcccccatttggtgccaggcgaggcctggtgcgtgggcaggagagtcaggatgggccccgcacaccatcaccgccttaccgcggtgctgcactgctaaaccaagggattactgctgttcctgggctcagggagagagcggctcccccacctttatcccccgccatccgcccacccactgcttcacccttcccccatcccaccccaccccactccaagccccagggagcccggtttataagagccactgccaccgtttgtccatcgctcactgggacgctgctttgtgataaacattttgcacagttacctcagttagccctcccgctggcactatactgacggctcccttttcagatgaggaaccggggctcggagaggtgaagtcacttcttcaaggtcactgcagtcagaggcggagctgccctgaggctaattgaagcttaagtttcagacccttgcaaggcccggacctaatttttgcatttgtatttttgtgttcttttcctttaaaagccccctcccgcgacagtaggagggtcaagccccttcaaaatggatctctctgaccgt

SEQ ID NO: 18866 - DNA, 1134 bp, Artificial sequence
  DNA replication origin
agggtggaggcagggaggcctccacagttgtccaggagagagatgatggtggctgggaccaggtggtgacagaagagatggggaggagcaggtggattctagagagccattttggaagtgggatccacatggctggtatgaggttggatgttgtggtgttgagggaggaaggaatcaggaatcaggggcttggctgcagacagaacgctggagaaggcgcagaggagttcagtcttgatgaatggagccggagatgactgtgagggagcccacgggagacgcacggtaggccggtgggtgcaggggtccagagttctgaggactggtctggggtagacaaaggccgggcaccatgggcattggtggcttttaagccccaggatgggtgagaccctccaggagaggcaagtaaccgcaggggagaagagaagtcgaagcacagccttggagggcgggcttcgaggggaggggaggcctggggcagggggaagaggctcagaagacaaagaggactgagcaggggcccagacggcggaagggaagcttagccgcacgaaagctaagaggtggggagcatttcaatcgtgtcaaaggctgctgtgcggccaggcagggctggagccaatttggtaacacggagtctctcctatacaacccaagccagggcagacgccatggtgggtggaggcaggaggcacacaatggaaccgggtgaagggtgaccgtgaagcggggagtgtaggcaccacggacaactgctgtggagaaggtgcggcagctggaggggagagggctggctgtgaagatgagggcacagggcagagtggcgttcacctatggggtggctgagggggagtacgtgggggaacggaggacaggcagggctccgagctttccagcctctgttccttccactttcaccttgtgtctgcagttaccccataataaccacccctaactcagatgaggacagctgagtcccagagaagatcccaacgtcacaaggcgggggctctgcctaagctggctccgcgcacagcaggctgtttggagtctgccaagactcatgcaaaggtcatgtgggccccttgaccaaatctggacgtccttccctccatgccaggttggcactgc

SEQ ID NO: 18867 - DNA, 974 bp, Artificial sequence
  DNA replication origin
agagtgggagaaagggcattccagccagaggagacagcaggggcaaaggccctgcaatgggaacactcacatcacactctagaagcggaaagaaggctgctgcagctgcacagcaatgagccagagggctgaggcccgcaggccggggttctggagcttgtattttcttttatttttttttgagacgaagttttgctcttgttgctcaggctggagtgcaatgacacgatctcagctcactgcaacctctgcctcttgggttcaagtgattctcctgcctcagcctcccaagtagctgggattacaggcgcatgccaccacgcccggctaatttttgtatttttagtagagacggggttctccacgttggccaggctggtcttgaactcttgacctcaggtgatccgcccgcctcggcctcccaaagtgctgagattacaggcgtgagccacctggcccggcctggagcttgtatttcatcctacaggcaatgagaggcactgaagggtttcagtgaggggagtgatgccatcccatctagctcctgagaggagtggattctggggggccagggtggaggcagggaggcctccacagttgtccaggagagagatgatggtggctgggaccaggtggtgacagaagagatggggaggagcaggtggattctagagagccattttggaagtgggatccacatggctggtatgaggttggatgttgtggtgttgagggaggaaggaatcaggaatcaggggcttggctgcagacagaacgctggagaaggcgcagaggagttcagtcttgatgaatggagccggagatgactgtgagggagcccacgggagacgcacggtaggccggtgggtgcaggggtccagagttctgaggactggtctggggtagacaaaggccgggcaccatgggcattggtggcttttaagccccaggatgggtgagaccctccaggagag

SEQ ID NO: 18868 - DNA, 942 bp, Artificial sequence
  DNA replication origin
ctgcctcctgccagcagcagcccactcctgcaccctcttcagagacttgaagtgggtgacaactcctgacgggcgggcctgggggtgcagaaagggacttgtccatgggtctctaagtgtcaaatgtcaggtaggtgtgaagtcagagccaggagaccagcttctggggggtatgggaggtgttgagtgttgagagaaagcagggtttcattctcttcttgacccccttgggaaagaggccccctggggagctggagttagaatcacagttaaggcctcttctggtcctagaggttcccaccagcctttgaaagtcctggaatgtttagctggagaagcctgggggtgggggtatgagatggtgtttctcaaatatttgaggggcagtcccccgggaggaggtacctgtgctctggtggtcccagtggtggaggtggggggtgggaggtgaggggaagtaaaagaatagctggagagtgaggggagccactgagaagtggatgtcgggttcatgtgtggagaagggtgaaggacgtcctaacaccccgcacagttcgcggggaagcggatggcgtctgaaggagtgagatccccgtcactgggaggattcaagttaggcagcagtttagtagccgtatacaagagctctggagtcagagagggctggggaacactgggcaagttcctcaattgctgtgtgcctgaatttcttcatttgtaaaatgaggatagcaatggaacctgctctaagggttttgtgaggagtgagatcatgattctgacacagtagccagcacttagaacgcacccaggataggacaggagtgcatggaggggattcttggatgaggtggggagttagattaactcctcactacgagccccccagcctggattttcatggaaggagtgccctggggctcattgtggcaatgcccctga

SEQ ID NO: 18869 - DNA, 1654 bp, Artificial sequence
  DNA replication origin
gctgctccccagcgccccgctacccaacgccgaggggcggacccgacccggccgccaatcaccgcgcccgcccccgcccggaccgcgagtcccggccccaccgcgaggggcggggggctcagatttaaagacacactcagcccagccgcagcccccgggcgggaggaacgcgggcgccacgttccccggctgcgcttcctccctccgcccgcccaccctccgcgaggaggaaaagtttggggcgggggagactgcccgggaagccagttcctcttccctcgtcgctagtgcggctccttctggaagacacccaaacccgacatccagcctcctggctgcgagaggcagcagcgctctgggcgccacaccccgtcccggacgccggctacccgcgacacccgctggcccggcttccctcgcccccctctgctttacagccaggccgagcctcggcgggaccgagcccagcatccgggctccgggccggcctcgctgtgcagtgcggccggagctggatgatggtgcgctctgcacttttgcctcccacgtgtcgaaggggagcccctaaacagcagacggtccccccaagcaggggcttctcccacgccccggggtcctaaggaaacgcgcccctcggcccccagaggtgagaggggaacagcagagcagagctttggatggagaggggtccctccgcccccacccatcatgcggctccaggcagtgacccgcaccataggcctgccccccccaccactcctcaccccacacgcgcggactagcactaggcggcagccagcccggcccactccgacggccccgcacgcccccgcgagcacgtgggtgaacgcacccacgtgcgtgcgttcactcttcgctgtgcttcctcgcggagagataggctttgttgtggttggtgagtcacttcctccctctcgctgctccacactcgggaaatccttttttctcacctgttaccacctgcctcacccccattcaggactggagctggatttcggcgagctggggttgccccaggatgcaggcagtgtaggccccacctctgtcaggctggagagcgctgggctgggagaggggaacacattccccatgacccctaagaataactgaagacaagagaaatcactcattgtggtggtctcaccatgtccctagcacctagctcttaagtgcctcgcgaagttataaggtcggtacttttctgatccctattttaacaaatgaggaaacaggcccagggaagacttgtcctcagctccatacctgctcctgcgccacccaaggtgtgtgaaaaggacagcagcagagaaaatcccatagtggccttgggaaacagacctgaccttcagagttcagcagagctaggctcaaagtggctcacaatttactggctgtgtggtctgggaaaagtgacgtaagttctcagattcccaacttctacatccataagatggcttcatcctccttcaaagaggtatttgagaagccagtgagctgggcaagtaatgtccaggcatcgtgtgtggcacactttaggactccatcctgggccacagtttccttccttcttcctcttgccacagccccatatcccatcccaccagctgtcagactccccagctgaagcctgcca

SEQ ID NO: 18870 - DNA, 1536 bp, Artificial sequence
  DNA replication origin
gcgttcctcccgcccgggggctgcggctgggctgagtgtgtctttaaatctgagccccccgcccctcgcggtggggccgggactcgcggtccgggcgggggcgggcgcggtgattggcggccgggtcgggtccgcccctcggcgttgggtagcggggcgctggggagcagcgcggcgcgcacgggccggggcgcgcaggtcccgtcgccggtgagcacgggctccctctcgcgtggcctcgccgggtccgcctggcctgcccacctccggagccacctctgcccccgcatgggctggcgaagttgggaggagcgagctggagccagagcgcgcgccgggcgcgccccgtcgctgcctgactcggcgcccgcagttcgggcgcagcacgccggccgcaggagcacggatgccccccggagccgcgggctggcaggtaccgaagtgtcctgccctggggctggcgaggggagggcaaatctggaatcccccgggcaccccccagcccgaggctgctccagacaccaactccccatcctttggagaggtgaggtcctgggccttcaccccacacccgctcaggattggtccctgggaggcaagagggactcacagggagcagttgctgggtggttgtgtgtgttggaccctgggctaccccctctcccgagttccctgggtttggtgtaggcatggcctggtgacaattccacttttcattgccagacctgggagcatggccaggagctagggtttcccgcgaagttagggggagattggggagagggaagccgcttcatgaccgagatggggtcctgggactcatctctagggggcgtgaggccctcagacccaggacgagtccagaagtctcagcgggcacaggctttgattcttggcccagtctggccctcttcctctgtaggcccgggtctccaaggagagtacgtttttcagtttcagagggttttcctgaaggggcagtaacctgtcagagagagagtggcctatgggagacccggctcctgaaggtggccgggatggttggagccctttctcttgggttgtcagagatgggagtaaagcttcatggcccagggaatcttctgggcatctctactctcccagccagaggcccaggaaccaactccttggcttctgggtagagtaacctgaacccagtggccgagcacctcttaaatgccaggaagggcactgggccgtgcccctggaatgtgtggatggaggaggatttggaggattctgtcctcaggaggctcagcccctgggggcaagacaggacataaacacacaaagttccccgatacagggtttcaataccagtcctgaactggtaatagtggaaagccaagaggctacacaccattaattgctatgtgagtaatgtaggctgcgagagtgccagggcagcagagatccagttccatgcaagcaagcaaatgtgctgaaatgttccagctccatgcccgcccttccttattaccttgctccaagggcagggagcagcaggggcgctga

SEQ ID NO: 18871 - DNA, 1177 bp, Artificial sequence
  DNA replication origin
cccctgaggcttgggggggtcagggatgggactggaagccagggccaggcctggccatggcaggctgtggcctttcagggctagcctagagcctgccccagtggcctgtgtcctccctcctgcccttgcccagaccctggaggcccagctgaaggcccatctaagcgagcctcccccaggcaaggagggccccctgacctacaggttccagacctgccttaccatgcaggaggtcttcagccagcaccgcagggcctgtcctggcctcacctaccaccgcatccccatgccggacttctgtgccccccgagaggaggtgagggtgctgctcaggctgaggcctctggggagggacaggaggcctccctgtctcccctctggtctgggctctgggagaatgaaacgaccccagcttctctacggggcccgggaatggtctcacgaggttttccgatttggcccaagtggtttattcacattccttccaagctttgtgtgtgtgtacgtgtgtttattatgtgttatagggtatatgtgtgtgtattgttataggtgtgtgtgtattggagtgtgtattctgttacgtatgtgcatatgtgttataagatgtgtgtacatgtgtttattatgttgtagggtgtatgtgtgtgtattgtgttatgggtgtgtgttataggtgtgtgtgtgttatcggggtgtgtgtgtattctgttacaggtgtgtgtgtgtatttgttataaggtgtgtgtgtgtgttgagggtgaacatgtccagggtgtccgtggtgtgtgtgtctcagttgggggactgtgtatggagtgtgtgggtggtgtgtggaatgtgtgtgtgtgtgcatgtctttttatggagtttgtgatgtctcccttgtctgtattgggggctgtgtgtggaaaaccatctttaggggagtggtgtggtgtgtggtagggtttgtggaggggtcgttaggaatgtgtgtgtgtggcatctgtaggtctgtgactgtgggtgtctgtatagtgtgtgtgtttaccggacgtggatccctgtgtggtgcgtgtgtctggcgtgtgttgtaggtgagccaccgtgtgcgtggtgcgtgtgttgtaggtgggtcgctgtgtgctgtgtaactggcaatggggtctgttaccctgcctgagcccctcctggc

SEQ ID NO: 18872 - DNA, 1397 bp, Artificial sequence
  DNA replication origin
gcaggagctgagtgaggaggggctgcagggtgagcaggagcagcccagtcctcattggtaggtcttgagggctcctggatgtggggtgaggagggcacctaggatgacctcgagtttctggctttgcagtagtgacagctgtcgatgtggaattcaggggaggaacagctgcagcagaggccaggagttgggttccctgtgaagagctgcagccctctgtctgaggtggcccccagaggacgcagttccctgcaccctcctggggacctgcctagagcttgggattggggatgtggactggacagctccctcctactcccctgggcacagcctgagccagatctgccactagttccttccagactgttcctttttctcctcccacttggttgcaactccatgcctgctggggtgcccagcaccaggccaggactctgagaaacgcaggagttggggaaaggcccttccctgttcttaagtggcagccagagagagaagagagcgagttaggtgttcattcattcactgggcagctgatgctggggcaccgggcaggtgccaggcaccactccaggtgccggcagaaagcccctcacttagtggggagcaggtgtgaaagtggaagcagatgagcaggtggctgtcgaccacgggacagggcgctgtggggaccttgcagggtggtgggggtaggtggtgggaggggttatgggtgatgctggagaggtaggctggacccagtggtgcggggagcctttagaccccagtttctgtgctgagtgtaagagagccatgaagagatcaaagcccggggattatacaacatgggttcacatttatactttcgtaagacctctctggccaccagggagagggagggcggggaggaggtggagacgctggtcagaagggtactgctgtggaggcaaagggggatgggggtctggatcaggtgccagctgtagagaggtgcagtgtagacagatttggaggggaactcagcacagggtggctgggagggcctgtgggggaaaagccatagagtaacctaaacaggcttcagttttcccagcagtaaggggcagattatatcattttttttcttttttctttttcttattactcagagatggggtctcactatgttggccaggttggtcttgaacttctggcctcaagcgatctccccacctcggcctcccaaagtgctgggattacaggtatgagccactgcacctggctggggtggggaattatatcagatgagtggtgtccaactctgagcgtctgcgcagtggctgggggctgctgcaggttaggaggagggtggggaggcttcttacaccccctcctcacccctccagccctagtacgtgacagctatctgttttatagat

SEQ ID NO: 18873 - DNA, 898 bp, Artificial sequence
  DNA replication origin
attcttgtaagaatttgctaaaattcttcttactaaagaaggtacagaaaggcacgttttaagagaaagtatgtaaaaggtaaagaaaggcagatttttagagaaagtatgaaaatacattgcaagggtgcagtgggcaagttagcaagagaagtgctggttgcaaggagacagaggctggctggggattttttaggacagtgcttgtgctgtttgctgaagagggctttgtgcagtactgataatgccgaggttgcagtgagctaagttgcatttttctatcagccgagggtctggtgatagctgggcactggaagattgtgtcatttgcgtaggagggccgtgtccctggaccatgaagaaaggcagacttggagcttatctgctttctctctttgctttctcctggtcccgccagccttacccctttccctaattaggactccacagttatgaggtgccgacggggcggtatgagggcttgcagtgaggggtggttaggcagggactccatgagaaggtggtgttgaacagacctgaaggaggagctgtgctggcatccgggggaagaatggttcagacagagggtgtggcttgcgtgcagtccccgaggtgggagctgtgtgtttgaggagcagagctagggaactggagggcaggagaggagggtagaggttatggggacaggaggcagactgtggggccttttctgggattgctgggactttggcttctactctgagtgcaaaggaagaaatcacagggttttgggcagacgcttactgtttgtacagtcatttaggtgctgtgttgagaatagacagcagggggcgggagaggtggcagggggccagccaggggctgtcgctgagtcaagggtgtctgggaccagggtggt

SEQ ID NO: 18874 - DNA, 1370 bp, Artificial sequence
  DNA replication origin
caccgcccttaatccatttaaccctgagtggacacagcacacgtttcagagagcacagggttgggggtaaggtcacagatcaacaggatcccaaggcagaagaatttttcttagtacagaacaaaatgaaaagtctcccatgtctacctttctacacagacacggcaaccatccgatttctcaatcttttccccacctttcccccctttctattccacaaaaccgccattgtcatcatggcccgttctcaatgagctgttgggtacacctcccagacggggtggtggccgggcagaggggcgcctcacttcccagtaggggcggccgggcagaggcgcccctcacctcccggacggggcggctggccgggcggggggctgacccccccacctccctcccagacggggtggctgccgggcagaggggctcctcacttctcagatggggcggctgccgggcggaggggctcctcacttctcagactgggcggctgccgggcagaggggctcctcacttctcagatggggcggctgccgggcggaggggctcctcacttctcagactgggcggttgccaggcagagggtctcctcacttctcagacggggaggccgggcagagacgctcctcacctcccagacggggtcacggccgggcagaggcgctccttacatcccagatggggcagcggggcagaggcgctccccacatctcagacaatgggcagccgggcagagatgctcctcactccctagatgggatggcggccgggaagaggtgctcctcacttcctagatgggatggccgccgggcagagacgctcctcactttccagactgggcagccaggcagaggggctcctcacatcccagacgatgggcggccaggcagagacgctcctcacttcccagacagggtggcggccgggcagagcctgcaatctctgcactttgggaggccaaggcaggtggctgggaggtggaggtagtagcgagccgagatcacgccactgcactccagcctgggcaccattgagcactgagtgaacgagactctgtctgcaatcccggcacctcgggaggccgaggctggcagatcacttgcggctaggagctggagaccagcccggccaacacagcgaaaccccgtctccaccaaaaaaatacgaaaaccagtcaggcgtggcggcacgcgcctgcaatggcaggcactcggcaggctgcggcaggagaatcaggcagggaggttgcagtgagccaagatggcagcagtacagtccagcttcggctcagcatcccatcttgacatttcttaagccaaacctctttggcttaaatgatcaaaccatcctttgctagtattaagttctcc

SEQ ID NO: 18875 - DNA, 818 bp, Artificial sequence
  DNA replication origin
atctagggagtgaggagcatctctgcccggctgcccattgtctgagatgtggggagcgcctctgccccgctgccccatctgggatgtaaggagcgcctctgcccggccgtgaccccgtctgggaggtgaggagcgtctctgcccggcctccccgtctgagaagtgaggagaccctctgcctggcaaccgcccagtctgagaagtgaggagcccctccgcccggcagccgccccatctgagaagtgaggagcccctctgcccggcagccgcccagtctgagaagtgaggagcccctccgcccggcagccgccccatctgagaagtgaggagcccctctgcccggcagccaccccgtctgggagggaggtgggggggtcagccccccgcccggccagccgccccgtccgggaggtgaggggcgcctctgcccggccgcccctactgggaagtgaggcgcccctctgcccggccaccaccccgtctgggaggtgtacccaacagctcattgagaacgggccatgatgacaatggcggttttgtggaatagaaaggggggaaaggtggggaaaagattgagaaatcggatggttgccgtgtctgtgtagaaaggtagacatgggagacttttcattttgttctgtactaagaaaaattcttctgccttgggatcctgttgatctgtgaccttacccccaaccctgtgctctctgaaacgtgtgctgtgtccactcagggttaaatggattaagggcggtgcaagatgtgctttgttaaacagatgcttgaaggcagcatgctcgttaagagtcatcaccact

SEQ ID NO: 18876 - DNA, 1230 bp, Artificial sequence
  DNA replication origin
tgcccgcggcggcgcagagcgcacagtgcaaaggcagcaggtaggacagcagcgcgcggagtggagccatgtggccgcgctgggacgcgggctgggcaagcgcccgatccccaagtcccaggctgagggcggcgaggctagggtgcgccccgggctgtcggagcaccggctggctgccgccgctgccgcctcagccgcctccccgcctagctgcttccctcccgcctgctccgggtcccctgcgcggcgccgccgcctggaccgctggctccgggcgcgcgaggctgccggctggagagcggggccactgacgcgccagcgcacccggtgccaactgccggctggtcggtcagcccgcccgcgcagtgacgctccgggactccgcgggagccgggcgacggggcggcgggacgggccgggggtgggcacactgggcggggcggggccgggcgcgggtcggagctggggcgccgggcgcccgggggcggggcgcgcggctggggagtgcagctgcctgcggccggggatcggaagtgccacgcggagacagagcaggggttcctggcgcacggaccgattgtcccctcagacgcctgggatccccggagtggtggcccaaagccgctttctatggctgctccgccccctttcttggccgcagggcctgctctctgtttctgttccagagccaggagcccaaggggtgtccggctgcatttgggagtgtggtggacagtgaacctcccggtagagggagactccctctttctttcactatggtcttgatgccctcactaaccatcgaccccttggatctacccattttccagactccagcccagggtgcacgactgacctgtgtcctagccaagagcagggctgagccggtgaggagagagccctggcttcagagtcagacagccctgattgaaatcctagctctgagcctcagttgtcttatctgtgaaatgggtgttaactacagcacataatagatgctcaataagtgataactgccctccacttccatccctgacaccagtagcaactgtggcatcccaaggtggaaagaaccaagagtctgagagatgagcacttgatgctagtcttgcaatggtgttgagaccaggtcaggagtcagtacaaacaacccaacagaagatccatgctcttgctttactctgtaaatatgtaactaataacttgcaaataaactatatttcaagcaat

SEQ ID NO: 18877 - DNA, 1419 bp, Artificial sequence
  DNA replication origin
gccccgtcgcccggctcccgcggagtcccggagcgtcactgcgcgggcgggctgaccgaccagccggcagttggcaccgggtgcgctggcgcgtcagtggccccgctctccagccggcagcctcgcgcgcccggagccagcggtccaggcggcggcgccgcgcaggggacccggagcaggcgggagggaagcagctaggcggggaggcggctgaggcggcagcggcggcagccagccggtgctccgacagcccggggcgcaccctagcctcgccgccctcagcctgggacttggggatcgggcgcttgcccagcccgcgtcccagcgcggccacatggctccactccgcgcgctgctgtcctacctgctgcctttgcactgtgcgctctgcgccgccgcgggcagccggaccccaggtgcgtgcgggttgggcgcgcgggggcccgtggggtccggggtgcacgcggtcagggtggcccaaggttgccccagccacccgggcagggttcccgcgggtgggaggcagtatgcacactctgggctgatttgctgtcttttcttccactgtgccacggcactgtcccgtgatttctctccctttctggtactagaagtagacagagaccccaggagagaatttgggagcatcgagtctcttctcgggagcagcgcatctgtctctttgtctctctgtgtttcttctttcccctcttccccaatctgtttctctgtcctgtgtgtctttctctttcaatgtcttttctgtctccaacttgtgtgagcatgggtgcaaggggtgtgtgtgtgtgtgtgtctgtgtgtggctgttacatacccagcataaggctaacaggtgattgcctcctacagcagagcatgcggggcactcacgctcctgcacagaaacacacatccttccactgcccccaacgtagcactgtcaaacgctgtggacacaggtctcttgcatacagaccagatacactccactcccgccctgcagcatggggtaccctcctggtggctctgaacatggggaggagtcaccggtcatttccaggcagggtccctccttgtttgtgagccttgttcatgtgccagagtgggtcccctcttgcagcagtcttaggggtcctctgctataatggggatgaaactagagctgtgggcatgggggattttcaggaaacaccactttctatgtttcatcagtgacgtgaactggggagacgagaggtagagctgtgtggaaatgaaaattcctcccaaactcgcattcatgaatcaccaggcctggaagccagggagctgtcattcctgcccagcctggctgggctcaaggagagctgcgtgaggatgggcctgctggcatgtggcctggagcatggggccatgacctcacagttaattcagcccaag

SEQ ID NO: 18878 - DNA, 591 bp, Artificial sequence
  DNA replication origin
agtacaggactttatagtttacaaagctcttttgcttccttcaatcttctgaagtgtgtatgcagatattgttattactcctgctttgcagagagtcaggtccctgtcctcgaggaacttgggtgccatgcagggggaaacccaccagtagtttcagcattcacttggttttctagaacacagtggggatgggtgctcagtaaatgggagtgattgttttctttgatgtcagagaaggtgacatttgaactgggccttgaaggatgagtagaagtttgctggggtcagggggtggggagggccttctgggcagggggaagagcttgagcaggctagtgatggttgggcagaggaaggagcaccatgtcaggtggggctggggagtggaccctagaagacacgcggggcaggggggcttggtctgaccttgaaggaagggcaggatggaagaaggggtgtggggcagggatggggtaggttgctctcttgaagaggctgggctgggagttgagagataatggctgcgtgactctgagcaagctggccccttctctgggcctcagttgcctcctgggtgcattaaggaagctg

SEQ ID NO: 18879 - DNA, 735 bp, Artificial sequence
  DNA replication origin
gcagggggaagagcttgagcaggctagtgatggttgggcagaggaaggagcaccatgtcaggtggggctggggagtggaccctagaagacacgcggggcaggggggcttggtctgaccttgaaggaagggcaggatggaagaaggggtgtggggcagggatggggtaggttgctctcttgaagaggctgggctgggagttgagagataatggctgcgtgactctgagcaagctggccccttctctgggcctcagttgcctcctgggtgcattaaggaagctgggatgtgtaagctcagaccccttccagctctggcattggtgctttgtggcatggggctgaccttgttggagtttggagccaggcccctgtaaacctgtagttgatggctccctcctacattgtggttaattcatgcctaacactggggtatgggatactttgtcttacttcccacccactgttatggagggccttctgggtgtcctagctgtgggaggggaaagagaaagatccaggaatgaaaaagcagggcccttgccctggaggggtttgtaggctagtggggacccagacataaaagcaaacttgagaatctagtgagaggcagcaggagaaggacctgtttagtttggttagggcatctaggaaggttccctggaggaggtagcaattgctcaagactgttcagacattataaacatgaaagatagtgccaggcccctgaccagcaga

SEQ ID NO: 18880 - DNA, 913 bp, Artificial sequence
  DNA replication origin
ctcgtccgggagggaggtgggggggtcagccccccgcccagccagccgccccgtccgggagggaggtggggggggtcagcccccctgcccggccagtggccccgtccgggaggtgaggggcgcctctgcccggccgcccctactgggaagtgaggagcccctctgcccggccagccgccccgtccgggagggaggtggggggggtcagcccccccgcccggccagccgccccgtccgggaggtgaggggcgcctctgcccggccgcccctactgggaagtgaggagcccctctgcccggccagccgccccgtccgggagggaggtgggggtgtcagccccccgcccggccagccgccccgtccgggagggaggtggggggggtcagccccccccgcccagccagccgccccgtccgggaggtgaggggcgcctctgcccagccaccaccccgtctgggaggtgtgcccaacagctcattgagaacgggccaggatgacaatggcggctttgtggaatagaaaggcgggaaaggcggggaaaagattgagaaatcggatggttgccgtgtctgtgtagaaagaagtagacatgggagacttttcattttgttctgcactaagaaaaattcctctgtcttgggatcctgttgatctgtgaccttacccccaaccctgtgctctctgaaacatgtgctgtgtccactcagggttaaatggattaagggcggtgcaagatgtgctttgttaaacagatgcttgaaggcagcatgctcgttaagagtcatcaccaatccctaatctcaagtaatcagggacacaaacactgcggaaggccgcagggtcctctgcctaggaaaaccagagacctttgttcacttgtttatctgctgaccttccctccactattgtccca

SEQ ID NO: 18881 - DNA, 1252 bp, Artificial sequence
  DNA replication origin
ggccgggcagaggggctcctcacttcccagtaggggcggccgggcagaggcgcccctcacctcccagacggggcggctggccgggcggggcgctgacccccccacctccctcccggacggggcggctggccaggcggggggctgacccccccacctccctcccagacggggcggctggccgggtgggggggctgacccccccatctccctcccggacggggtggctggccgggctgaggggctcctcacttcccagtaggggcggccgggcagaggcgcccctcacctcccggacggggcggctggccgggcggggggctgacccccccacctccctcctggacggcacggctgtccgggcgggggggctgaccccccacctccctcccggatggggcggctggccgggcggggggctgaccccccccccgacctccctcccggacggggtggctgccgggcggagacgctcctcacttcccagatggggtggctgccgggcggagaggctcctcacttctcagacggggcagctgccgggcggaggggctcctcacttctcagacggggtggttgccaggcagagggtctcctcacttctcagatggggcggccgggcagagacgctcctcacctcccagacggggtctcggccgggcagaggcgctcctcacatcccagatggggcggcggggcagaggcgctccccacatctcagatgatgggcggccgggcagagaggctcctcacttcctagatgtgatggcggctgggaagaggcgctcctcacttcctagatgggatggccgccgggcagagacgctcctcactttccagactgggcagccaggcagaggggctcctcacatcccagacgatgggcggccaggcagagacactcctcacttcccagacggggtggcggccgggcagaggctgcaatctcggcactttgggaggccaaggcaggcggctgggaggtgtaggttgtagtgagccgagatcacgccactgcactccagcctgggcaccattgagcactgagtgaacgagactccgtctgcaatcccggcacctcgggaggccgaggttggcggatcactcgcggttaggggctggagactggcccggccaacacagcgaaaccccgtctccaccaaaaccagtcaggcgtggcggcgcgtgcctgcaatcgcaggcattcggcagactgaggcaggagaatcaggcagggaggttgcagtgagccgag

SEQ ID NO: 18882 - DNA, 2140 bp, Artificial sequence
  DNA replication origin
aggcagaggggctcctcacatcccagacgatgggcggccaggcagagacactcctcacttcccagacggggtggcggccgggcagaggctgcaatctcggcactttgggaggccaaggcaggcggctgggaggtgtaggttgtagtgagccgagatcacgccactgcactccagcctgggcaccattgagcactgagtgaacgagactccgtctgcaatcccggcacctcgggaggccgaggttggcggatcactcgcggttaggggctggagactggcccggccaacacagcgaaaccccgtctccaccaaaaccagtcaggcgtggcggcgcgtgcctgcaatcgcaggcattcggcagactgaggcaggagaatcaggcagggaggttgcagtgagccgagatggcagcagtacagtccagcttcggctccgcatgagagggagaccggagggggagggggagggggagggggagggggagggggagggggagggggagggagagggagagcctttgcttttaagccagccacatatttacacctttggtctgtccagaaacagcctgccactttcccctccaagccactcccgtcccccaggcagaggttcacatccaccccttgaggctggcaggggcccacactctatgagttagctcctccagcctgaagaggcctgtgttccacagcctggccgactgctggcctgggtgcatcgtgcctttgaggctttgtcacttcaaaattcatagtccccgcgtagggagatgctaggtaaaatatgccgtcccctaatccacggccacagttttggggaagcggatctctcacaagggtggtatacccaagggagtttgttttaaggcctgacccgaaggatgcttgtttagcatggtttcattccaaagtcagttgtgcagcaccaaccagttcatccccctgaagctcacgtctagaagaaggacagagatacctggacagggatagagcacctgccaagagccaccaccacagagcacaaaggagggagcagtgatggggtggccttcgagctgggtgaaaggggcattcctagtggggtgcacagcaggggcgaaggcgcggaggcccatgggaactgtggctctggtacagaacgggtcctgtgtggctccattgtggggatttttgttgctggtaattctaaaagggaaaccaacacagcataataagaataaccagcactggggtggtgtgagccacctcctgtctctcccagatgatgacattcgccttcctgcgctcccttgcccctgcagtgtattcgccaacagcagcctgggcagtcctgttacaatccgagtcctccatggttcgcggcattcctcccagagaagccagccaggccctgggccgccatcgctcctcctcactgccctccctgaagggaacattcctccccagggactgccagggcctgcccctcagacccctcaggctttcactcaaatgtcaccttcagagcgacgtcctccctggcaaccttattcacaatttccagctccagtcctctcttctccatggctccttccatttggtatgtcacatatttctagttatttatcgcctgtcaccaccctgctgtagaatgttagctccgtgcaaagagtaatttttggctgtgtctccagcacctagatcaggggcttctcagtcatcatctgatgaatgaatgagtgaatatgtgctattgcaggcaagggtttaggagaagcaagttacagagacataggtgaacatgtgaagggagggggtctggagagggggtctggtggctgcagtgtgggcatttgtgctgctagtgcctggcaggtgaactgtaagagtgtggccaaatctggaacctgtgctagtggtgctggtccctgggcagggttaaggacaggaccatgccacctgtctggggtcttctggccaattgtgtttcatctgctccttccaccctttgcagaggagactggccagtgatacctggagggtcattgtgtcatcaggagccacttgtggggctagagctagcctggcattctcccatgcttacctgcattctggagggaacttgtctcttggccactgccaagtccctcatcggcagc

SEQ ID NO: 18883 - DNA, 648 bp, Artificial sequence
  DNA replication origin
aagagtccctgcaggagccatggttccagggtgtgggggtgtgaggggtggggctgcctctcttacctgccgtgaatcagagacaacagccccggatggcccattagaggttctggcccctgcaggttatgtagggtgttgctttcagctgaactgactgatggaaccaccagggttgggggacttgaaaagacctagatcactgagcctgtccctcctccttgattttggggtagagcaactgggaaaaaggcagtgtcatttactgagatggggaagacaaggggaggagtgggtctggaagtcaaacccagagttctgttccaaagtttgagatgaccagtggagatccagtctctatcaaggaggctgttggataatcacaaaggaatttcaggaggagccagggctggggatataaactggaagtcatttgcagtcatgcagtacctaaagccatggtcctggggacatgccagggagagctgatgatgggaggagctgtgtgagaccaggacaaagaagtgattgctggctatggccatgttgtggtcacaggtaagcagtttccaggaagtggtggctctagaaggccacttgaggtgggtagaggagaagccagggggtatggaggtggtgagtgtagac

SEQ ID NO: 18884 - DNA, 1319 bp, Artificial sequence
  DNA replication origin
tggacggcagggaaacaggagtgactacaactaacggatgggaatcttctggaattagatggaggtgatggttgcacagcattgtgaatatagttttaaaaacccaccaaatcatatgcctcaaaatggttaaaatggtgaattttatctcaattgcttgtaaagcagccgccctgagccccagcccggctggcggccctggcatgggcagccccacggagagcccgagctcgggctgcaggagcacataccccattagtgtcctcaggagggaactgggggtgggaacggggctccagagagtaggaccatggattaaataggagagggaagcgttaggagcaggagagcatccaggacgcagcctcaggggccaaggcagggccgcggggtgagggccagcttgagcctggtggcccagcaccgggaattcctgcccctggactctgaacggttcaatttctcaccaaagccttgggaaaggatcacctaactcttctctggggctcattcatggatgtgtgtatatatgagagtatgtgtatatgagcatgtgtgtgtatgagtgtgtttgagagtgtgcgagtgtgtgaaggggtgtgtgagtatgtagggggtgtcagtgtgtggatgtggggttgtgagagtgtatgagtgtatagaggggtctgtatgtgtgtatgcaggtgtgtgagtgcgggtgggtataagcatgtgtttgtcagtgtttgagtgtgggtgtacgggtgtgtgcttgtaagcgtgtgtttgcgtcagtgtgtgagcatgagggtatagatggtgtgtgtctatgtgtgagtgtgggtgtatggatgtgtgtaagcatgtgtttgcatcagtatgtgagcatgactgtatgggtggtgtgtgtctatgtgtgagtgtgggtgtagggggtgtgtgtttgtgagcgtgtgtttgtgtcagtgtgtaagcatgaatctatgggtggtgtgtgtctatgtgtgatcgtgggtgtatgggtgtgtgtttgtgagcgtgtgtttgcatcagtgtgtgagcatgagggtatagatggtgtgtgtctatgtgtgagtgtgggtgtatgggtgtgtgtttgtgagcgtgtgtttgtgtcagtgtgtgagcatgagtgtatgggtggtatgtgtccacgtgtgagtgtgggtgcatgggtgtgtgccagtaagggtgagtgcgggtatatgggtctgtgtttgtgagtgtgggtgtcagtgtgtgggagagtgcatgggtagatgtgagtgtgtgggcccacacatgcccttttcaggaagcagcagctgaggccttac

SEQ ID NO: 18885 - DNA, 1233 bp, Artificial sequence
  DNA replication origin
ggcccgggtctgggcgtgcgcgcggctggtagcagcggggccgcgcacgccagggtccgggagccgggccggtgcccccggagccatttccgggaggggcgaggccggcggctgccgggcctccaatctcggcggcggcggcggcaacaggggagcctgggtctcgcggcctgcgagtccgtcgcgtgctgagggagacgcaggaggtggagccggccgggtgctcgagggaaggagactggaagctggttccggcgtgaggaggtggaggggccgccgcgggctccggggggcggtgagggtcgggacggaggcgccgcggggtgaggagaggacaggggccgggtgggccgagggcgggcagaggcggcggggcggctgcggccggggcgggggcgggggcgggctgaaggcgtgggcaccagccgctgaggtccaagcaagtggacggcgggcgggcgcggggccgcggtggggcgggtctggagcccacgcctgccgcggggtaggcatgggcggccaggatttgctggtcctccgacgggaggggtgacaacgagagcgaggccgtgctgattctgaagggagtgcggaggaggcaggaccctggtagcctcggcaccttcagcccgggttaggtggcctgggctgggctccccaccccgatcgcgcgcagacggggcgtttcccctagtttccacctgggtggaatgctttgtgggagtctgggtctggattagtttcatcagctgtgggagggaaacctagttgcagcaggattttgattcgctggtctggggtgctaggggtggactgtgatatctgggaatgaaatctgagccttcaaaggagggagagaaccataacttggctgctctggcgaatctaggcgggctggcgagacagtttaaagctctagaagtaaacaaacctggttcccttttacagagtctgaaaaaggggagcgcggagaggaggctggaagaggaagatgcctagcacagaccttctgatgttggtgagccttttgcagacatcctcctggttccaaggcatttgtctccgtttttttagtccaaaggatcccagtgtgtagatttcacctctgatgcttgcttttggtagctgagcgttttgccaccttttattttgttttgttttgttttgtttttttggagacggagtctcactctgttgcccagactggggtgcagtggcatgatctcggctcac

SEQ ID NO: 18886 - DNA, 1438 bp, Artificial sequence
  DNA replication origin
ggcggggaggggaagctgaagccctgagaggggcggtggcgggttcgaatcccacccagttgggaggccaggcctgccctgaccccggccagtgcttgttccgggacccttccgggggcggggcctacgaccttcctgggccggggaagacagtcgtggaggagtccacggatctcgtccccttggtggcccgattctgctttatactggggtgggagcgagagggaggctgagtttgcgcgctcgtgtgcgtgcctgtccgctgccccttcccgctggcactctgggtacggggtctgcctgggactcacgctctgcgccggtatgctggccccagagccactccccgcgccggcttgaggcccgtgccaggccacgggggcttggtggcgctggagcagccctcctcccgtgagcttcccccacccacccccggggcgggggcgggggcggggcccttgctctgctgtaagctcgcgagcttcatcagaccatttctggtccacaggccttcggagcaggcaagactgggagggccttttgataggagagggacttgggggagggaggatgagtggggctgtttgtgaggggcgctgaggtcccagagatgcaggcttgggaaatcggtaaccactccccacacctcgccagaggaggcaaacggggcagcgtccccctctctgtctccagagccggcacctggaaggtttgtcagttcagccgcaggctgtgcgacctggggggttccagaaggctctaccgagaaagggaagcctcctaagagctcacctggactcacccacccctttaagagccaaggaagtaaacagtgggctctgatgctttggctgacttctggttgtctagatacacggaccaggcggtcagccacggggagaaggccagctctggagtagagacctacctactgggcagatgatgcaaatcgctgctgccattcaatccctatagtcatccagagccgaggggaagagaggggccaagctacatcagtccagagagagctcacgttttcaggagggaaaacagcagggaaaaaagacggacttaggaaagcactgcgatgcttcagctaccccaaatgctaccaggcccatcacaagcctgcttgccttaggaagttttttttttgtaatgcagatgacatttgctttatagcagtggagtttcctaaagtgtcccattggcacctcatgatgatctgtggaggtggaggttctgccaagagaggtacagccacctggctggtaaatggtgaaagcgggtctcaaaactcctgccaatcaacacatggtgtccagtctgcaggctgcctcataaaagctaaatcaacctccctcacattccctccccacccctaagggtatcttttcaattcagcactctatttctgccctggggtggtgctactcta

SEQ ID NO: 18887 - DNA, 1257 bp, Artificial sequence
  DNA replication origin
gtcattgcacctcagcctgggaacaagagtgaaactccatgtcaaaaaaaaaaagtagctatcgggaagtgtaaactcacatgcggagcctgcatttgtggttcccattatatttctattggccagtgctacagtggaccagggccccaccctcaggactattggtatttggggctgaacagctcttccttgtgaggggctgtcccatgcactataggatgttcagcagcttccttggttggcactcactagatgacagcagcactgccatccccagtgtgacaaccaaaccttgccaactgtcccctgggggaaaaaattcactaccaccctgatggaaagccaccactctgggcccttctgatgggcaatcatcacagccccctgtgagagatgggtggaaacagccgggggtgcagggaggggaccagcagccctgggcagttctgtgggcccaggaaggggaccagaggggccagtttcaaggttcatgaggcaggagcctgaccctgctgtcctgatctacgggctgtggggcagatgccctgggagaactgccgagagggcccctgaggagcagtcttggttgccgagggataggggccctccctgggggcacctgcatagaaggctggcagctcagggagctgccacccctgggcaggagcctgggagactttccctgagcagaagcacaacaggacctgatggcggcaccctgcgcggcaaaggcaaggacagcagtggggagaggcggcgtggctctgggttccttgagagtggaagccctcctttgggatcgggcaaaccctagggttcatgaaccacttagggaggtggggtaggaggcggggtagccccccaagtgtagattgtatatccagcccatggcggggcacgggggttctaccacattctagtctgaggcgatttaagtaacatcatttgcatcccaagggtgtggagcacttatctctgcagcaatcatcgtgatctctccctccccaccttcccagaacctgacacagcttggcaggtagaaaccaaagtatagttgaggaaggaaaggaaggagggagggaaggaagggaacttggctttggtcgttatgcaactgggagatagtgcatgaagcagacaggcaccggaattgtgaatgttagaagcttagaatgggaaaggatctaaaggctgtcttgtccaaagctctgaaccatatgcacggcagtctctacagcagccctaacaggatccgtg

SEQ ID NO: 18888 - DNA, 1193 bp, Artificial sequence
  DNA replication origin
agctgttaatccagcctcccctccgcatggtgcattgtaaagagctggccctctgacagatttgcattggtggtttattgatttaattaagcaggggctgtaaacagtgcccccctcctcagcctgaggagcatccacagggcacctggctggctagcattaaagacccatggaggccgctgactgtggaggcagcctgatttaaggacctgtgattcccgtgaactttgttcctccatccctcttggattctatcagaagtgccatcacagtggcagtgatggcttaatcatagcccagtgcctctgccagggagagagggcctcagtggacagcaggcagagggtcttgggagccgtggttctcagtctgccccgccccctctctctggccccaccagtccggggcccaccccagctgttcccactcctgcgagtgccctgcccagtgctctgggaaggctgctcttttgtcctcaacaacagagccgaagttccggaggcccatggtgtactttaccgtgcccactcttgcctggcatctccagatgccaccatagagcaggcatttgctgcgtctgcaaaataggcaggagtgactgtaggtgaccgctgtgtgccccactccctcccaaaccagggagtgctggcctgggagacagagacctggggtaactgtcccgtcctagccctgactctgctgctctgcctcccggctgctgtctccgggctgctctttctggttgtgggtaaggggatggagtcagcactatccaagctcccttctagcctgctagtcacctttcctctttcatggggagatgttcttatgccagggaaggctgggcactgggctgggcaggattctcacccctacagggtcagccgatcctcacaccagctctacaaaacagtaacctcgtcccccacccaccccttagagatgagcaactcagacgttgaatgacctgcctcaggtcactcagcccttaaatacagagcttggtttgagctgaactagtgctaggagaggtgaggatgatgttgctggatctcccctggtatctgcccctgatgctacctctccagtcagttgtaaggtccccttccccagagccccaaggagatgtctgacccggaggaatggagcctgggtgacagagaggctgtaggtacgcagcctgggtaatggag

SEQ ID NO: 18889 - DNA, 1727 bp, Artificial sequence
  DNA replication origin
taaatacagagcttggtttgagctgaactagtgctaggagaggtgaggatgatgttgctggatctcccctggtatctgcccctgatgctacctctccagtcagttgtaaggtccccttccccagagccccaaggagatgtctgacccggaggaatggagcctgggtgacagagaggctgtaggtacgcagcctgggtaatggagaggcagcaggaacggagcccgggcgacagagaagcagcaggaacggagcccgggcgacggagaggctgcaggaacggagcccgggcgacggaggggctgcaggaacggagcccgggcgacggaggggctgcaggaacggagcccgggcgacggaggggctgcaggaacggagcccgggcgacggaggggctgcaggaacggagcccgggcgacggaggggctgcaggaacggagcccgggcgacggaggggctgcaggaacggagcccgggcgacggaggggctgcaggaatggagcctgggtgacggagaggctgcaggaacggagcctgggtgacggagaggctgcaggaacggagcctgggtgacggagaggctgcaggcattctttggccccttccattgttgaggaagacccaggcccaggtcagtgtcgcacagttggccatgcttccctccggagccaggaggctgggtgaaaggggtggagcatctttgcaggcttggggctgggtgcaggggacaatgccttgtggctcagagcctgacggctgacggggtccttggaggcccactgcccaagatgagaacactgaggcccaaggccacacagtccgggtaggggtctccctgggggagcctggccctctctctgctgatcctcctcccatttacagccctaggcacctggatcaaggtgggcaaaatcagcttgctgggcctccggggggcagaggggcagcaggcagtgaggggaagggaggaagagacgggtgggagctgacggtggcagggacgcgccccgcaggtctgtgttagctgtgtttgtctgggagttcacagctgctggtgaacatctgctctgtctcccgcctctcaccactgcctcccgcctcaccgcccccgcccggcctctttctgggcgctccctgtcatccctcctctcaccagccctgccctacctggtttctgcttttctcggttttgttgcctctccatttctttctctcttccctctttcacactctgggtctctcagaattggtcctccctgcccttccccagggaggcaagcccctccagccctctgggcctgggggaggtgtggaggtgaatgtgatcagctgggcttgggtctgcaaggctggggcccttgccattctctggctggcctctctgagcttccactgccccatctgtaaaatgtggactgaggggcggggacagtgacggctgaggacagtgcctgacatcttgcggggctccctctgtcccacatccaggtgcggagttattgccacagttatccaacctgcctgttcccaggagacctggaggagcaccaggactcctgggagccctgagaggttacagattcccgagcccattctcccagcgccatccagcccagtgggccccaccctcctgcatccctgccacgttgttcctcacaagtggtcatccacccctagtgtgacatggtcaccgatagggtgagttgacagcctggagtcctaacaccac

SEQ ID NO: 18890 - DNA, 1105 bp, Artificial sequence
  DNA replication origin
ctgagctggctaagtgtgtggtttgtattgaagcgtgagttctaggctagtctgggctaagcgatgtgtgatgagataacaggcatattctgagataatctgtgggttctgggctcccctaggaacttgttccaggtccatctgtagacaaggaacaaactccagtcccaatcccctcttaggactttaatggtggagagaggccctcagttctccttctgataaatgagaactagaagctaccaagaaacttggagctcctttgaaagcgagtgcctggggtggcttggaaggtccagagccagactcctcctggactcctgtgggagagagaagacgcaactgctcctgcctgagtcagcaaggctgggctgggtgcatgacccactgtgggaccattgtgggctctggggaggacgccagacaacaggagagctctctccctttctgagttttcttccagaaggaaggcagggacctcattaaggacgtgggtctaccaagtcaaggatacattttggagtcactggtgcatataatgaaacttagagctatgaagttagacgggcttagagatgtttgaggcctgctacccaggacattcgactttaggagctcaaggctataggagacagggggagcagccacagggcagatcaaggggacaaggcacaggggcaggtgcctggagctcaagagagatgagggctgggagaggttccaggaggcgggggcacaagagacttagaaaggtggaaaggtagcaagtctgggcagtgaagtgtgggctgtttcatagagggctctgagtatcagcacagggaagggttgctccattctatcagcaatagggagccatcgaaggttggtgagcggaagacaggcatgaaagacatggcaggcctgggggcccacttggtgactgcaaataggagagagagagggctggaggtggggactaggctgtgcccaagctagggtctcgacattaatttaggttttggggtgatcttgaacctcagtttccttttgtttcaagtggggtaaaaattctaaccctgccaaatgggccgttttgtggcgggggcgctgacgtgctccatct

SEQ ID NO: 18891 - DNA, 1060 bp, Artificial sequence
  DNA replication origin
atatgtgtgtgtgggaggggttgggggaggcgctccaaaacaagagaccagcagaggcgctgaggctagaacaagcaaggcatgtcccaggaaaacacgcctggtggggcttggagcacagtgaaagataggtgagttggccgggtgcagtggctcacgcctgtaatcccagcactttgggaagccaaggcaggtggatcacctgaggtcaggagttcgagaccagcctgggcaacatggtgaaaccccgtgtctactaaagacacaaaaattagctgggcgtggtggtatgtgcctgtaatctcagatacttgggaggctgatgcaggagaacccaggaggcggaggttgcagtgagctgagatcatgccgctgcactccagcctgggtgacagaatgagactctgcggaagggagggagggagggagggagggagggagggtgggaggcagggagggagggagggaagactggtgagtccatgaagttagagggttctgggtagcttaggactttctccagggtcacagagaagccgcaggaggctgtacaccactagagggcagggtttctctcttatgagatcactctggtgttaagaggaaagtggattttaggggcaaaaggaaaggtagggagcccagagagaggaagggtccaggcgggaagacctgggcttggagactgcagcgggtggtgggggtggtcgtgcagtgtgaggcacatcttccaggttcatctagcagcaccaggtccctccagcagcacggactggaagtggggtgaaggaaagggagccaccaggcatcctcccagatgggacctgaacaactgggtgcttggcggagtctaagattgcagctcaaactcaccccatgccaaccctgggtcagggagaggtgacctataaaatagcaggtctgagtcacaggtggggagcctgccattgccttagggggacagcagcattaacaaaggcccaccctgagaaaggcactgtggtcccagcctgggtggggctctcagggtgtccccagagatagctgtggatgtaacctg

SEQ ID NO: 18892 - DNA, 668 bp, Artificial sequence
  DNA replication origin
ccccttccacttgccgcacgcagatcttgcaggtgagctctgtggaggccaagctgtgcctctccagggtgaaagtgcagtggagggccttctggctgccactccaaatgtgatagaaggggatctcctgcaggaggagggggtcaggaccaggcaggcaaggccagcctgccctgtcctcatagaaatggaggctcagggagggttgggagctttggggggcagttcaggcctctccacccagatagggaggggtcaagtgccctaagctagccagctgagttggtgtcaggccctcagttccagaagggagctgagggtgggtaggtgggggagggaaaggcacaggtgtgtgtgtgtcaggggctagggggccttgtggtctcaggcgctgctgggtgggcagcgggctgtggctgtcagagatgagatgggcagtctgccaggagggcatgccctgaagggtgaggagcctctgtgaggatgaagggcatagtcgtctgtgcgtgtgagggtgtgacagggcagaagtgtgcatgtggctgcccattgccctgaatttggggacgtgcctggggatggctgaaagcctagagactggggtgggaggagacagagacagtgagagatccagggaggggtaaggccacaggacagagctaggaggc

SEQ ID NO: 18893 - DNA, 1880 bp, Artificial sequence
  DNA replication origin
aatgactacaaacaactcaggactctgcatgaagtaaaagcaatcaagtgacaaagcaccggagcttcacagacatgggtcatggtcttggggctggaccagaaatagccctgatctgctgccctcactgaatcctacggctttgtccctcgtgctgtcccagctcccctcagcctcacctgcctgcctgtaaccgggcatgacaaaaagagccttggctctgggttctgccactccatcactgccagctgtgtgccctgggaagccacttgacctctttgagcctggctttcctcatctgtaaaatggggacaacagtcccatttcactgggtactggggtgggggggtggaatcaaatgggagactgttcatgaaaatgctctgtatattagaggatttttttccaacgtaaagaggctaaaaataaggcctgatgactaaactaacatatacactatcacattttgggggtggggagtgtcttccttggaagtgatggaaatttgcattgagtgcctggcatggatcacctgacttaattctcccgacagtcctaagccgaccctgggtttcagagaggtttagtaattttaccattatccctcagcttgtaagcctggagctaagccccttcctctcctgggccggggggctttctgacaatttagggtgctagtctccaaactcgcctgctggtggagcttgttaaatagatccattctggatccccattctgcaccccctgagtgatgggttgtattaatccaggtatttattgaacacaaattatgtgcccacgatgagggaagagcaaacaaagcagatacagcaccaccctcagggattggggagtggcagcaaccctcctggggagaggtccccagaatctggatgtgtactcgagacttttatgatcaggccagtgtttggggaatggtggttataaaatgagaggctggggcagggagtggggatgttctgagaacctgtccacacactgacagcctcaatgggttctgtggcacccctgagccctgggatggcaactgcaagaatttactatccatggtcacagatcttcaggccctgtgaagcatccagatccccgctctgaataggccaactgggccaggaccgggagtcaggaaggtttccgcctttttttttttttttttttttttgagatggagtcttgctctgtcgcccaggctccaggctggagtgcagtggcaccatctcggttcactgaaatctccgcctcccgggttcaagcgattctcctgcctcagcctcccacatagctgggatcactggcacgcaccaccatgcccggctacttttgtattttcagtagagacgaggtttcgccatgttggccaggctggtctcaaactcccgacctcaggtgatccgcctgcttcggcctcccaaagtgctgggattacaggcgtgagccaccgcgcccggcccctgctttcttaaagaacacgcggcagctgtgtgttacacgctatggctgaggtcaagtgtgagggctggaattgctgactgccatgttctgggtctactgaaaatagctgcctggcctgggaggcccagttcagtccgggtgtgggtcccgcttcacctccagagcagcggcagccggtaagggtagaagcggcctttggagaggggtctctgcagcggcctggggacaagatgagggctcctttgagtcctggggtgcaggttatagtagctaaaggggaggtctgagacagtggggtctggctccaaggtaaagaaggagcagcaaccaaaaggcctgatgcgcagcgcacccatcgcaagcatgggcagtgcgtttaagactgggtgactcactttttctcctat

SEQ ID NO: 18894 - DNA, 1136 bp, Artificial sequence
  DNA replication origin
aaatcgctttttccacatgcacccactcatagaggaaaagccatgtgaaggcacagcaagaaggaggctgtctgcaagccaggaagagagccctcatcagaaaccaaatcaaccagcaccttgatcttgcccttcccagcctccagatccatgagaaacaaattttgtttaagccacccagtctatgctattttgtctggcacaaaatggtacaaatgtaacaagctcacttgttacattttaaaaattagtgtttaaaatgtaaaaaataatcatgacccacccacatagaacaagagagaaccggcaagtggttctttccagaggctccagctacctgtgggggcggctagaaggtccaccagccctgtcactcaggaccacacctggctagggcccccttctcagttcctagcgtctatttgtcaaggcttgactgagcttctgaagaaggagccaggaattttctctaaccagggtcacaggccagggcactggagtgagcaaagtcttattagtctttataaaagctagctgctggcttctggattaaaaaataaagagaaaggcaggcaaggaagtgcccaaccttccccaaaacaagctggctgtggcctggaacgtgctcctgggtcacctgcgggagcccggccatgcacagacagacagccccacacaaggaggcaggcactgctggggccgcggcaaaacctcatctgggctgggaagcctgggtgctggttccaaggaggttcctgactctggctaggtggctcgcccctctgtgcctcgatctcctgggctgtgaaccggggtggggagctggtagggctaacctgtgggaaggcactgggaagcgcagggcaccgcctactggccgcggcagaaccggctttgcggtgtaaacagccccagcctcaggccccgcagctgggaccgagagaatcagccaccgtctggatacttcgggccgacgggtccataccaggcccccaccatacaggcggtgaggtccagtctcagggaggaggaggggagaggatttggggaagagaagatagagacccagaaagaggggtggcagagagcaaggagagagaggagggacggtggggaagggaccacggatggggtag

SEQ ID NO: 18895 - DNA, 1159 bp, Artificial sequence
  DNA replication origin
ctggtccgctacgagcggtgctggctgcccccaggagctggcacccgggagcactgcccctcatctccaccgtaggtcagcccaggactcgagcagagcccgcgtgttccaaggcagtgacggcgccagccggcggggactctgcctggctttctcggagcgggcacctagagaggctgcctccgtgctgtgagcggagatccgatgccagccgccgccccactgcgaccccagccccagccctagtgctgtcagcggtccactgggaggaaattagcctttcctcggtagtaatactcccccatcctccctagtaattcagaaagcagagccttctttttctacgtcctttgccctctcagaccagagctggcattgacattgacctcgccttccagccccttgggaagtgccccaaccctaatttggattttgaaataagctagagagacacaggagtgtgtgtgtgtgtgtgtgtgtgtgtgtgtgtgtgtgtgtgtgtgtgttgggtggagtcagaccctcacacagggaagaattaggttgtggggtgtggggtggggcgggctttaagaacctagttggggccagttgcatggtgatgatgagtcagcccacgatggggagagctggcttggagttagtgcttggttcgtggtgcaggggtaggcgcactgcggtcagcacctacaggggtgggggcactagatgttactctgccaaggaggagctgggaaggggccccttgcctgggggaatagcaaggcttggttctggctgccagggctggggagggcaggaaggcagagtgtctcgtggtagagggtgggtgtcccccgtgagttgggaaggtggcacacagaagccactggtgtgaaccaggaagctctgcctcgagtgctggaggacagcagtgaggggtgggaggcccagagctagcatcctggccccgtctgtgctgggtccgcatatacttctcagacttggccttcctcacctctaaacagctgggctcctcacgtctgcttaccaaagggcttgatttgagggttgtgatagcagatggtcctggttgcctctggaatagctcccccactcaacaagctaccttacctgcagtttcaccatttgaggttcatttatttgagccaagtatttt

SEQ ID NO: 18896 - DNA, 872 bp, Artificial sequence
  DNA replication origin
agatattttctgtaggttgcgtttttactctgttgatagtgtcctctgatgcataaaagtttttcattttgatgaagtccaatttatcgattttttccatttcttgcctgtgtttttggtgtcatatccatagtgttatcagtcattgttatctcgataaagctgcacagcaaaacaccacagcagtcatttattctttcttatgtgtcaggggtcagctggagggaaggtcagcaaatctaggctggacgtgactgagcttgactctaggctgtgcatgggttctgtctgctcattcttctggggccaggggtctgcatggggtgtgttcttctcaaattgaatggcaggagctcaatagacaagtccctctgcacaaggtacatgctcatgctactgtggagcttgggcaaagtgagtctcacagccaagctcagcataagaggtgggagaccccgcatgggtgtggacacatcattcttctgaagaggagtgaagggctgggatcgagaatctgatcaagcccagtgatggccaagaggtgggaatgagctggcaggtttgaggctgagaggggctagtgtggctgaaatacagtgatcggggacaggggggaaagtcgtatttagcgggtgcgtggaagatgttcgttaactgaattaatcaaaagaaggtatcgtgactgactggctggatagagatgaatgtgctgagatgggaaaggcaaggactggaaactatttagggaagaaatcagctcactgccagacctgttaaattttagagacacatgctggtgggcaaatggctgtatgagatgaagtagactctgcttgcaaggatctgtgggtcttctggcagcaggaggacaa

SEQ ID NO: 18897 - DNA, 768 bp, Artificial sequence
  DNA replication origin
actctgtgaagaggaggcacaagatatgctgatgttgacatgcagtgatggctccctgggggcctgttagactgttttatctacttctgtgtgtgttcaaaaatatccatgataagaagggagaaaagatccttgggagggggtgcctcatccactcaacgcagggtggggagactccatgaggagagatcacaaaagccaggcattgcaggaggagtaggaatttgccggaaagaggggcggacaggcagaaagaacagtgtgtacagagactctgcagtaggagaggagccacattcatgcatctgcagtagctcagcgtggccgggcagagtgcacaggggaggcggggtgggggcgggggtccggtgctgaggccgcagagggaggcagggcgggccatgcagcatgtggagtgcccggctcaggagaatgccagccctggtcctgggagcagcagggggccacctggggggtcttgggagtggggtgcatagtcaggattgcgtttgggaagcccactgtggtcaaggtggagcagacaggttgggggacagcaggtaggagcaggtagggaagaggttggggtgtccagctgagagacagtcacagccccgactgcccagccacaggccacattaggagacagaggccaagggggcatggaggccttagaggaggtgctgataggacaagtgctgtgggtgagggcagagctctgtcctcttttcatgctgaaaaggcttaatctcttcttgccgcccacat

SEQ ID NO: 18898 - DNA, 1504 bp, Artificial sequence
  DNA replication origin
ccacattctcatgttgtctccctaaatggcaagccacacatctgatagattaaatacccacacgattgctcgcctgacatctccgtcactccgcccgcaggtccctgatgaattttacagccccaggctgccggaagaaattaaggtcaaagtcccacgcgggaaatataaatcacccatgatctgtgagaccagcagaggctgcgggcccagcccctcactcacctgggcccacgcagcccagggctgcaccgtgatggtgcagggatggtgcagctgggttctgtgtgtgtgcgcgcagggtgtgaggaggcgcgcagggtggaagggggcgcgctgggtgggagggggcgcgctgggtgggaggggacgtgcagggtgggaggggacgtgcagggtgggagggggcgcagggtgggagggggcgtgcagggtgggagggggcgcgcagggtgggagggggcgcagggtgggagggggcgcgcagggtgggagggcgcgcagggtgggagggcgcgcagggtgggaggggtacgctaggagcacccatgccaagaagcagccctcactcccagtcccctgacatttaggtttcctgactcctctgcccaccccaccccagttatcagaatgtcctaaggcaggctggagaaacccactgagagaagagccgcctatctcatttatttgcttcccaaggaatccaaaacactctggcctcactgttttaaaaacgtccccagaaggtagagagggcacagtaacatcctccccattttgcagatggagaaacggaggtgttcagagaaaaggggctggtccagggtcattcagtgagtcaaacacctgaatcttctgactaccagtttgtaggtggcgatacagtggaagcctaaagggctcttttgtcctggctttgttccctttttaggtgggtgggtgggtttctcctgcaggaggctgggccggcagagggagcgctgggcctgggtcagcttgtatgttggctaatcaagttcagtttctgtctcgtcacatctcagccctacagattcgccaggctctcggggagcagttcagtctccatgagggggctgcactgccccatggttaagggaaagaattttggcatcttgcagacaaggaggttcgtgcctccgttatgcccctttcatgggagtgtggtctgacacagagctaccttctctgaaactcagtgctctcatctacaaaatggggaggataatttcagcctcaccaggttgtcatgaggcttcgataacacacgtgacaggagcgcagcttggcaccaggtcctcaatattagtacctatcatttgattagcacctggtctgtgtcaggcattgggctaagcactttacatgtatgatttcactgaagcccacataattctacaatgaactatcaccacccacacttccaaaagaggaaatggaggcacacagaggtgatctggcagagactaaacagccatgccttccc

SEQ ID NO: 18899 - DNA, 1092 bp, Artificial sequence
  DNA replication origin
gcaccggccgcctgcctctgttgctgggacccagggctgctgcggaggcagctgggcctgccttgcttcagagcagaagccccgtgcggggcattcctgtgagtgtgcgtgcgtgacgggagtgtgggcgctggtgaggagtgattgagtgcgtgcctgccagcctgtggtctgcagggacagacacccaggtgtctagggagggggtgtggaggagaccacaggggctgagactgggctggagacaagtaggggtgctgcttgaggcagagaaagagagagagagtgtgtgtgtgtgtgtgtgtgtgtgtgtgtgtgtgtgcgcgtgtgtgtgtgaggggtggaggtgtgggagacctctgagtagagtctacctgagccagacagggagagaaaaggaaagtttctaggagagtgtgcagggggtacaggatgcagaaagttgttcgcagctgcctgagatgcagagagaggaagagaaaggggttgtgtgtggtgcgtgcatgtgtttaaagaagtaggaagtatggagacacaggaagagagatgacacgaagacacacaaggcaggcaacctgtaaggtgggggaccctgttccagggcaaatcaatggaaaagggtgagagatgatgactgttaattgcaaagaaagcctgggtaagaaggggttctcaggaaggggacaaagagacaggagggcctgaacactgttggaatagcgggtccccagagagtgggcataagatgttgcgctgagcaccagagggccgggagctgggctggacatagagttttgaatgcacaagatgaagggggactacatgagagggtgccatgggaaaagccccaggtgggtcaggaagggcacctgcagccagccagactgccccatccttccaaggtggcctcaggttgggccacacagctccctccaatccaggccctaagccacctgcacagaccaagaccaagcctgggatggggtggagtccttctttaagggtctgtgggaagcacctgcttgggtatctgagggtctaggctcaggggctgcatcctgggaaaccacagccagagacccctgccaccac

SEQ ID NO: 18900 - DNA, 1986 bp, Artificial sequence
  DNA replication origin
ccacctgcctccctgcagcctcctgcaacctgtctgtgttccttccaggatgagaatgacaaccctcccaccttcagcaagcccgcctacttcgtctccgtggtggagaacatcatggcaggtacaggctcaggtcggggggtggggggcacatggaggtaggcagccagcagtcacggcacccaggatgtgcagaccccggctctgcacacaaattgtgggaggtccatggccttctctttccccggccaagctccttgacaaatcggggagcctttggaaacatctagttacctgccagctaacagctagttccagagcacctgctatgtgcaggtgctgtgctgggcacttggttcctgctctcctctaactatagtctagtggggaaagaataatgatccatgattaattaagcaatcttgattaaacagtctcaagtatacagagggctctgagactatagcactgtgaggcaggtcccaggggccatgatttcagaggggtggccttacagcggggcatgtgttcctatgtgaggatgcgattgagaggctaatctctgggccaggctcaggttgcagggctcagtttgcagacccagcaccaccagctccacactcaggttccaggggatctgttctgcccttgaggcaggctggcagcttcgcccttaccctcagagcaaatgatcctagcaaagaaaacgcccatatcaggaactgctgcagtggctgaaggagacaggaaggctggaatcagggacagtagagtcatggatggtggagtcatggatagtggagtcagggacattggagttagagatgctggagccagggatggtagagccagggatggtggaataaggatggtggagccaggggtcgtggagccagggatggtggagccaggggtggtggagtcaggggtggtggaaccagggatggtggagtcagggatggtggagccaggggttgtggagtcaggggtggtggagtcaggggtggtggagccaggggtggtggagccaggggtggtggagtcagggatgatggagccaggggtggtggagtcaggggtggtggagccaacggtggtggagccaggggtggtggagtcaggggtggtggagtcaagggtggtggagccaggggtggtggagccagggatggtggagccaggggtggtggagtcaggggtggtggagccaacggtggtggagccaggggtggtggagtcaggggtggtggagtcaggggtggtggagtcagggatgatggagccaggggtggtggagccagggatggtggagccaggggtggtggagccaggggtggtggagccaacggtggtggagtcaggggtggtggagtccaggggtggtggagtcagggatggtggagccaggggtggtggagtcaggggtggtggagtcaggggtggtggagccagggatggtggagccaggggtggtggagccaggggtggtggagccaggggtggtggagtcaggggtggtggagccaggggtggtggagccaggggtggtggagtcagggatggtggagtcaggggtggtagagtcaggggtggtggagccagggttggtggagtcagggatggtggagtcagtatggtggagtcagaactggtctttcctggcaccacgaggccttctaaagagaacctctgggtaccactctggcacctgacaatgagctgggtgggtgctgggctgcacccagcctaccctgcctgtcctagtcaggcatcccctggagaatgtcactgctaaagagctgcctccagcactacacccccatccctggggactgtgtcaaggagaagccttcactatggcacttaattctcttcaggggtatgttatggctcatgtgcctgtcctcctgctcaaggcaggcctgagggtcatatttgaggccccagggccacagggccactatggcctgcctggccccttgcccc

SEQ ID NO: 18901 - DNA, 1203 bp, Artificial sequence
  DNA replication origin
gggacaggagcattggttccatggcagtcctagcaaggggtttccttctgttctacccactgcctcccagagtccctgcctgctccccaaatcagagaggaaccccccagaagcatgggcggggactggacagacctagtttggctgacctcagtgctgcgtttcttgggacctttcttgttcctgcctgttagagggcctggtggcttctcctcccattggcttcatcccagagtgagacctcctctccctctcaggtacaggggtatctgagattcccttcccccttggcagatccccctgctgggcttctgtcttccgtgggtccccagccatggggtagtcacttaccctgggccgcctcctcctcctcctcctcctcctcttcctactctcgctccctgtcccccaggctggggagcgaggatggggagagggcggctgcattcagtctgcaaaggctgggccacggccttggcccaggccccacaggacaggaagggtggtgggggtgtggtgggcatggaggaaggcaatggggtgaggcagagaagagatgaggtgggaagtgacagagaaacagagctcaaacctgtgggcctgccagccatgaggaagagagaagagggttaacatcagttagttcagggtgcagcagggatggagcagagcagggcagggaggatggtggggactcagagctgacggggtgggaggagggagggaggggtggaaacagggagtggggaggggaagaggcactgggaaggaaaccaggggagcaagtggaagcccatttggagtggagagctcaggggctgaggctctggcaagaagaaaaggtagcaaagtgggcaagggaggagtggagggctgaggaggagggggcagagaagacactggaaagaaaaatagagaagagagtcagctggaggaagggggaacaggaaagagaaaagcagtaggggattgagcagagcctcaagttgagtagggacgtggagcagctctccatggtcctgaccaacccatgcagccaggaattttgctaacctgggatgtagctggttctatctaacttctcctagtgctcatggtttttccttcttctgtttccctttgggcctcaaatgcagattgagtttatcatgttctttggctcgctgcacactatgaccactggcacttctcttgttttatgtg

SEQ ID NO: 18902 - DNA, 1719 bp, Artificial sequence
  DNA replication origin
gggagggtcagccccctgcccggccagccgccccatccgggaggtgaggggcgcctctgcccggccgcccctactgggaagtgaggagcccctctgcccggccagccgccccgtccgggagggaggtgggggggtcagccccccgcccggccagctgccccgtctgggagggaggtgggggggtcagccccccgcccggccagcctccccgtccgggagggaggtggggggatcagccccccgcccggccagccgccccgtccgggaggtgaggggcgcctctgcccggccgcccctactgggaagtgaggagcccctctgcccggccagccgccccgtccgggagggaggtggggggggtcagccatccgtccggccagccgccccatccgggaggtgaggggcgcctctgcccggccgcccctactgggaagtgaggagcccctctgcccggccaccaccccgtctgggaggtgtacccaacagctcattgagaatgggccatgatgacaatggcggttttgtggaatagaaaggggggaaaggtggggaaaagattgagaaatcggatggttgccgtgtctgtgtagaaagaggtagacatgggagacttttcattttgtgctgtactaagaaaaattcttcttccttgggatcctgttgatctgtgaccttgcccccaaccctgtgctctctgaaacatgtgctgtgtccactcagggttgaatggattaagggtggtgcaagatgtgctttgttaaacagatgcttgaaggcagcatgctccttaagagtcatcaccactccctaatctcaagtacccagggacacaaacactgcggaaggccgcagggtcctctgcctaggaaaaccagagacctctgttcacttgtttatctgctgaccttccctccactattgtcctgtgaccctgccaaatccccctctgcgagaaacacccaagaatgatcaataaaaaaaaaaaagaaaaaaaaaacatgattatagctccttgctgccttgaactcctgagctcaagcaatccgcttctcccagctcatcctcttttaacaggtgttggtatctcggagtgacggtctcctttgccctgccctgtgcttgccacaccagagccaccataattttttgctaactttctggaagtgatgacatttggcatggagtcaaatgcctgtggctcagcatgtgaccccgctgaatcacatggctcacatagggtgttctgggtgacccagacaattctgaggaggactgagccctgtggcttggcattcactgaatcacatgacctaagcagctgcaggctgtggcttgcagtgtgcatcctcaaggctgtgaccccaggtggggcccgaaggccccaggagggagtggaaggggctgtgtttaccctggggagggtgggtgctggcaatatctcctgctgggcccttggacaacgtcaagccttgcttaaggtgagtgaaggccacctccctttgataggtctcacaacatgcaggagatcaggtttttagttatccaaagaagaaagggttttccccgaagggaaaaatatttttacttgtctcttttccgcttttccgcattttctcagttactgatagtgaacaaatattgtagtcgcccttatcttcaggggatactttcccagagccccagtagatgcctgagacctaagtgatagtatcgaaccct

SEQ ID NO: 18903 - DNA, 1065 bp, Artificial sequence
  DNA replication origin
ggctggccgggcagaggggctcctcacttcccagtaggggcggccgggcagaggcgcccctcacctcccggacggggcggctggccgggcggggggctgatccccccacctccctcccggacggggaggctggccgggcggggggctgacccccccacctccctcccagacggggcagctggccgggcggggggctgacccccccacctccctcccggacggggcggctggccgggcagaggggctcctcacttcccagtaggggcggccgggcagaggcgcccctcacctcccggatggggcggctggccgggcagggggctgaccctccctacctccctcccggacggggcggctggccgggcggggggctgactcccccacctccctcccggacggggcggctggccgggcggggggctgacccccacctccctcccagacggggcggctggcctggcggagacgctcctcacttcccagacggggtggctgccggagggagggactcctcacttctcagacggtgcggctgccgggcggaggggctcctcacttctcagacggggtggccgggcagagacgctcctcacatcccagacggggcagcagggcagaggcgctccccacatctcagacgatgggcggccgggcagagacgctcctcacttcctagatgggatggcggccaggcagagacgctcctcacttcccagatggggtggcggccgggcagaggctgcaatctcagcactttgggaggccaaggcaggctgctgggaggtggaggttgtagcgagccgagatcacgccactgcactccagcctgggcaccattgagcactgagtgaacgagactccgtctgcaatcccagcacctcgggaagccgaggctggtggatcactcgtggttaggagctggagaccagcccggccaacacagcaaaaccccgtctccaccaaaaaaatacgaaaaccagtcaggcgtggcggcgcgcgcctgcaatcgcaggcactcggcaggctgaggcaggagaatcaggcagggaggttgcagtgagccga

SEQ ID NO: 18904 - DNA, 932 bp, Artificial sequence
  DNA replication origin
cggccgccatcacatctgggaagtgaggagcgtctctgcccggccgcccattgtctgagatgtggggagcacctctgccctgacgccccgtctgggatgtgaggagcgtctctgcccggccgccccgtctgagaagtgaggagaccctctgcctggcaaccgccccgtctgagaagtgaggagcccctccgcccagcagccaccccgtctgggaagtgaggagcgtctccgcccggcagccacctcgtccgggagggaggtgggggggtcagccccccgcccggccagccgccccgtctgggagggaggtgggggggtcagccccccgcccggccagccgccccgtctgggagggaggtgggggggtcagccccccgcctggccagccgccccgtccgggaggtgaggggcgcctctgcccggccgcccctactgggaagtgaggagcccctctgcccggccaccacccggtctgggaggtgtacccaacagctcattgagaacgggccatgatgacaatggcggttttgtggaatagaaaggggggaaaggtggggaaaagattgagaaatcggatggttgccgtgtctgtgtagaaagaggtagacatgggagacttttcattttgttctgtactaagaaaaattcttctgccttgggatcctgttgatctgtgaccttacccccaaccctgtgctctctgaaacatgtgctgtatccactcagggttgaatggattaagggcggtgcaagttgtgctttgttaaacagatgcttgaaggcagcatgctccttaagagtcatcaccactccctaatcgcaagtacccagggacacaaacactgcggaaggccgcagggtcctctgcctaggaaaaccagagacctttgttcacgtgtttatctgctgaccttccctccactattgtcctc

SEQ ID NO: 18905 - DNA, 1201 bp, Artificial sequence
  DNA replication origin
tcagagagcacagggttgggggtaaggtcacagatcaacaggatcccaaggcagaagaatttttcttagtacagaacaaaatgaaaagtctcccatgtctacctctttctacacagacacggcaaccatccgatttctcaatcttttccccacctttcccccctttctattccacaaaaccgccattgtcatcatggcccgttctcaatgagctgttgggtacacctcccagaccgggtggtggccgggcagaggggctcctcacttcccagtaggggcggccgggcagaggcgcccctcacctcccggacggggcggctggccaggcggggggctgacccccccacctccctcccagacggggcggctggccgggcggggggctgacccccccacctccctcccagacggggcggctggccgggcggggggctgacccccccacctccctcccggacgaggtggctgccgggcggagacgctcctcacttcccagacggggtggctgctgggcggaggggctcctcacttctcagacggggcggttgccaggcagagggtctcctcacttctcagacggggcggccgggcagagacgctcctcacatcccagacggggcgtcagggcagaggtgctccccacatctcagacaatgggcggccgggcagagacgctcctcacttcccagatgtgatggcggccgggaagaggcgctcctcacttcctagatgggatggcggccaggcagagacgctcctcactttccagactgggcagccaggcagaggggctcctcacatccccgacgatgggcggccaggcagagacgctcctcacttcccagacggggtggcggccgggcagaggctgcaatctcggcactttgggaggccaaggcaggcggctgggaggtggaggttgtagcaagccgagatcacgccactgcactccagcctgggcaccgttgagcactgagtgaacgagactccatctgcaatcccggcacctcgggaggccgaggctggcggatcactcgcggttaggagctggagaccagcccggccaacacagcgaaaccctgtcttcaccaaaaaaatacgaaaaccagtcaggcgtggcggcgcgcgcctgcaatcgcaggcactcggcaggctgaggcaggagaatcaggcagggaggttgcagtgagccgagatggca

SEQ ID NO: 18906 - DNA, 940 bp, Artificial sequence
  DNA replication origin
aagtagtcatccttattctgactcacaggacgcattaattgcgtttttaacagcaagtccgctggaggtgggaggcgctcggggaagcttctagggccgtcagggcccattccctccgctaacacccctctctccccaaccctcaggttgcgcaagacctctccagcccggcgaacccgtggggctcagcagtcctcctccacgctcaagatgcagtttgatgcaatcctagaggacgcagtttcaagtttctcgagatagagaagcgaaagaggatccgaaaccgcgcttcacatctgaatctgatttcagattcctccggaatatagcggaagcgcggggttgagggcgcagaccggggcagaggagaggcgcgcaggtctgctgggacgcagcgcggggcgagcagtggcgcactcgtggcctgacgcatccgcgagactgcacgcggccaggcgggggcacgaacgggttggggcatgcgcgggcagcgtcgagtgggtcccttgggggtgggggtggggggcagtcgaactagggagagagtctgtggaagggctcagttgtcacttcacacctttccccgctgtttattgatctttaactctctctgtgtgtcctctctctctctctctctccctctcctctctctgtttctctctctctatcccttcctgtccaccctttggggccatctcttccaagaaacaaccgtctctcccagcccatgggaaattgtctctcctgcgaacttatccaacctgagggggtctcatccatgccgataccggctgcttgtggaaccttgtaagagttcttccctctccctgtaaaatggagataagctgtgtggtgctgaggccagcgccgggcacactcaccctcaccttcttcctgagagaggaaagagcctggagacctggattctacctctgccccc

SEQ ID NO: 18907 - DNA, 1691 bp, Artificial sequence
  DNA replication origin
cccgctcaggcccgagccggctagcggcggcggattcctgaaccgcgtccaaggcgtccgggagcccttctcctcctcctcctcctcttcctcaccccacccagctcccacccctgcgcgcccggcaacttgggaaccgttggcgaagttggcgctgctcgggccgcgagccggccgggcctctgggggaggaaggggaggagaaggaggagctggcgggagaggagaggaggggagagaggggagagaggggagccgcccccggggagccgctgtctccaggacccctctgcgggcctttgttccgggcgctgcccctcggccctccagtccccggggactcgcttggggccgctcgggtatccacgctctcctggcgaggctggtgggtggaggctgcttggagaacccccttggcttctccgtgccggagcgcccggggccgttacggccgccccctcccccgacctttgccagggagaccctctggctgcacgggttccccatcatctctgcccggagaggatcttcctgctcccccctggggcaagtgggctggaggacggtttccctggttccaaagaacagagcaccgtctccctgggcggcagcaggtcccacatccgccctcctgcactttcctgcgccgccagccagtccaaggctcccctaattcaagaactgggaaacgggagggacagagggtcttcccggcccgccagggctgcctggcattatcttcggaccctcccaggcagctgggtctccggccgggctgccaggcaagtggggtcccagtcgcctcccgtgcatggcgtggtcggctgggcagcaccggctgcggggtgcaaaggccagcttctcgagggatgaggtaaagggctcagaactggaacacaaaccgaacctccctgttcctttccgaatcctggtgatggccctgtccccgagaaggcgagaacgtcttggattccacttgctgggcattcctcctgggacttccagtacgtaacgtcatgagctaattcaggcctaagacagcactcctgacatttaatgggatagtatggggtttagacaataagttatttcctgtacaggagaagtaggaaaatccaaaaaagctaaaacctgattatctacacttggcctccctctgccattctcagcatttacagatggacagcaaatagagaaccagatagaactaatcctgaccctgttagggacaagttgccccaggaaccccccgccccacacacaatgcagctgacccttaccctgaatactccgaagctgcattcctggacccttatctaggtgctacagcaaggtcaccagacttgcttacagcccaacaggcagcatggggaaggtcacgagaaatgtggataaacttaagttacaccctcttctaaattcctatattgtaagcggtcacgagatgatatgtggtaaagttaaccgacaaccccagggtctctctcccccatatgaacccctcattttataagctccagggctgcctcctctgactgtggtggagcagcccggcaggataaacttactcgcctaactttgggtctctctcttgtcctttctctcagctaacgttacattttggtgccgaaacccaggaaggggacaggctctggctgcgtgtccttagaggtgtctctctctctctccct

SEQ ID NO: 18908 - DNA, 1378 bp, Artificial sequence
  DNA replication origin
ccaacttcgccaacggttcccaagttgccgggcgcgcaggggtgggagctgggtggggtgaggaagaggaggaggaggaggagaagggctcccggacgccttggacgcggttcaggaatccgccgccgctagccggctcgggcctgagcggggagggcgccaggcaggacctctcgcaggctcgctgcgcaggacggcgcccgcctggcgccgcttcccttccagcgtgccgaccggccccgcagcgcctccatccctccggcccgccccggagaagacgcacagctcgggccgcgcgggcgccggggccgcggaaccgcttctgccgggatcttccaggaggaaagcgaagttgcgagcggatgctgcccgcgccggaccccagccgcggagggtcggggccgccggtggagtctcggcggccggggtaagtggggcgccggcgtcctggaaccgccgcccagcccgggggaggccgcccagccgggagcccccgccttccgcgtccaggcgcgcgcgccagactttggagggagaagggggcgaagcggacggtgggaggtggagttcccagctcggggaaaagcccaggcaggcacccacaacccgctgcaaccggatcacacctgccaggtacacacagctcatcgccactcataccccgcacacggcgcaggctgatctgcgcacacccacaccggccaggcacatgccacacaccgaaatgcacattcctgggagcgcgggggatttggcctctacagcaggcacgtcctcacacccctccgtcacatccacggcctttgtctgctgcccccgcagcccccaaggagagggagcccccaaagcgcagcgggcaggagagaggctgcctgggttttgaaaacttgtggccagaaccccgagaccaaggggagcagatgttgcagtcggttctcggagttctgcaggagcgaatttggtgtggaaactcggtgtctgggtgatgtgtgagtgtgcgaagcccttccggaggcgaggcccggagagaggagggagtgattcataaactcagagccggcgtgccagggtctgtgagcagcgtggaagaggctggcaggccgttgctgcgctagacagaagggtagtggccgtgacagtcttccagggaagcagggacccttccccccagcggatgtgcttcctccagggacttccaagggaaccgggtgagcagattccagtcctgggtgtggacggggtaaggggaggtggggggatttaagcctaaaaggttagggagaaaccaaggcaggcctgacgccttcattattttccttgcacctgaagttgtgtttggtttctgatgcgtggtgttgctgggccccaggatgtacgg

SEQ ID NO: 18909 - DNA, 1143 bp, Artificial sequence
  DNA replication origin
tagacagaagggtagtggccgtgacagtcttccagggaagcagggacccttccccccagcggatgtgcttcctccagggacttccaagggaaccgggtgagcagattccagtcctgggtgtggacggggtaaggggaggtggggggatttaagcctaaaaggttagggagaaaccaaggcaggcctgacgccttcattattttccttgcacctgaagttgtgtttggtttctgatgcgtggtgttgctgggccccaggatgtacgggggattgtcctgggcctagcatagtgcctggcacagtgggcactcagtcagtacttgcttgatgaataatgacaccggtaattatcattcattatggactcactgtgcggcaaggccagtgggcctctgctgggttgaaattgattttccagcagagaagggggcctgagtagctcctaggagccctgcctgatctgcttgggccagtggcccaggcactgtgtgttccactgtgtcccgtgggctggccttgggagactggagctcatcattggcctctgcccctctaagagggcagcaggaaaagcttcatttctgtatctggctaagatggggttgatgtgggttttggtagatggcaggctgtttggcagattctgtggggtctcaattgaagaataactttagatctgcagcagagagaggggttggttccatcaaccctcccatctcctggctgctggagaagaggggtgggtaagtggagaaagagatgggccgtgctgctgggcatgtgctgggggtaggaggaacatgggaacatgtagaatttgggggcagccgtttttcttcctggctcctgatggcctggctggagatgggtctcatgaagggtctaggagctgtgttctgcagcagtggcttggctctgtggtggcagcaggtagagcagtggtcacagtccctgtactgagtattgctgtgggttctcctgtgccagcttgcatgagtttcccagaggagcagaaacattcgtgttcctggaactggattgccagtagtcttgggattgagagtgcacaaagatgtgggggtggcctgggcatgtcatccaaaagaaatgtgtcattccccacccctgcccccttgtgaagag

SEQ ID NO: 18910 - DNA, 1067 bp, Artificial sequence
  DNA replication origin
aagagactaaagttatgtgcggtcccaagtgtgaagttttgcccacagttggtggccatggttcgcaccgtggtcccagcacacgccctcagcatgcacctgtggcccacacgctcatgctcacagccactcatgtatggagcaattgcctttttttcttcctcttcatatcttctgtcaacttagaacgattaagcatcttgcagtaggctcaatgctttgggaaggacattgattcgttcattcattcattcattcattcagcaagtatttatgaagcacccactctgtgccaggtacagttctgggcactggagatgcaagggtggagcagacagatgaagctctcctctcccggagtcaacgttctgggggatgagaggccatcagcaagtgcatttccatctatgaagggagtaaagcagggcgccaagagggaaagtgatgggggtggcccacattaggtcaggggtcagggaagtactccagagctgggggggcatttgagctgagtcctgattgcttagaaggagccagccagagcagatctggcccgggcagaggtaccagctgatgcagaagcccccaggtggggagtggcaggaagggccagggtgggggtgttgggagaagaggtgggaagggtgagcagggtctggatcttgaaggcccttacagggcttttattttaccaagtagtgcatagagtgtttgaagcagaagctgccttattgtctgtgcctccgagaagtttccatgtggctgagaagctgggtggcagcacagttataatcagtgctcaggtgttcccctgtctgggtggctgcccacatgtgatcccatagaagaggctgggcctgaggaagccagggaagcaggagggggtgtggggaggccagcaggggtgtgggcctcagcggggagggaggaggtgatgcagcatggaagatgagaagcccacaccagccacactaggcccccaggagattgtggacgccgtcgggagcattattcggtggaggggtgcggggcagaagccagatgagacagctgggaggtggcaggca

SEQ ID NO: 18911 - DNA, 1592 bp, Artificial sequence
  DNA replication origin
ggctgcaggaactccagctgccggatgcgcaccgccttgagggccatgtgctccttgcggcggcaggcctctgcggccagcgtcacgttgagggggccgcagcggcggttcttgcagtggtacttctcgaagaccttcttgacgaagggcgtacagacggggtcctcgcacagggagcggctggagccccggcggaacatgaactgagtcaggtggtcctcgggcagcggcgtgatgaagtgctccagcacgtacaggtcgcacaggaagagctgcttgagcacgtcgcggtacaccagggccgagcccgcggcgttggcgccccccggctcgaaggacactgtgcgctcgatgtgccacagcggctcgaagaggtagaagatgttgccctgctggttgaagaactcgcccacgaacgaggagccggtgcgcgtggtggccatgagcagcacgtggcgccggggccccgccacggccggtctgggcggctcctcctcctttctctgctcttcctcttcctcccctgcggcctccatggctggctccacgcccagctgcaagctgaggttgcggagacggctctgaagctgggagaaggctgaatcgagctcgctcagggacaagagagatgcgttctcagctaagatcagggctgggtcggtgctgttggcatctgctagagcttggggaatctgcttcagcttgtctgagaccctgtgaggacaaagaagatcagggtcagtggctgactggggaccccgtctcctgggcaaccctaagcagtcctccaagcagatcaccaaaacctgtctcagttgggtttccccaaaagcagacgttgaggcaaggatttgtgtttaagtaagtttatttgggacatgatcacaggaagtactggatggggaagtgaggcaggggaggaaagaggtgcatgatggatgtgctgctaggagcaggtgtgggcatcggaggcttagtctgatggggatctgggggggacagttactccctagtacttccggcttgccagtgtgccagtggagagaaagctctcaggtgcagagctgtaggggcttgcagtagaacccaataggcacaagctagaacggtccttgctcagtgacccaaggggggggattgacggtgtccactatattgcccaatccctgacccacccatcttagctaatgctttcttgcagggcttgtgcctgggaggagaacaggctaagaaatctttctacatctaacaggcccactgcacatagctgtatgctgccaattcaaaggggtaaaggggcgttcccagattagcctatttgagggacatgcccctggagttgagcagtacacaacttggcagctgcacattggcagccttgcccatcagagtatccatactaggaccttgcctttccatgggctcagtgacatcaagacttctataggggatgtgctgctaatgcaaggccaggaggtaaattaacagtaatagtcacagccagcaaatactggacaccaactatgtgccaggcagtgggctaaatgcttttacattttctcatttaatctttacaacaatgctggtcccat

SEQ ID NO: 18912 - DNA, 806 bp, Artificial sequence
  DNA replication origin
gccgcctgcggccctgccatgcgcctcttcggctacaaactggcgcgggacgccgccgccctcaccaaccgctcagtcagcctgctggaggagaggggcaccttctgggtcacgtaggggggccggggccccgtatgcccctcctcgtgaaaggcctgccccgtctttctgccgcagccctcgcagagggcgggtgcacagcgccatgagcgggcagcgcctcctgtagcagtagggcccccagccagcgctccagccaaagcggcggccccagggttaattgcggagaacaggacagtgcccggtccccttgagggccatcacacccagacccaacgggttgcagcctcctgagcaggcctaggcaggcccgggcctgttggcaagcttcgatctcacacacacagaaacatacattcgtgcctggagaccctgcaggccagagtccaaatatttaacaatcagaaggggcaaggctctgaccagtgacagtcagacctcctgctttatttggtgttaaccgtttcttgtctggatggtgaagtctggaatctgggtgggtccttggaggaggggctaggacagccgtgggtgtcaaaggtggcatttgaggctcgtttgaggtgacagtggctgtttaccaactagtacagagcgattcagcgttttcatgaatgggttggctgtgctggttactgatgaatatgggccccttatagagctgcaaaacacacacatgcgtatagacatacatacatgtacaccatacatagacaagcatcataaaggcacaagtgcacacacat

SEQ ID NO: 18913 - DNA, 1050 bp, Artificial sequence
  DNA replication origin
tcctccttccccaggttccctcgtccgacccacccagtacaacgcaggccacaccatgacctctcccgttttctccttaaactgcgtgcatccacaagttccttggaaatttgtttaaaacacacatgcttcataggctatccagccaagtgatgggaagaggcagagatttggatctttttgttaccgtcagacaagtgactgtttctccccaaagtcaaactggcaggttgtaattcacagaggacagcaggaaccacgggcagccaggtctccaggctgagtggccgggccccgcgatgggctgctgatctccgccttcgccccacatgcgacctgtccagccgcaggagcctggagccccgcgaggccttcccgaagcacctgcaggcccagcgcagatgagccgcagtctcctgccgcttcctgggcagcagcccggccacagcagcgagggggcggcagcaggccggcccatccggaatccatgtgtcactggcctaggcctccctccgactcgctggctgtttgatctgccaaaatgggaccagtgaaggtcagagggaaaagaaatgcttaatcagaacaggaaaggtttaaaataaaagattcctccccacctcccttcttccacctgcttccaatagccagctccgtgggtgagaataaatgacttactgcttgaccccatggcactgggctacccacctgtctctctgtattggtgccaaccacttcccccttcctctcatgctcatcagaagaaaggcactagatttgaaagtcttcaggacttgcacatgtaagattcatgggaaagctttaggtgtgtgttgattttggtagcctcaggcttttgtaggacagatgtcctctaaaaccccatttaaggtagtcctggctgcaggaggacagggtcagggagagaagtaggacaaagaaggctgggcaagagggcctggccctggggatctgttgacagcctctgcagaaaggcaggaaggaggctgctagctcagagccactgcattgcataactctaggggtgcc

SEQ ID NO: 18914 - DNA, 1025 bp, Artificial sequence
  DNA replication origin
acatacggggcactgcagcaccggcaggtctgggtggggccggcagtgagggtggcatcggctcgcgcggtgccctctgttcccaccgtgggctttgcgggagggggacagcatgggacgggagtgtgaccggggctctgggtctggggtcccagcagccttctaggcgagatggtggaaggcgtgtccgtacgggggtgggctggggtccccgtgcagaagggcgcgcgaggacccaggctggttttcccggaccaacatttcaggggggaatccagcctggagcgaggggagcagctcggagccagaggaaggctcccggcccggtgggcttgagaagccggggagagtccagaagctgggtttgggggcccccggcgggcgccgcccgaaccccggcgtaaccttgggccgaactccgcggggtgggggcgggggggtagctgcggcacttttgtttaccggcacctgtggatcagaggggaagtcgcaggcggcggcccggcggggctggctccttcctctcggccgggccgggttgggggctggggaagcaggggtgaggcagggcgggcggagggtgtggctggaccccgagatcgttgggggtgctgtgggggatgggcccggatgcgccagaggcgacgccggctgctcctggcgacctggtgctcaccgcggccctgaccccagaaaacctcttctaggaccctggcccttactcctccttccccaggttccctcgtccgacccacccagtacaacgcaggccacaccatgacctctcccgttttctccttaaactgcgtgcatccacaagttccttggaaatttgtttaaaacacacatgcttcataggctatccagccaagtgatgggaagaggcagagatttggatctttttgttaccgtcagacaagtgactgtttctccccaaagtcaaactggcaggttgtaattcacagaggacagcaggaaccacgggcagccaggtctccaggctgagtggccgggccccgcgatgg

SEQ ID NO: 18915 - DNA, 1193 bp, Artificial sequence
  DNA replication origin
agctgggggtcccggggctggggggtcccagggccgccggcccgggccgcagggacaggggaggggcgctgggctgtgacccccagtactgtttactttccgtgtaattagccggccaggctgcggagcctcgggctgcgacgtgcggcggccgctcccgcagaccccggagctcaatccccgaacccgcaaccccgggtctctgccttggcagccctgcggactcacgtctcggaagcggttccagtgcttgatcttgccgctgtactgcgagatggacgacagccattgctcgtcctccatgaaattgccgggggtctcgccctccttgagccccttggcgtcgccttcggccagggctgccgcggccaggagcagcagcggcagcaccagccgcccgcagcccggggcgcgcatcgtggtctgggttcgacctgggggggtcttgacttctgcagtattttaatgtccttcctcccaccccgctgctggcgaagcgcacgcggctgtcctcagctctcctcccgcggtctgcctccggtgactggcggagagtgggtcgcggctgaaatgtgacctggttaggagatgcacttgtctgaaaaagcccagcactggacgcggagagggagagagaatcagagaggctgcgccagcaggggctgtaactgtagcatcagcatcacgtttgacatcatcatacctggtttaaaaaaaaaaaaaaaaaaggagtgggtagatttcaaagcgaagcgctccctcgatgagagcgccaaacgccagccagccgcagcggggcccagccccgcctggcacacagggagttgcagaccaagaaatccagaatcccgaaatgtccctgagctccctcaaaggatggagagcaagaagggccccaggatctccccggggaagatgggatgggggagagggcacaaaactctccggttacaaagccagccaggctcaggtgtcggaaagggaatttggccagacactgtttttctccccttgcctcccacccagaggggcctgcgccacagccctgacagctggcttcctgcgagttatggctctaccgtaatgggtggcttcgttaagacaaaagccgtataacaactggctgctcagaaccattgctccccagcggcaccgcgttgcgcaaggcaaggcctgagcactgagtggctggt

SEQ ID NO: 18916 - DNA, 1016 bp, Artificial sequence
  DNA replication origin
ctgtgggggaagagtgaggggaggaggggaaagtggggctaaatccaggcaacactttccagaagttcaacgggaaggggaagcaaaaactgagggactgagagggggacagttaaaggagaatgcatagcaaagagctcgtttttttcttttacaatgggagaggtcaaagaaaaaggggataattggccaggcacggtggcttacacctgtaatccaagcactttgggaggccgaggcaggtggatcacctgaggtcaggagttcgagaccagcctggccaacatggcgaaaccccatctctactaaaagtacaaaaattagccaggcatggtggcaggtgcctgtaatcccagatactcggggggctgagacaggagaatcgcttgaacctgggaggcggaggttgcggtgagctgagatcgcgccattgcactccagcctgggcaacaagagtgaaactccgtctcaaaaaaaaaaaaagaaagaaagaaaagaaaaaggggataattgacggacggatccctgaggaagtgggaggaggtgagagccagagcctggctggcgtgaggcgggagaacaggatgtgctgctgtgggtaaatgtgtaggaggggcagcaggaagagggggcattcccatccagtggcctctcttttctcagtaaaggagaggcaagttggcctactgcctgtgtcccagggtcagaaggcttgccaaacctattcaggggcctgttgcagtgagaggccttgcatttacagtagcaccactctttggggaagtccaccagcagctcccagcagcctggcaggaggaatggaaaaaatgagcagttggtggttgaagtcttgcatggtaggggtaaggggctaagcaaattgttggaccaggctggagagggagggaagtgaaaacaaaaagaggcccccagagagaaactaacagggtcaaccacttattgagggtctactatgacacaggcaatgtgtagggaaagagaaataaaaaggtatg

SEQ ID NO: 18917 - DNA, 1630 bp, Artificial sequence
  DNA replication origin
cgctgacataggcacccaggagccactgctgaattttttatacttaaaagtagccgcacagaaacacaaaaactttcagactctgctccgggaactggtgcacgcaagagcttaactgatttcgccgcggtctgcggtggcttgtctggggccagcgggatgggggaagggaagaccccccactcagctcgctctcgcctccctccacagcggaggtgcgacctcaagggagcgctgccgccgaggtgacagatgcagagcagctgactgggggaagggtccaatctccgtcgaccccctactaggggaagcgggggacgtgacttggagaacgtgcgactgaggaacgggagggggatggagggagagggggaacggggaggagggcggggctggccctggccccgcccaccctcgggaggaaggaggctcctcccactgcccgggaggagggcagccaggccacagagatgctgagctcagcatttggggccccggcggctgggtgggggcagggcgcagggttggcgcctttctggtgagagccctagagaggagagagggggagggagggagaggccgaggaggccctcacacccctgaggctgtaactcttctccaaccgggtgggtcgtgctaacaaagcggtctctgttggggaggggaaggcttcctgggtgtgcgcaaaccctaagggatgggggaaagaatgtctgtgactcactaccctaaaccctgacttagccccgagaactcacgtcagagaggccaagcctttgtgccctctgaccccaggattgatttggtggagggagcgcagggctgcccctgtagggctgcagtccctactgccctggctaccccagctagtgcaggaaggagttgtatttaaggcaaccttgaaaagtgcagggggcatcagcttgggaagggaagcaaggaaaacctttctacccacttggcacaaagggctacccaggccaggcgggtgggtggctatttttgagctgacctacatacctatttgcctctttatctttttattatcacacatggttattatgggaacttttcttcagcacttagtgcagctgatgcgttcgatgagggctgcacaataaggtgtgttgcctccctcgccaggaagtttttaagagtgtctgggccaggaaagaaggtcatcagtaggcctgcagcagcttccccaagctcttgccacatggaacaggatcctgaccctgacacccccatccagagctggtcgccctggaggcagatgatgacattcagatttgacaacaggatcactgggttttgctggggcctgaagcccctcagcctctgagccttgttgcttgcagaggctgactccatagtcctacagccccacactatggctttcctgcatagatggagcaagggatgctcatctgcatttgagttgtgggcagaactggtttgggatttactgctctgatttttcttaagtagaagcaaggagagcctggaactttctgtttattttacctctgttcagcctcactaggacctccctctccaaaccttttaatagctccccattgcctttagagccagtctggctgcttagttcagcctcgcaagcctcggg

SEQ ID NO: 18918 - DNA, 2755 bp, Artificial sequence
  DNA replication origin
ttctcttataaattttgggcatgctgggacttgtctacactgttggcaattgtcaaggctttaggtccgagttgttcctcaacttctgacccccacctcatgctaacaggactggggccacagcgcgtgactgcaatgtggccagtcctgggagagccggcctcgccccgcggggaagcgggcggcccctccgttgccatggcagccgagagcacccccacgaggctcctcattggccaccaagtcgaggtcccgcctccgccatcagaagggaccaaccaaggcagaccgggtgcgacccagttgagggattagcgggtgacgcatctctcccagtccctcatggagacccgcgcgcccgcgatcctacgggcgcagccgtggccctgggtcggggtcacgctcgctgggcgcgcctcgggcggggctggggaggtgcggagctggggggcgccgcgggaggaggccactcaggccgctggggagggccgggctgcggctgggaggtttccgaggacggtcaggcggaggcggaggccgtgcaggaggcggaggaggaaaactattaaggaagggggtggaagggccccgctggctgaagaccgctgagctcaggcggtggtaggaccctgggcacggagttgcatggaaccctgttcgaatcctgctctgcacccgcttgcgctgtggcctcgcgcacgcgagccttcctgcccgggggagcgggaaggagggaggggagcggcgaacatctactttgtgccgatccttttgctgaaaaccctagttttctctccaggattccctcaaaacgaccctgaaataggtggatgctatccttagccccattttacagatgaggaaacaggttcaaaggaggctacgtgagaaaagcctcgagtgagctcagttcccagatgtgagaatgatgtggccgggttggtggttatctgcggggggaagtaggaggtgccctgcccacccccacgctcaggcatcctggccggcccggaaggaagagttcgtgccaagccgtgagactcggtggtttcctgcagcaaatctgcgtcaggctctctctggggggttaaccgccgcaaactggtaacagcgtcagaaaggggaaaccgagctttatctgcggaggtccctgggccagggacagcagattaaagaacatggaggcagggcgcggtggctcacgtcttaaacccagcactttgggaggccgaggccggaggatcgcttgagaccaggagtttgagaccagcctgggcaagatagggagacctcttctctaaaaataaaaaataaagaagatggagcccgcccctcgggaaggagggaagggagaaagtgtttctaactccttattgtcctttctcttcttttcttttctttttttgagatggagtttcgctcttgtttcccaggctggagtgcaatggcgcgatctcggcttaccgcaacctccgcctcccgggttcaagcaattctcctgcctcagcctcctgagtagctgggattacaggcatgcgccaccacacccggctaattttgtatttttagtagagatggggtttctccatgttggtcaggctggtctcaaactactgacctcgtgatccgcccgcctcagcctcccaaagtcctgggattataggcgtgagccaccgtgcctggatccttgttatttcaaaacaggctgaggttccctctggaagccccatttaagaacagacccatggccgggcgcggtggctcacgcctgtaatcccagcactttaggaggccgaggcgggcagatcacctgaggtccggagtttgagaccagcctgaccaacatggaaaaaaccccgtctctactaaaaatacaaaagtagccggtcatggtggcgcatgcctataatcccagctactcaggaggctgaggcagaagaatcgcttgaacccaggagaaggcagaggttgcggtgagccgagatcgcaccattgcactccagcctgggcaacaagagcgaaactccatctcaaaaaaaaaaaaagaaaaaaaagaaaagaaaattcaccatatgaatgtcagactcttaatgatgcaaatgccagaaaacctgactcaaactgatttatgctaaaaagggaatctactggctcaggaaactgagaaccccaggcatgactcgatctggcgacaccacgacgtcatgaagactcatttcccagagtctttgtacttgtttgtactttgcctttgctgtcttgggaagtgtttgggctccatgagcacctgctgcagctgcaggggcacatcatcccaagttccagttgagtagaaagaggctctgtccttgggaattgtgacacatgtcccgggtttcactgtaactggacagttggggtcatgtgaccacacagataccaggggcaaggcaggaataaccctgtgttgattggcaaatctgttcacaggccccacacctgcagcctcacctgctccaatgggctgaaaaggaaggagggaagagggtttctccaaaggaggaactgaagagatattgaatgggtgcccattggtaacaccccaatgccagggcttcagaacccacctcctgaccccctctgcaccttgtactacaggtgccagtcagggggaaacggattggaaagtgagggtcttgccctgggagagtgcccaccccttcctcgctggtcccatgtcagtcgtcccaagtcagtcctcatcacatccagtgcc

SEQ ID NO: 18919 - DNA, 1107 bp, Artificial sequence
  DNA replication origin
aagccagctcagcaagacaggaaactcctggccgctttgttactcatgattttcagcaacttggggagtggggggcaggggaggggagtcctaggggaatttctgtagttcaagaagtttgggggctccaggactgggagtgccctcggggaggtctacctcccggggcaggtctatttcccaggccaggtaccgtagttggcactagtaagtaagtgctccacaaattcgtgttaacatgcattttcaagaatgcaatttatttaattttcaagtcttcagtcccagctactccgtaggctgaggcgggaggacccctttagcccaggaggtcaaggctgcagtgagctacgatcttgccactgcattccagcctgggtgacatagctagactggtctcaaaaaaaaaaaaaaaaaaaggcattttctcacctacctgctttgagtgcctgccagaaagaatctccaggtgaaaggggacaggtttagggctggagctgaaggctggcatttggggtttgaggttctgcgtttggcattggtttgctgtttcacttgggcaaatctcttggcctctctgggctgcgtttctgtagggaatcagtaataaggcaacctgtctggctctaaggctcagaggcacggggcaggctttgaatttccagcaagcaggagaaagagcctttgatttgaagcagagatttcctcttgaacattaatattctgggcttttccaggctggagctttagaaccgctgttactaaactaagtgacatgagtagccccccgttgcttacagaatttcttggcttggcatttggggttttctcacgttgattctaccctgcctgtatggcttaacccccaactacacccctacactgtaattaggaagagcctcagacttccccacacaccccacacaatgttcagacttctgtgccctcactcatgctgttccttctgcccggaatgcttttccctacactcttcaaatgattggctctttctcatattgatccccacataaatgttacttgagtagagatcctgttattaactctcagagcttcctgttttctctctttagctcttactgcagttca

SEQ ID NO: 18920 - DNA, 904 bp, Artificial sequence
  DNA replication origin
gctgagctggcttactcaatttccctcgtttgtccgctcagaccagacggggcaaagggcagccatcaaaggtgtctgggacgagcccggcggggtaatgggccgctagggactcagtctggcccgggtctcagccggggcagaaggcagccgggcgagggccgcgggtggggggcagggggccggggacaagcagccccgcccaggccggcgcgctgtgtgcacaacgtgcagggctgcgaaagcggatgcggcctgatggggcaatcgctggcaacgcgccgcgggttgtcagcgggcgctggggggtgggagcccggcgccggcgggccctgcctccagcattggccccgcccccagttccgcagtcgtggctgggtttcggggagggcgcccggtgcggggggcgcccagggcctgcgcacacgggtaggcccgcgtgcccaagcccccttgcagcccaggcgccctggctcattatccatcccggccactggcgttcggttccgctcctgtcgcaccaccccctcactgctctgacagataccaggagctggtgccaacccgcagacacacctgggcagccccacgtgggtatcgcacgcgcaggggcacatctgccctgccgggtttggagagcagttgcaagtcagcccctggaatgtggtcccgtgccggctggagcaagaactgtgtaacctctctgagcctcagataactcatctgttaaatggggaggatgatagcatcactgggttgttgtcaggatgaaataagatagaggctataggggcgggtgtggtggctcactcctgtaataccagcactttgggaggccaaggtgggaggatcccttgagcccaggaagtcaaggctgcagtgagccaagatcacgccactgcac

SEQ ID NO: 18921 - DNA, 1474 bp, Artificial sequence
  DNA replication origin
ccagacaagctatttgacttctcctgcctccgcttccatctatataatggatgccacgtatggccctcgtcatatgtcaaatacaatcatgcatataaagtccccaagcaaacagagctcttgccatcaaagcttatggtatcaggctagaaaccttgggggcgggggcactttgaatatgtcagtagacctttctatcccaaggacttactgtgacattccacctggccccacctgtgatagggaaagggggaggggaggggagggagaggagctgccgctcacaacagtgctggcctctactgtgaacacttgatatcgttctcattttcccccagcctcacaacagctttacaaagtaggcatcgctatccccatttcacaagtggaaaaatggagacccaaaaacattcaatcacctgcccaaggtcatgcagctggcctggggcagacgccagactggggcccagatctgagtgtgatctccttgtgcactgtgggatgaggcggggtctgtcatgcctggggtcggctgagggtgcaggggtctctgactcttttgggaggagcccctagaaccccctgcctgaggtgactatggaatatgctgagcctttggccagggctgccttcctcctgtctggtcccacctcccccacccggacccccccggccagccctcagacccctcccagaaacacggaagggctccactccctctgggagttaccaccttcacttccaacttcagctaggtgagggaggtactgcaacccctgagtgacagaaaaggcagccggatcagaggggtcaggaacctgctgtcatgctcgcagagctggggaagcagagcctggacagagccccagctgctcagactcctaagctgccagtctggatcccacaccccggctgtcgggtagggttggggacttctctgctccccctgctcctcacgcttcccggagccatccctgtttgtaccggctggggttacatgcaaagtgcaagccttgcatcagccagatgggccccgctctagtaagagctgctttctgcctctctgcgccttccccaccgttatctgactcatcccctgacagtcccaggagactagagagaagccaggcctcttatccctattgcacagatggagggactgagagaggaagtgacctactccagtgactcagggcagcaacccaggctgaggaggccacaggtgtagctggtgtggcctggggaaagttcccgggtgccacacagccagataagcagtttttaatgcctcacagcaggcacaaatatcaaccgatgtgtgtcaaatgaacgaaggaatattgcaggccctgggtgaaagatgaggggtgatattgaggaaaaaataaatatgatacagggaaggaaaaaagaagccggaaacccagacatgccccagttgcagcctgtgagcccagctggctttgtagctccc

SEQ ID NO: 18922 - DNA, 1393 bp, Artificial sequence
  DNA replication origin
cacagtttgagaacccgtcttcacagcctgccgcctctaacactctgtgatttatgccttcaggacaaggatgttgtccttgttgccttctccaggcagcccagtaattagaccccaagcccagcatgttctggtactatccattccgtgctgaaatcttcaaattctttctctctttctttccttccttccttattattttttgagacagagtcttgctctgtcgcccaggctggagtgcagtggcacaatcttggctcactgcaacctctgcctcctgggttcaagcaattctcctgcctcagcctcccaagtagctgagattacaggcgcccaccaccacgcctggctaattttttttttttttttttttttttttgtatttttagtagagatggggtttcgccatgttggccaggctggtcttgaactcctgacctcaggcgatccacccgcctcggcctgccaaagtgctgggattacaggcgtgagtcaccgagcccggccaaaatcttcaaattcttaatcgctggtttctgctgacagtgaggtctgttatgcagagttcagtagggccacaggtcccttgtcccttctcagggaagggaccgggccaaaactttctatgcaatggccaaccctgtggggcacttccaggtgtgtgtaggatgttcagtccccaacagcatgcaggaaggtgtgactcccactggcagacaagggaggggctcaggggtcttaggaggctggttactgatacccctgtggatgcagggctgggtgcctggacaggagcccaggtcctttcctggagccacagtctggggccctggcccaggcccaggttttccctggcttactccgggggtgctggcacctgcagacaccagcaacagaaagaggcaggagtcgatgagggaggcggagaggagggggactttccttcttctgctgggggtctggggcgtccttttccaggctgaggagtagggctacccatttccccatcaccttccggccaggggcagtgggtagaggaggaggccgagattgcacaaacaggtatgggaggaggccagcagccaggcagctggctggggtcgcccaagggccgtgagagagtccccagtgcccgtactgacatcaatggcgcccggagggactcagtcggtcatctagcagtcttctctagctctcacaacaggcactgggggttgggaggagccagaggtccctgctccccactccacgcgtccctcccagctgctgagctggaaactcgagccaagtcaacagttccttgaattgtgttacagccccggctgcccctccagagctaataatatgggcagctgcaggacatgaaactcgatcctccaggctccaataccac

SEQ ID NO: 18923 - DNA, 1074 bp, Artificial sequence
  DNA replication origin
agcagcaagggacaaggctataagctagtggagccagggagctgggatgcagtggcgcgttctgccacctgacagtgggtgggggacacttgtcaaagccttttttgctgcagtcagagcgtgcatcccacctcctctggctcacggccaagccacacagggagggcaggggggatgaggtgggtgaatgggggtgcctgcaacgcctctgccaaccgcagctaacaagtggcggcttgcacaccagggcaggcagtggtgaccctgggcaggggcagccaatgagctcccgggccacggtggcaccactgggcagcccgcctgtctttggctggtgcagccgcgggaggggcctgggtccgccagtcagggctgccgggccctgtctctgggaggcctgggcagatctgccgctccattcacaggagcccgacccgacttgggctgccacattttaaactttttcaacctcctggagaggagggcgggctgcgggggcggtttgggggaggatggtgggaaggacgatggaaacaaactcgcaacacttttcccaggatctggctcctgagtgggatcgagctccaggctggggccgggaatttcgaatgctctgcgggcacatggcaggcctgagggtgtgggggggagggattgggagagggaaaagcagagggtgatggtcgtggcccagatgcccagccaggactggcgctggggaccccagggacccagactgctcaggtcctgcagccccccagtcacctgagcacccctctgcctggatggagttagttctggaacagcatgtgtggcttaagtggctgttagccagggccaggggtcgggggaaattcaggctcatcatctagagctccttgtggcacaggctggacagtgtcagcagcagcaggggcttgtgccccctcccccccaccccttaggcctccctgctcaatgcagacccaccacggccagtcacataataaacatatattaacagatgtacaatttgagaattctaattcaagaaatacagcttccagaggatcctttaggatctatgttcttatt

SEQ ID NO: 18924 - DNA, 1173 bp, Artificial sequence
  DNA replication origin
cagctagcaaggaaatactcttctaaggaaattcaggacccaaaatctttcttaggcagtattcaaggagccctcattgtgagtttaagtggaaagaagtgtttttcaagagaaagtgtttgttattccaaagcgtattctgataactatttcggcaaaattatgaagcatcattaaaatagccttttacatgaatttttttttttttttttgagatggagtcttgctgtgtcgcccaggctggagtgcaatggcccgatctcggttcactgcaagctccgtctcccgggttcacaccattctcctgcctcagcctccggaatagctgggactataagcgcccgccaccacgcctggctaattttttgtatttttagtacagatggggtttcaccgtgttagccaggatggtctcgatctcctgacctcgtgatccgcccgcctctgcctcccaaagtgctgggattacaggcgtgagccaccgcgcccggccttacatgattttttattacgttattaatgtgttctgtttctgtaaatgcacacaaagtcaaatatgataaaatagtgctgtttctggagagtgtgagaatatccgtataaaggtgctgtaaaaatgaattgggtatttgagatgtatacacgtcagttaattcactctgaaggcatgtactcattctgggactttgatattgtaatcgttctacctctcctatattatgctacgcatcacagtcattagatcactccgtgatgtagagttaatttcagcatatctaaatattatcagttatgaatgataattctaggcgtgtagttgagagttacagcatacaccgttaatggttattaatttggtgcctattttgccaacttagaacactcacttagaactcaacttcgaacaaagcttttcacaaatatctatatcccccgttactcttatcatagctctattgttggtgaagattagccgaactgaacatgccatctctattgctgttattttcacgggtttgggtgtcaattatgggttccctagaatttgcccgtaattgactatgtcccactataggtaactctggaagggactggcagcttccagtgtggttctcccgcctgtcgattggaccttgcaggaagccccgcctcatcaactcagtcaagggcttt

SEQ ID NO: 18925 - DNA, 1655 bp, Artificial sequence
  DNA replication origin
tggcagcttccagtgtggttctcccgcctgtcgattggaccttgcaggaagccccgcctcatcaactcagtcaagggctttagttggcccggcgtcggtgagtggcgggtcttagctccgccctggccgtccgctgcgctgcctgggtcggcgccgtttccagttgagagatggcggccgccgcaggtagatcgctcctgctgctcctctcctctcggggcggcggcggcgggggcgccggcggctgcggggcgctgactgccggctgcttccctgggctgggcgtcagccgccaccggcagcagcagcaccaccggacggtgagcgagcgcgcccggaggctccggggagggcggggcggcgctggcgtgtgggagccgccggcgggcaggccgccggggcagcaggcgagttacctcaactcccggccgctccggaggttgccgggcaccgaggagccgccgtgcccttcaggcgcctgcggcggcgaccaggaagggagggcgggcgggaggaagccgagaggaggaggaggggcgacggcggggatgttcccgcaggactggggacaccagggcggggaaggcacgggacttgaacctctccccgactcgcccccaatcgcgttccctcccttcttcgttcttaacagccctgccccaaggctccctgaacggagccagatggaagttgtcccctttccctcctcctccgggcgggttggggagttctgagttgccgcggccgccttgtgtgtgccaggagagtggcagtgccatgctgctgggagctgccccggagagcagcccaggaccccggcggggccgcccctcgtcctctctcgtccccgaggggtcgggcaggaaggaaaatcaaactttattcccctctgtgacttcctctgtgtgtgtgcatggggaaccggctccctcgagatggatgctgcattgcttcaggaggcaagcttcatcctcttgggtccttaaaggtgcttttgggggtcctttcgagggctactgtataagcgtgttcacgcgtgcctgaagcgggaagggtggtcagcaggcacaggagaagcgaatatggtaagttgttgacagaggcagagatttggtggttgtattaaccagttgttgctgggtttcattggctggcagaaaaagaggatttctgtttgaacactcttgggtgagtgtgtgtgtgtgtgtgtgtgtgtgtgagagagagagagacagagtgtgagagagatttcttttttcaattgcaagagatgaatttggcatggagttcttaacctaacaagtcaggaggtttccttcccttggactttctagacctatatgtgttggtctctggccagctctgagggaaagaatgtaggttttatttgctggggctgagttgtatagtgtgattattggaggatcactgcaaacagcttgataggagaaactacaatagtaccttcaaccctcaataaacacatcgcctgccttgttctgatcataactcttaagaggaaactgaactggagctcttcggagaggatactcctaaggccaatgacagcatcaaaatcgagtgcctgaaagatctatgaaaagacctaatgctctgcaaaagcaaggttgtattgttattattagtcataggta

SEQ ID NO: 18926 - DNA, 1946 bp, Artificial sequence
  DNA replication origin
cagcctcaccccttgggctaggaagccacggaagcaaaacctccgccccggcctgaaagcaaccgggagaccgcggaaccactgccaccgactcagccctgcccagcaggggcccgcccaggggccactccccaagggaggcagccagtcactcgcccgcccttccgggcccactcccgaggggacggtctcccgcccgccctcacacacagctagctcttcaggccaggcccccagggtttcgtccacctctcacctttgacgacgcggtcagccccgggagggggcggcgggggcgggggtgggggcggtgcagcccgggccggctccggggcggccatgctgggcccggggctcggctaggctctgggccgggcggggttgggggcgggggcggcggctaccagagccaagcggcggcgccgccggggaacatggcggaccctctttccctacagaggggctaagaccggcatgcactgcgcgtgcgggggtgggggcggggtaggctctagggacttgggcaaaattactgaagctaggagagaaacaggacgaggccaagggatcaggttaaaattctttgcatgcagaatgaagaatgaggaggtgctgcgatcgaacgactgcgaggaaacacacccgctctcatggcattcccagtaaactgagaagacgtgattaaacctcaggatctcctactaatagagaaatgtataacgatttagctaccagatctgaatactgaagggttggtaggggaccagagaatagaggaagcattgtaggttctagagtggagaagggaccatccaaaatggagtttgaaagagaattctggcctttgtgtttagagtctggaattgtcaagagtctgaaagcacagaataagactgcagctagagcaatttaggcgccatagtttgtcaaaacaggtaaggggaataaaggggatgacaccaagagatgtgcaaagaatctgaagaattcacctgaaaaggatacaacctcctcctggaaggcagaggagtaaatagggaattggaaattaattccttatttctgcacatgcacagaatctgggcccaggtgacttatggaacctttatagagaccacggtgactgacactcatgggaaagggggtagaggggcaagaactgactgttcatcaaaaattattagatgagtgtgtccacgacaccaggagatatgttgaatcatggacagggaccagcatatccactaagctctatatatcttgatggtgcaggatccaagtgggatggaacaaccaattcctgcccatcctcctgctcaataatacatgtgctcagaatctgttcataatgcatggtggtaagtaagtagtagtccgaaggtccaaggagtacctttctacctcttctttgtgtcaatttctatcctgagaccccaggaaaagaggaagggaaagacccaacaatggattttttccaaaaagggaacccacaagctattttttagagggaagagtctcgggagtgaggcacaggtgaaaatggatctttctggcatggaagggccataacaccacaggggaagggaaagggagaggcccccacggaaggagaggaaggaagggacaggaggcacgtcacaaacttataagatagagggaaggcacctggagtacattgatcaggagtgagtctgtaagaagagcttgaatccccagaaaatcttcctaaggaggggaggaaggaagtgtataatgtactgagtactgaatgctctgtcaggaaagggatgggaaacatcctagcagcaatactagaaaggaaaggcaccctattttaggacccattgattcccaccttgattgtatatccttcaactcgtctctggctcctcacttccactcagtcaaaagccacttcatatatttatccagacttccagccccaa

SEQ ID NO: 18927 - DNA, 1435 bp, Artificial sequence
  DNA replication origin
aaaatgaatcttcggctaaagacgacgctgctctaagtttgaggcaactgggaaaagaaggccatatccctaaagttatcccagtttagggtctgccacgctaagtttcctcagccccgacggacgcggtcccgcctgcaatcgttttccgactcctggccaactcaagcttcatcctcgcctgcgccccacctccacgcctgtccgggacacccgtgaaacgccttgaagccgccattttaaacagtgctatcgcgagatatacttcgctgtttccagcctgactcatttactttcttgcgagagtctcttctcgtgtgctctcgccatggccaaggaaagtgtcgcgagagctggttgccttggctccctgtagctatagcagccgcggcggttaagtatgcggcgccaggagctgtgagtgcgacaccctcaggggggcggggccgggggtaacggggtgcagggggtagcgcctggggagggggtgcggggaaggttaggtcgcgggaggaatggacctgagtgtgacgtgtggggcaggacctgggtcctgtgggtacagggacgcggcgccggtctgctctagggcacgcggggaggactagagctgctgggaggtccagggggagggacccgggtgtaatggggttcagggggcgcgggctggagcgtggaggggtgtgtgtgttgggagcagggtgtttacggagactcggaactggataaagggaccaggctacattgggaaagaagtgggaagaaatggggtacagcgacgaggagggtatgttgaatgagagcacagacgctgggcccagtttgcttttcactggttagaggggtggagggaggagaagggatcagacctttacagatcccccggctctgcctgaggctagtcggggaccgcgcgccgggacctgggtcctaaatggccgtggcgggaatggtggcgtcccagatcgtcgccgcctcctttccctctttccggagagataccccacggacactcttgagatgcgaacggagagtcctggtgaactagtattagttgggaaggttcttttcgctgagaaactacgagtaggataatgaatgattgctactctaaaataaagcgcagggtaggggggcgggagagagcgattcttgagaagaaaaaaacactaaggttgcttcctctgaagcgtattgagttggaagaagggggtgtgtgctaagcttacgtttcttcccagactcattcaagtgtacaatttctttacggtgtgcttatgaaatacctggaaggtagtcaggttagatggtatggtgaaaaaatgtgcaatacgacacttaaaccttccgcaaatgtaacttaaaaaacaatttttttttaattgcagcagcaggctgaacactaaatctagggatagttttagttatttggatg

SEQ ID NO: 18928 - DNA, 1220 bp, Artificial sequence
  DNA replication origin
gagtcttaggagtcatagggggcggggtcttgggagccattggagggggggtcttaggtgtcacgtgaggcagggtcttgtaactcctggcccctactggctgcatgaagttgcaggcttcagccccgaggctcagagcatcttcttcaggaccagattctgcacccccggcccgaggcttttcatccaggttctgtaccagcgatagcagctcggggttgggcgagttcttcgtctcctcctttcccggccggaacatctgcttccgggtcccccggcgccgggcctcctgcaggatacccgtgcgggcagctggcacagagatgcgctgctcgcgagcgctggggggctcaggagcccctgggcctggggcaggcgcctctgggcgcgcagagggtcgcaaaggcgcagataggaagatagaagcggtggaggtcatggcagctgcgctaggaggagcggggggctctggagctccacctggggtgacaggccgactaggggctgggatgtacagggagctggtggctgtcacagggcccgaggagcgtggggtgctgggggaaccagagactggcgcgtggctgggaacccctgaagtgaagctgggcagaggggtgggcccctgcgaagacaagaaggggggtggggcggggctgaggccccccaggctgtcgttcgcccttttgggggctaaaggccggaaaataaccgaggtggtagttggccgctgcccttgtaggcccggggtaaagggcctggctgaccggttaaagatgcttggagctggggtcggggctccaccacctggttggaagggtctggggctggctacaggcgccggcaaggggctgggtgggagcacagctgcctctgggggagcactctgggcccgaggtggtgactgcaggccttccccgttgagcatggctgctggttcgacccgtgccagttcctgggtgctggagtctgcgcgctggcgctgctgttcaaagagctgcacccctcgcccagagacctcactcagctgccctcccagcccagagccctggccctctgatgctcttgagcccgccctggcaagctccatgtccagatagggactgtcccagtcagattgattggtgaggctgcgggcgtcagagaaggcttcttcgtccagctcggactcactcgtggggggaacgccgtcctcctcctcagcgcctgtcccagcagca

SEQ ID NO: 18929 - DNA, 818 bp, Artificial sequence
  DNA replication origin
gtgtaggtggtagtaagatcttctgccactgggtggggaacaggccccaccatagggatgagatgaggaccaggtcggagggggccatggggtaacagcagagcctcagctgggggtggctgaagggctgccccatcctcccaagacggggagctcacacggctgtcaccctggctgggagggccagggatagtaggtgctggctctgcagggctgtcagacaggtagacctcatcaggtggggcacccggaggggtgggccttgtggggcctcggcggcgaggtcgacggggcttctcctgggtggcagggccatcagcatcactgtcagtctctccgtagtaagcctcactatcaggaggtgaacgaaggctcccaggctgaagaggctgaggaactggagcaccagggggctcaggacttagtggagataagggtgacagcacctgaagctcatggggagatggagattgcacaggaccctcgtctgctaacctggataggaaagatgacagagcttgagagatgggctgggtactgacagctagagagatctggaagggatggagggaagaggtaagggggagggaagaggtaagggagagagaaggctgtcatacagttggaatgggtgggccgggaagagtggagatatgaagacaaactgggaggcaaatgtgcttgaagggctgtgagtggaaataggcttagaggaagatgtaatgaggaggaaacaggccaggggttgaagtaggctcatcagtcaaatacccactgacatccccatcccttaattgcagatacattcaagccctctg

SEQ ID NO: 18930 - DNA, 1384 bp, Artificial sequence
  DNA replication origin
caaaatgaaaagtctcccatgtctacctctttctacacagacacggcaaccatccgatttctcaatcttttccctacctttccccactttctattccacaaaaccgccattgtcatcatggcccgttctcaatgagctgatgggtacacctcccagacggggtggtggccgggaagaggggctcctcacttcccagtaggggcggccaggcagaggggcccctcacctcccggacagggcggctggccaggcggggggctgaccccccacctccctcccagacggggcggctggccgggcagaggggctcctcacttcccagtaggggcggccgggcagaggcgcccctcacctcccggacggggcggctggccgggcggggggctgaccccccccacctccctcctggatggggtggctgccaggcggagacgctcctcacttcccagacagggtggctgccgggcggaggggctcctcacttctcagacgggggcgctgccaggcggaggggctcctcacttctcagacggggcggttgccaggcagagggtctcctcacttctcagacggggcggccgggcagagacgctcctcacatcctggacggggcggcagggcagaggcgctccccacatctcagatgatgggtggccgggcagagactctcctcacttcctagatgggatggcggccgggaagaggcgctcctcacttcctagttgggatggcggccgggcagagacgctcctcactttccagactgggcagccaggcagaggggctcctcacatcccagacgatggggcggccaggcagagacgctcctcacttcccagacggggtggcggctgggcagaggctgcaatctcagcactttgggaggccaaggcaggctgctggaaggtggaggttgtagcgagccgagatcacgccactgcactccagcctgggcaccattgagcactgagtgaacgagactccgtctgcaatcccggcacctcgggaggccgaggctggcggatcactctcagttaggagctggagaccagcccggccaacagagcgaaaccccgtctccaccaaaaaaatacgaacaccagtcaggcgtggcggcgcgcgcctgcaatcgcaggcactcggcaggctgaagcaggagaatcaggcagggaggttgcagtgagccgagatggcagcagtacggtccagcttcggctgggcatcagagggagactgtggggagaggcggaggcggaggcggaggcggcagaggcagaggcagcagaggcagaggagacagaggaggcagaggaggcagaggcagaggcagttgtgctcttattacagtgttgttcttgaatctattgccagtgtgtgatacgtt

SEQ ID NO: 18931 - DNA, 939 bp, Artificial sequence
  DNA replication origin
ctgagatgtggggagcgcctctgccctgccgccccgtccaggatgtgaggagcgtctctgcccggccgccccgtctgagaagtgaggagaccctctgcctggcaaccgccccgtctgagaagtgaggagcccctccgcctggcagcgcccccgtctgagaagtgaggagcccctccgcccggcagccaccctgtctgggaagtgaggagcgtctccgcctggcagccaccccatccaggagggaggtggggggggtcagccccccgcccggccagccgccccgtccgggaggtgaggggcgcctctgcccggccgcccctactgggaagtgaggagcccctctgcccggccagccgccccgtctgggagggaggtggggggtcagccccccgcctggccagccgccctgtccgggaggtgaggggcccctctgcctggccgcccctactgggaagtgaggagcccctcttcccggccaccaccccgtctgggaggtgtacccatcagctcattgagaacgggccatgatgacaatggcggttttgtggaatagaaagtggggaaaggtagggaaaagattgagaaatcggatggttgccgtgtctgtgtagaaagaggtagacatgggagacttttcattttgttctgtactaagaaaagttcttctgccttgggatcctgttgatctgtgaccttacccccaaccctgtgctctctgaaacatgtgctgtatccactcagggttgaatggattaagggcggtgccaagatgtgctttgttaaacagatgcttgaaggcagcatgctccttaagagtcatcaccactccctaatctgaagtacccagggacacaaacactgcggaaggccgcagggtcctctgcctaggaaaaccagagacctttgttcacttgtttatctgctgaccttccctccact

SEQ ID NO: 18932 - DNA, 1506 bp, Artificial sequence
  DNA replication origin
gggagccggctgggggcctgggccgcccgcagggccgtgggcgcgcggcatccgggctgtcggggctgggcgaaggtaggctcagcgtggctccgacgggccgtgcagcttgcagagctttgggacctcgccggggtcgggtgacccggggccgttgggccgccggccgggggtgttcgctgatttgatgtacagcgagaaggagcgcttgaggcggttggtgtcctgcaggcggtcagaggagagtacaggccgcgcagccctgctgcagcgcgcaggtgtctgggggcgtggggggcagtgggggctccccgcccgcgctcaggccgccctccctggcagctgcactcccggtggcagcgctttctgaggtaggtggtggcagccatggcagccgggccccagccgcagggctgggcggaggctccggcgtccctgagggggtgcccgcatccccctgcacggtggccagcagcttcaggctgcgctcctactccagcagctggcccaggaagttgaagttgggcgagatggactggcgcctatccttcatgaacctgtaggtgtcgtcggaggatatgcccatggtcttcatgatgtaggcgatggcgatggtggcagagtgggagataccgaccagacagtggacgatgacttggcagctggacagcttgcctttacagatgaactccatagacttgtccagccagggcagcagcttttcacagtagttgtcgttgatggggacccgcatgaagcggctctcgcagatgaagtcaggcttggggcaggagttgctggcattgaggacgtagcttattccattctgtgtcgtcagatccttgttcagaacgtctttctgcgagcccaggtagaggtgaggcaggatgagggtcaggctcacgctaggcacgggcaggcagggctgggagaggctcatgggtagcagggcagcaggcttgccctggcagaggctggggaagcaggaggagaaggtggcgaagccccccgtgaggatggccacgctgtcgaagcagctgtccagcttgctcagcaggatggagaggaagcggtctgcggccagcacactggcgtcccgtgtgctctggtcatagaccaccatatcctgtggctcagtggcctccatttggctgcgtgtggccagccagatgaactctgcaatggtcaccttgcccttctgcagccggcacttcaccagcttggagcagcagatgttgacggagctgagcacatgccagctgttgtactccaggaaggagcggctgtagatgaccaggcaccctaggcccgccccgcagcaggctggccagcttcttggcgtccatcatcttcctcgggagccggtctccggccatggtggggcaatgggtggtggggagggtgacccctgacgtgaggaggggttgctcggatggcccaagtgtggccttgcactgggagtgacctagcacatggtgccggacctcgttagcgctcgcctcgggg

SEQ ID NO: 18933 - DNA, 1259 bp, Artificial sequence
  DNA replication origin
taaacaacattttattgaacagaaattgttcaataaaattggctagccaagttctaatatatatattttatataattaataataattaaccaataataataaatacttcaacctctaatccatagattgcaaatacaatgatagcttattttcttggggaacagcagttggtggggacagagggaatgggaaaaggacttttgctgaaaggagggatgacaggaacacaaggctatgggtgaaaagaagaacaaatagaacaaacagcagagagggcagctggccggggtggggtgggcgcctccctggccttgctccaggactcaggactgggtcctgcctgggccacccctcctgccaaggccctggcctcttcccagggtgactggtccactcctagaccctagaacatctgaagggcaggggtcccaatggcctgagagggtatgggccaggggcagcaggctgacccacctgggcccaaaagccacctgtgtttgggggccggcatgctgtctagagagagtgccctgggaaaggggcacacgggagtttctctcctgagaagcccccatgcaggtcggggcaaaggagagggctttatctgccttgagggcagcgctccctaagtgaagcaggcctaccccagaagcacagggacttggctggcgcctgaacttcctgtgcgaagcagcacctgctcttggagccccttagcctgctggtgcacacctggtttccaagtcctgcctggggacttgctaggtgggggacggacctggaacaggaccctaagcccaccccctccgcatacctggcggtccagggctccccgcccagtggagccagcacaggctagccaggccccactcctgcgtcacccccggaggccaagctcctctcctgcactggtgccgtcctgcctggcaggtagttctgggggcagggtcaaaggagaagggagggccgcagccctctgggaatggcctttctgagccaccagtggctggactggggctctggcaggagttggggacattaacaacacccccatcctcccctgggctccacctcatctgacgctccagaaccccctgccccaagcccctacacactctgttctattcctcagcccctctcaacgtcctggcaccatggggcccaatgcctgtcctcccttgagaaggaacagctctggggcaacgggcagcggggtgccctccctgccaccaagatttggtgcctggagctggtggagg

SEQ ID NO: 18934 - DNA, 1126 bp, Artificial sequence
  DNA replication origin
tcccccacttcccgggagactcggagcgcatcgagtgtgcgcgcggcgcgtgcgtggcgtcccggaaccgccgagcgctgagggactcgcggacgcgcgcgctgctcttctacggcacagacttccgcgcgtcggccgccccgctgccgcgcctggcgcaccagagctgggcgctcctccacgaggagtcgcccctcaacaacttcttgctgagccacggcccgggcatccgcctcttcaatcttacctccaccttcagtcgccactcggattacccgctgtcgctgcagtggctgcccgggaccgcctatctgcgccgcccggtgcctccgcccatggaacgcgcggagtggcgccgccgcggctacgcgccgctgctctatctgcagtcacactgcgacgtgccagcggaccgggaccgctacgtgcgcgagctcatgcgccacatcccggtgagtgagggcgggccggagggaaggaaaaggagagggcgggttgaggccaggactccaggtgtccaggactccaggtgtccaggactccaggtgtccaggcctccagggccgcaccctcatgacagccttactgtacccggtctaggtagactcctacgggaaatgcctgcagaatcgggagctgcctaccgcgcggctacaggacacagccacggccaccaccgaggatccagagctcttggctttcttgtcccgctataagttccacttggccctggaaaatgccatctgtaacgactacatgacagaaaaactgtggcgtcccatgcacctgggcgctgtgcccgtgtaccgcggttctccctctgtgagggactggatgccgaacaatcactccgtcatcctgattgatgattttgagtctcctcagaagctggcagagtttattgactttctggacaagaatgatgaggagtatatgaaatacctggcatacaagcaacctgggggcatcaccaaccaatttcttctggatagtctgaagcatcgggagtggggagtgaatgatcctttgctgcctaactacctcaacggcttcgagtgtttcgtctgtgactacgaactggctcggctggatgccgagaaagcccacgcggcctctcccggggaca

SEQ ID NO: 18935 - DNA, 787 bp, Artificial sequence
  DNA replication origin
ttgggccccgctgactgtttgcgccatccccgccagttctggcagaggctctcggcctcggagatgaaggaacagagtgaatcctcctcaaaacggtccgaatcctcgaatgagaagcgctctccgtcctcccactctgcaaacatcagctccatggggcccgcaccccccggggccgggtccccccccgcggatccggggcctgggccgccggccgggggttgaggggaggcccggggcctgaggggcgagccggggctgggggtggccggggcgctcagggcggccgtgccgggcgagaatctcaggcctgggaaagagacgggaccgggcctcgcccaacagcgcggtgcaagcggtgatcttggccagtctccgagacttagggccgggacgaagcgctcggcggctggggcctctaggcggctgcggagccgcctcccccatcagctgatctggacttccggccgcgcgggccaccaccacttccgccctcgcgcgctcgggatccggatcgggtacgggcggatgtaggggacatttttatttaatggctgcatttgctttttttccctcgagcccaccctcagacatcataagaggaagccaactcccaacgttatacgaagcaactacagatcccagcaacaactcggagtccataatgtccccaaggcataaacagccgccatgcatgttgggaattgtaggctgtcaggagaggacagcaactattggatggagttattgtcttaactctggataggccccagggccgcaccacctt

SEQ ID NO: 18936 - DNA, 630 bp, Artificial sequence
  DNA replication origin
gtagccacccaggtctgacggctcgtggataccttgttcttcttgccctagaaagggaagaaacacaggagacaggcagatgattctgacttaccttggtggaggtagaaggatgctctcacttggggtggggcatgggagcaggttgggggtaagtgggggaggggaaggtagaggaagggggtctctcaccttggcagggggcggctctaccttgaggtcgggtgggttggctagcagatcctgggcaagctccacagtgagacgggaggcctcactgctatagccatgcgcatgcagggcctcagcacaggcaaacagtacctggaaggaggacatgggaccagacaggttaaagtcccaacttccaggagcaggacatcatgctcactcatgcagccaacattccttgaacacttgctacatgccaggccctgtgccgctccataggagctctggttagaaagacagacacataaacacacatgccaccgtgatgccagctattacagggaaaggtcaaggggaagcaggtgggatatcttggggcacagggacagtatcagagagactccctagaggaagtgatctttaagatccctgagacctgaaggagaaacacgggctaat

SEQ ID NO: 18937 - DNA, 618 bp, Artificial sequence
  DNA replication origin
ggtctgggataaggaaggtggggagagcaggtggggggggggcaatggtcctagggaggggaggtgttacccagctttgctgccagccccagcaaccatttgacatcatcagtgtaggggggggagcgggagaagttgttggggtgatcgttgtgtgcccggcgacccagcatctccagtgccagcattcctgggagatagataagggtgggcacatggtacggtgtatcctcttcaccctttaccccaacctgtcacctgaccccacagtaaacaaatgaagagctagaggaagggtcctctgaagagccactggcacaactgcaggtaggagcacagaaagggatgtcctctcaccgacacggtaggcagcatgcaggtggtgcaggctgtggggattgactggctgactgtgtgtctcctcctcgggcggtggaaaacctccgctcaccagagggctgggctgtgtggtcagggcaggcagtgaggcaccttggatggctggaaacgtggatgctggatggacactgctcactaagtggggtgagagccatgtgaggaactcagagcccaaagagagacaaagaacattccctccccacctcccctgcccagtgt

SEQ ID NO: 18938 - DNA, 996 bp, Artificial sequence
  DNA replication origin
tttgcaccaccacaccctactaatttttaattttttttagagatgggggtcttgttacgttgcccaggctggtcttgaactcctggggtcagacagacaatcctccggcctcagcctcctgagtctgttctttttcttaaatcgactgcttctgtaagctttattgtcactatccccactcagcctccttgtaaggctggcaatccctctctaccacccacccccaaacacacatctcaggggtgataaggcagagctgaggtccttcagaattgacagagatgatttaaaaacagttcaggacaggcgtggtgcctcacgcctgtaattccagcactgtgaaaggccgaagcgggtgatcacttgaggtcaggagttcgagaccagcctggccaacatggtgaagccccgtctctactaaaaatacaaaaattagatgggcatggtggtgggcgcctgtagtcccagctactcaggaggctgaggcaggagaatcacttgaacgtgggaggcggaaattgcagtgagctgagattgtgccactgtactccagcctgggtgacagagctagactccagctcaaaaaaaaataaaaataaaaataaaaataaaacagttcagctttggcctaggtaaaacgacacgagaagacagctgggggagaggatcaaaatggtgacgggaaggggtgaatgctaagaatgtgatgcaactttagagaaaacattgtagtgaggaggtcactgacgggaagttgatactcagggtgtatcatcccgtatttgagaaattacaacttgccagccattcttctaagagcttcacatatatttaatcttcacaccagccctaagaggtagggaaaaggtacatgctccattatccccatttcacatatgagtaactcagagaagcttagaaccttgcccaggatcacacagctcagttggtgggagggctgggattcgacgtcaggcctgtcaagctccagagccg

SEQ ID NO: 18939 - DNA, 1902 bp, Artificial sequence
  DNA replication origin
tggtttaaagcagactagcaaggataggaagattccctgggaaagggggaaccaggtgccaagaattcccatagtgactgcggggagaaagaggccagtctgttcagaggctggagacacttaccttgacaccgccatccgacttcttgttcaataggcttttggcagctgtgaaaacaaagaggaatatcaagtctcctgcattgtaccctctccccaacctgaagtccggcagccagatccacaagagagtgctgtgtctgacaagggggccaagggtctcccgaaacccccaaaagaggcacttcctatagcctctcagcaagaaggggatcttgagtggcgtcagagccctcagggtggcacctcaggatctcctctgcgtggaggagggcatggatgcacgacacttagaggagaaaccatgctcagtactggagccgcctggggcactggggactctgcctttgacagcttccacccaggcctggaagcagagtgccagggtgaaagagtgagggctccatccctaggtgccatggaagttctctggatggccaaactgcaaggatgcaagacatctcctgagtgttctcaagaagcagagtgtcacagttcacacaggagaccagaggacagacagacacagacacagaaaccaggaccacctacaggagggttttgccagggggttgaagccttcactgagcaggtcctcaccaggttcactgggtcctagctgccaccctttccccagtgtccactctctggacctgtgagcaggaaggactcggcagaataatgagctgtcaaacagattctagccaggcatagggtgacgctccaggctgatgagctctgtgccagaaggctggtgacaccagctggccacaaaaggccacaggaaggtagcagacagtggggaggagagtctgggaggcacagggagatggaatcagcccaactgtctgatacacctggactgcctgccctgggtctgtatcttggttccaccacttgccagctgtgtgacctttggtgagttacttaacctctctgagcctcaatttctttatctataaaatgggataaagtagggctgacatcacaaaacagtggtgggaatccagtgggattatgcatgaaaagcacttagagtgcctggcatatagcaagtactgagtaagtgtccaccatcgttgtcactattgctgccaccctcctgccctttgggtagccattcctccccaagctgtgttccatctctctccagtgagaacaggggtccttccattacgagaattctgactccagaaaaagacctttgatcttatcttgtcgtgctgggtttgaatgttgttttttaaatgtgctgactcctgtgcctgaccgcctactgtctaagtgctttccattcaccagccagctctcaacgctggttgcccactaggatcacctgggagcttaaaaaaagcgtactacctatcttatccctaagggtctgattttattgtctggggtggggtcctggcattaggacttcttacgagctcccaggtaacagctgtactgcacaggcagggctgagagccttcgacagggtgatcttaagcaccaccatgttatttatcatccccattggagaggtgaggaattaaggctgggagagctggtgtgactcgctcagggtgtggcagggctaggatgtgaacccagaaacagctggctctgaggcttctgcactctggagcctttcagacctggaggccagcaagcgccagacttcacaattttgaggagcgcggctcctctgtggggtcttaaacagtgctgcggaaatctagtcctagcaccgggcagctcagggcaatgcccagcactgtctctgagggcccactgttg

SEQ ID NO: 18940 - DNA, 1228 bp, Artificial sequence
  DNA replication origin
ccaggctactgccccctgaaagttggcaagcgcccagcatgcatggctggttagggggctccataacaacgatgcgcttgcagatgccaagttaggtagtctgtctggcatgcccatctcagcccgcaagcatgggactcgcctccctggtgagtgggcccggcatgctggccctcctggtggggtggcagggggccgaggcaggcggtcggggaggactcatgccacgtaccttgcccggccaggccggcggcgctcgcggcaggcgaggcgggggcggagctctgcctgccaactgaggggatacagtctctcagtgcacagagccccgcaaagccacggggccgtcagcagcgagcatgccccagcgcgaggcgcagcccaggcggcgtggccaagccagccgagctgggggagcggagcgccaggggcaggctgaggaggtaggcgcagccagccctgcagcagtctgggggcctgggaagaccgggctgggccagggcatagggaacactgcgtccccaccagatggagagggctgcagtgcctgtctcatgaccccctccggaggagggtccacagcgaaatgcctgagccggtgagaggcaggtgccccttctgaggtagcccggccctagcttaaggctgtgatgaaacgccctcccttctagtccttccctccctagaagctaaatgagcccacgatgagagtgccgggggcgcagagcagccctctcccctctctacatcccacacactagagggactggcgtgggggtcccagggagggtctgtggcccttgtgcagctaagtttactggtgggccccagctccatgccccccaacccctcagagacacaggtccctgtcttaagggaggtagccgagagaggcagcattctcagtctgtgtgtcacagtgtgctgaggtgaaaggtgcccaagaaataaaccctgagaaagaaaacaaaggctgctgaagcaatacactctggaggccccgattcgctgttagccaaactgctagagtccaggataagccacatctcctattggaggtcaactcaaaaaacagccctagagaaacacacaggtgcccttccttcttgattgcatccatagacacctctttctgcagaagcttccggacagactctgtcctcacctgtcccagagtcagggcagaagaggccatcctggaatgcttgcaacattgtttgtctcctct

SEQ ID NO: 18941 - DNA, 850 bp, Artificial sequence
  DNA replication origin
ccgccagtccccccccccgcccggcccccggcccgcccccggggaggggcctcccgccgccggccccgccccgccccggagccgccctcgctgggccaggcgcgcggggcagccgaggggagggggtccccgctccgggccacctgtctgggcagacggagctggaaggttcgcgacttatgggcttgtcccggggcggaccccgcgcgggctcgggaacgtgcatgcgagggtgcatgtgttaggagtgtaggagtctggaccactgacctctctggacgggtcctacacgcgggtcccgagcccccaaccgggctcctagcacgtggggagagagccaaggtcaaggagcctgtgccaggctgcacgcccgggaggcgcccccagcctgcgcagagccagctgccagccgccttccctctgggagctgacagtctagacttgcgcaagcaccagggccattattagaaagaaacccttcaggcgcgggttgatcagggagaccaggccaggggcaaggatacaggtaggactctgccttcctgcaccataactgcagagatgaaagagtattctctatccggccagaaatgaaaggggtgaagtaggaagacttgaaaaggctttgtgcagtgggggctagaagagaaagtggaagaaaggggaaatccccattttcttgcaaggcaccctcgtacttttattttctggcacctaccacattttgtagtgatgcattgactggtataaggggcagtagagctatctcatagctgtctaagcgtgaacttgcatcaaactgcctggattggatttctaggcaactcactgatcagctctgtgacctggg

SEQ ID NO: 18942 - DNA, 1304 bp, Artificial sequence
  DNA replication origin
ctctgcaaaggaaggagaagtcagggcaagaggcggaggaacgggaaggcaggccaggcgggcgactgcagcgcaggggagatgcccgcggtgaccaggctccccagctgtctctctcctctctgggctccggactccgggcagcctggatcggcacccgcgggggacgcccgggacggggcgccttgactccgtgcagccgccggggagcccagggagcccgggcagcccagggcgggggaggcagacgctcgggagctggggccgccgcgcatccggcccggggatctcaggaccgcggcactcaccggtggctgcggcaggagggcgcgagccggcgctgcggggacaggtggaccctggcccgggctccggggctgcggtctccgcactgtgctgcgacccgcggcgcctgctctatatcagggcccgccccggcgccgcccctccctctcccgcccggctccctcccctgtcttgcagcgctcagcgacccggaccccgcgtgcttccgcaacgctcacaaagatttgggggaagcgcgatctccagcggaggggacccaacagcgtctggactgaggaatcgagaggcttgtaaattctccgtgcttcctcccatgcacctggccgggggcctgccccagtgcaaggagtccccgaattgcagagaggagagaaggcgcacaggagactctctacctcgcccagctctgaagcctcctggggtcctctaatcagttcttctgcaacttctccccgctgggccccaacttgcctaagactgcctcagacccccttgcccgcagctgatggagctgtgaagtcttcatcaacgcgacaaatgtacgagacatactctcccagaagcacagacagaaaaacccctgcctgtaggggctccctctgtgcgtctgttcagtggcagtccccagatatcaccaacacaaccagtggatggaacaaagccgggcttattgctttcggcagtaagggggtttgtttgatggtgctatcagagggggaaaggcaaggccagattactgaaaatttgcagcttggtttaaagtccgtttttgacagggcttgataaggattgggttaggtgtcgtgatatgatgttacaggattgtgggaacaaagtcctagggcataaactgttggtgcttcctattgaagtgttaacgggtcttttgggaagtttccataatgagcaattcatttatttgtgcaggcaagaataaaagtaaagacaatggaaacatgtagacagttctaactgtggaggttctggagggtgtggaa

SEQ ID NO: 18943 - DNA, 2200 bp, Artificial sequence
  DNA replication origin
ggaggaagcacggagaatttacaagcctctcgattcctcagtccagacgctgttgggtcccctccgctggagatcgcgcttcccccaaatctttgtgagcgttgcggaagcacgcggggtccgggtcgctgagcgctgcaagacaggggagggagccgggcgggagagggaggggcggcgccggggcgggccctgatatagagcaggcgccgcgggtcgcagcacagtgcggagaccgcagccccggagcccgggccagggtccacctgtccccgcagcgccggctcgcgccctcctgccgcagccaccggtgagtgccgcggtcctgagatccccgggccggatgcgcggcggccccagctcccgagcgtctgcctcccccgccctgggctgcccgggctccctgggctccccggcggctgcacggagtcaaggcgccccgtcccgggcgtcccccgcgggtgccgatccaggctgcccggagtccggagcccagagaggagagagacagctggggagcctggtcaccgcgggcatctcccctgcgctgcagtcgcccgcctggcctgccttcccgttcctccgcctcttgccctgacttctccttcctttgcagagccgccgtctagcgccccgacctcgccaccatgagagccctgctggcgcgcctgcttctctgcgtcctggtcgtgagcgactccaaagtgagtgcgctcttgctttgactgatgctgcccaaggacctctgatcagcaccaggggagaggaggggctgctcagggagctggggtcctccggattccatccacagcagggccagactctccccaggaaatgggacagggtggcagcggaggcttgagaaccacgggggttggcactggctggcaagggaggaagaggccgccgggactgccccagcctgcgggcatctggtagatgaagcttgcttgggtcaatccatttctcctggctggaaacccatggtcttccatttgagaactagatacgaacagggtgaggcgagagggagagggaagagtgggttttgggattggggccagtttaccctcaccctggagtccctggagcatgggacctttgatgaagcctcctcccgaatctcttccagggcagcaatgaacttcatcaagttccatgtgagtatccacccctacaacagttggctgcacagacaagttgggaaggcttcaggggacatcccctccctgccctctgctgcagggctgcgccaccccttaccacttccactccccctcgcttaccccacctttgttctctccagcgaactgtgactgtctaaatggaggaacatgtgtgtccaacaagtacttctccaacattcactggtgcaactgcccaaagaaattcggagggcagcactgtgaaataggtatggggatctccactgcaactgggagagaaatttggggacagggagggatgggtgggaggcaagagcaggcaggagttaggagctggaggtagggtgggtgacatcttcatccctatgtgacaagcataaacacacacacacgctcacgaaacagtggccacacaaatgtgaggtggggttggaaggagaccctgtccagtcttctggcaggtctgaaacgacatctttaaaatgtccgttggcagccgggcatggtggctcacgcttgtaatcccagcattttgagaggtcaaggtgagtggatcatttgaggtcaggagttcaagaccagcctggacaacatggtgtaaccctgcctctactaaaaatgcaaaaatcagcctggcatggtagtggatgcctgtagtcccagctacttgggaggctgaggcaggagaattgcttgaacctgggaggcagagatctcagtgagctgagatcacaccactgcactccaactgggcgacagagcaagactccatctcaaaaaaaaaaaataaaagttagttggaatgttcttctctttctcatattctctcatcctcctgtccccttgtagataagtcaaaaacctgctatgaggggaatggtcacttttaccgaggaaaggccagcactgacaccatgggccggccctgcctgccctggaactctgccactgtccttcagcaaacgtaccatgcccacagatctgatgctcttcagctgggcctggggaaacataattactgcaggtgaggtggg

SEQ ID NO: 18944 - DNA, 837 bp, Artificial sequence
  DNA replication origin
gaaggctacacacccagctgttaaacagaatgtctttgaggagggcagggggcggagtctgcgtttacgtgaatgggacgctgctgtttctcagtgcacctctgctgtttgaatcttttactaaaaaccttcccatgcattgctgggagggaatggaaggagtattttgagggtttcgtgtgaagggaaaagttgaggaggggacgtgggagaccccttggtctcatcaaactctagcgccgcttgaggtgaggagaccccgccccgctgaggtgattctgcagaggggcggagccccccagatccgaggcgggaggcggcccgggggcgggaccagccggctccagcggcccgctccgctcccaccatgcccttataaggagcgcccggcgttagggctcgggaatccggtagcaatcccggcggctcagccccaatcccaggcccctcccttaggaatgggggaggggcggggtttggcggcgcggtggctggggcggagcatctcgaaaagggaccagtaggagtggcggcccaggtctgagctgcgctgccattgggcgcggcgacgagagggggcggggagcccgtgaggctggttacgccgagggaagccccgactccgtagtcgctgcacagtctgtctcttcgccggttcccggccccgtggatcctacttctctgtcgcccgcggttcgccgccccgctcgccgccgcgatgccagtgtttcatacgcgcacgatcgagagcatcctggagccggtggcacagcagatctcccacctggtgataatgcacgaggagggcgaggtggacggcaaagccattcctgacct

SEQ ID NO: 18945 - DNA, 1624 bp, Artificial sequence
  DNA replication origin
ggcatggaagcccataaataacttttctctaaatagcctaaccagatatcaacccctagactacactagctctgttccaagtgcaacatgtggttttaagatttcatttcctgaagtactacatggagagacactattaccttgtctctttacattgtttcctatttgttgaaaaatggaggcctggaatgcagccatgttagacaacactacataagaatgtactctggagtgttctgttcaaattagttataaaaagaagaacaatgtacaagtagacattgtgaatgaatacagcattcttactgaatgaatagattcttactaaagctatagagaagaaagatcaggaatttggtcggtggtgtcaccctgtcttcctagctaccagtctcctaaattgcttgagacagtccagggacccctgaagactgaggaagactttcagctgctaaagagcctctaagtgcactaaagtgctcaaatcagaaaagtaacccaagccccacccagacagacccacagttgccgcccaactgccctgacacacactatttacacagctcagtgggggagcagtatgaactttttccaaaattgttcctcacaagcaggaccagtctgagtcacccacccagggtgggaaagaaaagtgtgacattagccaggggagtcttgggagactggtctcagcacctcttttttcccatttcagacgtgggctccacctcctccaggaatcacctcggttatgagtcacagctgtgggttacaggggtctgcagagccaccaggaaagttgtggatggggagcggatgccccagccttctctccggcaggggcggcagatcccagattccacaggcctctcccaacagctccatcttgcttcctgccaggaggaggggccaaggagggcccccgagtctagaaaggccccagtgggaggaggccgtttgacagcaggtaacgccaggtgaaaatgtccacaggagggaatgaaaggaagggcagcagggctgagcggaaggaaaaaccgggcttgtggtcacgaatgactgcataaaggtgtgagagtgccagaggagtgagcataagtaaaatgcccaggagggaggaggaggcgacagagagtgaggcaagtgaataaaagggcggaatacagggagctctggggagcgggggtgggcgaggcgggtctcagggtgaggggcagaagtattagaaaggaggacaacgtggctcaaataaggatccctagaagagaaggcaagggatccgtgggaaggcccgctctccctcccccgcacagccagatcgaggaggcctaaaaggcgctgagagcgaggaagtcaacgtgggggcgaagcctgcgcggggcagggaccctcggacatcccagcaactctcatttattgggtgtctgctgtgggccacacgccgcgcgaggcactccacgaataatacctcgccatatcttcacgacaagcccgcaaggcagcctttttcatgactgctcccattttatagatgaggacactgaggcccggagaggctcaggactcgctcaaggtcacagggcggagaagaggccattcgaaccctcggcgcctggctccggaa

SEQ ID NO: 18946 - DNA, 1162 bp, Artificial sequence
  DNA replication origin
gccctttgttgctgcagcctgggtctccccgctgccttcctcagcctccgcctcgtcctttgccagccgcccgggtccgcagcgccgcgctccccccgcccgggacccaccgccgccgcctccttctcctcctccgcctcctcctcctcggctccgggctgcagcgcacagagcccgaggcagcgccgcccagccccgctccccccgcgccgcccgccagcccgcccggcctggccgggggcgcagcccggaccccgcccgccccagtctccgccccgggggtacctgcctccgccccggggggctcctctcgccgccctcgggggagggcggagacgctggtgtccgcgggaggatggggacgcctgggccgtttggggcggggagtgtgcccgccagggctgggactgaggtgcggtcctcgccaacgcgtccccactcccgtcgctgtgggccccaaacttcgtccttcgcccaggctttgcgccttcgggcgatcgcggcagttttggggtgggggacgcctcgggagctgtgtctaccctgatcgggaggaagagggagcagtgacattcagcgactgcggacagggcacggcggcggcatccttgtgtgggagtggggatgtcagacgcgggctggagggggaagctgccccccaggatgctctctccctgcctgcgaggagctggcgagctcagccgcgttctgggtgctttcttgggcggtgcaggcggatggcagaggggctgaggcgggaggggggcggggaagaccgctggggggcccttccccccctctcttttagccagcgctgtaaggaaggctgatggcgaagttcggttttccaggcttcccctgggccccccgagttcctgaggcccacttgagggagactgggggctcctctggccgcccaggcgaggccactctgacgctgcccacatgcctcccagagctctctggactctgaagagagcgcccctggttctttccggaggtgaatgggatgctggcaagggagacttcagaaaataggaaaggtgggctgagaaatggctcctagagagtttgagcacgaagtttccctcccaggcgccatttctttgagagggggaggagaactatggctttgcaaaagaaccaagtttcaggcatggtg

SEQ ID NO: 18947 - DNA, 1045 bp, Artificial sequence
  DNA replication origin
aggcagcggggagacccaggctgcagcaacaaagggcagcgagcgattggccgggctgcaggcgaggttagccggggacccgggtggccggaggcagcggcgagcggtgcacgtgcttgcagacacgggcgagtgtggagccggggggtgcacgcccggtgggtaggggcttgctcccccgaggcatgggatggcgaggaggctgcagcgacatcgttctgcctgcacccggcctggggctggcagggtaggggtgtgttggggggggaaggatgcgagccagggggcgggcgagtagtcgcccgggacgggacgggacgggagagagggtggaggagggggcgggatggaacgctccgggcggcgcgcccgtccgcacactccaccgaaggagctggcgactgagaacctcgaattttaacttcgcgtgcccgcccgcgcgcgcccgcccgcgcccacccctaaatcctgcggccgccgccagcgatcagctctcacacaaactttagctgcgggctagggggtttggggttgagtgggggaggggagagggaaaaggcctcctgattggcgtcgtctgcagccaataaggctacgctcctctgctgcgagtagacccaatcctttcctagaggtggagggggcgggtaggtggaagtagaggtggcgcggtatctaggagagagaaaaagggctggaccaataggtgcccggaagaggcggacccagcggtctgttgattggtattggcagtggaccctcccccggggtggtgccggagggggggatgatgggtcgaggggtgtgtttatgtggaagcgagatgaccggcaggaacctgccccaatgggctgcagagtggttagtgagtgggtgacagacagacccgtaggccaacgggtggccttaagtgtctttggtctcctccaatggagcagcggcggggcgggaccgcgactcgggtttaatgagactccattgggctgtaatcagtgtcatgtcggattcatgtcaacgacaacaacagggggacacaaaatggcgg

SEQ ID NO: 18948 - DNA, 1884 bp, Artificial sequence
  DNA replication origin
cgggaccgcgactcgggtttaatgagactccattgggctgtaatcagtgtcatgtcggattcatgtcaacgacaacaacagggggacacaaaatggcggcggcttagctcctacccctggcggcggcggcagcggtggcggaggcgacggcacctcctccaggcggcagccgcagtttctcaggcagcggcagcgcccccggcaggcgcggtggcggtggcgcgcagccaggtctgtcacccaccccgcgcgttcccagggggaggagactgggcgggaggggggaacagacggggggggattcaggggcttgcgacgcccctcccacaggcctctgcgcgagggtcaccgcggggccgctcggggtcaggctgcccctgagcgtgacggtagggggcgggggaaaggggaggagggacaggccccgcccctcggcagggctctagggcaagggggcggggctcgagggcggaggggggcggggcgggatcgggtgggggcggggttcggggagtcggaaggcgggggctgagagggaatttctgagtgggagtgaactggtaggagcggtggggggccggcgagggtgtgaggaagactagtgagggttgggtgggaggagaagctgaaggtgtagaagcaggtgcagagggagagttagggagggatgcaatttgagagaagtggaaggcggaccgaggggtgtgtgagggcaggtgagatgataccgaaggcgagattgcagttgtctgggcgcagagtaggtgggtttgggtgtggtggatgtggagtagagttgaagcggtgcagagtgttgggtttggggaggcgttgaggggtttggggaggcattgaggcgcatgtgaggagcaggtacgattgcagtgatgggaaagaggtatctgggtggatcgcatgttggaataagaaggaggtttgctagctttggggtatgaagtattttttaaaaacgtggaaggatgggatggttgtgcttgggagagtttctgaaagatgatgctaagacagcagagcaaacttaaatatgaaggaaggggagagaggctgcttagaacttgcaaaatctgtggcagaaaatctcctggggacaagggattggtaggggtgggacaaggcggcaggtgtgaagaaagtgggtggagctgtacagtaattttcggtgaatgtgatttggtggactgtgccaggggtgaggatggggcagagaaaggtgttagtttgggagacaagttgtttgataggctgtatttattattttttataaaaatgagaaaagggtctcactatgttgcccaggctggtctcgaactcctggcctcaagtgatctgcccacctctgcctgactgatgggattacagacgtgagctatggcgacccgtgatacgctggattcattatgttaaacttgatctggagtcttcaagggagtgtccggcagcagggtatcccaggaagagacatgcaccataccttgggataggacattttgcatagctttgaatttgctagtactttgctgtgggcagagtgcagggagtggtaggagatgaccaggcaaaggcagaggaggggttagattacaaatggtgtcctatgccccatgaaggagtttaagccctgtaattggtagaaggtgttgggacgtgttaaagagagtgttagacagaagttgtgaaggggtagtgataaagaattacagatgtgggaaataggaaatgaagaccaacgaaccaagtatgtttggggttggaggtaccaaggaaattcagggtagagcatatgagggcccctcctatatggacagaaggtggaaatagcaaatggaaattagttgtgttcgaacagtcttagttctatggggc

SEQ ID NO: 18949 - DNA, 1245 bp, Artificial sequence
  DNA replication origin
ggtggcccctgagtttcccggacccggggcagggcgccgcgcgcccacagatttctctcccctgcgcccagggcgacggcgctggaccgctataggctgcagaaggcggggttcacgcacgtgctgaacgcggcccacggccgctggaacgtggacactgggcccgactactaccgcgacatggacatccagtaccacggcgtggaggccgacgacctgcccaccttcgacctcagtgtcttcttctacccggcggcagccttcatcgacagagcgctaagcgacgaccacagtaagagacccgcggccccgccccgatcggccccgccccgccccgccccgactcgccccgcccgtagcttaggccccgccccttccccgccccactaaggctccgcccctagcctaggctccgcccttagcccaaggtttccccgtctgaggcccaggccggaagcgggatgtgcgcgtgcgaaatctttgtcgcaaagctgggccactggggctgcttgtggccgagggtaaaggtccgagcccctggaagctgtgaaggtttaaggacctgcaccacccagcgtgctgctggtggggttcgggccttgattgcagctctggggaatggaaatagggcgtaagaataaaaggccttttggtcggagtctttgctaaagaacatttgccatccttcaaaaggcggaggcggtctgggagctctcaaagctgggactgcggccggagacactaattgtgcctgggcctgaacccaactagtagccaagggctttgatgccagaaaaccctcagggagctgacttgagtgggaatccatggagagaccttaaattctcctgcccaccaaccaagttacactccccagttacactcagcctcgtgaggcctccagtagaaagctgacaagctgggctttactggcacgctgtatttgaggtataatttgggttttgcacccccagcgtccaagttttcccagtgttaattatccagcttttaaatcacagtgctagtctttgtgctcagaatgcactgttggctaccctaatccagcaaaggctacaaggctattttggagagaagggcacagcttagggacgcatcgggggtaagacaatatacagttattgctgcagggtgtacttcagtggaattccacagaggccagagggacttcagctccctaatctgtgctctgacttcagcccaatgtgtcacacacccctttgtgga

SEQ ID NO: 18950 - DNA, 1351 bp, Artificial sequence
  DNA replication origin
cctttaccctcggccacaagcagccccagtggcccagctttgcgacaaagatttcgcacgcgcacatcccgcttccggcctgggcctcagacggggaaaccttgggctaagggcggagcctaggctaggggcggagccttagtggggcggggaaggggcggggcctaagctacgggcggggcgagtcggggcggggcggggcggggccgatcggggcggggccgcgggtctcttactgtggtcgtcgcttagcgctctgtcgatgaaggctgccgccgggtagaagaagacactgaggtcgaaggtgggcaggtcgtcggcctccacgccgtggtactggatgtccatgtcgcggtagtagtcgggcccagtgtccacgttccagcggccgtgggccgcgttcagcacgtgcgtgaaccccgccttctgcagcctatagcggtccagcgccgtcgccctgggcgcaggggagagaaatctgtgggcgcgcggcgccctgccccgggtccgggaaactcaggggccacccacgctttccgctgtggattccagttccagaatgaggactagttattgcaaatgaagtcccaaagctctgctcttacccggtcccctaggccacctgcactgttttgtgattctggctcggctgtctcaagaaaggacagggtggaggctggggtaggcaagctgagctattcgttcgtccattagttctttcatcattcagtatacacagcggaacctggtgctggcctctacggtggtcgcagatctggacctgccaaatcgcctgaaagccctccagaataacctgttcatcagggctgccttctcccaacctctgctctgaacctgctggatgtttttagggtttggagatggacgctcaactgaatggtttaaagcaaggccttccataagaggattggattgggattgggcaaagttcacaaattcacgttggcacgatgtgaacgggaaagtgttgctttggggagctgttgcccagctgggcagagcattgttctgagaaggagggctttttgagccatctgttgtttgaattgattgcagggaagttcttgaagccagcagtgaagttatttaatgggctacagctttatctttctaggcaagaatttccaggaacagtaaagtcctcttgaagtaggtggctctgaaatatgactcgatgagaaggcagcatggtggggccggagtggagatgggctgccagaggaaacacgggttcttcctgcctgtggggtggggcagggagaggcctgtgtcactacaagtgtcaacatttggtgatggaggggaagaaggaggcaagcgcgggccaagc

SEQ ID NO: 18951 - DNA, 1366 bp, Artificial sequence
  DNA replication origin
ctgatcccacaggccccgccccggctccgctagccccgcttcctcctgtcgctttggcctccggcatgacgcatgcgccctcgggctcctccgcggcagcatctcggttctcctctcgggcccatctggagcctcgcgtcttttccagtgtgggccccgccccctgccggtagaaccccgtccccggccggtagggccccgcctcccgaagcagttccggttcggctccgagcagctgccggcgcggcggtgacggcggccgggacgatgcctgcgcgcagtcgccaccgcccccgcctccactccggctccccgccccgggctccgcccccgccgcttgaggcgcttcactccggcgaggcggggagggccccggactccgacggcggctcggacgccgactcggaggtgggtccggggagcccgactcggaccgcggaggtgagcgggagctgaggctgaggagaggggagcttggggggcgcctgctgccaagggtgagtggggagtctgggatggagccgggggctgccgagggaccgcgacctggaggggccccggggagacggttgagggaaccgggatagtcagctctggaatggaatctgaagcaaatggaggttgtcgaactgagggcctgaaggctgagggataagtggaggccgaggaacgagagggagagagcgagagggggaggcttgaagagcccagagcttgggggcttttgaaagctgcgcagtgggggaaaaagatcgaaggtcctgcgggaatgtggacccggaagaagagatgctctgggtttggcagcggggatgaggagtcagaggagcaagacctgggccggtgttcccttcccagggcgagggagggcgatcggggctgggactggagccctctcatggggttctcctcttacggagccctcttatccgcctcccaccccgggtggggctggtggtgatggagggcaggatttaggtttgactagaaggaggagggctgttggatgggaaatcgtctggcctcaaggggtgagggaggcactgaaaaagagaagtgtggtcaagaaagaaaaggagcccttggggatctaattttgggctttggcatttttacaggtgccttttaaaacatcaaagatcactagggcaatgtacttggatcgtggggctttctcgttcgtgcacagtggatcattttaagaatcttgggtggaaggggcggtgtgaatcactgatttgcctaaaggactgggggaagtagtggagaggaagtgatgtttgaagaaggtagtggaagacgtgattctgaaaatgaagatatcatttggatttattgacagtaatggtgtcctttttttcattgt

SEQ ID NO: 18952 - DNA, 1263 bp, Artificial sequence
  DNA replication origin
cctaggcccctgggtcggcgtgaggcgggcgcggcggtacctggtggtgtcctgaggggggccgccgccaccgctccgctagctgctgaagccgcttggcacgctcgcggtcgggctgcagctccagcagctggagggcgaagtgaaggagacaccgttccgcccgccgcaaccctgtcctctcccagacaggaccccgccgctgcccccggggctgtccgccgcgcctgtccctgcagcgcagcccgctgccaactccaacctgctccagagcggccacgtggaccgacagcgccccggtcctgcaggtgggctgcctccgtccgtcggtggggatccggaaggcagaagctgctgggccttggatcaggcagctatccgggcagcctcagaggcgagggggcggggaacggcggaggcagcgcgctggggaccgcctgggagggggatggggcggaggccccgcgcgaacgcgtcacggacggggcggggcgtcggcgcgtggccggggcgatagggcgcggctgcgcaccagggtcacgtagatctctcctactccccttacgcgctggtgcgggttcccccccgaaacaaagccctgcatagggtgcctgcggggagtcagctgagcgttacccacgtccatcctaagctagcgcagcctgcgcttctgagggaccgcttctctttcccagcccagggagaacgagtgggacacaggggcgccacctccagcccctcgcgctcttctgccctcttttcccaccttggtgtgactgccttgctgtgctgggttgtgtgcctgagaggctttttgggactgcctctccctgaacaaatgtgagcgggtcctagcgtgccccacccatttccacgccgccttacgctttctcttccgcggctcctccccactcaggcatggcactgcttcacacacgcacggagccggagcttggcgaggcaagcctgctccgggcccaacctcctctggattatgggcctggagaaaatgtggaatcatgctgagcaggcgttagaatgccgcacccgagttccccgggtgtgcaggaagggtgacagagctattagataaaatgtatatgggagaccgttagtttagactgacctcctgcattaggcccatcagaccaaaccaaaatggggttactcatgctgaagtttcacactaccacgccaaagctaggatctttatctgaccttccaagaaatcaggagagaaacagatgctagccagatccccaa

SEQ ID NO: 18953 - DNA, 1371 bp, Artificial sequence
  DNA replication origin
gttccccgccccctcgcctctgaggctgcccggatagctgcctgatccaaggcccagcagcttctgccttccggatccccaccgacggacggaggcagcccacctgcaggaccggggcgctgtcggtccacgtggccgctctggagcaggttggagttggcagcgggctgcgctgcagggacaggcgcggcggacagccccgggggcagcggcggggtcctgtctgggagaggacagggttgcggcgggcggaacggtgtctccttcacttcgccctccagctgctggagctgcagcccgaccgcgagcgtgccaagcggcttcagcagctagcggagcggtggcggcggcccccctcaggacaccaccaggtaccgccgcgcccgcctcacgccgacccaggggcctaggccgcggcggccaagccggaggcccgcgccggactcggagtcggccctggcttcctaagatggccgcgctgccccgcggcccctcgcccctctctgcccgggatctccctttggccctttgaccccagcttaccgcacttcttgtccctcccgcagattcccctcttcccgcggcctcgccatggcgacccacggacagacttgcgcgcgtcgtaagtaaagctgggatctctgcgggatggggcggcggagagtcgaagcctgtcgaccagaaacccagtttgtttccccctatctttccaagaacttggaaattcggctgcttttggtggtcgccccaccgtctgaccacctcctctgcggaggaggggctgggctgctggatttcaaatggggaacaaggcccggggagttggtctgtggccgcatggacttttcagcctttgtacatgtctttgacgtatagaagtaaaaagttgttaattggggattctgcctttggaggatcggatcaatcacttttctagaggaagtagcagtccctcttgtgagagcgcaaggtcattacttgtgctcctaagggcgtggacgtgctttgtggaatgaatgagctggtgtaatgagctcagattgcctgcccttaagcagcacagcattggccgaggacttgagagtcacattagtaagtttgaagcgctatttgatatttagttgatgtagacatttgagtgaaacacacatggcagtattttttccaagtttcaatatttaaattcccagtattaaattctcttcccactccagggtgttggttttcccctcagcgaagatattaaaggacgtatcagggtaaagggcctagtcttaggtttcggttttatctaatttagttaaatcagctcatctcagtgaattttggcagatacataaatatccatacacacaaatacttgtttgattc

SEQ ID NO: 18954 - DNA, 925 bp, Artificial sequence
  DNA replication origin
gccaggccagttaaaactttataacctgcctcctgccagctggaggttcctgcagttgggccacagacctggcgccagggaggggacgaatctcaaggcccctttcactgaaggcaggagctgtctgtgctgggccttccctcccttccccatccagcgccacacacggaggctcaggaggtcgtgtgtcccagccccactttattttcgaatttaaaactcagggtcaattcctggggttcccaggcaaccctccctcgagcccactcactaggggccagccctagatcttgaaggccaaggtgagtccatcgcccaggggcaggaggctgatgtagaccctgacgtcccgccggatgcgttcgtttaggtttcgcacacactcggccgccacgtcccctttcggaggttgcagcaccttcccgcgccacaggacctgcgggagggcggggccaaccgggccgtgggaggcggggcttcggagggaggtgctcgggcggaaggcgggggactgggagggaggtgcccgggcgggaggcggggtcttggagggaggtgcccagacggaaggcggggtctcggagggaggtgtctgggcgggaggcggggcctcggagggaggtgcccgggcaggaggtgaccagagctggagacagaaccaaagcggaggaaagcctgggtaccggggccggagccccggagggggtgtagcctacgtgactggactgggtggggctttggggtataagaggagtcaagggaaaagatggggacccggcccgacagggtgctttctcctcccccgcagtggatcccttactctgaggacggcgaggatgcctccgggtcgcagcagctgcaggcagcgctcgtagtaggcggagcagttctccttgtccgcatccaccacggccacgtcgaaggt

SEQ ID NO: 18955 - DNA, 1472 bp, Artificial sequence
  DNA replication origin
gctcccgcatggagcggctcagaagatactgccacaggcggctgtcctcggggggaagcaggcactgctctcgccggcctcgccatggggggcaccgcctccctgacggggagagggtgttggattaacctgagccacgccgcgccctactctgcgcccgcccacccgcccgccgggaccaggtcctgctcacccaggaagaggccagtggcgaaggcggcgcccagtgcggctgagcccagggccagcgcggcgggcacggagagccggggcaccggctgggtcatggcgcgggcaggaggcggcgggaggcagtgacaggtcacgtgagctggagctcctgggacaggtctcggactcgcgggcccgccgggctccaccttgtcggggcactacccgcggagccgcggtctcgggcatcatctggcggccacacagccttactgcaagccccgcccgagagagccgggcgcgatctggtggccgcgccgggaactgcgcccctgcggggagcaggccaagcgcctagatctgaattttcccgcctgtgcccgcagtccaggtgcctgcctccattcccctcctgccaatgcttttttctcctcgccaccatttattctgaggccccttgggggcatatgtgaattgtgtatggagggcgccagtgtaagttacaagatagtcacaagtacaagagatagagattaaagggggaaggcctcctggacaagatgccccaaagcatcaggctgaaggagtgagggaactggtttgagggcatgcagcctcgaattggggttcaggagccctggggtgggcctgtggaactgagaccatattcttagctgttaaaatcctgcttttgggggccagatggatacgagtgtctaatcttggtcctgccagtctctctgagcctcagtttccttcctgtaaaatgaggcctacaatcttaccataaaaggcaccagatcccacagcttcgcacacagtagcacaatacataagtggcagctgctgttatgttggtaggttggaatgaagacatcttggggagaaagccggtgaagctcccttgcaaggttgttctgttgaaacactgtccagagaacactgattgaacccctaccatgcgccaaactccggaggaggtgaaagacgctgacgctgtcctttttttttttttttttgagactgagtctcgctctgtcacccaggctggagtgcagtggcacaatctggtctcactgcaacctccacctcctgattcaagcgattctcctgcctcagactctggagtagctgggactacaggcacgcacccctacacccaactaatttttgtattttttgtagagacgggttttgctattttggccaggctggtgtcagactcctggcctcaagtgatctgtttgcctcgtccttccaaagtgctgggattacaggcctgagccattgtgcctggcgtt

SEQ ID NO: 18956 - DNA, 816 bp, Artificial sequence
  DNA replication origin
acagaccagacatcagatctcagtcagataaatccagctgaaagaaaggggctgaggccagggctggcacaaagaaaaggatcccttgccaaagtcacacaggaagatactccaaaagaccctcgcccaaagaagagggcggacggggttcccctggagctccctttccctaagggcctggcgttgggctttcgatcctagttccacatgaggtttcatgtaaatgattgtattattattatttttttgcatgggtgaaaagtcacaaattattaacgctgaatttcaaagactgcagtcttctcactctggggtggcatctcttcactgttcaggcacgggcagcctcacagaacggacgtggcccagacctcacttgacctctgagaggccctgaaggcagtcgcccaagggcaggggcaggggacagggcggagggggaggacactgagcggagcggggaaggaagagagaggaggggtggggaaggagaggaggggcggcggggagcccggagagaaagaagggagaccccggagaggaagagggggaggcccgggagggcgcgcggagggggtgtcagcgaggggccgcctgtcagggttctatctgcgcgatgattgatgcgggcccgggtttttctgtcagcctgtcacggcgcaggaatgtttaatgttctcattattggttacgctgttgtgtatatttctctgtcagcaccgcggacccagctgaactggcagagcacttcaaaggcctacgggtcattcatcatccccatgacgctccggcaaatgctcagcttcagccccgcgc

SEQ ID NO: 18957 - DNA, 869 bp, Artificial sequence
  DNA replication origin
ggggtcagccccccgcctggccagccgccccgtccgggagggaggtgggggagtcagccctccacccggccagccgccccgtccgggaggtgaggggcgcctctgcccggccgcccctactgggaagtgaggagcccctctgcccagccagccgccccgtccgggagggaggtgggggtgtcagccccccgcccggccagccgccccgtccgggagggaggtggggggggtcagcccccctgcccggccagccgccccgtccgggaggtgaggggcacctctgcccggccacccctactgggaagtgaggagcccctctgcccggccagccgccccgtccaggagggaggttggggggtcagccccccgcccggccagccgccccgtctgggaggtgaggggcgcctctgcccggccgcccctactgggaagtgaggagcccctctgcccggccaccaccccgtctgggaggtgtgcccaacagctcattgagaacgggccaggatgacaatggcggctttgtggaatagaaaggcgggaaaggtggggaaaagattgagaattcggatggttgccatgtctgtgtagaaagaagtagacatgggagacttttcattttgttctgcactaagaaaaattcctctgccttgggatcctgttgatctgtgaccttacccccaacccggtgctctctgaaacatgtgctgtgtccactcagggttaaatggattaagggcggtgcaagatgtgctttattaaacagatgcttgaaggcagcatgctcgttaagagtcatcaccaatccctaatctcaagtaatcagggacacaaacactgcggaaggccgcagggtcctctgcctaggaaaa

SEQ ID NO: 18958 - DNA, 1632 bp, Artificial sequence
  DNA replication origin
gaatcacttgaacccgggaggcagaggttgcaatgagctgagatcaagccacagcactccagcctgggtgacagagcgagactctgtctcaaaaaaaataaaataaaacaaaaagaaaaaagaaaaaagaaaatccccattaaaaaataaaataataacaataacaccaaaaacctttttgaaaacccagctacgttcaccacaccctcctctagctggaacagcatctctggctcccaggcactgttctgctttaaaacttcatcaggcaagagcagccaaggtgagaatccctgcttatagccatctctcactagctgtgtacctcaagccactgtctttccgctgctgagcctcagtctcctcatctgaaaaacgaggtgaagattcttttaagttcaggggtacaagtgcaggtttgttacatgggtaaacttgtgtcatggaggtgtgttgtacagattatttcatcatccaggtattaagtctagtaatggggtgaagattctaatgacctcatggaactgttgtgaagtgtaagtgggatgatacaggatcccatgggctgggcatagcccgtgacagatgtgagcaggtcagcctgggttttccagtcactctaagcaccaccaggctgctagccacattcggtgaggaaccctaagccaatacgtgcagcagaggccagccgatgacctgacaggggataagtcccaccttctgggcaacttttacgagtcttctgtgtaagtactgtgtgctaaccgattgcgctgctggagctgcagccttatgagttttctaaatcacaagaagttcatcacctagtggggcttttttatctgcctttcctcactgcttaaagaccaagcccacatctttccttctcctgtctgctgtcggagcataagtgtgtgccacacgtgaccaggtgtggcagagtcagagcagggggtggcttctgtggaagtaggagtgaaagtgtggaaacaagtgagtgcgtgtgttgacaggcatctgcatttgtgttagttgtgcttactcagaggtccacaggcttgtggcagatttcagaagctggtccttcttcagcagctctctcggaggcacacctccctgatctgcatctatgcggagttacccagcacaaggacaccagggtcgctgtgtcaccaccagaggcacaggtagggggataagattggatggtgggggaaaggcctgggccttatccgccagccctgccactggcctccaggacttagcctcggtttctcaaactgtgtcagggacgagtaaatgggatgagcagcccttggcaaggagtgggcgctaggaaatcatcagtgaaggagggagtgaatgaatgcaggcctgtgtggcgactgcttcagcatggcagacaaggtgacgtatcagagccttgagggtgggagctccccaggttgggaagggacagacacgtgggccaatcctctggacaggaatagagaacgaggaggaaacaagcgcagaagctggagcgggtggagaagagcaggggagacggttcgcagcaggagaaaagaagcgaggagtcacagggaggggcctcctggacaccgctcccaaagccacgcgaaagtggaagcg

SEQ ID NO: 18959 - DNA, 1033 bp, Artificial sequence
  DNA replication origin
cggagagtttggggtgcgctctcagagctgtgactccacggtcccggaatccttggaaagggcgctctgggctcagagctcccaactagccggaggacctgggctagcgcccaggcctggagcgtctgggagggggcgctgggtctcggcccccctccccccaaaagggactgagacttttttctgcgtgcttccttcggcgcttcgggcagctctgtcctgcggcccaagctggggagaagacagcggcccgcgccacagggagctgcgcccggacccagactcccgccgcgcttctgcagagcggagccctaggtgcccacctggtagccccagaaaggccggacctgggcgccgggacgctcgcggggccgcacttggaggggctttccgggtcctggccgggcgggctctcctgcggcgcggaatggaatagagcgccggctgcagagccacccggacggggaaaagcagcggtggcgccggccagccccgggtcccgactctggagggaggaaggagcgggcgggtgggggtgggggtgagggcgagggttgcggggagcgtttagaaggccctgggcagccagaagaagaaaagaggacgcactctcccctagggaccagagggtccctgcgtactccccccaggcccgggacacaggttcccccagcgcccctccgcctcccagtctattcggcttgccccagcgcgctgccccacgtccccgaggccccggcccaggcccagccggcgagtcccggcctgctccactctgcacaaaacgaaacccaaatgcccaaaaagctcaggagggaaatttaacaaaaaccctgtcccccgccccacaccccctttcacttttaacaagccagctgccaagagaaaattgaaataaaaacgaaatgatagatagcggaggacactattttccaaatggtgaaatatcctctaaaaatatgttccccaaggccaacttcgcggctggtagccccttccgacgcctttgcctcccagaaaatcacaacaaagc

SEQ ID NO: 18960 - DNA, 1468 bp, Artificial sequence
  DNA replication origin
ctggacacgcagcggctcgcatcgcagagcgcagcgccggcgcggggccgcgagaacgcagcgcaggggagcagcccgaggcggacaccgcgagccgcccggcactcccgcagtccagccggctcctctagcccggccacggctccgctgcgggccacccaggattactcgcgtctggctccaggcgccgagaaggcgcgctgggcgcccgtggccgccgcgccagctcctcctcctcccgctgctcctgctcccggggcgagcgcgcagccccgagcccgccccgcgcctcccggagccctcccccccgctgctcccatgcgcgcgggtgggtcatgagcacagcgccctcgctttctgccctaagaagcagtaagcacagcggcggcggcggcggcggaggcggaggcggcggtgcagaccctgcctggaccagcgcgctctctggaaatagctccggccccggcccaggctcgtccccggccggcagcaccaagccttttgtgcacgccgtgcccccctctgaccccctgcgccaggccaaccgcctgccaatcaaggtgctgaagatgctgacggcacgaactggccacattttgcaccccgagtacctgcagcccctgccttccacgccggtcagccccatcgaggtaaggaccctctctctggatcgcactgggaccactaccctggctgccaccctagggctttctttttctcgggatctgggcggaggtgggggggtcggagtgattcagctcccgaatgggggaagaggctactgcttccgtacctcaaaactagggcggaaaagggggaggaagtggaatggggcgtgcatgctagggagcaaggctgccaatacttgtttctcctttcgatatgaaagcccctaccccgacccaggccccttcactcggcaccgaaggcaggcggaggtctgaaatacggttccaaagtcgccgtccttcgtatccgcagaagccagtgtgtgcacacagcctctgaggcgccagccgcccgagcccttactctgaagaattaaggagtgtttgtggggagggggtacagttctgggtctaggaaccgaaaaccaaaacattttgctctttaaaaatctagttagcgctcagagagggcaggaaagatgctgctgggggtggtggttgggcggggggagcaatctgctgcctttcccaacggcgagaatgtttgtgagtgggtgttgaagagggggtgccgcctagaattgcgccttggggctgggaggatcttcgtgggctgttgcggagaggcatttgaaccccagaagccaggattctaaagggtttccacttctttctctgtgtgacgctccccccccatcgtctgaccccgcagctcgatgccaagaagagcccgctggcgctgttggcgcaaacatgttcgcagatcgggaagcccgacccctcgccctcctccaaactct

SEQ ID NO: 18961 - DNA, 1507 bp, Artificial sequence
  DNA replication origin
tggcggcaggtgggagaaggtcggggagggggcatgagtgagcctgagatgtttcttcccccatacacccatggccaggcctcttcttcgcagcctcttagccctgcttacgacccgagggggtcaaagaattgaggcgaggtttgccccaccattgacctccaggactagaagttccttggtggtgtggctcttagaagtctccgagtttggggttagggaactacagagggtggcagcctgacctccgcacgcaacacgccccgcgaggactcgcggcggcggggtggggtggcgggaaatctcccgtgttagaagttgccgccgctggtctcgggtacccggagccgcgcccgaactccgcgaccccaacagaccgaggctcccagaggtggaagggcgtctctccgacaccgagagggcaggcgcacactccaggcctgcgcgcccctctcggcgccctgggcgcacctgcgcactttactctcgctattcattttcctgacaccgtgcgcctctttcattctttttcttagagcccccaccccacccccatcccaggaggccgctcctcttttcccctcctccagttccctctcaatctcctccttcctctccgtctctctctccctctctctttttcccttcaagtcgcacccgccttgtaatcagcaacaaaagctgacataaatcacgggaggattgacaagagctgacaaataactgattgattgcggtcgaggaacattgacaattgatggaggggtggagatgcccaaagaagggggggagggaggaaaacagggtgggagagtaagaatggggggttgggggacagactgagggtgaaacagaggaaacatgtgacccccgctgctgccccaatctacgcgtccccgggcgtcacgtggccgggaagggcggagagcccagcgctcctcgcggtgttgagccgccgccgctgcgactgcccatctagcttctggtttctccgccgcggaatctgaggaaattagagcgggcgggcgggcttcttccagctccggctccccaccttgccttcttaccctggtggctgcgctgcgccgcgcgggatctcgattactgcgaaggaaaaaacactgggtgtgcaggttcccttcgcccctggagttgacagtccggccggtgtccacactcccaccggtgctccttctggacaccccccgcagtctgttcctcacgcgcaccccccttcaaaagaaggtttcagtttattttcgagctggggaaaggaagaacgacgaggaggaaaaaagagggaggcggcggatggcaaacgtagaataaatgtccatctcgtcctcccagcgaaatcgagggaggggacacacaggggggcggcgaagagggagctgcccattaaaaccggcactgagagtcctggcagcggcggcggcggcggcgcgggacgcgtcacatccccttgaccctccaatcacctcgggctcccatttgattggaaggc

SEQ ID NO: 18962 - DNA, 1183 bp, Artificial sequence
  DNA replication origin
agttatttgtcagctcttgtcaatcctcccgtgatttatgtcagcttttgttgctgattacaaggcgggtgcgacttgaagggaaaaagagagagggagagagagacggagaggaaggaggagattgagagggaactggaggaggggaaaagaggagcggcctcctgggatgggggtggggtgggggctctaagaaaaagaatgaaagaggcgcacggtgtcaggaaaatgaatagcgagagtaaagtgcgcaggtgcgcccagggcgccgagaggggcgcgcaggcctggagtgtgcgcctgccctctcggtgtcggagagacgcccttccacctctgggagcctcggtctgttggggtcgcggagttcgggcgcggctccgggtacccgagaccagcggcggcaacttctaacacgggagatttcccgccaccccaccccgccgccgcgagtcctcgcggggcgtgttgcgtgcggaggtcaggctgccaccctctgtagttccctaaccccaaactcggagacttctaagagccacaccaccaaggaacttctagtcctggaggtcaatggtggggcaaacctcgcctcaattctttgaccccctcgggtcgtaagcagggctaagaggctgcgaagaagaggcctggccatgggtgtatgggggaagaaacatctcaggctcactcatgccccctccccgaccttctcccacctgccgccatccccgcaggctggggagccagggtaactcggggctgctctctcgaatttattggaacgccgagtcggaatgagctgcgctaggagagccgagggaaggagcgagagagggagggggcggctgcctgtgggaacgcgggttcttccagggaagcggagcgggactgccgcgttcccctcgatttgcaccgtcactcgggttgtttgggaagaaaaggggaggcgctgtgcgtgccaccgggtacctggacctggatgcccagtgtgtatgcatgcctgtggcgctgcgtgagttatcggggctctgatagcgtccggagcgggttcgagggtctcctccaggaactcgcagaaattagagggggtggggaggaggacacacccccttcctcggaacgacttagaagactttgaatctcccctcctccgcttttccgccccggctcttcttttgttgtc

SEQ ID NO: 18963 - DNA, 982 bp, Artificial sequence
  DNA replication origin
gctgggggttggaggctttaggcctggcgcagagtaattaatggcccccactcccgggcccgcgccggccttcgggggtttggcctcctgcgcgaggtgcgcaggctcggacgctggcgcctcccaaaagccccgggcgcgcaggcccccaggcgcccccatgcgctcggaccctcggagtggagttttgagaaaagcgaacgcacgctgaccacgacccgcacccacgcagcacagcgcagccccacgagcgtgtgtggccacaccgggggacgcaggagccactccacggcccccccaggcttcaggtgctgaggctgcctcccctgagccgccggcgtaataagctgctggaattagaggagagggggaagagctgagtctggaggctggggagggacgcccttggctgcgtcccccccggccctgtcgcaggccccagaatttcagtgcccgggcctcgcggggaggccgcggcgatagcggcccaaaggtgggctcgcggcgttaggagcactaccattggttgggtcgacacctagacggccgcgcactcagtaaccaggcacacatggacacacccgaaggataagagtgcttcacagacgcgctgccccgcagagacagcgtaggactgtcccgccctccgaaacgcgcacctgggacttgctccccggagaccagacaaccgcctccctcagcgtggggcctcgccacccgctcgccgactcacctccctcagatgtcgcacggacactacaaacccccttgaatgcaggtgtgctcttacacgctcacactgacaaacaccagccccaagcacacaccgcctcactcccctcttctctccaaatgagcttcagtcaagttaccatttcataaagtttaccaacccaaagaatcaagggataaaatccaaacgcagaaaaagaatgcctaggagcaaattctaaaactcaccccggaaagttctcggtacccg

SEQ ID NO: 18964 - DNA, 913 bp, Artificial sequence
  DNA replication origin
tgtcagggctggtgaaatataggcaacatttcaaactttctatttaaaaaacatgaattatggccgcggaaaatgtgttcccatttaaaggcgatacgaagtatttggtgtctcgtccccgggcccatccatcacgcagacaataaagagagtttttcgccctgacacccgcgatttatgggcgcccttctctgccctcatcactcacgcgccgcggccggcctggcgacaggccccgcggagagacgcgcggccgcccccgcgcgggccagcgcgcgcactttgcgccctcgctggccccgcaagatctcggctcccagagggaagcacccgctcccaggagttgggggatcggtcttgagggtctgggcagccgagtgggagcagaaaccacactggtcctcccacccgcgcagcctctcagggccggggccgagcgcgccgcggcggggttttgctagcctttgctgtgtcctggcctcaacggcgccgcgccgggaagtttgcagggcaggcggcgggaagttatttaagcactggctcgaagtgaggacagagaactgggcagggggttacccaggccaattcttgggccattccgccccaaggaacatggagctgtccccaagctttcttgagccccgccgggcggacgcttctcggctaatctttctgcaacttttacaaagctgcctcctccccagtttgatctctgcaaacacatcctgggcgtccgcggcagcttggaaactatttttaccgtctggggccgaggagttgcattgaaataaggaaggcgaggcgccttctctagcgtttcaccccggaccaggctgggtcacccagtggcctctttgctcccccgccccacccttcgtgcgccttccagagccgccatcgaatctctcttgct

SEQ ID NO: 18965 - DNA, 1485 bp, Artificial sequence
  DNA replication origin
tggggaggaggcagctttgtaaaagttgcagaaagattagccgagaagcgtccgcccggcggggctcaagaaagcttggggacagctccatgttccttggggcggaatggcccaagaattggcctgggtaaccccctgcccagttctctgtcctcacttcgagccagtgcttaaataacttcccgccgcctgccctgcaaacttcccggcgcggcgccgttgaggccaggacacagcaaaggctagcaaaaccccgccgcggcgcgctcggccccggccctgagaggctgcgcgggtgggaggaccagtgtggtttctgctcccactcggctgcccagaccctcaagaccgatcccccaactcctgggagcgggtgcttccctctgggagccgagatcttgcggggccagcgagggcgcaaagtgcgcgcgctggcccgcgcgggggcggccgcgcgtctctccgcggggcctgtcgccaggccggccgcggcgcgtgagtgatgagggcagagaagggcgcccataaatcgcgggtgtcagggcgaaaaactctctttattgtctgcgtgatggatgggcccggggacgagacaccaaatacttcgtatcgcctttaaatgggaacacattttccgcggccataattcatgttttttaaatagaaagtttgaaatgttgcctatatttcaccagccctgacatatttatgaatcgctccctgcatgcaaatatcattacttaaagcgccggggagagcgcgggggaggggaggaggcgcggttcccggggcgtgggggtggtgaaccggggaaatatcggtggaggggggccatctccctaaagggcagagggtgaggtgcggtgaatagccgtatccggaaaccgagcgtgccccgggcttctttcccgccgccagaccccgcacagccgccctgggacgtttttcgaggcttgggacctaagacgggtccccggaccctgctgggaaaccagggggcgtttttcgtccctctctgaggccattatccaagctgaaaccaccttttataagaaaaaagtttaaagaaaaaaaatttaacaaacacaaataataataataacccaacatgtttcgcgttctttgccactgcatcgattttattgattttcattctgcaaacctgggaatgtgcgcgctcgggaggggaggctgtcaaaacccagtcatcgcggggactggatgggggacaattctccgacgccgcggcctggacccgcccccacccaaccggcgcaccacctcccaggcaccacggagcctgcgcaagctgcggggccgtaaaggaaccggcccccaatctccggggcttcagtcccgcccctctctccccccagtgccctgcagcgctcccagggtccgtgtctgccctccccaagcccccactgtcaatacaatccctgttaaaaaaaaaaaatctttttagagccaggcacgtgccgtcgg

SEQ ID NO: 18966 - DNA, 1045 bp, Artificial sequence
  DNA replication origin
acatcaagggggtgtgccaggcccgaaacgaggtctgtcctagccccactagggcgagcctgagcacctgaagctcaccccctgcagacgcagccccctgaggcggggacaggggtgtctaggccctggggagcctctgtgccccgctgtccctccccacgcggactgcgccccgggcggaggcggggctggccgggacttacttgagttccacgcaccacgagcccggccatggcggccaggacgctgcgggcgcgcgggacggagcgcgggggcgcggcggcagcagcggggagcgcggcaggggagcgcggcgggcgcacagttccgcactgggcagtcagctgacccggcggaagccggaggcgcgggctagcctcggggacctcagctccgccgctcgccgccgccgcccctcggcccggtctccgcgcaggtgagccctggccgcccgctgcaacaggtggcccgcagcgccccgcgccccgacggcggcctgaccccgactgcccgcgcccctccctcccccggatgtcccaatgcccaaaactccatgcccacagctttatcgcgtttgtctgggccacgcctgaggtgggggtattcctatcaggggcgccctttctgagccgttagccgggctgtagccagccgggcctttcctgcatttcgcaagctgggttacataatggacctcaactgcagcgaggaggggcctcttggctgaacgcccctcctcatcaaagctggggagagggaaagttagaaggttgaaggactcctggtgcggcccagtttccatttgtaggaggggagggggattgggggggttgaatttccctataaataaaacgctggcttggtgaagaccaccccaccctttccctgtggcctctaagagttgacaataataaaccctggggaaggataattggctggtgaccccaaatttcaggcttctcttctcctgctcctcagagggcaagagatttgtgaggcttgaagttatcagtggggttattcgctgttccccacccaccccatc

SEQ ID NO: 18967 - DNA, 1353 bp, Artificial sequence
  DNA replication origin
cctggccgccatggccgggctcgtggtgcgtggaactcaagtaagtcccggccagccccgcctccgcccggggcgcagtccgcgtggggagggacagcggggcacagaggctccccagggcctagacacccctgtccccgcctcagggggctgcgtctgcagggggtgagcttcaggtgctcaggctcgccctagtggggctaggacagacctcgtttcgggcctggcacacccccttgatgtgcgggaagaacacccgcaaggtctcccgttctccccacttccttctgcccttagcgcctcactgagcaggcccagcggacacagtgctgacggcccccgctgcttttgggggcccacagaaaatgttccaatttcataatctgaattttaaaaacttttggtcaaagaatccattttgataaatcacattgatatagtcatctttataccaatgcagttgtaatatacaaatttacttatttgtaaatggaggaaggggtttatgaaggcaaaagtgtctagggtacccaaagtcccagcacatccctggagatgagggtgctggtgggccctgcgctgaatgggctacgccatagccaaaggctgatggaaggccaccgacctccagttctctttccacactcgatttcttgaacaggagtctgtgatgaatggcaacacgccagtttcaatcctgggtgccagacacccagtctcacatgctttgagctctgtagtgaagcctcaggtgttcattgttggagggatgaacccagccactctgggaccaggtgtctttcttacctgctggaaaagccagttctctgtctttaacctcttctctgctctgatgaagccagagccctcttacttcccacctttccctgcacaccctggagaaatagttctgagtttttgaagctctcctcttggattgcctaaggcaggtagtgtcaggcacaattggattttgagattactttgggctgaagggaatgattcctccttagaggagattctaggggtttttacagctcctacagatgcagtgagggccaactgtgcagcccattaaactagccgctgcctgttttctttttttccagagtcctgtcgtttcatcaggtacacatgtttattgagtgcctactgtatgccaggcaccatgccaggtgttgttggaaattagcctttcctttgtctctgtgcaccccccatttaacagttttgttgctcaggaatgctggctctgtcccttgacccacagcctgggaggagagagctggagaaagaccagagttcagaagtgagttaacagcctgcggagaggctaaaaatgacgggtcttgt

SEQ ID NO: 18968 - DNA, 1383 bp, Artificial sequence
  DNA replication origin
ctgtttaacaaagcacatcttgctccgcccttaatccatttaaccctgagtggacacaccacatgtttcagagagcacggggttgggggtaagattatagattaacagcatcccaaggcagaagaatttttcttagtacagaacaaaatggagtcaggatgtctacttctttctacacagacactgtaacaatctgatttctctttcttttccccacttttccccctttttctattcgacaaaaccaccatcgtcatcatggcctgttctcaatgagctgttgggtacacctcccagacggggtggcggctgggcagaggggctcctcacttcccagatggggtggtcgggcagaggcgccccccacctcccggacagggcggctgccgggcgggggctgcccacctccctccccgccggggcggctggccgggcaggggctgccccccacctccctcccggacggggcagctgctgggcggaggggctcctcacttctcagacggggcagcagggcagagacgctcctcacctcccagacggggtggcggtcaggcagagacactcctcagttcccagacggggtcgcggccgggcagaggcgctcctcacatcccagacggggcggggggtggggggcagagggggtcctcacatcccagatggggcggcggggcagaggcgctccccacatctcagaggacgggcggccaggcagagacactcctcacttcccagacgggatggcggccgggcagaggcgctcctcacatcccagatgatgggcagccgggcagagatgctcctcacttcccagacgggatggcggccggccagaggctctcctcacatcccagacggggcgggggggcagaggggctcctcacatcccagacgatgggcggccaggcagagacgctcctcacttcccagacagggtggcagccgggaagaggcgctcctcacttcccagactgggcggccgggaagaggggctcctcacatcccagatgatgggcggccaggcagagacgctcctcacttcccagacggggtggcggccgggcagaggctgcaatctctgcactttgggaggccaaggcaggcggctgggaggtggagtttgtagccagccgagatcacgccactgcactccagcctgggcaacattgagcactgagtgagcgagactccgtctgcaatcccggcacctccggagtctgaggcgggcagatcactcgcggtcaggagctggagaccagtccggccaacacggtgaaaccccgtctccaccaaaaaatacaaaaaccagtcaggcgtggcggcgcgtgcctgcaatcccaggcactcggcaggctgaggcaggagaatcaggcagggagg

SEQ ID NO: 18969 - DNA, 1379 bp, Artificial sequence
  DNA replication origin
ttggtctggtgtctggaatgagactggggcctaataaaaaggagcgtctatacaggaccttcaatgggctgtaccctgcagcattccgaggacaggcctgaattctgagaagggaaagcggtaaaagtattgtccagtcctttttaagttggtggctgagcttggtgaggtgtgtttttaaaagacctttagtccattctacttttcttgaagatggaggaccataagggatataaaggtttcactgaatactaagagcctgaaaaactgcttggctgatttgactaataaaggctcgtctgttatcagactgtattgaggtgggaaggctaaactgaggaattatgtctgacagaacggaagaaatgactgcggtggccttctcagaccctgtaggaaaggcctctacttattttgagggcctctaaaagtattaaagcagcggcagccactgcacgcagacatgagggctaggctagaacagtaaggtcaagttgtttggacagaaaggctacagggtgtggtcctggctcttgtgtaaaaattctgaccgcctaggaatgcctaggaaggaaaggagttgttttgtagaaggtgcttgggtttgagagatcagttggacacgattggcagggagagcacgtgtgtttttatgagcattatgccaagataggtaacagatgaggaagaaatttgggcttgattgaagtaatgggggctgtctgtgaagctttgaggcagtacagcctaggtaatttgctgagcttgatgggtgtcagggtcagtccaagtgaaaatgaagagaggctgggattaaggttgcaaaggaatagtaaagaaagcatgtttgagatctagaacagaataatgggttgtagaggcaggtattgaggataggagagtatatgggtttggcaccacagggtgtataggcaaaacaatttggttgataaggagcagatcctgaactaacttgtaagtcttgtctggttttaggacaggtaaaatgggggaattgtaaggagagtttataggctttaaaaggccatgctgtagcaggtgagtgataacaggctttaatctttttaaatcgtgctgcgggatgggatattggcgttgagtggggtaagggtgattaggttttaatgagatggtaaggagtgcatgatcagtcgccaaggagggagtagaggtatctttcttatacttgtgggttaaggtggggggatggatacaagaggacacaaaggaggctttggattgggaagaagggcggcaatgagatatagctgtagtccagtaatagtcagggaaacagataatttagttaaagtgtctcagcctaataagggaactgggcaggtggggataactaaaaa

SEQ ID NO: 18970 - DNA, 996 bp, Artificial sequence
  DNA replication origin
aaaaaaaaaaaagcaaaaataaaagacagacaaaacaaaacaaaacaaaacaggtgcaatctgtaatcatgttcagaagataaagaaaagaccatcccgacagaagagggcactggcctgatctagtggggtggtgaagtagggaaattaaagaggagaaagacattttggacaggactccatgatgaattggatgtggagtgaatggaaggaggaatcagggtccttctagccttctagtgtttggcttcaatgacaagtcgctggtggtagcatttactgggaagggaggggctgcactgggggctaagggctgcactagggagaaatcaggatttccatcttggatatgttcagtttaagaagtctgtgacacctgaaagagaagatgtcaaacagcagggtagataattgagtccagaactcagaagagaggaatcatattacatttggaaattacaaagatgactttgaatgcctgtgagttgatggtaccatctggggaaagagtgtagggagaggagagaaggtgccccaggtgaaggcaagaggatgcccaacatttagagggtgagtaaagcaggaggaggctggatgggaaactgaggaagggcacacacagggcaaggagatggcagaagcctagggaggagagggtttcaggcagagggagtggccaattgccaagcactgttgagacagagggaaggtaagggtctagggtcatctgtggagtttgtgacagggatgttgctggtttctttgacattgaagctctagtgagtggagggagggcctgatcaaagtgggctaaaggatggagcctgcagtagtctctggaaatgtggttggctatggaggacagttgagcaagcttatattttggcagcagagctccagcagcaagggagagcttgctatagcaacacagtacagttagacagtacagggctgaaagagtgtctgtggagggcatggtgtgttatgaatgaagag

SEQ ID NO: 18971 - DNA, 1093 bp, Artificial sequence
  DNA replication origin
agcccacggggctgccacttttggaatgtgtcgaggtcgcatatctgatgtaacctcccactccgtcccttaggtgctctagtggaacataccccaagttcttcggcctctgttcctttgcccccaggccacccactttgggtccccggaaatgccaccagcagcgcggagctggagcgggagtccgcctgaggccgcggttttacgcggagcgtcttccctggcgctcgaggtggctagatgtcgtcggctttagctattcctggtgcagacgcccaccggcactgaggctggcgacaccttcgatgtatggttgctaggctcactgcctggtctgtagtcgtgtccctagagatgtcttcccttccccacagccactggctggagtgggggacccgacactgatagaaaactgcagaataaaaaagaaagaactggaaaaaagagagtgagccagctgccttctttctgagtaattcccatcctaggggacttcacgcgcgaaccgttttggagggaagggaaatccaggggaatagtgcagggtagatacacattgcagcctccacatgttcacatcttttctagtaaagttaaaccgaggacccctcaaacttctacagggcacagcaacttgtagcagcctccttggcggctgagagaagtagggaagcctggggctatgggtgaaggctggctatgaaaacaccaggggggaaggagcctgtctctcctgatcattaattatacatcctgttgggtgctggagctcagctgtgttttgtggcagcacatttgtgttttggaaaatactggtgtattggaacaaagggagaaatatgaaaaccatcattctcttcgtcattctctggcttctccggaggcctgcaggtgctggtcggagagttttctttggaattaccttctcagccgtagaggtttcttcttatttgttaaggaggcaaacctcccaccttccagagaagccctcaggttaagcaaagccctatacaccagatccctgactagccttcctgctgagaacagcttattcctggagccttcaaattcccacattccctctctccatcct

SEQ ID NO: 18972 - DNA, 987 bp, Artificial sequence
  DNA replication origin
tcggtccacgagcccaagatggatgcgctcatcatcccggtgaccatggaggtgccgtgcgacagccggggccaacgcatgtggtgggctttcctggcctcctccatggtgactttcttcgggggcctcttcatcatcttgctctggcggacgctcaagtacctgtggaccgtgtgctgccactgcgggggcaagacgaaggtaacgcgcgccccgggcgcccgccctctgcgccagccccaccgcttctcggcgtcccctgcagcccacctcctcgctccgcgccgcgccgtgcctccctccatccccgcctgccttcccctcgccgccttcccttccctcggctctcccggtgctctcggatcggggcagcgggcggcgcgccgggggtgaggagttgcccccagccagtgcgctccgggacgcggacgctcaatcctgtcctcttgtttattgtagggttgttggcggctgcggctggggccggggtcggggactcacaggctcgggtgccgtggtgcggggtggggacagccaactcagcggggacggaggaagctgggggcagctgggtgcgtgttttgcaccgctcacctgccggggctcggctcctggcggtgggcgagagggagcacatccgcccatactttaggaacctgttggggagatgagttcgtggggtcagaaagaagggaaaaatcctttgggcaagggagagaataattttgcacaagggaatcccgggggaggagcatggcccgagataacagggggacttcgaggggcgagagaagttggggagatccatcccactattgggggtagcccacggggctgccacttttggaatgtgtcgaggtcgcatatctgatgtaacctcccactccgtcccttaggtgctctagtggaacataccccaagttcttcggcctctgttcctttgcccccaggccacccactttgggtccccggaaatgccaccagcag

SEQ ID NO: 18973 - DNA, 892 bp, Artificial sequence
  DNA replication origin
cctcccccgggattcccttgtgcaaaattattctctcccttgcccaaaggatttttcccttctttctgaccccacgaactcatctccccaacaggttcctaaagtatgggcggatgtgctccctctcgcccaccgccaggagccgagccccggcaggtgagcggtgcaaaacacgcacccagctgcccccagcttcctccgtccccgctgagttggctgtccccaccccgcaccacggcacccgagcctgtgagtccccgaccccggccccagccgcagccgccaacaaccctacaataaacaagaggacaggattgagcgtccgcgtcccggagcgcactggctgggggcaactcctcacccccggcgcgccgcccgctgccccgatccgagagcaccgggagagccgagggaagggaaggcggcgaggggaaggcaggcggggatggagggaggcacggcgcggcgcggagcgaggaggtgggctgcaggggacgccgagaagcggtggggctggcgcagagggcgggcgcccggggcgcgcgttaccttcgtcttgcccccgcagtggcagcacacggtccacaggtacttgagcgtccgccagagcaagatgatgaagaggcccccgaagaaagtcaccatggaggaggccaggaaagcccaccacatgcgttggccccggctgtcgcacggcacctccatggtcaccgggatgatgagcgcatccatcttgggctcgtggaccgaggacgaggaggaagaggaggaggaagaagaagaagaggaagaggaggaggaggaggaggaggacgcgtctaggctgagatggttcgcgtggatattgctactcattctaagactgctgcctccgccgccgccgccgccgccg

SEQ ID NO: 18974 - DNA, 1275 bp, Artificial sequence
  DNA replication origin
cggctccggctcgccgcgccagtgcgcgcccggccgcggcaggttcaccgcgtccggccgccggcccgtggccgcctgctagcccatgttctcgggaccccctagtcctgtcgccacgccgctgagcccctcggcctccgctcgctcttcctccttgccgcctccgactcctcctcgtccccgtcctcgccgcccaagcctcttcggcgcgcgccccgcgctccccgcagccgccagcagcagcagctgcagcaactggagcgggcgcggactcaggacgacccaggcgggaggggaggaggctcgccgcgctggctcgcctgggctccgggctgggcaggggtgggcagggcccctcggcagcggcccggcaagcgcccctgacccccagggcgcaaggtagagcgcccccagcccaggcgcggggccaggcgcctctctccaaggtgctgcgcccccagccgagagcggtggggtacactgggaggacggcggggcgccccggtcaggccgtttttttccccaaagagcccccagtggggaggggaggagtggccagctgtcaactggattccacaggctgagctccccaggaccctcgggcttcgggagtgaggaggaccccacgccaggatacacacagctacccacccctacttcgctcttcctgctacctatgtgcccagggtcccgcgtgtggctggagggtagagtcaggaaggccagcgggtggtctgtggcctctgacagcagcaggtggtttctctcctttttccttattagcaacagaggctgcccaacaaagagtaggcagaaatgatcaaggacgacctggcctggggatagtgcaggccccgatagacaatagagttccctgaagggttgctttcctctcatatagtctcagactccatccatcccgtgaggagggcagatgggggaagagggactccagacttcattctggctcaccgttccccatttagggtcttcccttctccccacttaagatgaagaaggagtccgtgtttgttccgtagcgtgtctccgtacaccaccaggggaatcccccttctgacactttcagaaactttgcgccccctgaacagcgtccgtcctcgtgctaccagctggaccccaagtttttccagcgctaattaaatcgaggatgatcacgctcttccctcattgctgcagtggtttccccaaagtttccagctcattagtttaagcctaattggaattctcaggttcctttcagctcttcccatggaa

SEQ ID NO: 18975 - DNA, 2024 bp, Artificial sequence
  DNA replication origin
aaagaaagaaatgacagcaggaaaaaaggagggtattgtcatcttttaaatgcctctggcactctgagagaaaggtctgggcataagggatctcaggaaaaagtaaaaaccaaactgggcttagcctggagggatgagtcatgttgtacaggcatgagacaaacatatagaatggtctttcttgagaagaggggatagaaggcagaagacaatgagagagacagagaaagaggcaaaggagagagagaaagagaaaatgagagagggagggggaaagggagggagagaatcagggagggagagaatgagagagggaaaggaagagagggagggagagaatgagagaggaaggcggagggagggagagaatgagagaggaagggggagggagagaatgagagaggaagggggagggagggagagaatgagagaggaaagggggagagagggagggagagaatgagagaggaaggggaagagagggagggaaagaatgagagagggaggggaagagaggaagggggagaatgagagagggagggggagagagaaagagggagagaatgagagaggaagggggagggagggagagaatgagagaggaaagggagagagagggagggagagaatgagagaggaaggggaagacagggagggagagaatgagagaggaaggggaagaaagggagggaaagaatgagagacggaggggaagagaggaagggggagaatgagagagggagggggagagagaaagagggaaagaatgagacaggaaggggaggagagaatgagagaagggagagagaaaggaagagagagaaaagagagacagactaggggagagaaagaaaaagggggaagaaatacgaagagcagtggggacagagggggaacagagagacagagagaatgagggggagacagggagactggcagagacagggagaaagagagtaacagggagacagagaaagagagagacacagggagaaacagaaagagagaggagagagcaatagggagagagagggacagggagagagagacagagggagagacagaaagagagaggggagagggacagggagagacagagaagagaaagagagacttgggggagagaaagaggggcagaaatatgagaggaggagggaggagaggtggggaagggaggacagggagacagaatgagggagggggagaaagagaggtagagagagatggacagaggggagagggaggaagacagtcagggagagagagagaatgagggcatgagagaatgggagagggagggagggacggcacacaaacacgtaaaggagaggagggaaattgccaagcaatggagacccggagagtgatcttgaatagcagacagaaggttggggtgactgaagagagcactatttcacattcttaggcagagtgtaaggtggtaacagaagtgagctaagtatttgtgaaggtcactggggacgctgtgtccagatctttggaaccctgctcttttggaggaacttcatggagctagctgagctcgttgagcctctcaggttgtcaatttctcttagaagtaaaagagcgctgactgcggaagtgagaggcagggggtgtgtgcatgtgcgtgagtgtgtgtgtgtgtgtgtgtatgtgtgcaagtgcgctacatgctgccttgatgagaccatctgataggtccctgccatgccaacctggcactcttgttctttgggcacagatgaaagagctgggataaaaccagctgggattagggagttaatgatgtgcttggccttgggaaagtttgaggggatctggcttcctcaatcttgttacgcaatttataaccccgtcttccaactcggcagcccctccttccatgtcagtattattcttgactaagaattgctcttgcttgctgagggtgtacctatttgtggattgcttgtcacctacagttgaagggaactcagattcctaaagggcagtgtcctcagatttagtccatttttgtccag

SEQ ID NO: 18976 - DNA, 1577 bp, Artificial sequence
  DNA replication origin
gccctagggctgctgccgaggtgctcgcctgcccgcccgccggcctcggggggcccgggaggcgtccggcggggcggggcggcgcggcccgccaccatggagccccagcgccgggagctgctcgcccagtgtcagcagagcctggcccaggccatgacggaggtggaagccgtgctcgggctgctcgaggccgcgggagcgctcagtcccggcgagcggcggcagctggacgaggaggcgggaggcgccaaggcggagctgctgctcaagctgctcttggccaaggagcgggaccacttccaggacctgcgggcggcgctggagaagacgcagcctcacctgctgcccattctctacctgaacggcgtcgtcgggccgccgcagcccgccgaaggcgcgggtgagtggcagacccttggcccccgcctctgggacgcgccctccgcttctccctcctgctggccgagggtacctcgccggggccgccgctccacctggcgatggcctcggtggactcgctcctctggcccagttggggaggcggcggtgcgcggatcccgaagtcccgccgcctcccccagtcccgccgttcgctgtgaacaatgccccccgctgaaggccttcactctcaggtgcctcgacgacagggtccccgggggccaccaggtccagtagcgggtagggggtacctcggaggatgtccatcagtcccttttctgaggctcctcaccgtccgctagctttggcaccctgtgctagcctttaaccaagggtaccgtccagaagaatgggacttgggccaggacccctactcttaagttttggtcgctgccatcctgtgccggggccacaactgctttttcattttctggctgtcccagctcctttttctctgctcagagcccagtctctcccagactggtggctgattgtgcacaacgcctgcctgggtttctttggaaactgggcccggaaaagttggggaagttgcattgcaccatgggaaaatcctagtagtggctgctggggctaagttctctccctgagagcacagagctgcttaacgaggaaggctggtgactggttcccttgagggtgccttttggaacccctgtgtctttggtcttggggatgactgatttgtaagtgtgtgtctgggtgcaggaacggatactggcgggagtttctgacaagtggtaggcttgtcctggcctggccgtggagtgtggaagccagcctttttagacaaggcagctggaggaagaagacatggcactgagggaggaggagaactagcatttattgggcatctactgttgtggcaggcgctctgctttatcacgttcagttgtcgttgccactatgtgagctttctgttattctttgccagagagaaaactctggcttggagtggttaaaatgctcagaaagtattgggcaccaggaattttgaattataacctattgtttgatttaacttgttcagagccaggaaacaaagtgccatctttctaggtcttgtccctgttttaacagtgaatcgataggtacagtaaaaataaataaggatatatgta

SEQ ID NO: 18977 - DNA, 1359 bp, Artificial sequence
  DNA replication origin
agaggaggaggaggagacggaggaggagaaggaggaggcggaggtggggacggcggccggggcgcgccccgaggccgggctccagccgggcatgctccccctccccctcagcctccgcgcgcgccgcccgccccgcgagaaaactcgccccgaaagccgggccgcgcgccgcccccagagcaagactacaactcccgggagaaagtcgcctgggccgtgtttcccaggctcccgacagctccggcccggctcggaggccgcctcggcccccgtgcaccccggcccggctcaccggggccccgcggccgccacccgctcccccgtggccacagccccgccgccgccggcccgtccctcctctctcccctccccaggccgtccctccgggaggcggcagcaggggaggaggggacgggcggaggggaggggtccccggcccgcccgctaggcggggacgcggcgccggctggttcccggtcccccgaggcccaggcgcagccgggggtgggggacacggagtcaggcctggcacgcggccagcccacaagctgctggagaccccctcatacaaatcttgcccccagtccagagggtcctaatctgagaactccaaaatacagcctggagacaaatggtggggagggtttcccctaaatttggacatctccagattaagacctccgccgaatccgtgaggctttccctctccaaggagctcctaagagaatttcccagtaaaatcgcctcaactgcggtaaataggctgttccccgcgccagcatttgagaagagctggtccccagagtgtaaaggagttaggatgttggcaggaggaaggatgtgtcgccggatgaggaaaagaaaggtgggtgtctgcggtgcagtccttggtctttctggcaagtgaggcgctctccccctaaatgtctcagagggagacaaatcagcggactaccttgcttcctttgatgacttggaaaggatctgcagtcccccttaaagcccaagaatgtcttctcttccacgacagccgtttgtggacacatactgcttacctccctgactgcaggacaaggtccttcaaagctggaactctgactgcgctcagtgatcccgcagtgctcctctgtagagtgggaacccaggtccatttcaaatatctacgttggaatgagtggatctcgctgggggtgagaggcactttgtctacccacactgccagtcccagccacatgcctcctcccttccctcaaaaagcagtgtcttcttagtctgcttcttcaaggggagaagtcgtttttatttatggaaacgaactcactatatggtagaaagaacaagagtatcagaatttgcact

SEQ ID NO: 18978 - DNA, 1073 bp, Artificial sequence
  DNA replication origin
ttaaaagcagatcatgtgtagtacatctagaagtagatttacaaatattctgaagagttgtaaccttttaaaatactaacagtgacatggttttgtttttaaggtttagcaatatttagcccattatttttgttttattcttaacttgaatgtttgtaaattttatttcttgatgctttcattgtgttatgataacatcaaaataacttgatattctaggttactaataattgttgtgcatgagtgttactacttttggaattgaagactttaaagaattttaaaggcagttgttgactaaacttctttctcttgattcacagccgaaggagtaaaggtgctgcaatgatgttagctgtggccactgtggatttttcgcaagaacattaataaactaaaaacttcatgtgtctggttgtttgaaatgtatttgcagtttcctgggactgctaggaggttagtctgctgatttcagttgctgtccaagttcacatgctccatgaagcattcagtgaaaacttaatgtcatggggtggtgtttgtttgctgcttggtttatagcttaggtgggttcatctgggagtcaagcttgtaaatgctgtgttaagaaccatgtccgcggtggacgcagtgtagtggctcacagtcatcagcacttttgggaggtttgggtgggatgattacacttaagcccaggagctcgaggctacagtgaggtgttttttttttcgagacagggtctagctttgttacctaggctggtcttgattgaactcgggctcaagcgatcctcctaccttggccacataaagtactggcatgagcgaccacgtctggcttagagtctaaaaagtaccatgtctggataaactggagaaatctcaggaagcagtagagagctgaaagacttggttgggcatgaaggggactcaggaaaagcaataccgtgaaggcagaagggttgaggttgcaggaaggaagggtagtggaatgttttggagaaaagatggtcacagcccctgcatggagcacctacagacaggagggcagggctgagaagagttaagtcatgg

SEQ ID NO: 18979 - DNA, 1093 bp, Artificial sequence
  DNA replication origin
tccattcaaccctgagtggacacagcacatgtttcagagagcacggggttgggggtaagtttatagattaacagcatcccaaggcagaagaatttttcttagtgcagaacaaaatggaatctcctatgtctatttctttctacacagacacagcaacaatctgacttctctatcctttcgccacatttcccccttttctattcgacaaaaccgccatcgtcatcatggcccgttctcaatgagctgttgggtacacctcccagatggggtggcggccgggcagaggggctcctcacttcccagaaggggcggccgggcagaggcgccccccacctcctggacggggcggctggccgggcgggggctgccccccacctcccggatggggcggctgctgggtggagaggctcctcacttcccagacggggcggctgccgggcggaggggttcctcacttctcagacggggcagccgggcagagacgctcctcacctcccagacggggtcgcggctgggcagaggcgctccccacatctcagacgatgggtggccgggcagagacgctcctcacttcctagacgggatggcggccgggaagaggcactcctcacttcccagactgggcagccgggcagaggggctcctcacatcccagacgatgggcggccaggcagagacgctcctcactttccagacggggtggcggccgggcagaggctgcaatctcggtactttgggaggccaaggcaggcggctgggaggtggaggttgtagggagccaagatcacgccactgcactccagcctgggcaacattgagcactgagtgaaggagactccgtctgcaatcccggcacctcgggaggccgaggctggcagatcactcgcggttaggagtggagaccagtccggccaacacagcgaaaccccaaaaaatacgaaagaccagtcaggcgtggcggtgcgcgcctgcaatcccaggcagtcggcaggctgaggcaggagaatcaggcagggaggttgcagtgagccgagatggcggcagaacagtccagcttccgctgggcatcagagggagaccgtggagagagagg

SEQ ID NO: 18980 - DNA, 1020 bp, Artificial sequence
  DNA replication origin
aatgcaatgtgattttgctgatcataaaaataaatcctgtattcctgacaagtatgaagtcgaagtcaagagcatggctggtaatgaggggcaggactgaggtatgagttcaaaaccccaacacatacatcttctttcaggcccaccagccagctctggggctgcaagtataacctcatggggcaatgacctcaaaagtccatatctgaagtctttgataatgtgagccctgagctgaatgtcccatccatgcccaagtgagaccggccccaggtgaggagagttataacatctgggtcccccaaaacagggtaggtatcaaggagctggttcaacctcaggaaagccctggctgaatgtgagctctttgtactgcctagtcctgattctgtccctgaggggacccctaagacaggaaacactcaacattaccccccagagtcaaaggggctatcctagggaagagaatctccagatgcatccaagcctgggagaaggaggcagcaagatggattgggttagaatctgccaagtgccaagcccaccacgtcaagtacttttactgttatactctctactttgtagataaggaaactgaggctcagagagatcaggtgcctggcccaagatcacaccacaaatgagagtggagctgggattcctgctaagatcttctacatcaaagcccactcaggccaggtgcggtggctcatgactgtaatcccaacattttgggaggccaaagtgggaggatagcttgaggtccaggatttcgagaccagcctaggtaatatatgtgagatcccatctctacacaaaatttaaaaattaggtgggtgtggtggtgcacacctatagttccagctattcaggaggctgagatgggaggatactttgagcccaggagttcaaggctgcagggctgtagtgagccgtgatcctgctactgcactccagcctgggtgacagagagagacccccatctctaacaacaacaaaaaaagcccattctgcatccac

SEQ ID NO: 18981 - DNA, 1017 bp, Artificial sequence
  DNA replication origin
ctgcgagttaatgcacatgcatataggctccggtatgggccggtgtttgcagccgctagtgaggccgtccgggggcagggaggcatgactgttccctgcactgcccctggcggggagccgcgtcctcgcgggctggctgccaagggagcgctctggaggacgcgcatgcgcgatggtggggcggggcggggcggcccggccggctggaggtcgggcggcctctgcccttcggaaaccagggcatcgatcctgcccgccccgcgcccccgcgctggcccacagagcggagggaaggggaggggagaagagtggggaggaggcggcgcggcagctgcgccccgggcgctgcgggagggaggagcgcggcgcgcagccgcggccattagtcaccagatgtcaccttctgctgccaaggcggcgcctggcgcagacaatggccgcgcgggccgaggggcgggccgtgccggccccaaagccgcgtctctgctgacacctacagccccgctccactttccgccgcccctctgggcccctttgcccagggcctttcccgccgccgcgcctggccagcaccaacttccccacgtcccttcccccaagtccgcgtaacgcctcatctctcagggcacagcgcaggtgtcaccgcctgcatttcctggctgtcctccctgcccctcctcccattctcatagcctcttcttccaactcggatacccaagaggggctcccctgcttccccagactgggctgtatgagatccgcagggaccttgctttcttcttgtgcacctggcactatgcctgacactcaaggctggtgcctggggtggcactggtgccttccaatttgcaggggaatcacgctagatgttgaagttcattgccacccacacatagctgcacttgaccccatgctgagataaaagcccttcaccctagaaatccaacaaggatcactgagcttttccctgggtacagatatccccccaaaatataagtgggaaaatgagtgccctaa

SEQ ID NO: 18982 - DNA, 860 bp, Artificial sequence
  DNA replication origin
tggcaaccgcccagtctgagaagtgaggagcccctctgcccggcagccgccccgtctgagaagtgaggagcccctccgcccggcagccaccccatctgggaagtgaggagcgtctccacccagctgccaccccgtccgggagggaggtaggggtcagcccccgccaggccagccgccccgtccgggagggaggtgggggggtcagccccccgcccggccagccgccccgtccgggaggtgaggggcgcctctgcccggccgcccctactgggaagggaggagcccctctgcccggccagccgccccgtccgggagggaggtgggggggtcagccgccccgcctggccagccgccccgtccgggagggaggtggggggggtcaggcccccgcccggccagccgccctgcccgggaggtgaggggcgcctctgcccggccgcccctactgggaagtgaggagcccctctgcccggccaccaccccatctgggaggtgtacccaacagctcattgagaacgggccatgattactatggcggttttgtggaatagaaaggggggaaaggtggggaaaagattgagaaatcggatggttgccgtgtctgtgtagaaagaggtagacgtgggagacttttcattttgttctgtactaagaaaaattcttatcctgttgatctgtgaccttacccccaaccctgcgctctctgaaacatgtgctgtgtccactcagggttaaatggattaagggcggtgcaagatgtgctttgttaaacagatgcttgaaggcagcgtgctccttaagagtcatcaccactccctaatctcaagtacccagggacacaaacactgcggaaggccgca

SEQ ID NO: 18983 - DNA, 1288 bp, Artificial sequence
  DNA replication origin
tattccacaaaaccgccatagtaatcatggcccgttctcaatgagctgttgggtacacctcccagatggggtggtggccgggcagaggggctcctcacttcccagtaggggcggccgggcagaggcgcccctcacctcccgggcagggcggctggccgggcgggggcctgaccccccccacctccctcccggacggggcggctggccaggcggggcggctgacccccccacctccctcccggacggggcggctggccgggcagaggggctcctcccttcccagtaggggcggccgggcagaggcgcccctcacctcccggacggggcggctggccgggcggggggctgacccccccacctccctcccggacggggcggctggcctggcgggggctgacccctacctccctcccggacggggtggcagctgggtggagacgctcctcacttcccagatggggtggctgccgggcggaggggctcctcacttctcagacggggcggctgccgggcagaggggctcctcacttctcagactgggcggttgccaggtggagggtctcctcacttctcagacagggcggccgggcagagacactcctcacctcccagacggggtcgcggccgggtagaggcactcctcacatcccagatggggcggtggggcagaggcgctccccacatctcagacgatgggcggccgggcagagacgctcctcacttcctagatgggatggcggccgggaagaggcgctcctcacttcctagttgggatggcggccgggcagagatgctcctcactttccagactgggcagccaggcagaggggctcctcacttcccagacgatgggcggccaggcagagacgctcctcacttcccagacggggtggcggccgggcagaggctgcaatctcggcactttgggaggccaaggcaggcggctgggaggtggaggttgtagccagccgagatcacgccactgcactccagcctgggcaccattgagcactgagtgaaccagactccatctgcaatcccggcacctcaggaggccaaggctggcagatcactcgcggttaggagctggagaccagcccggccaacacggtgaaaccccgtctccaccaaaaaaatacgaaaaccagtcaggcgtggcggcacgcgcctgcagtcgcaggcactcggtaggctgaggcaggagaatcaggcagggaggttgcagtgagccgagatggcagcagtacagtccagcttcggctcggcatcagagggagactgtggaaag

SEQ ID NO: 18984 - DNA, 848 bp, Artificial sequence
  DNA replication origin
ctctgccatgtctgctaaaaaatgtgttgctaatgtgatcccttcgagaggacatgggaaaagcagggcctgggagcctgaggctggccttcccaccccagctgagagtcaccaggcaattggcctgctcggattacagacaaagggggtggggggggtggggcgggagcaggttcacaggggggcgaggcccaaatgaaatcacagctggaaaagcactttatgcgctgtacattggcctacccatgcatgggattattggtattgttattgttatggataatgataataataattattattattataaattaaaatggtgtattttgttcccctaactggagagcccatttggagcccagggggaatagcatgcaggctacttccaatttttttccaatttggctttaaaaaattcagcatgaagagagattggtctgggcagtgatgcagacaacacacaaaaaagagagtgggggtgggggagggctgggagccctactgggctttcaatcatctggctgccgagtgcccagagccagcgcctgatttctgagggcagcgaaagctgcacactcattagagcgggcctccaccggctttcaggttcagagtgggcaattgttctcagctctccgtggaggagggagaggaggcttgtgtttaccaggctcagaaactggccccaaagagcctcccatgggtgggcaggaagcccacagtcgctggggttctggggtgacccggctgtgtgacagccattcattttcagtgggagggagccaatatcagtctaccctgtggggaggcctggaagctgcttgtctctgaagacagatcccaggtgc

SEQ ID NO: 18985 - DNA, 924 bp, Artificial sequence
  DNA replication origin
ggatcggggatcggggatcggggatcgggagcgcaagcctcgggccggccggcctggaaacaccgcgccccggccccagccccggccctgcgccccgcgcgggctcctccctccccaccggctcagctgcctcattgtttattgtggagcctgcctctcccctgcccgcccgccctcccgctcctttctcccctcctcccgaaagaaagaagagccagtgtgtggagagaatgagtcatgaataaacaaacagcgtggggggagctgtcactctcagctcacttcctggccgcgctccgctccgcgacctcctggcggggcgcagaagccaggctggccgaggtgggcggcggctgctggggctgctggggcgcgcggcccagctcagtcgggcccctccgcggggcgggactgggctgggctagggtgctcaggaccccagttcccaggcctgtctttgaccacagccctcacaagcctcagggcccttagagtaagcgagcgtgacatgatgtccccagacttgtatggccgtgtgagccgagggctgtgggccggacccttgggttggacagaagccatctgtcacagacaggcagtgcatgcgggacctgcggcgggcttgcggcgcctgtgtgggctcatcctctgggaatgccagtgtgtgtctgctgagttgtgtaggcgtggctttttccgcgtgacacagggacactgcgaggatgtgtatatatggcatgtgtgtcttctgcatatggtgtttgtctggagtgggggttacacgtgtgctagtgacccgtgtgtgtgtgtctgtttgtgttgtgtggccaattttcctgactctgaatttgcgtctgccactttaagttttgagattcttactttgtacttggcttttctctatttagtcctttttcttctctc

SEQ ID NO: 18986 - DNA, 1332 bp, Artificial sequence
  DNA replication origin
tccacccagtttgacaggaacggcagtggggctgaggatcttgggagaggtgcctgtatggttactctgctgggtggtacatgggaaaatctcaagacaagaatcttcaggttgagtgagaagggatgggaaaaggaggcagagaaagcagaagaaaaccaatatccacgggcacctgccgagggccaggcattgccctggggacggcctcttgaattggtctctcctaaccctcaagacaaccctgtgagttaggaaggaattgttcttatgggtccagtttatttgaaaacaatagcaccatcaacatgagctaatgcttagtgctgtcctgaacagtttgcctggattttcctaatgcaccctcctgagctcccattgaggctggtgtcactgtctccactttccaataacaagtctgaggaagctgggaagtgtcagtgcagtggccaagctcgtggaccccgcagccagcctgctgggttggcttccctgctcaccagctgtgtggctttcggcaattccttaacctttctgggctcagcttcctaacctggaaaagaggagagtaaaagcacctgctttgcagggtcgtggtgaggattaaatgagggaatatatggaaagcacgcagaacaggcccctgcacctagtgggcgctgtgcaagggtgcgctgctgctatagtactattcctgccccagctcacttaggagaaggctttgacctggagcctggtgggaccgaccctcgcctcttcccggctgacactttgctctctgtggttctggacttgcagagccaggctggggaggaaggagctgtgtgactcccaccgggcctgctcctttgcggcaggcatgtgacatattgtggcgtgatgtgttttcccctcatggtgcaagacgtgactcagaggggcatgctggggaaatgagtttcttggatttgcccacctcatcgcccctgcattcttttgaatttctctgaatcagactttatatctggctctgccattcaccagccttatttatgcagaaaacagccccacatttccaacttgctccacagcagtaaagattcatctttggcccggggagggtagcaaaagagaggagggaaggggaaaaaaaggaaaaagaaagaaaaaggaaggaagaaagaaagagccagcaacaatcaaaacaacctttttctccctgtgtaatctgggcggcttccaggaggataatgtctttccaccgtggatcgccccctccctcccaggctgttttcacaggaagtaaaccctggagcattttcaatgtgcccctccaggcagaacaatgaggcc

SEQ ID NO: 18987 - DNA, 944 bp, Artificial sequence
  DNA replication origin
gcaaaagatgctggctaggaaggtgggatccaagaggttgggagagaggggaaagtagtagaatcaggaggcatgaaccctaaatgagaaaaaaaaatcccattctagggcagggtgcagtggctcatgtctgtaaactcagcactttgggaggctgaggtgggcagatcacttgagcctaggagttcgagaccagcctgggcaacatggcaagaccctgtctctcaaaaaaaaaaaaaaaaagaaagggtctgatggcctcacagtctggaaacacccctagggatgtgaaagggatgtggggatcttgggaaccacacaagggagtgagatgtaggaacagaaacagccgccccagagaggatagaggagatgggtcaccagcggcaaagcctccatcacaaggctgaggacagagggggtgctcttaaaggaagtggggtcccagaagggccagtggggaggtctgggaaggaaggtcggtgaggcaaagcgcagtgacaagggatatgactaaaggagggtgcactgtgagctgtcagcaaggaagcaggggtgggtggcatggggcagggtttccaagaggcaggggtctgtaggatgagtgggagtttctctggtgaatacaggaggcaacgggcagggaagagtggtcaacaagcgggaattcattcgttccgcagacactcactggggcttcctatgcttgggatgcatcagtgaacaaagtggcaatcctcactcttgtgggtcttacactctagctggaggaggtgggggacagaaaacatcacaaatacggtcagaggtgaattgtagagtgtgttagagggccatgaggctgtggccaaaagaacaagctgaacggagccaaatggagttgtgcaggtggagggggcaggggctgggggagccactttgaagtcgccgcatagtggtcaggg

SEQ ID NO: 18988 - DNA, 1134 bp, Artificial sequence
  DNA replication origin
ttggcctctagtgagtgggtggaggaaggggcacccgcaggagaggagggatggtcagagaggtaggaggctagcagaaatggtgatgtcacgtggtcccggggaggacacagctgttaagtgtgaggatgtgggggactgcactgaatgcagtaaagtatcccacaagaagaggacagcaagtggcctgccagggagaggcagagattagggaagatctccttaggatgggagagatgtgagcacatgcagaggcctggtgagagcaggaagtcttggtagagagggacatgctgtaggccagggagagatgggcgaggttccagagcgggcctgcccagcacctcactgcaagggtgggctggcaggctgaagagagaccttccttaccctctgattctggacagaggatactcaggatgggtgtggggctgtgtttggaggcagggcaggggcagcaggtcccaccaaagggccttcatattttgacgaagccaagtgtctctgggaattgaggttggcagagggagaagggtgaaggtcagtgagacaaagaacccatgagggaaatgggaggccggcaagcaggcagaggactttgggttcatgtccacggtgcagttgagactggagacctcatgttgacactggcgccaaatcttcatgctgtgggcccttgccagcctaagcttgccgtgtaaagagtgtggttgggttggcccctgttaagtctggctgggcggatgaagggaaggatgggggtactaagaaatcaggggtgctggtgagagggtcattctgatgaccaaaccattggagcagttggagaatgtggtcagagggaaagaagagatgttggggttaagatggaagaggaaaagcagtttcgagtggtggcctgggattgggggctggacttgagtaggctagagggtccctggagaagggtgctggaggtccggggagtccaggtattggatgggtcacccacatggatgctgaaggccatcagctgctggcagaccttggacagggaaggagaggcagcgacctgaggctgggtagttcaggagcaaaagatgctggctaggaaggtgggatccaagaggttgggagagaggggaaagtagtaga

SEQ ID NO: 18989 - DNA, 1504 bp, Artificial sequence
  DNA replication origin
cgcaccctggataagtccctttccagattcagatctaggtttcctcatctgtgaggtgggaataatgccaactctagtggatgtttccgggatccaatctagagctgtcacagatgggaacatgctttgtggacacagagaggatcagtttgtattatccttgttctgctcaccgccatcattattgttgactgcccaggtcctttggggcgccgggaagccctgcccttgtgctggaaaagcttggtttgatcctggtaatcttgagcatttggcacccccacccctgccccaaatcactgcagccctgccagggtccagctcctcacccaggctgccctgcaacgagcctgtccagatgagcagcaccctggggtcccccgtgccccccagccaggccctgcccacctctttgggtcacacctatgtctgcctccaccaagggggccgttactactctcggggggccaggagcagctccacgatgaagtaggggttgctggggtgggcggggacagcgaggagtgcccatgtggcctgggactgtgtgggtgtgcatgactgtgggtgctcgtgtcgaggggggtgttggtggggatcagggagtatgagtgtgtgtgtggtgtgtgtagctgtgtgagcagggatgcagcctgtgtggctgtgtgaatgtgtggggtgcgtgagtgttggggccatctgagagtgtgaggcttgtgtgtgccagtgtcccttttggtatctgagagtggtaatgtagtgtgtgtgtgtgtgtgtgtgtgtgtgtgtctgggttatggtggtgactctggggtacttggggatgtcagtgtggaggctttgtgtgtgggtctatgtgtgtgtgtgtccatctttctgtgtgtgatgtgtctgcatgtgtctgtgtatgtgtttatactgtgtggtgtgtggcaggtctgtctgtggagtgggagtgtgtgtttgtgtgtgtgtgtgtttgtactgtggtgcgtgtgtgagagtgtctgtatacctatgttacacacagtaaaactatgtgtctgtatcgcgtgtggcaggtctgtctctgtgtttgtactgtgtgtgtgtgcatgcttgcatatgcatctgtctacatatgtctgtacggtgtatggcaggtttgtctgtcaggtgggagtgtgggtgtctggacgggaggctgtggtgcgggtgtggggtgtgggtttctctgtcgggcgtgtgagtgtgagtgcagcgtgtgttgtgtgtgtgagggggtggtgtggtgaggcggcagagaggctggcaggcaggcggtcaaggtgctccccccgcacttccctgtgtgcagtggctgggctgacagccgggcggagaagaaaactagacgtcagggaaatcagtcagagacaaatcgattccctttagaggtgagaaaaagcagatgccacggctgctggtggcctgttaggctctgagccacatccctcgcagccctcccccactcctgtgccgccaa

SEQ ID NO: 18990 - DNA, 1742 bp, Artificial sequence
  DNA replication origin
caaaaagtttaaaaattagccaagcgtagtgatgcatggctgtagtcccaaatacttgagaggttgaggtgtgaggatcacttgagcctgggaggttgaggctacagtgagctgtgcttgcaccactgcactccagcctgggcaacagagtgagaccttgcctgtctctaaagacaagaacaatgcaactcagctgccacctgactcttcctctttgacatgcaccttgggagccctgatctgttttctgttcctatagttttgccttttctagaatgtcgcataagtggactcatccagcctgcagtctttgtgtctggcatcttttacttggcctattgcttttgagatttgcccctgtggctgtgtgtgttggtagttgggtcttttttatttctgaatagtattgttaatccattcatttgtgatttgtatgcccaccccagggctgggcacagaatgggtgctccccaaatgggtgttgagtggctgagcaggggaatgggaggtgaaggcagagactcctgtagaaatctgttcaaatcagtctttcatggggattggaggaggcaaggtgatgacgtttatcattcattaattcacaaatatttattgagtgcctacccatgccagatgccatgctaggccatgataaatggttcctgattacccagagctacccattcagctgagaagacaaataactcaccaagcggttgacatcaagggagacgtgtcctgaaggaagggaaagcagggcagggcaagggtgtggttgggtagacagcagggcagccactctaggatggtgtagggggccagattaggcttccctggggaagtcaaggcctgcaggaggtggtgtctgctgaaccatggaggagggcagtgtgtcctggcaaaaaaggcagaggtgtgaagacccatgtgtgagtgtgcagcaggttagaggaatgagtctggtgtgactctagggagtggtcagatttggggctgagaggtggtcctaggacagatgtggagagcacctaagtcacatcgacaagtgtggcttttgttctagaggcagcaggatctgtggaaggactctgagttggaaagtgatgtaattagggtctctgcctccaagtggagaaaggactgagtgcacaggtgtgggtgggggtccagcgtgggatggcagtagcctgggaacaggtgacagcagtaggaacaatagatttcagaccaatttagaggctgacttgccgggatctggtgactgattttaggtggggtgcagagagaaaagagactgaatcccaatttgggactcaggcaacagaatagatggcagtgccaatcttcggaagaggagtgagggaggaggggcagggagtgtggtgatgatgagtacatgtgggaactgtggaggctgaagtgattgcaagatgatcaaatgcaaagtctagcaggcagttgaacattttggcctggagaggaaatgtgggctgaacgtagggacttgggagatgttggtgtctaacagggagtggatgagcttgcctggaaatgagtggaaatggtgcaggtcacagggctcgggccagagacccggggatccccaggattgaaagagcaggaacaggggtacatagtggcctgagagaaatggcacggagaagtagaggtgaggaccgagaggagcactggggaaagtattgaaaggagaggcagcggaccccaggaagcaggcaaatcag

SEQ ID NO: 18991 - DNA, 741 bp, Artificial sequence
  DNA replication origin
gggtgggtcggctaggggaactcccgcgagtgggtgcacccaactgcgcctcgtgagtaccttagctctccgctatctctggcagtgcccagtccggggcagagggccaggccccagcctagcagctcccacgcagcccgcgcgcacagcgccccgggcgctccgcgccgggcctaggggaatccacgcgtctctggactgtgctaggtgccgcggatcaactgtggccaccacacccccgctcccccacagctgtcggggggccgcgctctagtctccctcaaagtcacccttggtggtggtggtcctcttcccaccccaaccaccagtccccgggctgtaggaacaattccaaagtcaaccccaggggaaggctttggaggtccagttaccaactcgcttaccccaattcgggtacctgacagcgcccggggccacgagtgcactccaggcgggggcgtgccagcgcggggcaggggctctcgggtgagcagtgtgattttggcttcctccccaaggtggtccctacctaggctcagcatttgttcccctctccaaacttactggggctggggcctgcaggggggctgggggctgcagggggcgtcagggagtagcggagggagtagggcaaggagagaggtgagtggactggtggcgtagcggggaaccaggagccaggagaagaaaagctgggagagcgccgagaccgaggagcgaggaagagaggaagagaaagga

SEQ ID NO: 18992 - DNA, 799 bp, Artificial sequence
  DNA replication origin
accccagccccagccggcgcggagcaggagccggagccgagcggatctcggcgccctcgctgcgctcctcccggcccgagcctgccctacccggcggtggcggcggcgcgtcctccagcggcggcagcggcgctcgcagcgcccggtaagtttggggccagagccaggcgcccgctggctccggggctacctcccgctccccggggactctcggggtgcaagcgtggggattgggtgctggggtttttcccttaaagtgtcccccggagcggggcgaccggccggcggcgcgggctccgctccgctctccttggcggccgggggccgaggcccggcggccggcgagctcccggctgcgcggagccggcttgggctgcgcgtgggggccgggtttgtcagggtgtgcggggcgtaagtgtggtcgtgcgcgcgcggacccggtgcccgcctcctgccggcgcgcctccagccctcgctccctacacccgggggccgggcaggaccgggaatcggaggagggagggaaggaccgcctcggtctccttcgcctcctctggggagatgcgaagttgtgcgcctgtgtgtgtacaggaaccgctggggaaagcgctggatttcaggatggcaaggggtggtggtgttaacttgtgcgtctgaatttccagggaaaacatacacttttgtaaatgggaggtgggggcgcggttaagttgtttgtgtgggaattgcccggggaaagctggcgcgcggtacaaacgagaaacgcggaggtgtgtgtgcagggttttctcccagggct

SEQ ID NO: 18993 - DNA, 1047 bp, Artificial sequence
  DNA replication origin
gtctcagcaaggctgcccagggccaggagctgaggggggacaggatgtggttttcaaagaggcagcatttcaagttgcaacagaaatattggagccacccaatttcatgacttttccatgggttcttactccctaatcctggtcccttccctggtctggctggaggcgagtcccaggcgccacctgggaagcagtgctggcctagcaccaggcggccttgctgctgctttgctgccgtaggctaccaggcccacatagcacctctccgcggctcagtgccctcatctgagaagtgggatcattcccaacctggctggcagggagttgagggggtgatggtgagctgacagaatcgtagctgttcactcacttgttcattcaaccaacacttattaaatgttagttttatgccagccagtgatctaaacattggatagaaagcaggaaaccagcttgaggaggtgctgaccctcctggggctaacatcattgagcagggctggggaacacagaaggacagtaatcagctcgtagtacgtgcagtacagtagtaatgtcgagcgatgtgttacggagcggctggggtgggggaggcggcatgtattttagatgagggcagtctgggaggaccccttgagaaactgtaaaacagccagccactgtaggtggaggaggtggtgagcgggaacagcaggtgcaaaggcccaggggtaggaatatgcttggtgcccgagaactgaggacatggggaaaccgtgagggggagcgagcagagccagctgcacggggctcgagggccgtggggatgcctggggtggggggctgtaaacaggaaaagctttacagctgtaaggaagagcaggaaggaagtgagagtgggaggccaaggaggggctgttgcccccacccaggcaaaggagctggcgaggagtgggcagatccgcacgcggggagggtgaacggtggaaatggcagatggcttggttgagggggagcgtcagaaaccaggatggttccttgacttttggatttgatgcctgggtgggtg

SEQ ID NO: 18994 - DNA, 647 bp, Artificial sequence
  DNA replication origin
taaggaagagcaggaaggaagtgagagtgggaggccaaggaggggctgttgcccccacccaggcaaaggagctggcgaggagtgggcagatccgcacgcggggagggtgaacggtggaaatggcagatggcttggttgagggggagcgtcagaaaccaggatggttccttgacttttggatttgatgcctgggtgggtgggggtggagagggcatttgatccaaaaggagggcggagggagaacaggatctaggggagggagggcaaggggtgatgccaacctggacacaggttttcggtgtctgttgacatcggagtggagaggggagccctgggggagcagctgcatggggcacaccaggccccaggctggcaagccctcctccctggggctctttgccagcccggagccaggctgtgtgggcgagtgcttccctgggggcctggcctggggttttgtcccattgcatcatggatgaggaccttccggtcccctggcttggaggcagacgtaggtggaggtgcagagtggtccacggctctgcccaaaaggctggacaagttggaaggtggtctgtcattcaagcaccatttgccattggctggatgcgagccctggtgtcactaccaaccttgttcccagctgg

SEQ ID NO: 18995 - DNA, 730 bp, Artificial sequence
  DNA replication origin
tgccagcagcctctgagcggacccaggcagggcccagtacgtcacacacagcagcccctagtgtgaggacagtacaggcacgtgtgcttccttcaccctcccagctggctgtggcctcccccaacccatcaccttatgtggctagggcagagcaggctccaaagccagagctggtgggagcccagtcctgggctttgatggcggtggctgggcagtcaggaaggaatctccagggccaacctgtcctggatcagggagggagaactcccggaaccctgcagggatcaccttccgccacccccaccagcatccagaaagcactctgctattagtcaccagccttctctagaccttggttttcctgtctttgcaatggggctactaatccactggggtggggatgggggtagaggtggaggtgagggtgggggtggaggtggtgggggtggagtggaggtggatcggggaggtggggtggaggtgggggtgggggggggtgggagcaggcatgccgagcacagggtgtgaaatcgagcatgaggaaacttactgatcccagctacccctttacccctttctgtgaacctcctccccagtgaggctgggttcttcccaccccagacccccacacgctgcctgtgctaccctcactcttggagcctcagccgcctccttttcctttcccacagcacttacagaatcctgccaacttccacaatgccgccacgga

SEQ ID NO: 18996 - DNA, 1273 bp, Artificial sequence
  DNA replication origin
ctttccttcccccgcccaggcaattaattggaagcaacacttgtgcgagtggggctcccggagcgctgtcgcccgaggaggccgccgggaaggcgctggcggtggatgacttcgggtgtctcccgccccccagcgaatcctcccaagtgggcatgctaatgagggtccacggcggggagggggtggaggagggagctgaactggagggggcctcggccggggggaggggaggggaggggaggggagggcggggctaggcatccagattaaatctcggtttaaaggattttcggaacgggctacggggtggagaaggtaggcggcccggcatcttacttccctgaccctgggtgccctggcacccccgggattccccgagcgaggggcccaggacagggtgaacacgcgcacgtacgctcccgctccccgacttcggggagttcctgtgaccaggagctggcggcaggagggaagccgggggcggctgcgcgcggccctgccccgccccgggagctgctgccttcctgacattgcatcctgtggtggccgaggcctcttccttccagccagtctgtcgcaagggctccgggctttcagcgcttgctcaccccccacctctctgccccttagacacccctggaagcccacctgctgtcccacctccagagatcttcgccccttcctctttcgtgggcactccctgtcatcattaccccctcgggagaaactgtattttatagctccctcccccagccccacccacctgcctgtgaaagttgcttgtgtggtgacctaactgccccaaacacttaggaaggtaagtgagtccccatcattcatccccaaagaagggcagccatgactgtctttaaaatctcctctgtattggactgccgtgccctgctgccctggccaacaccgggagctgaccaggttcactggcctttgaggtgacatctcctgactccatcccctcttctcagcctcagcctctggctggcccctaaaccttcctgccggccctggaagttgctgggacaaatcacttatctagaaataatgttcttgctccttgtttgacataaatcgttagcaggctctaatcccacccactgccacttgaaatatcgctttcaggatggcatttgaaaatgcagttgtcatgggctttccctccgagaagctggttaaatggattaattcgtacttcataacttgagccttttggacacgaactagcttcctgcaagagaaattaattggcatcccctta

SEQ ID NO: 18997 - DNA, 1884 bp, Artificial sequence
  DNA replication origin
tgcgcccgggcgcgcggctggctgcctcctcggcggcggcggcggcggccccattagcggagcctccgcctatgattggcttcgcccgggaagctggagacgggcgatgaataattgatgtgtgcggtgcggtagccggacggcggcggcggtggcgggcagcagcgagcgggagcgcgggagccggagcgccctcggagcgggcagcgcggagcgagcgggcgccggacccgcccgggcccccgcgccgccgccgccgccggggcgcggagcggggatgcaggcggcgcccgctgcctgcgcgcagcctttgttcggcgctggctgaatcctacccggagtcgctcgccgcggccgccgccggccgggccccaagcccccgagggcgccagggcgggatcgcgaccggtgcaacttctaggtaagtgcggggtcggaggggtcggcgcctgggcgcccacgggccgggccctgggctccctccgggcgcgggggtgagtgtgcgtgcctgtgtgtgacagaggagggccggtgcattgtgggtagcgccgtgtgctgcatggtgtcagccccaggcttggccgcgagagtggcaccggcgtgcaccgggccggttttgtgtgcccacagacggggccttcatttctctttggggccacggggcagagtgcgcccccacccaggtccctgaaggtgaagtgttggctctccagcagacattttacgaggctctgtgctcagtcggctcacgctgcaaaaataagaatcggccaggatgccttcggaggcagcgcctgagggtcctcgacttcaagctgctcctttgtcagaatgcagccctgatgcctccagcgcgtagagaccccacgggcactggtgatgccaccattgcggcagggtgcccttcgcaaaggtggtgggtgccgaatagacttctgacaagtgtttgctggcaagctggctagaggagagaggtggatttgcaccagagggcaggaagcagcctttcaggagatgcctggttgtgaggaccttgtacaagaccttggagaaagagccccttgatagggactaagaggaggctgcctggggtcctgagcatgtggttttggtattggtgtcttcgaagccaagccatggtgcggtgggcaccagataggtaccagttcctgggtcgagaagccctctggggggaaactaggagaggtcagctggcacttctttagacgggtttcaggagactgtcattcctgcagtggggacccagtcccttcgcccttgaccatcaggcgagactgccagatgagtgttgagcagggctgatggctcttccagcaggaaggctttgtgtggcaggtggcatggagttggtgccagtgtgcttctcattggcccatctttgagagtggccacagaaattgggctgaggagagaaatcaggctgagagtcagaaatctggctgaggagtgagttggggtgaaaaggccgtgccatcctgaagtcagggtgaccccagatgttacgtgggggctccggctcccccagttatggggctctgggcctgaagcttatctcccatctgctatggaggaaaggccctgtcccaggggttgcgtggaagggtgactcttggagtccacgtggctcctaacaagcctttcccctttttttgtgtataagccaggcagtgactaccctccaactagctggattcaagtccccttctgagctatttttatcctgaacttccttagtgagaaaccaccaaacggcgatgctttggtgagaatctaggtctttaccggaagcgcagcctgcacagagtttacacctcgctacataaggctgcctccactgccctgcacagccctcccctggctcag

SEQ ID NO: 18998 - DNA, 916 bp, Artificial sequence
  DNA replication origin
ctcaatgagctgttgggtacacctcccagacagggtggtggcggggcagaggggctcctcacttcccagacggggtggccgggcagaggcgccacccacgtcccagacggggcggcggccgggcgggggctgccccccacctccaggacggggcagctggccggacaggggctgccccccacctcccggacggggcggctggccggacgggggctgcccccgacctcccggacggggcagctgccagggggaggggctcctcacttcccggacggggcggctgccgggcggtggggctcctcacttctcagactgggcggccggtcagagacgctcctcacctcccagatggggtggtggcggggcagagacactcctcagttcccagacggggtcgcggccgggcagaggtgctcttcacatctcagacggggtggcggggcagaggcgctccccacatcccagacgatgggcagctgggcagagacgctcctcacttcctagacgggatgtcagccgggaagaggcgctcctcacttcccagactgggcggccgggcagaggggctcctcacatcccagatgatgggcggccaggcagagacgctcctcacttcctagacagggtggcggctgggcagaggctgcaatctcggcactttgggaggccaaggcaggcagctgggaggtggagattgtagcgagccgagatcacgccactgcactccagcctgggcaacattgagcactgagtgagcgagactccgtctgcaatccggcaccttgggaggctgaggctggcagatcactcacggtcaggagctggagaccagcctggccaacacggcgaaaccccgtctccaccaaaaaataggaaaaccagtcaggcatggtggcacgcgcctgcaatcccaggc

SEQ ID NO: 18999 - DNA, 1126 bp, Artificial sequence
  DNA replication origin
acagcatgcagtgagggtgcaggcacccccaagggctccaggagcacagcagcctggtcgttgccaagtggcacaaatgaatggctgccaatcccaagaggccccgtcccctctaggttctgggtacagctccatcatctcccttccagcccacagcttgccctcagttcccctcagatgcaggcagtacctaactcttccacccttctccccctgcagttaccctgggggtcctaacgcccccgcaggcatgggcatccctccgcacaccaggccgcctgctgacttcactcagcccgcggcagccgctgcagcagcggcagtggcagcagcagcagccacagctacagccacagccacggccactgtggcagccctgcaggagacacagaacaaggatataaaccagtatggaccggtaagggttcccactaatcctggtccagccttgcccagccagccaggcagacagccctgggaaaccagagttgggatgtcagtgcttatggggccatgtgtgctgggagagctgactgcattagggtgcatttgggctttcatggaagcatgtggaggtctgtgtgtttagaatggcgcatgtctagaatggggcgtgtcagtgtgcttgggtgtggtggggtgtatgggtgctggtgtttgttctgtgtgttggtggctcatgtacaactgcatatggggaaaaggttctacatggctctctgggcccccaactcaccaaggagtgggctcaatgtctaaaaatagtcttgtgaccggtctgtctcctggattgcctctgagaccagtgccctcctagtcaccctatctgtgggtctgcgcaggccccagtgctgctccctgaccttctgaaggatgggttaggggatgaggagaggggagcccccataggaatgcagaacaggaggtgaggaggtgggaactgcagggcagaggggcagaagtggaagctgggctgaggccaactttggggatggagggtgtgcctccactggcccaggaccaagggcagggccagggcttccaggaaaggggctgcagtctcactcgggctcctgcctccaccctcatctacctccaccctcccatacccctccctgtccctgca

SEQ ID NO: 19000 - DNA, 1527 bp, Artificial sequence
  DNA replication origin
gggagagggagagggctgatggcgtgtgctgggtagtggcgagtgcatgcacgtgtgtgtgtatgcatggggtggtgagggtttggggaagagcctgaagcttcccccatctccagagaatccgaaatcctaggtaaaacagccaagtctaaggacactgacagggcacgacgtagcctcagttagacccctcctattccattctgagcccacacacccaattcttcatcctctgccttgcctgggagggaacagggtatccagatcccaaggcatcaaccccaaaggctggggaatggaatggggtgaggaggaggtactcacagtttcctgcatggggtggctgaggggtttctcgagggcggccatgttgttgggcatgtccggggggtgggagagctgggggggcccgtgcatgaagtcattcatggatgtccctccagggttcccgtgggggaagtcaaagttgccatggccttggtagttgttgcctaggaagggatgagatggggaggggagggggtcacccagagggatagtggccacccccagggaacagagagtgtgtaaaaatacaagccaagtccttttcctcttgcgaggctgtagtaggtcacagcagcccgaggcttccgggctgtaggatagagcagccactcagccctgtcccgtggtctgtggtaccctaggggatgtgctgcccctactgctatggaggagggggcagagtgggacaaagggggcgggccaggctcctgtggggagtgggggacatggcctgagcctagagcagacctgctgagctactccccaatgtgggcacttttcatacccagcaagacccaggcccagagtgggtgcatgttctgccaagcccacaaagaaagctgcagcagactcaggatgacacccgcagaagccagctgttccgcctccctggtcactgtgccctccaccatgtggcgatggcaagggtcagaggatcagcagactgggaggcttggcccttggcacactgtgggagttcggctaggtggcctaacctcactgggcctctcatggggacctaagatcacggatcccagggggagctgccacccagtgggggtactttccaggaatcagtggcagtaggagtaaaacttggtctgggcagccgggagcgtaagggccagtgggtgaccttggtggccaaaggctgaggctctaggaacctggactctgtccctaggagggcaggaaagttgcaggggaaatgtagatatcacagaaaaaatacaggagggcaaggggtaaggccaagaactcgggtgggtgtgggagggaagaggcagcagtctatctcccaccagggcaggctctgaagcccctgggctaggcccatgtaccctcaagtctagcaaactgggaattgttttttgggggatgtgttacttctctctcttcaaccacacccccgacccctgccaccatcagcacagaaattctgtgcctctgcagggacttggggctgccctccttctccct

SEQ ID NO: 19001 - DNA, 676 bp, Artificial sequence
  DNA replication origin
cgggggagggcagggaccctcctgtgctgcgcaagggaccccgcagggcttgggtcagaaggtgggtcagggctggggttcagggctatggccaaagggactggggggacaggagccagcagggtggggaccctcagtggtgacacttccccatcatggggcttcctggtctggagccaggtctgggtgaagccctcccaccgcccacccacctcctcccttcggggcctcgagccctcacacccaccccttctctcgggcaggtcccggcgccaggcctagccccaggccaaggcgagtggcgaccccaacttacatccagcgaaggctccggcatgtcggacgctccctgcgctccggcctgaccctctaaggctgaggaggggttaaaggtcaggtcgctgtgtggatggctgctgggagcggcctgtggcggctgccggggaggctgggaaggaggaggaggaggagccccactgtgatgtaatggaggccctgactggctgctggggtgtggtacgtgcaaaccttgttgtatggaggggtggggctggtcagagctgccagcgtgtggcatctgtggaggaggagagagcgggagagaagagaggtgaggtgaggaggcacggcgatgatgcctggagaaaatgaaacccaacacaaccagggaagtcac

SEQ ID NO: 19002 - DNA, 1321 bp, Artificial sequence
  DNA replication origin
gctgagggaaattctctgataaaggggcacgttctgggctgttggcggccaacacccgtagcagcggcaggatgggtgggccagtcggtgaagaagatcctgatgaagcaccacaagtacctagttaccataggaacctgcggagaagacaaggaaggcacagagggatgccaggaaaactaaacagatgaaagaggaagttgtcatggattcaagtgtcttcatctcttttctgttgctctaacagaatactcgagactgagtaatttataaagaaaagcagtttatttagctcatgcttctggaggctgggaagttcaagattgggtggctgcatctggtgagggcctcatgatgcattgtagtatggcagaaggcatcatgtggcgaggagggcaagcgcgtgccaagttggcttttataagagacctactcccatgataacccatgaatctgccaactcattaatccatcaatccattcatgaaggcagagcccttatgacccaagggcctgcctcttagtactgttacaccggggattaagtttcaccatgagttgtggtgggggggacaagcattcaaaccatagcaccaagagaagagagcttcaaggaagaaatggcaactgtcaagtgcagctgtgaggtccagtctcagaaagcagcgtggatcagcaacgaagaggccattggtgagcttgcaggagaagtgtcagagaactggtggggcatgaaccaggcatatgaagggtgacagagaaagagagtgggcactggcagttttgtggctgagaagcctgcatgggaaggagcagagactggccatcaaggggtggagcccagaccaagctgaaccttgcaatgccagagcctgggccactaaacccggggaggcgggaggcagaggtatggggagggttaacgggctgatagaatgagactccttggagaagagaaaggggtgatggtgtcaggggctgggggaggggtagccccaactggggaagggacaccacatcctctgggcctgggtggaaaaagatatggccagggtggatggagataggtctgtgggtagcagcagggacagtggggagctgggtgagggtagggtagcctgcttagagcgaggtgggcgtggttagcaggaggctggagcagaggagaagggaaatggggggccattaaacattgagtgcccttagcattcagggaggctggagaccccagtgtatcctgacatcgacctgtggggctgaatgaatttccccaatagcatcccatggccttacatgaagacagtcagtggattcagggtgg

SEQ ID NO: 19003 - DNA, 1986 bp, Artificial sequence
  DNA replication origin
ggctggctgcgctgcccgctgcggccggcaggggtagtccacggacaggcctggaggaggcgggacgggggcagggccgggaacctgggcaagccaataaaggctgcggcgcgcggctgcgcgggactcggccttctgggcgcgcgcgacgtcagtttgagttctgtgttctccccgcccgtgtcccgcccgacccgcgcccgcgatgctggcgctgcgctgcggctcccgctggctcggcctgctctccgtcccgcgctccgtgccgctgcgcctccccgcggcccgcgcctgcagcaagggctccggcgacccgtcctcttcctcctcctccgggaacccgctcgtgtacctggacgtggacgccaacgggaagccgctcggccgcgtggtgctggaggtgagaccgctcgcagggccggcctgggcgcgggacacgggcccggggagagccctgggccccgggcggcgcggtgccgggcgcgctgggtgaccttgggcctccccatgccgagctctgggcctcagtttccccatttctgagaatgggcgtcagaatgatttcttccggcctccctcggagcactggagcgggggagacgggagggagggcacgtgtggaggagaaagctcaaggtcagatcgcagagagggagggctcagcacctctgggccggcccgggcacgagggaggggctccaggagccttctggggctgagcctagatccggagctccgaggtgggtgtcgggggtcttggggtgagcgtcgtggcccagcgggtgctcacgtggcggcccttgcacaacacggagcgcttcctggctccggccccgcccctgcggtcgggctcacactgggggtgctgggaaatggagcgagaggtggtttccagcagtagtgcgggcccagtaggcctcaggccccggccacctggtggaccccagaatgcccctcctgcgagtcgggacacactcagagacagtgtgcccggcgcctcaacccctgccactgtccttgggggccacactgagcacctcccctaactctgtttttgggtcttttctaaagcaaagtaagaaacagtcaccagggtagctttagagggaaagccctagtggagccttcaggtcggccacacattgacagcaggggtctgtttgtgttgactggcccgtatcccagggagcccttagtatttcttcttcattctcagtttcttctggaaaatagggacacccttcctgcttccatttggttccagggtgggtcttgcagcttcgagggtagaggctggctgggatggggcttcagccttccctccccacaccctcatgcctctccctgggcctcagtttcccaaccccgaatggaggagctggtctggcttctaccttagacacactctcttgtccctgaatttctgatgctttgggcccagctgtgggagcactgccagctgtgtccacagaagtaggccaagatagcattgtcatctcttctgacagattaggaaaccaaggccacctcctccagccttgggttcaggaaacggctcccagaaatgatagagctgcctcccatgggggttggcaataatgggaatggaatgtccacgtgcttcttccttagcctccttggccactgtgggggtgggtgggtgctgagagacacccaccttcacctgcctctccaatgaccatcctcttttgtccttcttctcccccaacagctgaaggcagatgtcgtcccaaagacagctggtaagacagggcctggggccttctgagatgggtctagagggaagggggccaggcagggcaaggtgggtggcgtgatgagaagagtcggggctcagagacccctgacagatgggagctccatgtgtggctcagccattgggtgctctggggcagccctgccatccctctctgggcctcaacgttggctctgccctcctctctcatagtagctgggagcctcaga

SEQ ID NO: 19004 - DNA, 2227 bp, Artificial sequence
  DNA replication origin
atgacaccgaacaaaatgcagattctctcaactgcgtcaactgtgagaatggacttttgctcactgtgtgcaaggcctgggtgtgacattgcctgcctacctggggtcctcagcccatgggaaggcctcagggcctgtggggaaggagatgagcagattcacgtgacattcgttaccctgctgggcaggatccccaccctactgcagtgcccttccagctggagaggggccccaggcccgctgcccccatgggactcctgatggtctgtggctgtgtgtgtttgtgggctgtgcatgtatgaatatgtgcaggcttgagtgtgcaaatgggtgtgtatgtgagggtgtcaacagtgtgagatgtgtatgagtgcatgtgtgagatgcatgtgagtgcgtgtgtgagatgtgtgtgtgggtgtgagattgtgtgtgcatgtgtgagtgcacgtgtgagatgtgagtgcctgtgtgagatgtgtgtgtgagatgtgtgtgtacgtgtgagatgtaagtgcgtgtgtgagatttgtgagtgcatgtgtgagatgtgtgtgcacgtgtgagatgtgtgagtgcatgtgtgagatgtgtgtgcacatgtgtgtgggtgtgagatgtgtgagtgcaggtgtgagatgtgagtgcgtgtgtgagatgtgtgtgcacgtgagatgtgtgagggtgtgcatgtgagatgtgtgtgagtgcactgcaagatgtgtgtgtgcatgtgggagatgtgagtgcgtgtgtgaggtgtgtgcacatgagatgtgtgagggtgtgcatgtgaggtgtgagtgcacatgtgaggtgtgtgggtgtgcatatgaggtgtgaggatgcatgtgtgagatgtgtgagggtgtgcgtgtgaggtgtgtgggtgtgcatgtgagatatgagtgcacgtgtgagaagtgagtgcacatgtgagatgtgtgagggtacacgtgtgagatgtgtgtgggtgcgcatgtgagatgtgagtgcgcatgtgagttgtgtgagggtgcgtgtgagatgtgtgcatgcgtgtgtgagatgtgagggtgcgtgtgtgatgtgtgggtgcacgtgtgagatgtaagagggtgcatgtgtgagatgtgtgagggtgcacatgtgagatatgtatgtgggtgcgtgagttgtgtatgagtgcgcgtgtgagatgtgtgtgagtgcgcgtgtgacatttgagggtgcgaatgtgagatgtgtgagggtgcacgtgtgagatgagggtctgtgtgtgagatgtgtgaaggtgcacacgggagatgtgtgagggtgcgcatgtgagatgtgtgagggtgcacgtgtgagacgtgtgggtgcgcgtgtgagatgtgagtgcacgtgtgagatttgtgggtgcgtgtgtgagatttgtgggtacacgtgtgatatgtgagtgtgcgtgtgagatgtgagtgcgcatgtgagatgtgagggtgcacatgtgagatgtgtgaggattcacgtgtgagatgtgagggtgcatgtgtgagatgtgggtgtgtgagatgtgtgagggtgcacgtgtgcggtgtgggtgcgtgtgtgagatgtgtgagtgcacgtgtgagatttgtgggtgcacgtgtgagatgtgtgagtgcgcatgtgagatgtgtgggtgcacgtgcgagatgtgtgggtgtgtgagatgtgtgtatgagatgtgaatgcatgtgtaagatgtgtgagggagcacgtgtgagatgtgtgagtgcatgtgcgagatgtgtgggtgtgtgagatgtgtgtgagagatgtgagtgcacgtgtgagatgtgtgggtgcgtgtgtgagatgtgtgtgggtgtgtgtgtgagatgtgcgaggatgcgtgtgaggtgtgtgagcatgtgagatgtgagtgcactgtgagatgtgagggtgcacgtgtgagctgtgtgggtgtgcacatatgagatgtgtgagtgcacgtgtgagatgtgtgtgggtgcatgtgtgatgtgtatgggatgtgagtgagcgtgtgagatgtatgggtgcacgtgtgagatgtgtgtgaatgtacgtgtggatgtgtgagtgtgcgcatgaaatgtgtgtgggtgcgtgtgagatgtgtgtgtgcgtgtgagatgtgtgagggtgcccgtgtgagatgtgtgtgtgtgagatgtgtgagggtgtgggtgtgagatgtgtgagtgtgtgtgtgagatgtgcgaaggtgcgcgtgtgagat

SEQ ID NO: 19005 - DNA, 1237 bp, Artificial sequence
  DNA replication origin
aagaccatggaaacggggcttctcatccgggagacagaggagcgcacgatcccgccgccagccaggacagtgggctccctggccacggacgtgccacgaggcctctctgctcccttgggaggtaggaaattattgtctccattttagaaaagaggggttctgtggcttgtctcagggttctccatgtcaggggctaggagaccgaggtgagaaggagggggctcctccatgtttgcaggggtgggggatgaaaagcagggctggggctgcaggggccagcaggggaggactcagcatccctcagcttgacttcctaagacaccaagtgaagggtcacgatgcggggtacctggcacctgggaggtttctcccaccattctgggtgaaactccccaaataaagctccaggacacagcaccggccagcctgaatcccagaacaacagagctgaaatgggccctctgctctctagtgttatgctgtcatttaactaatggggaaactgaggcctggagatgcgaagtccttgcccaaggtgacacaatgcgtcggcagcagggcaaagacttgagccgaggtctccagaacaccaggcttgtgtcctttctgctggaacagacacgctgggcttccacactgggcccagctatcttgatgtggacccccagagtgggtgggaggcagaggggaaggaaagggagtggggctgacaaaacctaaggcagtctggtgggggtcgtgggaggggctgccccacgttcaccaggacgcatctctccagcattctgtgcctcccccatgcctaacccctcctatctgggtccatagcgtggggaggggggcacacccaggtgcaatgccagtgatgtcagagggggtctggatttggggcttaaggtgggcaagggacagagaggtccactccccagccgctgttggaacacatgtccccttgccacgattgctgactcaggaaagagggatttctgagagtggctttccatacagggcaaaccggaaggttctgggtgggggcaggcggcctggctggtctggggaggtttgggattcacagtcaatttagtgcacctgtggccaatacaaggctgctcaccccaaagaggctctcagaggcgagcctgtggggacacccagggctcctggacatgggcttttgcttgcctttgtcccctccactgagaccccaggcccgcctgcaaaaagccccagactccct

SEQ ID NO: 19006 - DNA, 1255 bp, Artificial sequence
  DNA replication origin
aaccggaaggttctgggtgggggcaggcggcctggctggtctggggaggtttgggattcacagtcaatttagtgcacctgtggccaatacaaggctgctcaccccaaagaggctctcagaggcgagcctgtggggacacccagggctcctggacatgggcttttgcttgcctttgtcccctccactgagaccccaggcccgcctgcaaaaagccccagactccctgctttccctggcctgtggggggcagcaatgtcagtaacactgtttgtcaacacacacaagacaaggacgctaagagcccccggcccagccccgcaggcctgcgagggcaccccatgcacagggcgacacgcagcccctcggagtagcacagggaagcagcgtctcctcgggctggcggggggtggctctgggtgcgggcgggcagcccgtcactgcacgcgacggcagtagtagcccaggaccttgcacttctcgcagaggtgctgcgggtgctccttgctctggtcggacacgtccaggccgtcgggcttctccaggggtctctgcagagagaaggaggaaggggcccaggggagtgaggggagagaaagacagaaacacagagacagacagggagagacacacagagacagacaggtgagacaggtacacagggaggggaccagacagagaggcacacctctgcagagacagagactgacagacacagtgagggagagacacacacccgatgaggggtggggagagggcgcctgtggtcacaggttgtttcagccacggtgccggggccctcctcctgagcccgcatgcaggcgtctgagtcctagggcacacaggtggggccctaggctgggccagggctgtggaggggccttgtacctggcaccctggccatgtgcactgctctgctctgccctgagtgctgcctgaggagccagcacctgaagttcacgtgagtccaggttagaggcaggacacgggtgcagcctgtcagatgaggaaacccaggcccacagcaacggaggcctggacccacatctcccgaccccagcatccggcgcctcttccctggccactctccactcgcagccctgcttgtgtggcctcagaactcaagggaagcctaacccggacacagtcacagtgcttcgggcttgtggtgagtgagctccatgagtgttgattgacccccacatctcagggccggcccagtgccctatttgttgaggctgcatgaatgaaacctcag

SEQ ID NO: 19007 - DNA, 785 bp, Artificial sequence
  DNA replication origin
gggctgggtgttgtggagatagtagagcttggagcccagtgcagtctggtgagaatgatctagaagacagcaaagggctgatggtgcaggggcaaaacgggggatgcttcacccatcggcacaggagggagggagaagagggggtaattaggaagtttcatgggttggatggtgcaaagaagaacctcacatccaaggcttctgttttctcagtgaatgggagacaagcgggctggggcgggcttgaggaaggatgagcaaggaagcagcctgctagggaaagctggctggaccacccagccgcatcccaggcccagggaggtgtgcaatcctaatgcagtggcaggcatcagcctagttccgtgacttgctccagcacagctcgcctggcaggtgcaggccaggcctggtgtacggagggtccacggggcaaaggttggctgggcgagcactccagagggcagatggttggggggtgggcctatttgtaaaagtatgatgaccgtgcttcatcgtggggcatcggcagggaagggaagctagacgggaccggtggagagggaggccgggtgggcctgtggactgggtggagtctgggagccagtggaatggaaggagagaacgagggggcagagatgggtggtttctgaagaagcccaagtctagggtgtggctgaggggtggtaggagggaaaggtcactgtcgatgaggtagtgggggatggaggagccaggggtgggatgggccatccatgtgtactgagtcaccgcaaaggacaagcaga

SEQ ID NO: 19008 - DNA, 979 bp, Artificial sequence
  DNA replication origin
gacaggcatgggacctatgcatgccacatgaaattatctctgatcactgccacggcctcattgaatcagcactcttaaccctaatgacggatgaggaaactgaggctcgagacaggggcagcaagtctgccaagtgctgagcccctggcttttccttcccctctgtgctctgtggtactgctttagggaccaaccaaagacctccacactcacatgtccacatgcacggccgggggaggcaggtggaagggctgcgtccctgcagcctggtctgggcagctgcaggctccacggaggccccggaggaagcaggcggtcagagggacaggtgggctgggccgcggcctgcaggatgctgggagggaggaaggacgcggcaagaggccacccggggcttcctctggagcctcaagggcctccttgtctgcgcacagccgtcctcgcctccttgcccagggccccctcccctcttctgggttcctgctgcagcccagcatgggcccagaaggcctggcctcttgtcacccctcccacccccgttcccagcccaaagccaccacaaaaatgccatcctgattccacaacactagggtttgtcaaagtgcaaggaacaatgggagctttcacagggacaggaaaaggcctcaggaaaaccctggggaggggggcatggagtgggggtgtggagaggagggaagggagatagagaggagaaaacaagcgggggacagagagatgagggagagatcctggagagacagggagtgaggacacgatgttgggaatgaggggcagggagtgagagagcgcccgtcagagcagataagaggagaaggggggacagggtgcccaggagaggcgagacatgatgcagaaacaaaccaaaagggctgggagacagagacattcgggggaacggggcccacagaggccaaggagcccctccaggacccagagaagtgccaagccccccaacacc

SEQ ID NO: 19009 - DNA, 908 bp, Artificial sequence
  DNA replication origin
ttcctcatctttcttgttcactatggaatgtcccatgcctggagcagcacctggcacatagtaggtactcaataaatacacgatgaccagtcagacaaaagtagcatgcttgaacactgatctggccttctgggatgtgctcaggatgagcagagccccatgttctgggagcatctggccagcatggctggggaggagtgacgtcacagtggaaagggccctgtggggctggagcagcctgtgcaaagggctagaccacgggaagcatggagggcttgaggcttggaggccaggccagtccaggtcctagaccatatcttagagttaaatatcagcccaggagtatgggaagccagggaagcgctgaaaatgcgaaagtctgcctggcattgtgagatctctttggctgctgagtggacagaggggttggacatggggggaccagttaggggggtgctgccacattgctggggagaggtggtgggggtgtggtctggggatgggtggcagaggggagaagagtgagagacccctgagatggcaggaggttgagtcagcagcacttgggctagccttgggggaggagagcaaggactcaagagcaactcccaggtgtgtggcctcaatcagctgcggggctgtgggggctgaggcaggagctcccctcttggcccatggttgccctggctctgactgggggacaaggccagggtggagcaagggaaggtgatgacggtgtcttgtgccggcagtgatggacggaaggaggactggccgtcactggacagcaggcaacagtgatggatggcagcctcatgataactgtttgccctggctcctgtcctcaggaatcgcctataaacctgtcatgtgagcctgctcaaggtgcccttgggggtatgatccac

SEQ ID NO: 19010 - DNA, 723 bp, Artificial sequence
  DNA replication origin
caggaccggccctgggctaggcacgactcaccaaggcaggagcacatggggcatagaagggcataggggctgcaccatgcaagaggacgtgtttgggctgaacctgggggagatgagagagtcactggctaaggccatagcacaggtggagtggggatgagaaggctgagcagaggtcaaacggcccaggctgggctaccttccaggactggggcagggcagagtgaagcccacccaaagaggggcattctctgtcccctaggggccagatggggatgggggaaagatgagaaacctggttgagatttcttacctcttgagggccttaaaaccaggttctggggaaggggtgctgtcctgacaagttagggttcagagaggagagctctgaggccctggatggttggggaagactccctgagagaggtgggctcaagctgggctctgaaagggggataggagagaagagattcgggaaaggcattgcagactcggggacagtgtgagcaaggccttgaggctgagaagcccaaggggtgtgtgcatgcacgcacgtttgcatgtgtgcacatatgtgtctgcgtgcatgcatgaaattaagcagctgcaggggtgggtcagggagaaggagaggggctccggtgggtgttgcttcccaggtatccgggctgcttctcatctccctcacaccaaccctcccatcaggtacatgagcctcacttt

SEQ ID NO: 19011 - DNA, 1825 bp, Artificial sequence
  DNA replication origin
agagagagacggggttccctgaagtcaggttgtgaaagacatttccccaccactgcactatacagtataaccttttcctgctcctttcacactgtgtgactttatggggaaactgaggtacgcagcaatgaagtgacagagggcagttctcactgagctccggttgggatcctggatgccagaaattttcaaaaagcagcacaacatcctattcttatagggtactcttgatggttccaaactcccaggtcctctcaggggagacccacaggtggggaacaatgccaccatggtagggggagcagagggaggctagaagaggttgattaggggtccacacttgacctgtgggtcatgttcacccttctcccagggtgagaaactcccgtggggctcccacaagcacccccatcaaatcacccaccattcataccctctatcaccttgtctgtttactcatccgtggcccccactagcctgtggctgtgaatccccgggtcctgcccagagctcaacaaatgtttggtaagagaacaaacaactgaaaagacgcatgcaccaaagaaacaccccacaaacggtcctccagtcactggtcacctgaagccaattccctgaagaggcagaaaagtctcttacaagaaagaaagatccccagccaagaaccattcctcacgtggagagaatgctttacagtttacaaagagctttggcatagaaatgcttttgcctgacaccaaagggtgcactttcagactcatcttcctcctctgcacccagccccctcccacgcctgttctacccacccaggtcaacaggtcagcctgggtagtgttggccttgggccagcattttatatgtccatgcctcccctagtaaataatggcagagttgaactcaagggcgaccctctgcctccctctcttacccccagcacacccttgcgtacataggctttcctccccaacccattcaggactctgactctcctaaaactcaccggtgtgcccaggtctggaaggaaagtgacccccatgtgtgtcctcccccgaacacacctcttgcatctttgcagagaaaacccccacaaggggaggaagtgaaggccacagatgggtgtctgaaattcccaaatgaggcaggagtaaatggagggaggggaggagtccagcccacggaaaggagtggtatctgggcaggccctggagactcttcaaaaagggctgggaggtggtggcgatctgtgtatttatcttgctggcaaagaggcgctgcccagtcaactttgtaactgaatccaccaaacaggcagactttgcaacacagccggcccaggtttctgcagaaggcgctgggcagctggaacctctccccccccctttctagcccccctcccaagagctcaagaggatttccctttcatttccttcgaggctgggagggctggggacagcgcagtctgtggggtcaagccctcagaaaccacttcctatgtggctgggggagggcgagcagctggaggacgtatctggggtccccgagtgagaacagcaggagaagccctctgggcagtcactgctctccagggtgcctttcgggtcgggaaccgcagaggtcggagaaaagattttaggcccttccagaggagctccgagcagaatctgcactctcggtcccagcccgcggtggccaggacgaggataaggttgggcgtgagaaggacacttcgaaggggctccccgcccaggccgcaccccagctgtctgaagaaaatccggagacaacccctcctcaactccctcccccaacccctttggagcagggc

SEQ ID NO: 19012 - DNA, 943 bp, Artificial sequence
  DNA replication origin
aggcgtcatgcagaggtcattccgctggacggtggccaagctggcactccaacgctgggcggaatggctccagagccagactgaaagtgggagaggtgactcggtcccagccaggcggtgagttcctctgggctaggtccccggtgctggcgcagcaaagaccacccggagaaagagacggtgaaggccccggggcttcctggggcgtcaggcggaggcggaggcgggggcggggctccctccaggcagtcttggactagctgagttgtcccagcgagatgggtgacagccgctttcccgagctcccccggcccaggctggtgtcctggcgactcgccaaggcaccggggcgggctagggctggagccggggtggaggaagagggtcgagaagcgaggcgggcccagagcagaaataggagaaggggggggggagggggcggggagtctttcctggggcaggaacccgggccccccttggcgcagccggcccgcaaagtgattctgcagatggaaggaattaagtaggagggggagggtccgatggtgatagcgagaggagggagttagaagtgtgtgcgtctgtgtacacgcgtctgagagaggagcgggagagacagggagaaacatcagaccagacggaaatagaagaaaggagacaagaagagtgagagaaagagaaggacatacacacacacacacacacacacacacacacggagggcgccacatacaaggacgacggacacaggagactagtactagtctaagagagagagaaagaaggagtatgagaaaggagggaaaataggaaaggaaaagtgagtgaaaaacaattgcagaggatttggaaagaacgagacaagagcgctgacgacagagggagacgaaattgattaggccggggctgcactgagctcccggcagctcggggagctgggttg

SEQ ID NO: 19013 - DNA, 880 bp, Artificial sequence
  DNA replication origin
ctccctgtctctcccgctcctctctcagacgcgtgtacacagacgcacacacttctaactccctcctctcgctatcaccatcggaccctccccctcctacttaattccttccatctgcagaatcactttgcgggccggctgcgccaaggggggcccgggttcctgccccaggaaagactccccgccccctccccccccccttctcctatttctgctctgggcccgcctcgcttctcgaccctcttcctccaccccggctccagccctagcccgccccggtgccttggcgagtcgccaggacaccagcctgggccgggggagctcgggaaagcggctgtcacccatctcgctgggacaactcagctagtccaagactgcctggagggagccccgcccccgcctccgcctccgcctgacgccccaggaagccccggggccttcaccgtctctttctccgggtggtctttgctgcgccagcaccggggacctagcccagaggaactcaccgcctggctgggaccgagtcacctctcccactttcagtctggctctggagccattccgcccagcgttggagtgccagcttggccaccgtccagcggaatgacctctgcatgacgcctaacctctgcgagcaagcctgttttctcctctgtaaaatgggagcagtcatcctcccgccgccggggacatttgtgtgcttcccagcttgggtttggtaagcggaagatattccataaaggacagctcttccccgccacccactccacgagttactcacatcacctgcagggcacctaaccacatctatggtcgctcgcaccacgaaggccttcagtgatgaccaaatgccaccctttttcaccaaccaagaggccct

SEQ ID NO: 19014 - DNA, 766 bp, Artificial sequence
  DNA replication origin
ccttaaggagcctcgcagagactcagggtttgtcagagcccatgccccactgagccagctgccccccggtagcaccaactccaggcggctctaagggaagctgagctgggtgtagacatttctccataagtcctgtgccccccaccatcttcctgtaatttttaaattgtgtgataggcagagatcggtggtgagaggctaactgagctggactggagaggagtgaagaacgcaggggtgaggtcagtcagaggacgggacaggcagagagaagatgagagagaagggatgagagagggaggggaaggacaaagagaaggagaaagacagggaggatagagagagaggggttgaaacagtgagagaaagagagaagggagagagagagaaggtggagggtgaggggagagagagagagatggagatgggaggatggagtcatggagagaagttgatttgggcccagggggagaaaaggaaagctggaagagacaaagacagaaggacccacagtgagaaccaagggagctggagggagggaggtgtccagagagctggccagtgatccacataccgagaggaaggcagagagtaaaagagaagagaggaatgaagacagaggaaacaagagagatggagaggactgagacagggagaggaggctggagagaatcacagacaaacagcacaatagaggaagggaaagagttgttgaagacagggtcacagaaagagagaaaggaaggacaaagagggaggcagagag

SEQ ID NO: 19015 - DNA, 928 bp, Artificial sequence
  DNA replication origin
gcccccacccaggcgcatggctccatgaagcaagaggaggaggcagagcgcgagaggtcccgtccgccccagccgcgtctgggccaggataaaaggtgggaaactcgggctgcgccgcacccttctccccgctgccgggccaggcctccctcggtccgccgccgccttgcccgccgggcctgttctcgccggggcgggcggcggggccgggaagagaccccgcggtcctggggcgagggtccgggggcagcgtgggggaggggtcccgggcggcgggcggggcctcaggccatgtcccagcggagggcagggggtcgggaggcactgccggggaggggcaggcggcgccgtgccccgggccgcgaggctcggctcccgctcctggtccttgtctgcactccctccaggaagcaggctcgctcgctgtaatgtttggtggtctccggcgccgcctggtggcccccacccaccgtcccgccgccccgccgccccctcccccgcccggcgtctggattccacccccgcggctcggcccaagctgctctacctgtcgctccatcgtctccccaactccccagcgccccgggccctctttcctcttaccctcgtttctcacctttcaccctgtccctcggcccgcttttcccctccccgctctgtcctgtcgttttcttaacactcttcacacgcgcacttcctcctcctcctcttctctttttcccacccctacctttgggccctccttccttaacctccgctggccccccattccatgatccgtccacctgacacgctgggtttcatgcctctctttcccaggctgtgggttgtgcccttcactccttgccctcctccattccctgtcctgatctgaactcctctccttgccacgctccctcacccttatccctctgcacactccaaaatt

SEQ ID NO: 19016 - DNA, 1393 bp, Artificial sequence
  DNA replication origin
ttagatcctaactgtactgcttattagctgtatggttttggatgaggccctgagacttagattcttcatctaagaaatggagatgtagcatctggaacacagcatgtactcagtaaatgtcagctgtcaccattgtcattgccaatccactcagcccacgggcaggtatgtatggtcctggcaaaagttgttaagaggaggccgcaggcgctggggagcatgcggagaggctgcgtggagctgcgtgctcccggggctgcatgcccagtgaagcgcatgaagggcgagcggtgatgggttctgcgccagtggggctgggagagtgtggggggctgtaggtggagctgcgcgcaatgtgggaactgcacgtgcgggcttggggactgcgcacatcggggggctgcaggcgtgggggagggtttggggggctgtgcatggggctgccctcacggaaggctgcacgctcggggacgcgcggaggctggggtgctgcgcgccgctggagagcacgttgggggacatgcagggactgcccgggcgaaatggtttgactgcacgccctccaccccacatttcacagtcgccatgacgactgggaggtccgcagccgctgcggtggccggtacaagtagttgaggctgcgaggccagtgaggcctttccagacctcgccctactgggctgggctgcgtgggaaattgacccagctccaccagaacaggaactatgagaaaatagttgggcaaacgaggagtaagctcaaaagcagcggctccacagccatttcaatcttcccgccccagccagttgaagctgaggggcctcccaagccagggagccagagatggaggaggaggtggaagagtccgggctgcctctgtagctttggaccctaggcagagggaacctgccagggggcgggaggaggtgcgcaatctgagacctccaaatggcttgcagctggacgtgattgccaagacccttctgggctgcttccagttgttacataatttcctggcgcagctccaggaaaaggtgcacaaactgcaggcgcctcagttctccaggaagaccactctgggctttggtgtggagagggcaggagagccctaggagggagccgcatggcgcttttcttgagtcttgaaggagatcagtttaataagcaagggtttgtgggtgcccagtagcaaataatagcaaggtccgagctctggaaaagcgtggcaagaatcgccaagctccattagttcttgttttaaaacattttcagggttttctgacagtagtcacccctatgtcacaataaggaaatggtatctgaatcagggcagctaattatcatacttggtaaaaatgattagctggctcttgaagaacagacatgtttctca

SEQ ID NO: 19017 - DNA, 909 bp, Artificial sequence
  DNA replication origin
cacagtaaggacagccgctggagcgctacggtctgacgaacgagcgagcgctcggttcaccccaggacctgggctcacaggccgcgggccgggggaagtcgtgcaagcacaatcccgactcccgcgcgctaggagcggaggggaggggaccagactccgcaatgagagcaagcatactggtccgccagggtcttgggcgggcgcccagggccctgagaaaccggctagccaggcttttcttatatgggggcggggacggctggggagctcccagccaactctgtgtctgggtttttcaagaggatggtgaagtcggaggccagcaatgcggctaccgcctatttccgtccagcaagacccttgccctctctggtcacagtcctggggctgggctacttcgcggtgaggcgtggggtggggcggggcgggcctctgttttggcccgccgggccctcgtagggcgaggggagctctgggaacggggcctgtgcgcacgcgcatctgacggttgtctcggttactcatgtaagcggaaattcggtgggctcttaggatagtttctgctttctagtgttcctgtctttgggtcctcacctctgcatggttactaacgggttatccgagcctaagcctctcacgaagcggaaagtcaagttaacagactgccataggcctgccaagtcagaatagggcttccgaagcagaatgtttgagccaataggaattgtttggaaaacggggataaatctaaaggatgggtaggatttaagtggtaagggaggataaagaggctataactgttctgacataggtgtggaagcaagaagaaagctgtacctagaaaaagagcgacgtttgtttggctgagaaataatctgtttaaaggataacgagaaagatgcgtggaaa

SEQ ID NO: 19018 - DNA, 1490 bp, Artificial sequence
  DNA replication origin
ctgagagtgatgccgaggaagacacttccctccgagtcttagtctgcccgcctgtgaaactggctcgtaacaaacccctgaccccaggctcggtcgccttgagcccaagacctcacccaatgccccccgccccgccttccctcccgggctcccaggaggtgcggggactcggggggcggccccttcctcgggaggcgcccaggtggcacgtcggtgcctcagctcccggggtctctgggctccgcgctgcccacggggtgccgaggggcctctggagggggcgggttctctcgagccagaaagtccggagccgcccaggaattttggctcgaactgagtgcatttcctctcgggccggccgggtgcgatccgggaagggcggctgcgggcagacgcggcgctgcgctcggccaggccggcaccatgcggcccctgctctgcgcgctgaccggactggccctgctccgcgccgcgggctctttggccggtgagtggggcgcagggcgcggcaggggacctggagccggggagacccgcagatggcgaggaaggaatgagcgagagagacggagagagagctggacacagcagcgagatggacagagaggcagatgcagggagggagggatggagagaaagattgagaggaaacagactcagaaaaaggcagagaagtagagcaacggagagataaaggagatagggaagaatacacagtgaaaaggaaaaaggagaggctgagacagaaagaggcttcccctgaacagatatgaactaagatagaaagaaaaaggagtttgagagacaaaagagaagaaggaaagagaaaaagtgattaaaatggcaaggggtggagggagagaggatattgaagaaaagagaaagatttgagagagaccaaaaaggagagagagggaagctcgatgcccggagtagagctggcaagagagaaggagccaggatctggagtgggaggtcacagctgctgggtggggcagccccggaggccagctccatctcagagggcctgtggaggctcaggcctggctttataggacattgcataagaagccacactccaaaggatgagtgacccaggctagcccagcacagccttaaggaaccaggcagtcgggcccaggagaaaggccaccgattcacctgccaggtggcctcaggtggatctgcagtcagtgaagaagtcagcctcccggtttccagggagcttctctgggaaactgagctatgttgggtggagatgggggactgggtggaggtggagagctgtgcggaggagagaggctgtctgggtactccattagctgggttccttgcttttcactgtccgctttcttcccctcacctacccctcaggcgggcggatcacaagctcaggagatcaagaccagcctcgctaacatggtgaaatgctgtctctattaaaaatacaaaaaattaatcgggcgtggtggcacatgcctgtagtccca

SEQ ID NO: 19019 - DNA, 815 bp, Artificial sequence
  DNA replication origin
ggggagtggcaccactgggggaaagggtgcgtgtgacagtggggaaggagtggtgataacagatgtgagcttgctgtgtccactaaaaaggtcacggctatttttaggaagtaggtgacaaggcatgttcctgtagaactgcttattactgagaacccactgttggcctcgccctgcgtggtgtgcttaaaaggagagaccgcccccactcaccctagagtcatccacctggtgtccctgagacatgggacactggatgaggaccaggtttggaggatgaagaagatcatgtatttggttttggacatgttgtgtttgaggtgtctttgagataccaaataagctggtgggtctggggctcaggaggcgtcttggctagacagacatttgtctaggttgtgtttgtatttgaagtcatgggcacagcgagattgaagaactcacctcgaacagctgagtaaaggaagatgagcctataaaggacccagaaaaagagcgacctgagaggggcccagaaagccaggacagagttgtatcccaggggccagggtgagtctgcttcgtgggatggagtggtcagcttggcatcgcggctgtggtgagtgatatggaggagatgtggctgccttcactgctttggtgggatgatgtgagcagaagcgaggttggagtgaatgggtgaggagtagcaggacgtgaggatctgatgatagacaggctctgaaatgttggctttgaaggcgaagaggacgtcgttgagggagtgtttgattctgttgcctcgatttaccctcctgctccctttccaatcccag

SEQ ID NO: 19020 - DNA, 945 bp, Artificial sequence
  DNA replication origin
actgggaagggtccgaggggggcttctggggtgggggaatatcctgtatccagccacgggtggaggttgtgctcattcattctagaaagagtcactgtgctcctagtgactgccagtggtgccttgtgagcagatagacagtaatacatccccatgaggtggccaacttctgacagggaatagaagggggcccagcagtggctgtggagcctgtgaggggcctcgcagagactcagggtttgtcagagcccattccccactgagccagctgccctcggtagaaccaactccaggcagctctaagggaagttgagctgggtgtagacatttctccataagtcctgtgccccccaccatcttcctgtaatttttaaattgtgtgataggcagaggtcggtggtgagaggctcactgagcaggactggagaggagtagagaacgcaggggtgagttcagtcagaggatgagacaggcagagagaagagagagaagggatgagagagggaggggaaggacagagagaaggagaaagacaaggaggatagagagagaggggttgaaacagtgagagaaagagagaagggagagagagagaaggtggaaggtgaggagagagagagagagagatggagatgggaggatggagtcatggagagaagttgatttgggcccagggggagaaaaggaaagctggaagagacaaagacagaaggacccacagtgagaaccaagggagttggagggagggagatgtccagagagctggccagtgatccacacacggagggaaaggcagagaaaaaaagacagagaagagaggaatgaagacaggaaacaagagagatggagaggactgagacagggagaggaggctggagagaatcacagagaaacagcacaatagaggtagggaaagagttgttgaggacagggtcacagagagaa

SEQ ID NO: 19021 - DNA, 1561 bp, Artificial sequence
  DNA replication origin
aggaggacagctggccgctttcgggagccccaggcgcgaagcggcctctctccgcctcaggtgagtcctgctcgacgcccaaggcccaacggtcagaaccgcctctgcccgccggacccagcgaagctaggggaacaaatcccaaaaacagttcgggcctttccggtgcgctcacccctacacacgcgcctgctcgccacccaggagcggcgtcccgttgccaggcaacgagagctcgcgcctcaggagccagtgtaggcgccgcaaagcggaaggggcgcgcggataggtgagcagagggcacgcggtgggcagcgaagggggaacgcgcagcagagaggagagggcgtgcaggagtaggagcaggcggcagagtagagggggcgcggcagagtagagggggcgcggcagagtggagggggcgtgcaggagtaggagcccgccgcagagtagagggggcgcggcagagaggagggggcgtgcaggcgcggggcgcccggcagagagaaggggtcgtgcggaagggggcgcgcgccaggggagggggccagagaggagggggcgttcaggagtcgggcctgcggcagagatgaggcggtgtgcaggagggagagcgcgcacgagggggcaacgggcagagaggagagggaatgaaagaaggggagcgtggcagagagaagcgggcgcgctccagggggcggggtccagggaggagggggagcgtaggatcggggcgggaggcagagaggagcgggcacgcgggacgggcgtgtgctcgtgaggggtcgaggaaaggcgtatgtggaggcgcgcggggtgggtgagccgaggagacttgctacacagaaacctggaggagtaggggcacacaaaagagcaagggaccctgactggcagcccggcatgctctgggagagacaaagaggtggcgggctttgaggaggaaccaggaagggcagccaatcggaaaagggtggaagaccttccagagtccctggaagaccgtcactgcaagctgctaatagcttggcagtttcacaactctgcacctttgctcttgctggtgacctctgcttggttcctttcagaaccaattcgggtgccccaccaccgggaagccgtccagtctccaccaggcccaaacccttgcagtcttccctggcctagtcgtctgtgcatgtgctagcctttcctgtgctctctttcagcttatgggcggggcagtgccaggcaagagaggccttaatagatgttagttgagctagtaaatgccagattgggcgtggaaaaatcaaagggaagcatgagggcaggtggcagaactctctcaatgaataagtcaagaaatatttacagagctcccagtgtgccaagcgtgggcggtatacagtaaacaaagacaacccctattcttatcaccttgcctactgagtgcaagtccaggaactgtgtaagcagaccctcagaggagctctgggaaacactgaaaaatagcctctccccccattggtgagtgtaccctaagttggtctgagtgggctttaaaaggcatccccttggc

SEQ ID NO: 19022 - DNA, 1340 bp, Artificial sequence
  DNA replication origin
agccaggtctccgcgctctactcacccgcgcgcggcggcggcagcggcggcgcggcccggctcggccgaggaagttagagcaagttccgcggcgcggggcgggagggcgcgactcgggccgtccgagcggcgggggcggggcgcggaggggcgcggaggggcggggccggaggcgcggcgcctgccgtctgccgaggaaggggcgccgcttccctgcgccgcccggtgcggccccgggcgcctgggcccgccctggccccgcccctcccccagccgcctcgcccctcccccaccgcaccccgcctcccggcccgcgcggcaccggggaccgcgaggccgggtcgccggcccgcccctttgtcccgctctgggcggtgccggaggcttggggcggccccggtccgcgccctcccagtgggtgcgcggcgcaggccgggcctggcccggggccgggcacttgtagccgccgggagcgctctgagccgttgcgctgcgcagacgccgctctggccttgtcggagccgaacctgggagaagcacgagctgtgggaggcggcgtctcgagggatacacgggatgaccgtggagagcgggcgaaggattaggaaaatggctgtggtggagataagaggcgttcctgcccggctttggagcctgggggcgggggtagtcttcaatcaaaagaaggatggggaaaaggtttttatttctttgtaaaccaaggagtaaggacacgctccttctggccttggtgctaaaaataccaagctttctttggatcgtggctgagatttcttcctaacctttacgctaaagaggtggctgggacgattcttgtggtgtaggggggtttccagggacagccaggggtggcgcccctctttggatcgtggctgagatttgttcctcacctttacgctaaagagatggctgggacgattcctgtggggtagaggggtttccagggatagccaggggcggctccccagcctcagcctccctacctgtagaatgaagcatgccacacctctgtttcttaaacttattcggtggctgagggccgagtggtcttctctgttgagtaacaccaaacagggatctattaaaactgggctaagactggttgccacatgccagtacaagcaaccaacaggttaattccaatggaaggaggaaatcttgaaatggagactgttcagtccattcccaggtttgtttgggttgttttttgagctaaggtatcgctttgtcacccaggctggagtgcagtggcatgaccatggctcactgcagcctcgacctcccgcctcagcttccccaagtagctgggaccacaggtg

SEQ ID NO: 19023 - DNA, 1631 bp, Artificial sequence
  DNA replication origin
gagggctgctccttaggtccctgtttggcccctcagcctccctccccgcctgcccaggagcggccccgcgggcggcgctggctttgtctgccaggattgctcgctagaggttggaggcctccgccgggaccccgctgagccgaactccggcgccgcgcggacgagagccgcggcgggcccggggccggcactcctggttcggtagccctcgccccatcagcgcgccccggcgagtgcgcgcccgtgccgggcggggtgagggcgacgggagcctggacggccgctgctgctcggggctctgcttctcgtccccagcagcgagctcggggatgggccaccctttcggctcagtcacccaccctcggctcccaggagatcgggtccggggtgggggtgggcgtaggccggggcgggccgccccttcctcctgccccgccgtggttgtgctcagtctcccacgccgccgtgggtcccactctgcccggcttgggtttgggacggccggagtttgagtaggcggtgacccagcttctccgcgttagtcgtgtggggttgtgtttgggagcaaagcctgacccctgacctagccggagttctggtagagtgaggtttgtggctgcggactgtgcttgtcccgggccgctgctgcttctcctccacccccaggggtggggtgcgggtgggtaggaagtgcctgtgtgagggtgtgtggagggactttggccctgggaccgcaggagcacttgtcttggggacttaaagttgatctccggcgagaaacagtccgtgctagggggagtcgggggaagtcgtgggcccgggtactggcctggggctgggcgcagagcggtggtgagtgcggcggtgtcacacactcgttggctgtgctggcgctgctatccgggaggtcaggcggtgctgggcggctgtgcagagcattgtattggagcctctgcaggtgtgctcttggcagtggtctgctctccaggggatcttcctcccttccgagagggagttgctcttgggctagtgagagagtggcctgccaaatcctcaaaagtagccttccccttgccccttgaccttgaagtccagaagcagttagtgcctgctgagtgctccggccacccttctctatttgtgaagggaaacctggggacaggccatcggagcacccctatgtccttgccacatttcagctagccgagtggttggtgggggcggccgtctttccagggatcttcctgggccctggcacccccagaatgaagcccagactccaccataatggccctgtatgcccttctatccccttagctgctggtgtgatcatagcctcaaattgctgggctcaagtgatcctcccacctcagcctcccaaagcacagggattacaggtgtgagccaccacgcgcagtctgatcccactccgatccctaacgttatagtgacaggccctggaaacccagggccaccagatgtattttccctttccttctcattgtgttgcaccccaacttcagttggagactctggatatatccatccccacatctctgaactccactgcttgggccacctaatgtcatcctcagtttagttaacaaagcatggttgagatttctgtgggg

SEQ ID NO: 19024 - DNA, 843 bp, Artificial sequence
  DNA replication origin
atggcagcagtacagtccagctttggctcggcatcagggggagaccgtggaaagagagggagagggagaccgtggggagagggagagggagagggagaggagggagagggagaggagggagagggagaggagggagagggagaggagggagagggagaggagggagagggagaggagggagagggagaggaggagcctttcccagggtaatccatttttaaaattctgtatgtccgattacttttgtggagacaaagggaaaagtacagaagatcacacgcctaattgtttagcattgcttcttagctttttcttggaatgcggagaaaaatgacactttagacaattctgtgttgttttatacaatgagtaggatatacttacataattcatatgactcaactataatgcatttcaaaggttttcaaatgtgatataaaagaacagacttctggagcctcagcatctatggagcagggacccccccagagagggacctgcaggcaaaccagaccttcctatgccaggaaggctaggaagtggcaatggagaaaccatccatgttccctggggttcctaagctggaagcgggctttgaggcatctcttagaagcagctctggcactggtgtggagagggcactgggagagcaggaggcaggggaaacagccagtggactctggccaaagtccaggagaaggtgacaggaactgagccagccttgccagtgggagccaagcagggcagaaatgggggtcccggagagtcctatcaggcactctgcttctacataaaatcctttcaaatctgaagtccatatgaccaatgatggccagacagccc

SEQ ID NO: 19025 - DNA, 1185 bp, Artificial sequence
  DNA replication origin
ccggacggggcagctggccaggcggggggctgacccccccgcctccctcctggacggggcggctggccgggcggggggctgacctccccgcctccctcccggacggggcggctggccgggcagaggggctcctctcttcccagtaggggcggccgggcagaggcgcccctcacctcccggatgtggcggctggccgggcccggggctgacccccccacatccttcctggacggggcggctggccgggcagaggggctcctcacttcccagtaggggcggccgggcagaggcgcccctcacctcccggacggggtggctggccgggcggggggctgacccccccacctccctcccggacgggcagctggccgggcagagggatgaccccccccacctccctcctggatggggcggctggccgggcggggggctaacccccccacctcccttctggacagggcggctggccgggcggggggctgacccccacctccctcccagacggggtggctgccaggcggagacgctcctcacttcccagacggagtggctgccgggcggaggggctcctcacttctcagagggtgtggctgctgggcggaggggctcctcacttctcagacggggcggttgccaggcagagggtctcctcacttctcagacggggcagccgggcagagacgctcctcacatcccagacggggcggcagggcagaggcgctccccacatcgcagaagatgggcggcctggcagagacgctcctcacttcctagatgggatggcggccgggcagagacgctcctcactttccagactgggcagccaggcagagaggctcctcacatcccagacgatgggcggccaggcagagacgctcctcacttcccagacggggtggcggccgggcagaggctgcaatctcggcactttgcggggccaaggcaggcagctgggaagtggaggttgtagcgagccgagatcacgccactgcactccagcctgggcaccattgagcactgagtgaacacgactccgtctgccatcccggcacctcgggaggctgaggctggcggatcactcgcggttaggagctggagaccagcccggccaacacagcgaaaccccgtctccaccaaaaaaatacgaaaaccagtcaggcgtggcggcgcgcgcctgcaatcgca

SEQ ID NO: 19026 - DNA, 1348 bp, Artificial sequence
  DNA replication origin
gaggagcccctctgcccggccagccgccccgtccgggagggaggcggggaggtcagccccccgcccggccagccgccccgtccaggagggaggcgggggggtcagccccccgcctggccagctgccccgtccgggaggtgaggggcgcctctgcctggccgcccctactgggacgtgaggagcccctctgcccggccagccgccccgtccaggagggaggtgggggggtcagccccccacccggccagccgccccatccgggagggaggtgggggggtcagccccccacccggccagccgccccatccgggagggaggcggggaggtcagccccccgcccagccagccgccctgtccgggagggaggcgggggggtcagccccctgcccggccagccgccccgtccgggaggtgaggggcgcctctgcccggccgcccctactgggaagtgaggagcccctctgcccggccaccaccccgtctgggaggtgtactcaacagctcattgagaacgggccatgatgacaatggcggttttgtggaatagaaaggggggaaaggtggggaaaagattgagaaatcggatggttgccatgtctgtgtagaaagaggtagacatgggagacttttcattttgttctgtactaagaaaaattcttctgccttgggatcctgttgatctgtgaccttacccccaaccctgtgctctctgaaacatgtgctatgtccactcagggttgaatggattaagggtggtgcaagatgtgctttgttaaacagatgcttgaaggcagcatgctcattaagagtcatcaccactccctaatctcaagtacccagggacacaaacactgcggaaggctgcagggtcctctgcctaggaaaaccagagacctttgttcacttatctgctgaccttccctccactattgtcctgtgaccctgccaaatccccctctgcgagaaacacccaagaatgatcaataaaaaagaaaaaaaatggattaccctgtgcacagtattctgcatggcgtcttttcattttatcaacggtggccacttccctcgacgaaacagtcgacttcattgtgacaggagtagaggtccatgctgggcaacccacccccatggagggacactcaggtggtttccagtcacttgcacaacattgttgcgtgcgtgggccttccgggcccggaagaaactgcgttcgcgtgcaacattaaacaccccacatgggctggtgaaaaatgaaagcaaaataagaccagttgaaaggcggcagaaaacctgtgtgactactccgtggctcccctgcctggtttccagccgcggactctgctcttcg

SEQ ID NO: 19027 - DNA, 1808 bp, Artificial sequence
  DNA replication origin
cagctggcttcacccagtggatcccgcactggggctgcaggtggagctgcctgccagtcccgcgcggtgcgcccgcactcctcagcccttgagtggtagatgagactgggcgccgtggagcagggggtggcgctcatcggggaagcttgggcggcacaggagcccacggaggcagggggtaggcttaggcatggagggctgcaggtcccgagccctgcgccgcgggaaggcagctaaggcccggtgagaaattgagcacagcagctgctggcccaggtgctaagcccctcactgccccgggccggtggggccggccaggtggccggccgctccgagtgcggggtccgcccagcccacgccccccggaactcgcgctggccccggttcccgctggcgcctctccctccacacctccctgcaagctgagggagccggctccggccttggccagcccagaaaggggctcccacagtgcaacggcgggctgaagggctcctcaagtgccgccaaagtgggagggagcccaggcagaggaggcaccgagagcgagagagggctgtgaggacagccagcacgctgtcacctctcaacttgatgctgagaaataaagaagatgctaaagagggtgagtcccttaggccccaggccagggctgcatctgggagcacatcctgagcccagctgtggagaatggaggcagtagaggctggaaccccactgggctcagagcactctgctggctggaatgagggcaggacagtgagcaggcataggaaggctggctgcctggtaggaaacctaaaggaaagaagcagcttcctgagtgtgcaggcttgattcacaaacaggagagtgggaagagcgggagggaaagacgtctggctcccaggcaaaagcatccagaaggatgagaggcggtcacagaggaaccaatttaacagtagcagaaactgtcaatcaagataaaactgacagggccaggcacagtggctcgtgcctgtaatcccagcattttgggaggccgaggagggcggattacctgaggtcaagagttcaagaccagcctggccaacatgatgaaaccatgtctctattaaatacaaaaattagctggttgtggtggtgggcgcctgtaatcccagctacttgggaggctgagacaggagaatcgcttgaacccgggaggcagaagtagcagtgagccgagatcacaccactgcacttcagcctgagcaatagagtgagattctgtctgaaaaaaaaaaaaaaaaagatagaactgacaggtccaaacagggaagcttcctgggtcagtagtgtggacatgtgtcctcagtcctgtgtcccctggtcacacccagctctggccctgagaacctgggatgactgagtaagcagagaggagtccacagggttgtgaagttcataattcctaacacaggatgtgcattcctgtggtggccaaggagaatgaggagagaacgagcttgcacaggtcgtggccatgctagaggggtttgactgaagtcttgctgggacataatgtgataacatgccttctctgagtctcaatatactcaatatactggacaacgaactttgtcagaaacgtgatagcacaataagcatgatgttagatttaaaaaacctaccaagctgaggggtccacaccatccaccacagcatagaacatcagagggttcttgccaaagcgtaaagtgaaaacagaaaagaaatgccatgtgctcagaggagtgatgtgtccagccgtgccctcatctcctctccttcctacctttcacagtccg

SEQ ID NO: 19028 - DNA, 859 bp, Artificial sequence
  DNA replication origin
aggagccttcagcccgccactgcgctgtggggtacccctctctgggccagcccaggccggagccagctccttccgcttgtcgggaggtgtggagggagaggcctgggcgggaaccggggctgctgagcgccgcaatcgcgggccagtgcgagctcctggtgggggtgggctcagcaggctgcactcagagcggctggccggcactgctggccccaggcagtgaggggcttagcacctgggccagcagctgtggagggggcgccgggtcccccaccactgctggcccactcacttcacgctggaatttttgcctggcctcagccacctccccgtggggcagggctggggacctgcagcaggccatgcccgagcctccccgccgcctgggctcctgcactgcggtagaatccctgacgagtgccgctctctgctccaggacacctggtcccatcaaccgcccaaaagctgaggagagctgaggagtgctggcgtgcagggcaggactgggaggcaggtcgcccatggccctggcaggggatgcactaggcaaagccagatgggcttctgagtcgggtggggacttggagaacttttatgtctagctagaggatagtaaatacaccaatcagcactctgtgtctagctcaaggtttgtaaatgcaccaatcagcactctgtatctagctaatctggtggggactggagaacttttgcgcctagcccagggattgtatacgcaccaatcagcaccctgtcaaaacggaccaatcagctctttgtaaaacagaccaatcagctctttgtaaaatggtccaatcagcaggatgtgggtggggccagataagggaataaaagcagg

SEQ ID NO: 19029 - DNA, 1587 bp, Artificial sequence
  DNA replication origin
tcggggcaccgcgcccagcccgctccctggggcgcccgctcgcgccgcgcctgggcctcgcgccgccttcagtggccccggcggccggtcgcggggtgccgggtgcccgccacccgcattccgacacagagggcctgcctggccgccgcgatcttcggcggctgctccgcgagcccgggcggtgaggtgcacctgttcttcagccggcccgcagccaaccctcggccagcactcttctggagagaccaatcccagcgcagcgcggagggctagcggcccggctcgccttgctccagccgttcgctgctgcgcgccgctgccgccgccgccggagagtcaaactccagcgaacagcgccgctgtcgccgccgcgagccaggggctgggggcgcaccgggcgcccgcggcgggtgcggtctgacccgcctccgagggacccaacaagcaggcagaggatcggaaatcacgccccggcgccctgcccggttgagcgtgggggacggaagcgggagactgcgtcgggggtcccggggaacgcagaccccgggctgagggcgtctccagacgggctctggctgccaggctggtgcgtgtgtgtgtgcagaatcgccgcggcgggctgggattcgggcagagtagcgcctcccactagcagctaatgctggtttcttaatgcacacaagatagataaatgatccaagcaaacccccgtttgcggtggggtgggggggcaaaagcagcttccgaccgattgtgagtcgtctcctgtacggatccagtggggtcagagactgacgctgctgggcgagggggcgggggcggatgcgggtgggagggtgcctgtgccctcccctgccggatggcggtgcggctggatggaaggccacctttgcctgagttcctgagagatgcaggtggagcagaagacctttgtataatcagacctgtcagatatctccaagccatttatgtgaacttgccttaaaatattgtctttacctgtaaatgtacgcacaggtacacacgttacaaggcaagtgtttgtgagaggtaaatatgaaaggatttggggttggactcccaaattccgttactgctttcttcccttggctggggaggcacctgtgtacctatttctccagcgctgtgtggtacctgccgaggcaaggggcaaagagccagtgttagcatgacatatgccgacagtgcaaaaccttgcttgccaactctccccagatttcctggtctaaagtgaaaaccgaagaggaggggtttttatttacaagcgttaagaatatgaggttgagaaaggcaactttctaatacattcccccagcactgtctgattggcgtggatgatggagcccgcattctcttgtcctgtgatagtctccacaaagatgaagttttcaaggtatccattttattcacagggggagagccaaacgttacactgaagagactgcagagagcagaggatgcattgaaacaggaagcccctggggtttggtgcctaccagagtactttgcacagacaaggttaataaattatttttgatggcagtaatgcggctgtcacctctttca

SEQ ID NO: 19030 - DNA, 1537 bp, Artificial sequence
  DNA replication origin
acaccccacctttgggaacggaacaaaagcaaaggcttggcagggctgaaaaaaactcctccttcgtcaggaccctagaggtggcagctctgcagggctcccttcatatttcctcctagttaactcactctcggcggtcacagaatctatgtctacaccttggaatggccacaggcaggctaggaggtcagtttagccctttgccttggatcgcctcctttccccaagtctcccagtggcttctaattaaccctttctggttcctgcccaggtcagggctgctggaagcgtcctcagcaacattctaccattatctccatcaactcgtcaccccacacaaggacataacttccttttgtggtttatcgtcggtcaatttgcatgtgctttgctttctttccttcctaccggcgggcggagaaggggctcagtgccttcgggaaggccctctctccctccctggccctctactggagcgggatccggcagctcgccagcaggtctgcagtgaggagggatcgcactcgcgttaaccctttgaagggagttgggagatctgttctcacttgggacccgctaaagtggggccagtggagcctgacaatctccctcccgttcctacacgcccccacccccccagaaccagagcaggctggcaccttcttccccgctggtggccagttttaatcagctctcactctgccccaaacctgggatgggggagggggcttgctagaaaacaggcggcgagggaaaaagacagcaggagggcagaagggaaactcagtagtaaatcatagttgagacacagtgtttacttacgaaatttggggctggtgctagtttctggtgtggtggtggtagcggaggaggaagaagaggaagaagaggaggcagcatcctgaaagggagacagggtccaggagggagtagaatcgtgaaggtaggaggaggtagcgtatgccgcagtaggccaggagggcattgcctgggtacttggagttcctggcaccgggggtcgggagcccagcgtgctgctactgaagaacggggccgtggtggacgggaccgtcgcaggggccgcagtgttccgtgctgtggtggagcgcgggctggcccggatgggcacccggtgcccggggaagcgagtgggcgcccgcgtgatggtggtcaggcgagtgctaatccggttgggcgtcctggaggaggcggcacccccggcggagggggtggcgggggacgtggtggaagtggtagtggtggtggtctccatggccttggggaaagagctgggcttggagaggaagaaggggtcctggcccatccccttggagtccactaggtcggtgggcacgtactccttgacggagcccaccacgatccatttgagaagcatgaggctgagccccaggccgatgaagccgatgaacagaggtaccacgcacagccacgtctgctgccggttccacacgatgcagtcgctacagcgtaactcccgggggggctcggccgccccttcgccgccgccgtccgggcc

SEQ ID NO: 19031 - DNA, 1274 bp, Artificial sequence
  DNA replication origin
gtgtatgtgtccgtgtgtttgtatgtatagtgcgtggtgtgtgtgtgtagagtgcatgtagtatgtgtctgtgtgtgtagttgtgtggtgtgtgtttgtgctgtgtatatgtgtctaggtgtgtatcactataccgtgtgttgtgtgtatatgctgtgtttctgtgtgtagttgtgtagcgtgtatgtgtctgtgtgtctgtagtgtgtggtgtgagtctgtgtgcgcatgtatttgtgtgtgtctgtgtgtgtggttgtgtggtgtgtatctacttatgtgtgtaggtatttgtgtttatgtgttttggtttgttgtgtgtgtgtctgtggtgggggctcacacaccccctcaacttcctgcctctgagcagttggtgcaggagaggggaagtggagggggagggtgtgagctcttggggctcgcctccacctctctctggaaggttttcaccttctttcacagaaccaggggcctgggggagcagagccacagcctgcgctcaccctgcatcctgcctgggctggcacctcacactggttcagcaagaggtgtgtgagagctggttatttttatcctggccggctgggtgtgatgccagtttggaagaaagggctgtcagcatctccgggagaaggtctgcggctggagtcatgctgtcttgcttcctccctctatccctctcctgcatcacagctgagcatccccttggtagctgggaaaggcatggaggctccggcgctggtcatggaccccatgggccatggccgcagaggagcaagtggggccgggacctcctcagcctcttgagagtgggcactggggctgcagagttcaggcaggagccccaggttggtgtcaggctgtctgactcagggtccacagtctccccttggggatctgcctgccctacccaagctccagcagcctgacccttccacctgggctgggcaactccagtgaatatctgctctgggcctgcagcccctgtgcagggaactgggtgcccgcagccctcctgagcttgggcctgtccgccacaggcctcccagtgtccccaggcctcagggagagggcagccttgctcttctgggcctcgttctggtcatgcagcctggatgctgcctgctggcatctctggggctgccttatctcctgccaagctatggctctctggaccctcaggcccactcccctgctggtgacctgcatgctgatctgtgccccaggtccacagggttcacaggcagctttggtccttagcttctgggagt

SEQ ID NO: 19032 - DNA, 1298 bp, Artificial sequence
  DNA replication origin
cttcacagagggggagactgaggcttagcagtgctgggtgacttgctccaaggcacagccagtgggtggtggagctgagatcccagcccagatggctatttccttctgggaagtcagccgtctggcttgcacgcgcatgtcttcatacaccggctacagaacactttctgtccacaggggaagcagtttgttgtagtggaaagaggtggaaagatcctagtttctgactctgcctcagtttctttctcagtctcagtttcccaatctatataatggtgacgagacctccccacggtggtctcaaggatttaaatgagatcacatggcaaggacccaatacatatgtttgttttgctcttcttgttctaagttgttcataaatttcaacaatggaattttaaaaatatacacacagaaagaaatccagtctcagcacagaagccacacacctagatttattctccagaagtaacaaaactgaaaaaacggatgcacgtgtacttgcacgggagttaacatggccacgtctcctatgcactgtgtgtgcttgggtgtatatctgtccatctgtgtgtgtagtgtgtgtgtgctgtgtgtagcataggagtgtagtgtgtgtagttgtgtagtgtgtgtgtgtaattgcttgtccatgtgtagtgtctgtgagtgtattgtggtgtgtgtctgtgtgtgcatgtatttgtgtgtgtgtctgtgtgtatagttgtgtagtgttgtgtatttgtgtgtatgtatttatgtgtgtttgtgtgtatagttgtgtggtatgtgtttgtgtgtagatgtacttgtgtatgtgtctgtgtctggtatacgtgtgtgtgctgtgtgcatgtgtctatgtgtgtatgattgtgtgtagtgtgtatgtgcatgtagtgtgtttgtgtgtatagtgtgtgtctgtttgtgtagttgtgtagtgtgtatgtgtccgtgtgtttgtatgtatagtgcgtggtgtgtgtgtgtagagtgcatgtagtatgtgtctgtgtgtgtagttgtgtggtgtgtgtttgtgctgtgtatatgtgtctaggtgtgtatcactataccgtgtgttgtgtgtatatgctgtgtttctgtgtgtagttgtgtagcgtgtatgtgtctgtgtgtctgtagtgtgtggtgtgagtctgtgtgcgcatgtatttgtgtgtgtctgtgtgtgtggttgtgtggtgtgtatctacttatgtgtgtaggtatttgtgtttatgtgttttggtttgttgtgtgtgtgtctgtggtgggggctcacacacccc

SEQ ID NO: 19033 - DNA, 1366 bp, Artificial sequence
  DNA replication origin
ctccacagctgcgtaggagaacgccaggccccctctgggctgatgggcagagattccctggcccagggctctggggacagtggtgcccagggctctggggacagtggtgcccagggcaagtcagagtctttgtcttgtcacaggccagacttttcacatctcttccatatgttccactcccaggctcactcactcgctcactcactcgttcccaggctctgcagtgttctgttcaccacgggcataaataccccttccgagtggggcaggtgaggcggggacttccctgaacccagcccctctgtgcgccaggccctttgctgcacttcacacctgactatttgccctctgagcaggtcctttaatctccatgttcatctatcccggggtagtaattgtcaggccctgagctgcgttctgaggctcagagatgaacaaatatggtcccctgatgtctgagaggcaatcatttctccacaaagctgtgggcacccaggtaagaacagagggctgggactgcaggagaaagagtggaagatgaggaaggaatgaaaagactgctcaaactcagcagaagacaccagccagagaaggggcgcaagatgtgtgtgtgtgtgtgtgtgtggtgtgcagaggggtgtggaggacatgggaggtgggggggggttgtgtggtgtatgtggtgaatggtgtgtgtgtacggtgtgtaatgtgtgtgtgtgcgatgtgtatgtgagggtacaggatttgtacatgtgtatatgtgaagtgtgtgtgatgtgtggtgtgtgtgtgagggtatggactttgtggtgtgtgtgccatatgtatgtctgtagcatgtgtgtagtttatacagtgtgtgtgatgtgtgttgatgtgtgatggatgatggatgtgtggtttgtggtatgtatggtgtgtgtgtggcatgtgtgatgtgtggtgtgcgtggtgtatgtgtgtaatgtggtatgtgttgtgtgtggtgtgtgtgatatgtggtgtgtggttgtatgtgtggtgtgtgtgatgtgtatggtgtgtggtgtgactgatgcacttgtatggtgtgtggtttgtgtgtgtggtgtgtgtgtgtgcgtagggtgtgtggtgtgtgatgtatgtgtgtgttggggcatgtggtttgtgtgtgtgtggtgtgtgtgtggtgtgtgtgtggtgtatgtgtggtatatggtggatgtgtggtttgtggatattgtttgtggtatgtatgatgtgtgtgtggcatgtgtgatgtgtggtgtgtgtggtgtatgtgtgtaatgtggtgtgtggtgtgttgtgtgcagtgtgtggtgtgatgtgtgatgtggtatgtggttgtgtgtgtgatgca

SEQ ID NO: 19034 - DNA, 1466 bp, Artificial sequence
  DNA replication origin
tggcagcacagtcaggctccactgctgtgtccccacagcagtccctgagacctccctttcctttctctaccctgtcctgcagctagtggaggctgtcacgagctggcagcatccccacagctgaggtccagttagccacacaccaggctgctatgcggtctgaaaaagcccatgccctgttgcctgcaagttctcaagtgtgtagagtggaggagctctgccaaactcagactcactgccaaccaccctttccagccttgacctgctctgagttcctgtgcctctcccaggacaggcttgaaaaatcactttgtgaggtttctttcagaaacctcaaagtgcaaacggatttatttttaatggaacatgcttaaaagattagcagggctggcaggtgctcgttaaaggagcccactcttcgctctgtgtgaaggaggagcatgaaagtaaagcccactctgctgatgggaagtggcccagagatctcacagagtggatgtgcctggggtgtgccccctcatcccctactctgtggagaggttctaaccaatgtgctccaggggaacttcagcccaccgaggtctgtctacaggcagtggccccgcagcactccccacacctccccatacctctctgtccagctcttcaaccagggtgatgtttccaaaagtggggtcaacagaaaagacgcttctagtgctggggtcaaagctgatgtggtaggagatggggtctccctcagggtctgtcccattcagggtgtatacgtgagagcctggaaggaaacacagtggagagacatagaatctgagacccaacttttcctaaaagtggcagatgctcaggaccaacgattcagctgtttataaagtgactattcaactcagtgccaaaggtactgccctgaacttggtgctcattgctggcctcacccctgctggctgcttccctctttgtatgtttattcttcacagcgggtggttgtgatgatcagccactttccagattgtaatctataacacgggttacagagcaggtgcaggtctgccgtgcctaactgtagtgcctatgttctgctcagcctggtaataactcctctctcaggatccaagattgaggggctcctgggtacagggaaggggaaatgggagcagccattaaggcaggaggggtgacccacagtgcaccactgtccccgatgcctggacctggttctgcagggatttctgagccaggtgcctactttgctctgctctcccttttccccgggttcccactacccacaaagtgagggagaaggagtgtgaaatctcccctttctcctcccctctctctgcatatctcagcaagttggatgttcttaggccgttttaaagcctagagacctggggctcagggaggtaaatacatttgttcaaggtcacacagccataaggggcagctgtagctgcctgcctcgcggggcg

SEQ ID NO: 19035 - DNA, 831 bp, Artificial sequence
  DNA replication origin
tttcctacagcccacgaggttcgctgacctccagcctgagacagtgctgagcctccttttcctgctcctgctctcagctgcaggcgtcaggatccagattctagtcagtgttgctccacgtggccagggccctgctgcttgactaaggatgatgatgagatcccagtagaacctgagggactgtgaggtctgggatgggtgagctggcttctcgtcaattctcagccctgaagaatggagggcattgtagtagtgccaaggatttgagtaacggggacgtatttgccaattgcatcctagagcccaatgtcttgcccaaggccctgactagagccctgtcagagcgcaacttcttgttgcgccagaaggtggcggtagagatgaggacagtggggattataccattgtgcaaaacaggggtcagtgaccttaaggagcagaggaaggggagcatagtccgagcagcagggtggtgggggtcaggggcggaggaaagatggggggtcatagggcatacactagaagtaagccttgttgtgcacactcttcttctcaaacttttgcttgagctcagagatcagagttgactggacggggcttcccatagttttgggttttggcgggggttgggtcggctgcggagtgagagagccagagacagtaggcacggtccactgggctgcgccagtgctgggcgccacgctgggtggtggagggagagccggagctctcgggagcagagagctttctgggctgttgttgttacagttctcattgggaggtttctctttgagcatgaacttggtagcggctttggtgctcttggacttg

SEQ ID NO: 19036 - DNA, 888 bp, Artificial sequence
  DNA replication origin
gtctctgtccagccgccccgtctgagaaggagcccctccgcccggcagccgccccgtctgagaagtgaggagcccctccgcccagcagccgccccgtctgagaagtgaggagcccctccgcccggcagccgcccgtctgggaagtcaggagcgtctccgcccagcagccaccccatccgggagggaggtgagggtcagcccccgccaggccagccgccccgtccgcgagggaggtgggaggcagcccccgcccggccagccgccccgtccgggagggaggtggggggtcagcccccacccggccagccacccagtccgggagggaggtggggggtcagcccccgcccggccagccgacccgtccgggagggaggtggggggtcagcaccccccctccccggccagccgccccgtccgggaggtgggggggcacctctgcccggccgccccttctgggaagtgaggagcccctgtgcctggccaccaccccgtctaggaggtgtacccaacagctcattgagaacaggccatgatgacgatggttttgtcaaatagaaaagggggaaaggtggggaaaagttagagaaatcagattgttgctgtgtctgtgtggaaggaagtagacatgggagacttcattttgttctgtactaagaaaaattattctgccttgggatgctgttgatctatgaccttacccgcaaccatgtgccctctgaaacatgtgctgtgtccactcagggttaaatggattaagggcggtgcaagatgtgctttgttaaacagatgcttgaaggcagcatgctcgctaagagtcatcaccactccctaatctcaagtacccagggacacaaacactgcggaaggccacagggtcctctgcctagg

SEQ ID NO: 19037 - DNA, 1436 bp, Artificial sequence
  DNA replication origin
ttctctaacttttccccacctttcccccttttctatttgacaaaaccatcgtcatcatggcctgttctcaatgagctgttgggtacacctcctagacggggtggtggccaggcacaggggctcctcacttcccagaaggggcggccgggcagaggtgcccccccacctcccggacggggcggctggccggggagggggggtgctgaccccccacctccctcccggacgggtcggctggccgggcgggggctgaccccccacctccctcccggactgggtggctggccgggtgggggctgaccccccacctccctcccggacggggcggctggccgggcgggggctgcctcccacctccctcgcggacggggcggctggcctggcgggggctgaccctcacctccctcccggatggggtggctgctgggcggagacgctcctgacttcccagacgggcggctgccgggcggaggggctcctcacttctcagacggggcggctgctgggcggaggggctcctcacttctcagacggggcggctgccgggcggaggggctccttctcagacggggcggctggacagagacgctcctcacctcccagacggggtcgtggctgggcagaggcgctcctcacatcccagacggggcggcggggcagaggtgctccccacatctcagatgatgggtggccgggcagagacgctcctcacttcctaggtgggatggcggccgggaagaggcactcctcacttcccagactgggcagccgggcagaggggctccttgtatcccaaacgatgggcggccaggcagagacgctcgtcacttcccagatggggtggcggccgggcagaggctgcaatctcggcactttgggaggccaaggcaggcggctgggaggtggaggttgtagagagccgagatcacgccactgcactccagcctgggcaacattgagcattgagtgaaggagactccgtctgcaatcccagcacctcgggaggccgaggctggcggatcactcgcggttaggagctggagacccgcccggccaacacagcgaaaccccgtctccaccaaaaaatacgaaaaccagtcaggcgtggcggcacgcgcctgcaatcgcaggcactcggcaggctgaggcaggagaatcaggcagggaggttgcagtgagcagagatggtggcagcacagtccagcttcggctcggcatcagagggagaccgtggaaagagagggagagggagaccatggaaagagagggagagggagaccgtggggagaggaagagggagagggcaagggcgagggcgagggcgagggagaatcctcacttcttatgccatttatttatatagagtatgttgtgtatgttccttgtctccctgatggggccactactctgtgtaatggatgagacatgatggagta

SEQ ID NO: 19038 - DNA, 1174 bp, Artificial sequence
  DNA replication origin
agaggtgaggtaggcattacacaaaaaatggctcagtcacactgaagagtcacaaattatgatgtctatgaagaaaaaggtgaggatgtgaagatgtgaaatggtgttgctgggggaccccattcagatgcaaggtataggaaggcccctgaggaagcactactcaaacttggggcaaaaggtgagaatgtgggaaaagggcactggcatgggaggagcatcctggattctggaaagaaggaagtggaggtgccaaggaccagagggacgaagggatatgttggagtagagcagggtaaggctgcaggggaagtaagggtaggagcaggtaaggcaggtaaggctgtaggggaggtgaggctggggagaggtaaggctggcagggaaaggggtaattaggttggggggaaggtatagctagggggaaggtaaggctgggggcgtgattaggttagggggaaggtaaggcttggggagagataaggctggggggcaggtaaagctggggggtaattaggttggggggaagatatagctagggggaaggtaaggcttggaggaggtaaggctgggagggtgattaggttggctatgggaagaagtgagagtgggaggtgggaggtgagactgggggaggggaggtaaggcctcttgtgagggaggcatctcagccaaggtgaggaccagccggtcgatcctggcagtccaggctgttcaaggtggggaccgtgactcaatccagggtaggctttgaagatacccctgaggctactgggctgggtggctggcaagctggggcaactctgagccctgggcatggagaggctgccctggggtctgctaggtgcccgtggtgtccccttcagccttcagtctggtcctagatggggaggagctggttagggtggggcaggaaagtcctgactcatctgcagcttagactgggatcctcacttaggagtcagtgcctgaggctgggagctgtagtggttgtgatggagctgctgcttctgagagtgctgaatggggccatctgtggaatgaacagagcagaacagactctggttctttataacactccacttgggtttcataagagaaggaagctctatctgtgctgtcctttgcagtatcttcagtatctagaaccattctttggaactagagctctgca

SEQ ID NO: 19039 - DNA, 832 bp, Artificial sequence
  DNA replication origin
aggtcaggagttcgagaccagcctggccaacatggtgaaaccccgtctctactaaaaatataaaaattagctgggcgtggtggcacacacctgtaatcccagctactcaggaggctgaggcaggagaattgcttgaacccgggaggcagaggttgcagtgagccaagatcgtgccactgcactccagcctgggcaacagagcaaggctatgtggaaaaaataaaagagagagagagacaaaaaaagagagagaaaaaggaaaggaaagggaagggaagggaagggaagggaaggggaggggaggggaggggaggggaggggaggggaggggaggggaggggaggggagggaagggaagggaagggaaaagggaaaagggaaaaggggaaaggagaaagaaagaaggaaggaaggaaaaaaggaagaaatggagtaagatgaagcccagggtttttcaccactaggtttggcccccaggagcaacatctgtaggatgcccggcatcctcctgattggagagtggagtgtctgagtgggagtccccagaagcaaactctgacacaaggagtcaagtgcaagaggtacatttgtgctacgcagggaaaactggggggattaggcaagtgggaaggaaaagcagcacactaagaaatctccacacagacgactggagcttcctctagtagggaaacaatgcagaatttggaccgccagattttaccaccaagggacaggggacagggtatctacacaccaactccaaccatctctgattgaagaatgctcccaggtagactaattccctcacttccaacctgctctgagtgcaagc

SEQ ID NO: 19040 - DNA, 737 bp, Artificial sequence
  DNA replication origin
cttcatctcaatgcaatcactaaaaatgacgattagaaaggctttgcaaccacacaggaaatgtttatcccaggatgttaggtcaaaaaagcaaaacacaaaatctcatctagattatgggatggagggaggggccagcttcaggtgtgggaatacagggaggttctggcttcaggtgtggggatggagggaggggcctgcttcaggtgtggggatgggagaatgggcctgcttcaggtgtggggatgggagaatgggcctgcttcaggtgtggggatagagggaggagcctgcttcaggtgcggggatgggaggagggagccttgagttcaagtcaaacatttcttcctgggctgcacacttgggccaagtcattcacttctctgattcctgatcatcagagatgatcaggaatgtgcagtgagaagaggggtcttggtgaggtgcacgggcatgtctacggaagcaagggaacgaagggcaggactgcatggccgctggcaatggagagttccgggaatgggcaggctccaggatgaggccgttggaggtggcggctaagatgggatagagaatggagctggggaggtgaaggagcccaggggtgaagaggaaaatgaattgacaacaaggaggaggtgaggagagaggtgaagttctacgagagaggacttctagatcagaagcctagatgggtctttgtggtgacagaatccagactcctgtggagagtgagg

SEQ ID NO: 19041 - DNA, 918 bp, Artificial sequence
  DNA replication origin
gctgccaagggactcattaagtggagaactcaggcagatgggtgggtgggggtcaggaccccagggggagccttgtgggcttgagaaataacggtagagccctcaatagggccgggcttagtgttcagtggggtgggtcaaacatgcaaggaatgttgatgattccataaagagagggtatacatgatggatctgggtgtgggaaaaggccagaggagggaggcttcggagctcaggagcagggaccagccttaggagaaacttttctcttgagctttcagcacagacagggaggtgtggagctctggaggcaggaagtcatgcgagatagcttgtgatgatggcttctgattcatgaaaaaggatgtaagtcattcgttgaacttggggaataaacctgggtggttcaagaagaacggggagggaggtggtagagatgtgtcagcgtggggagccctgctgaggtgggtgactgccatgtggccaaggtcaccaagttgccaggtgcgtggtactctctgtggccctgcactgcttgccggcagtgtggaggagcgtgggcaggttgatccaccctgagttgactcctagttgggatttcagcagccaggctacataaggaaagagagggattctgtaatggagtgactggagaggaggaaagcaggctccaaggcaggaggtggggttgctgcaggtctctgggaagttggaaagtgggcagagaatcactgaaacacagtctgtgggacaggatggatgcctgtcaagtgtgtgtcctgtgctctggagggaggcgtcttctgcaggagggacgggagagccagctcactccagggcccgagctctagcattggcctcttacagcaccaccacccatccccccaccattttatggttttggttaccttttaaatg

SEQ ID NO: 19042 - DNA, 796 bp, Artificial sequence
  DNA replication origin
ccatccattcatccttccaccatccatccatttatcaaacattgatgaggagttactgtaccaggaactggggattggaaggttctattgtggggagatagacatagaagaacacatatattagaggacctggaggcccagtgatggaggtggtgattggaggctttctcaaggaaggccatctgagcattagcaaagtgatggttgagggagaggagtttcaggaagaagggactgcctgggcaaaggcatagaggcctgaaacagctatcttcctgttgtgggggagggtgtgggggggtagaaatggaggtgagtcggggtgtgtggaagacaaatggaggtggagtgtggtaggagaggagcttgggtggtagtcaagaccctcaaaggggatgccaactgttgtgcggctggtctgagggccaagctaggggcacaatcaggtctgtgttcaagtagatttgtctgatgtcagagactggagaggatgagttgtgggatatgagggtccaaggatggatccagaggagactgtgacttaactccagagaagtccttgaaggtaggactgatggtgaccttgggactcactagcctgtgggtggccaaatgccaagccctctctgatctcccaggtctaaccccaggacataggtcctgctgccaagggaggggcatcctgggatcccccatcctctaagaaatagggagatctcagtatgggaccctctccccacctaatcgtggctttccaggcatcgtggctgtcagaaggggaaggtatttgggaaca

SEQ ID NO: 19043 - DNA, 1329 bp, Artificial sequence
  DNA replication origin
agagcctcactaaatggtatttactcttgttcttggggacagaggctctgtggggataggggaagagtcctccttggcttggtgtttgcctggtcttgggcattttggggaagtggaggggtagggggagtcccactacccaatcctatagcccggcaggaagtagtaggcctcatgagaaaactctggggacttaagctccatgctgcctgtgaatcccagggttcaggggaccaagagggtttcctaagcctgtgaaagctgctgcaattggtgtagaggccaccatggagccacagtccaggggcccagtgggccttttcttatctctcttgccaggccacagagtaggttctggagaattgggcctggcggctctgagctgggctgacactcatcactgacctgggatcatgggagttgggcaggagggccctcccctgggaaagaatcctctcatctgactgtggtgtgtaaaagatcaggaagcctcgaaccagattagggcagggctggggacaggtgcagagcctgggggctcctcagctgtgtagaagtgctgggaaggcatggtgtatttgggggtcagatgtggtagttttggggttattgatggaatttgggggtaggcagggatgccgtgtgtgaatgctctgggaggaggtttgcaggaattagagggatttgctggaggagctttctgatggcgtcactggtgctgtgcattgggggttggtggcaggtcctggagtcatagctggggtcataggtgtgttagggaggcagtgatgatgggttatcaggagggggaggatcactgatgaggtgggaggtgggagcagcgaggatggaatggtgctgttggccagggggtcctcagtgactaccccagcagggtggcttcaactgtgagctctggtgtgtctgtttcttgtctcagcgctccacggggaagtttagacctgagcctctgagaggggtcactgggcagagagacccctggatctcagagggctgaagggggaggtgaatggtgggcatgggtggcaaggggctgagccagggcagtggatgagtcaggagtatgggaggctgggctgctgatcagcgactttgcagatcctcagggtcattacttgctgttgttgctggggaaagttgcaaaatgaaaattaactgtcagagaagattgattcgtttgatgcctaaccaggagcagccttttattgctgtaaaatgttgatttcctcttgcctgcaatgacaggtgagtgttagtggcactgaaggaagacagatccctgaacagaacttgcagaaaccatcccct

SEQ ID NO: 19044 - DNA, 1326 bp, Artificial sequence
  DNA replication origin
cagcgctggccgcgcaggcgtgcgtggctcggggcagtctttgtttctcggtgtttgggggtgggcgtgtctgcgtgccgggtacctgtatcgggcgcacctcccctgatctcagtggcccggtgttttcctcgcttcgaggtgaggagcgcccagcggctggagcccgacctgtctccttctcccgggcataacctggtaggcgcggcgtttcgcgccccgcggcccccagagcctcagcccggcgcttctctgcagcgctcctccaccaggtttggaggagccggtttctctctcgctgtccgcgccgcgggcggaggcgccgccgcctgggccggaggtgggcgctgttcgcccaggaaaggagcggagctgggccggtccggctgcggggaaatcctggcctacgccggggccgcccttgtccacagccactgcctccggtcgggccccgcggcaggcgccacaggtgcgaggcgagggcgttcacgacagcaaccccctctgctttccctcctctctgctagtccctccccttcaacctttcagctcgggaaccctggttccttctccaagcctccagattcctggttaaggcctaaggctccgcctctgacacttacccggcttaagtcccttctccttccctctgccttgctccccgcaaccatggggactctggggccagcgcccctcagtgctggggcaagttagtggcgcaggatgcagggattccttgctggaggaactggtagagaagtgtagagggggcagtgggtgtagtgggaggtgggctggctaagagctcctggctggtgttttctcctcaagcccgttgagccgagagtcctcctgctgctttggtacacatgggttgctagtctccccggtgcctgcaaggacaggatgcctcgatgatggctctggcctgggtctggggggtcagagctggtgttggggaggtcgttgtgttggaaggaggaattctgggggtctcctattcttgggtgcagcagaggaaggaaaggggccagctctgggggcagggaccggggactacttctggggactgaaggtccaaggatttcttgaggtggttttacaaaccgggagtcccaagtgttttcttttagggggggtgaggctaacactgcctattatgggagctgctgcttccagctgtgacagatgtccattgtcagatgtctgttgaggtacagggaagaggaattcctgcccttctttggtgtctggtcgtgtcccaccagcagtctctatctccagacaccccctgcctctggacttcttttcagtgtgcccttatca

SEQ ID NO: 19045 - DNA, 1977 bp, Artificial sequence
  DNA replication origin
atcaaagaggccggaccggaaccgtgtgtgaatgtgtgtgggtgcgtgttgtcagcgtgtgtcgctgtgtgcgcctggcacggtgtcggtgttactgtgagagggtgttggggtgtgtggggccatctgagcgtgtgttggtgcgtgcacgactgtctgtcagcctgttagagtggacacagtgtctgcctgcttctccggtgtgtgtctgtgtagcccttggtgtatgtgtgagtgcgtgtgtatctggttgtggcgactgcatccccatcctggacagtcctagagttttgcgtggtccaagtcttgggggcccagacggtctgggtggtgggagccgagggaagaagcgtgggcagcggggggtagggggatgctgagcgggaagagatggatagagagagagaaccgggagagaagatgaaagcgcagaggaggagggggcgcgccgagggggagtgggcgcgccgagggggagtgggtgggagttgggagcaacacgggaggaatctcgggaagttgggccgagttggggggctgacagcggtcgctttgggggagtccctccgcagtcgtctttccggaagttgggaaagaccagcgagcacagggaaactgggggttgggaggtgttgaaggcgaggaggacgggacaaggcgggagggtgggtggtggagtggggtggtgaggactaggcctgggctcggagagctacgattcctcctcaggggcccgtgaccaaacctgcttcccgccctggaggggtgcgggtctcgcggtcagcattgcggcgccggctccgggtgtagtgaggaatccgggcctccctcctcctacccagcccccagctcgagggatcactgggcctagctccgggacctcagggaccctcgaggcttggtgaggcgggatgtgggtggctgactccagagctgtccaggttgcaggactaggctcgggctggtcgcactgatctcggctggaagcgcagggtccgtggaagctgtgctaggcgcacaaagcgccagccggagggcgccctggaggagctgtccgcggttctagaaagcccttcaagagcagctccttctgggacccccagctccgctagatctgaacgtggaggcgcctaggacacaagtccccttcccccactcccctcgacagacgtacaggaaatgggagtggggaaggatggagagtaggaggctgagctcagggcgccaggccgggcagcgtcacagtcatccaagctgcaggccatccgaagcccctgcctaaggaagacccctctgcgcaggaaagccaactgtagacctgcttcgctcagctccactcagcaggggacgtgcatggagaaggacccatcattctgtcctgggatttgggtgggggacaccaccctcccggggaacttcctggctcctgggatgggatttatggaaccatgtcaaggcatttgggcgctgcctggggccaccccagcttggcttagtcccttgtgtggagcatggctaggacatgtggtgccttggttgtgagacacgtgtgtgacctggtggcagcctgtgggatgtgcatgtgtaactcatgtcaactgtgtgcacgtgtgcgctgagggctggtggggggaggggaacatattcctgtgcaggtggagatcggagagccttaatctaccccgccaagctgaaatcccagttcagacttcccaccacccggcaatcatcggtctgcgagtgccttgaccctcgggccaagggaagcggggagagggttcttgtccaggtccggtcttgatcccttctctcctccaggtgccatcttcgaggagaacgcggccaaggacgacagggtgttccagttggcggtatccgacctgagcctcaacgatgacatcctgcagagcgagaagatcacctactccatcaaggtcatcgaggccaacaacccattccaggctgtgcaggaaggtg

SEQ ID NO: 19046 - DNA, 946 bp, Artificial sequence
  DNA replication origin
ccctcggcctcgccccgggcccgggtggatgagccgcgcgcccgggggacatggaagcgctgacgctgtggcttctcccctggatatgccagtgcgtgtcggtgcgggccgactccatcatccacatcggtaagcgcggctggaggccgggccgaggctgggcgggggccccaacggggcagggggtgcgcggcgtccaaacttggcgtttccctgggccgaggggctcggcgggcggtgctcccccgaagggccgcgccgcgccgcccggcggaggagctgtgcaccggccgcgccgcgctcccgctggctgcttgccgctccccggggctccgatctccgcgcggggccccgcggcctctaccgacacttagggccgacgcttcggggaacaccgggatggacgcgcgtcgagacccgcgcccttagcggggccgtcggcgggtcgggagggcccttctgcgcagctcagagcagcggggggcagggggaggtacagcggggggctcgccaagttggcagggcaagatcaaagaggccggaccggaaccgtgtgtgaatgtgtgtgggtgcgtgttgtcagcgtgtgtcgctgtgtgcgcctggcacggtgtcggtgttactgtgagagggtgttggggtgtgtggggccatctgagcgtgtgttggtgcgtgcacgactgtctgtcagcctgttagagtggacacagtgtctgcctgcttctccggtgtgtgtctgtgtagcccttggtgtatgtgtgagtgcgtgtgtatctggttgtggcgactgcatccccatcctggacagtcctagagttttgcgtggtccaagtcttgggggcccagacggtctgggtggtgggagccgagggaagaagcgtgggcagcggggggtagggggatgctgagcgggaagagatggatagagagagagaaccgggagaga

SEQ ID NO: 19047 - DNA, 1097 bp, Artificial sequence
  DNA replication origin
aggctcggactctgaagcccaattcatggccggaaaccagcgcagccgtgaccgcggcgcctggacgtgaggagccttccaagcggccggcgggctcagactccgaccctgcacggagctttcatgtgcgagcccgggcgaagagcccgctcctcgcggccacagcggaacagggctccctccgcctccggtgcctgcctcgggccggccaccaccaaagagagcgttaagctgttgtgggctcgtgcctgaaagggactgggctccatgtggcacccccaagatttcgaggagacagctgagcttcctggggtctgggacctggcagagcctcgttcaaaagctgctcctccagcaagcctgggaacgtccccgggccctgttgtccgcggaggggccccaggactcccgccacgcaccagggggagaggctcccaccacagcccttgcccagagctcccagcgcagtgggcgaggcagacacccaaccaagtcatcttttaaatgttggggggggctatgaatgagctgtgtatgctcagatgcctgggctctgaaccagcctgggaagaagagcagggatgacttcctggaggagatgacagttgtaaagactgagtggaggttcccaagggagaaaataaggcttccaggcattgaatagtggtgagccaaggcaaaaagaaagaagtgtgtgtctgtatgtctgtctgtctctcatgtggccagagccaaagagtaagcattggtagatttcactttggaaagaaagattggagaggatgggctgtgcagagggggccagtggaggcccatagcactgtgagggaaccctgggtgggccagctcagctgggcagggacagcctgttggagcggagaagctggattgcagaagtatcaaggaatcccatgagccagcaaggtgacttctaggttaaggaggccagggggcaagaagagaggagtggtcatatgtcatacttgcccatgggagtggctgaatgtggtcctacacacacacacacacacacacacacacacacacacacttcttccaaaaacctgtcttagggtccttgagtagtgaaacctgac

SEQ ID NO: 19048 - DNA, 1780 bp, Artificial sequence
  DNA replication origin
gatccgcccacctcggcctcctaaagtgctgggattacaggcgtgagccaccgcgcctggccacaaataggtttttaaaaagcatagactgggccgggcgcggtggctcacgcctgtaattccacaactttgggaggccgaggcgggcggatcacgaggtcaggagatcgagaccatcccggctaaaacggtgaaaccccgtctctactaaaaatacaaaaaattagccgggcgtagtggcaggcgcctgtagtcccagctacttgggaggctgaggcaggagaatggcgtgaacccgggaggcggagcttgcagtgagccgagatcccgccactgcactccagcctgggcgacagagcgagactccgtctcaaaaaaaaaaaaaaaaaaaaaaaaaaaaaaaaaaagcatagactgttaggtggtgatattccttaggggaaaacatagcaggaaaggggatagggaccgcaggaaagaggtcctgcagttttaagtaggatggtctgggaggcttccctgagaagggcaagtgagtgaaaacttgaatgcaggtatctgtctgggggaggagcttcccaggtagagcaatcggtaggtgcaaaggtgtgttccaggggcacaaataaataggccactgtactgaggcagaggtgagaggtctggggatgaggatagagaggaaaccctcctgcggagggagcttttcctctgagggaggcgggaggcggaaggttctcagcagaggaatgacaggacgcgacacactgtgtaactgagtcagtctggatgctgttgctgcaaacacgcgcagggggcacgggtggatcccaggaccagttaggagctcttgcaatgaggcaggaggcctcgggggtggtcgcggaggggtgagaaggggctggattctggatctttatccaagccagagcagacaggatttgctgctggcttggatgtggggtggaaggagggaaacagaaaatcagggatgactctcaggtttttggcttgagcttcagaaaggatggaagttgccgggtggggaaggcggcagcagaagccggtttgggggtggggagatgtggagctcactttttctacacctcccattgaagatgaatattccacctttaagtggagatgctggttagatgctggctgtatcagtgaggcaggacttcacggggggagggttgggggtggtgggctagaaatcaagatttgggagtcataaacgtagagatggcattttaaagcattggaactggatgagatcatccaaagagtgaccgagaaaaggtgggtaggggagataggagaaggagggactggaggagactgagctggggcagccaggaaggctggagaaaaaccaggagggtgggaggaggcccctaaagccaagtgaaaagagtgtttaagaggagggctgctcagctgtcctaaatgccactgacagttcaagaggaggactgagaggcgaccattggatctaacaccatgaggtcattagtgagcttgacagagcagtgtgggtgaatggtggggggaaagcttgattggagtgagttcaagagagaatgagaagagaacagctggagacagcgagtctatacaagccttcccacagtgtgcgctttgaagggaagatggggagcatctggagggatatgtgagtgcaggtcctgcagaggcaggtgggctgatgcaggagagggaggcctggcggagcaaggcctagtgctggctgtcaggaggtgcttcacccacagcaacg

SEQ ID NO: 19049 - DNA, 1543 bp, Artificial sequence
  DNA replication origin
ggcagagaacttgcatcaggcgtctctgaccaccgagcctgcgaagacctagctgattacgaccaggaaacaggaggggacatggcccaaggtgggcggggccagtgctgggaagccccgccccgcccccgatcctgtgctcccaggtctgggcgttaggattctctcagtcccggagccacgccggctgaccgcagggctcggggagcgcggctgggccccttttcccgggtccgggaagcgccgggccacgccgggtccgctggagagactgagggccagggtcgccgctgccgccgggaggcgacagagccagctgggcgcacctgggtgctggcggctgcggagtcgcggggcccggtcctgaggtcaccttcccaccccgacctcacgccccttcctggtctgacccatcactgcggcccacccggctgacagcgcccgagacccgcggcgagccatcagggaggagctgcgggctcagggtgcaggaaccttggggacgagctgaagaatgggttaataaccaggcaaagagcgaggaggtggctgggcctggggcgtctgaagctggggcttgggttgttccttgaaggagcagacagaaggccagtgtggctggactcgccaggagggctgctgagaggaggaggggctggaggccccaatgaggatttgggcttttcctcaaagtgccactgctacttttaattgtttgtcaccagagaaacaggatcaaatttgtcttgtaaacacctctgacttggatgggagggagagggaaatggaagtgaaaagcgttattcaggaacaaggccagagccggcctggaccagggagtggaggcaggtgtaggcgtagagagggatagattttggagttagaatcgatgggacctgaggatgagttaattgcaagtgggggcgattaaaaaaaaaaaaaaaaagccaacacagactccagggttctcgcttaagcagctgcagagaggagctgccgcttcaggaagcgggagaggtcgttccagaaggcagtttggggccattaaactttgacactcatgagattagagcaaatctgttccaatacttaaatcactgggagaaaccgcttaccagggaatttccagtgaagttgccagtagagggtcttactccagatcacaaaaaatgctaccatgcctggtggggctggactccgtctatgttgggtttgggcctggataaatgttgcagccagccttgatcctggggagaggtatttaaggatgggaacataaaggcagcagcaaaggagattgtcacatgtatgtggcgatgacagtcccattatctgcctgcctgtccctgtggccgtgtgtgcccagtccaaggagccaaccttgccggccgctgtcccctgtgaaggcagcaggactcactgaagctggactgtggttatgaccctggactgttgagccaaaactgtctgggtttgtaatcccagctccacctcctgctacctgcatggccttgggcaagtttctgtgcctgtttcctcatct

SEQ ID NO: 19050 - DNA, 1075 bp, Artificial sequence
  DNA replication origin
cttgcactgcccttaatccatttaaccctgagtggacacagcacatgtttcagagagcacggggttgggggtaagtttgcagattaacagcatcccaaggcagaagaatttttcttagtacagaacaaaatggagtctcctatgtctacttctttctacacagacacaataacaatctgattttcttttccccacatttcccccttttctgttcgacaaaactgccatcgtcatcatggcccgttctcagtgagctgttgggtacacctcccagacggggtggcggccgggcagaggggctcctcacttcccagacggggtggccgggcagaggcacccccccacctcctggacggggcggctgccgggcgggggctgccccccacctccctcccggacggggcggctggccgggcgggggctgccccccacctcccggacggggtggctgccgggcggagacgctcctcacttcccagaccgggcggctgccgggcggaggggctcctcacttctcagacggggtggccgggcagagacgctcctcacctcccagacggggtggcggtcgggcagagacactcctcagttcccagacggggtcgcggccgggcagaggtgctccccacatctcagacgatgggcggccgggcagagacgctcgtcacttcccagacgggatggcggctgggaagaggcactcctcacttcccaggctgggcggccgggcagagggcctcctcacatcccagacgatgggcggccaggcagagacgctcctcacttcccagacagggtggcggctgggcagaggctgcagtctccgcactttgggaggccaaggcaggcggctgggaggtggaggttgtagcgagccaagatcacgccactgcactccagcaaaaaccagtcaggtgtggcggcgcccgcctgcagtcccaggcactaggcaggctgaggcaggagaatcaggcagggaggttgcagtgagccgagatggcggcagtacagtccagcctcggcttggcatcagagggagaccgtggagagagagggagagggagattgtggaggg

SEQ ID NO: 19051 - DNA, 830 bp, Artificial sequence
  DNA replication origin
ggaagtgaggagtgcctcttcccagccgccatcccgtctgggaagtgacgagcgtctctgcccggccgcccatcgtctgagatgtggggagcacctctgcccggccgcgaccccgtctgggaactgaggagtgtctctgcccgaccgccaccccgtctgggaggtgaggagcgtctctgcccggccaccccgtctgagaagtgaggagcccctccgcccggcagccgcccggtctgggaagtgaggagcgtctccgcccggcagccaccccgtccgggaggtggggggcagcccccgcccggccagccgccccgtccgggagggaggtggggggcagcccccgcccggcagccgccccgtccaggaggtgggggggtgcctctgcccggccaccccgtctgggaagtgaggagcccctctgcccggccgccaccccgtctgggaggtgtacccaacagctcactgagaacgggccatgatgacgatggcagttttgtcgaacagaaaagggggaaatgtggggaaaagaaaatcagattgttattgtgtctgtgtagaaagaagtagacataggagactccattttgttctgtactaagaaaaattcttctgccttgggatgctgttaatctgcaaacttacccccaaccccgtgctctctgaaacatgtgctgtgtccactcagggttaaatggattaagggcagtgcaagatgtgctttgttaaacagatgcttgaaggcagcatgctcgttaagagtcatcaccactccttaatctcaagtacccagggacacaaacacaaggaaggccgcagggtcctctgcctag

SEQ ID NO: 19052 - DNA, 1058 bp, Artificial sequence
  DNA replication origin
tgagtaagcggctgcgcgattggctgcggggtcgggcggccgcgcggggactgtgggaagcggagtgacggagcgagcggctgttggaggaaggaggtgggggccgggagcgcaaatggcgttgagatggttcagggccctgttcaaactccagcactgaccattcaccggcggaagcggcggcgcaggaggcggcggcggcccagcgggggcacacagcaggctctgttaccagctccagcagtggcggccagcgagagctaggcctgggcccggccggcggcgctcgaggcggggagggaagttgcggggccgccgctcctgcccccccaaccgggcttcctatttaccgaaagcagagtccctcgcctctctcggctctcacctgccggccctgctctcccgcgcgagggttccgcgcccgcccgcgggccgtagggagcgggagaggcggaggcggcccgtggccaaagcacccgccaggctccgagggtaagtgaggtgtcgggcggccgcctaggccgggagggagccgggagggtgggggaggcagaggctgggagcgggcggtggaagtctcactgcctcgcccaccgggccgctgaggaagttgggcaggggaatgacctgaggaactctttttttccccttttattttcctttttcggagttctttttcgggcgactgctgattgacttagctccccaaacccagtcaagtgtgttgatttcagccccgagtcctttcccgtggtttcatccgcctctggccgccactggggccttgcactgccttaaggattcggtggcagaggcttccggggcgtcgaaagtgacctccctttcctgggcggcgcgggttgggaggagaaaagttgcattgagtgtctagtccgaggggtccatcgcgcccactgcccgtggcgccccggctgtccccaggtgaggatttctggttagtcaggttcgtcccgtccgctttccatctttaatggaagcccttaaagcctttggggatcgggaagacgctagattagggtgggagtgaagtataaagg

SEQ ID NO: 19053 - DNA, 1000 bp, Artificial sequence
  DNA replication origin
cgcttcccacagtccccgcgcggccgcccgaccccgcagccaatcgcgcagccgcttactcaaaccgccgcgcaggcgctgcgccccgcatgctccggcgcccgccattggcccggccgcggagcccgacgggagttgtagtccaggtccgcgaggtcgcgggccgaggaccaggcgcgggagcgggagcgggcgactggccgggccctcccggtctcggcagccacttctagctcccggcccagccgggagacgcaggtgccacggagatgggcagccgggcgggtggcgcagtgcaggcagctgtatcaatcgcttcccctccagggacccgccggtgcctggggaccgcgggctgtgcagctgtgccgggcctgcggaggccgccgcccgggagctgggaggcagggggcgcgtggtcaagagccgccctcgacctggcctggtcggtcctggcccggcgtaggtgacgatggcggggaccgcgaggcgccggacacccgaggccacgagcagcgtcgcccctcgctttttcgcgcccctccagccctgcagtccttcctctaagtccgtctgcccctcaccgattgaaagtggccccgagaatattggatggtattgagcaattatcattaactttgttgggtgtggtaacggtaatgtggttatggttttttgtttttttttttttaagacctactgatgtgttgacagagtgatctggtgtcaggactgtaaaatacgcctatgaaaactgggggagaggaataaaacaagctggcagaacgtttttcatcgttgaagctgcgtgatgcgagcatatgtgctcatcatacagtctctttacttgtgtatctgaaattttccataataaaaagtttaaagaagtgaaccagcgattgcctctagggaggacagtgaggtggcggatgacgggaggaaggagtcttaatttttcgctgtacgcctttttgtgctatcttaggtttttcccattcaa

SEQ ID NO: 19054 - DNA, 761 bp, Artificial sequence
  DNA replication origin
gagtggagggcaggtgacctgccagttctcgaaagaagccagatgactaactttggtcgccttatcacaggttaatccatgagaagagcttggaacagcgcccggcagtgtctcagcgcacccaaagtgtgtgcaggtatgattaccattgccagtagctgagctgggaaaaggatctgactagataattttggcaataactcgacaactatccaatgtggacagggaaacgcatgccaaggtttctaaaaagctcccgctgtgacactctctgtgtcctccccgggcgtggcggcctcctggccagggacacccgaccccgcgtggtccgggctacccaaggacgtcccgaggcgtggcggagactttggcggctgagtgcaggccgggctgcggcccagcgggacctgggcgaggcctgcgacctgggcggggccagggttgggctctgccagagctgcgccgcagccgccctgcccgggcctccccgcccccacctgtgacctggattccgcggttcctgcgcgggggtggagggcgtaaaggacacgcgcaaataaaggtctgtggcccaggaaaacttcaagtcctgaaatcggtgcaccaaggatactttaaggcgaggggtcggggctgtgtaatcatttacccggttcgtccgtgtacaccggcctctctagcttacaccaacacatgtttactgggttcgcacccaagccagagtcggtttgtttagtaatcccacagacgcttctgcccgt

SEQ ID NO: 19055 - DNA, 1136 bp, Artificial sequence
  DNA replication origin
acgcccggctaattttttgtatttttcgtagagacggggtttcactgtgttaggatggtctcgatctcctgacctcgtgatccgcccgcctcggcctcccaaagcgctgggattacaggggtgagccaccgcgcccggccaaaacattaacatttcaaataaatgcccccggatttgggggcggggtgccttaggctgcttctcccccaggactcccctttgcactggggtcaccctgggcattaccttggggctgcctgggccgcctttgttgcgcaggtgaccttcccggccgggccagtgtcccggctgctctgagggacagtcctggctccgaaagcgggcgccagcgctgagccagggcccgctcgagatcgcatcgtctctgctttcagtcgttgtccgcgcggtgctggggcctcccgggacccgggagccgcggcggattaggccgcccgccccaacctgggctttgatcttatctgagacttgtgagtccaaaagggcttagcaaccgcagccatggcagccccaacgacgtgaacatccgcacctctgagcctccccctgagaagtaccttcgaggtgaggcctgcgcagccccaggaagagggtgtgggcgcaaacctgaggtggggagcaaggcccgccggctacacggttcctgccatcctcgctgcgccctttctcccatgctcgcggcctccatccggcagaaactggcacagcaaacccgacagccacagacctgtggccccttccttccctcctcgcctcctcggcaacccttgaaagcactcgagtacgaagttataattgcaattataattagctgagtccaacttgggcttccccaggtcttggcttccgttaggacagtgtcccgggtctccctgtcctgcgcagccccagttcccaagaaatagttgaatgaatggatgtttgcatcccgtacccagcctcaggctgtgtactcctttctccaagcacagagattcttctggaaggccccagggatggtggaaagggaactaggcgtgaggtttggtaaaatgaggacaataccagcacccctccacctccccttccgagagagggatttaggaggcacaagtgagatagccacacgactcctg

SEQ ID NO: 19056 - DNA, 1522 bp, Artificial sequence
  DNA replication origin
caccactccagacccccagcaccgcagagtcttgggggtaacctcagttactgatcaaaatcagttctttaaatgtttaacatttattgaataatcaatcctttattcacagtttaaaagtgtagctctatcatatttaggtgactagatgtgctgatttgtttctgatgtctgttcgttctgttcccttaatctgtttatttatccttctgctagtctcacaatgttttattacagtaattttcttgaaggaaaatttgtattattttaattatttttatgtacagaaaactcaacagtgtatatttaacccagtttaatggcaaattctttagcctttgcctttttgagcttggcgatgcgaaccacagacttgggacccaggacattgccgccccagtgatggcggatctcatcgtatctgtcgttgtaattggtcctgatagtttccaccagcttagccaaagcgcctttgccttccgagttaacctgtgtgaaggcgacagtggtgcaggtcttcctgtggactagatggcccagtcttgccttccccttgataatggagtaagggacccccattttacgacacagggcaggcaagaagacaaccacctcaatgggatccatgtcttgtgcaatcaccatcggctgggctttcttgttctccaccaaggtggtgacggtattaactcctgcttgaaagacagatggtttcttagtggggacgtcccctttgccagcagctttcttctcagccagggccaacagcctctgcttcttctcttgctttgtctctggtctgtacttgtgagtagatgtttggtggtccagggcctgggtgaactggttaatcgcagaaggcactttcagctgcttacagaggatggctctctgcctctgcaacctgatgtagcggggccatttcacaaagcgggtgaggtctcttttgggctggatgtcccgtccaatgacaaaattcttaggccttttctcaaacgggggattcaccactttcttggcctcctgcttcttcacgacagcaggggccggagccaccttcttccctttggccttctttcctttcggcatcttgggcggcaggaggagagactattacaataattttatggtacttatttatttgtgtctggaaagacacgggcctctgcttgttctttttttttttttttttttccctaaaatttctccagggtttgcatgtatttaaccctgaagatcacatttacaattaacttctcaggttacagacactgtttgtgcttatgttcatactgcattagatgaaaggttattttgagaacctggatacagtacggtgctttggaactcgtgggagagtacaggggaccggatgggcgcagcgaggttgcagggggcttccactgctgtggttccggcagcaaagcctatttaatgggatccaccacttctctaaggcacctgccctcctcgttagcccgcggccgcagactccaaggccccgggatagctggggtcagag

SEQ ID NO: 19057 - DNA, 815 bp, Artificial sequence
  DNA replication origin
agtccaaggccaaaggcacattcctgcctgcctttcttcctgagtgctgtgcccctgtgcatccaagaacgaaagccctgggctgtacctgcagtcggggagcctcagcctccctcagcattccccccgggggccccgcaccctgtcctggagcccaggcactgtgcatgccataaacgccaggacaaaggcctggcagtgacccccaggctggccaggcactgatgaaagacacagtgcctgtcttggagggataggctcaggggggttgctgggcagccatcaacaatcaccaaacacatgtgataagcgctgccattgaggtgtgagcacgcagggtactgaaagcagaggcaagtccctgaggttccccaggaagatagaggtgaagcagggatctgcaggcagcaggggtggggagtggggggagcactgagctgtccaggatgaggatacagcctgtgtgactgtgcaaacacaggggcacaggggagggagctcaatatgtcctggaacaggatgtctctctgtgaccctgggagcagccagagggaccctggggattggcagtgggggacataggagaagggaagaggaggcggaggtggtaggagcagtgggaaggccccatcagggactggcttaggtgtctccagacctgacctggggacaggaagccctgggagggggttggttagctttgcagggtgaagaccaaagaaggaagtgctgcagggcaggaaagggatgacccatttaaggacagcaggagcgggggtgatgccagagtctccacatgtggaagagaggagcgg

SEQ ID NO: 19058 - DNA, 799 bp, Artificial sequence
  DNA replication origin
cgtgcaagggcagctgcataagcagccccagggctccgggcctacagatattgtggggtagccagtgtcaggactgcagggctgtttgagaaaggctgggccaggctctgctgggggctagctccccaattccctgagtctccttccctttctgcatggtcccctctcatccagaggctgcccctgactgcaaagaccctcctctacactgagccctcccacccccaaacacagctttggcacccctttgggaccaggctccacctctgcccaggaaccatccttggacacaagaatgggccttgctgggggcccttgagagccagtgcccatgagggcattttattggccacacccaagacccaaatggaactgtggacctggacaggaggaagagaggcaggagagactcaagagacacttgaggaaagccaggggaggtgtggtcagctacagagggggcagtgacccgtggctttggacacagaaggtcattgatatgcgtggaataatggggccaaaggcagacggctgtgtgtgagcaggtgggaggcagcggcagtgggggcaggatgtgtgggtcacttcttggaggagtctggaggtgcagaaaggagacatgacaggagccagttggagccacccaggcaggcagggagaggctttttgagcattgaggggactccggcttatttatcggccagggtggagttggggagtgggaccatggggagacagaaggttccagtgagagggtgagcatgagcaaagccccaggggaggccagatgggaaggcag

SEQ ID NO: 19059 - DNA, 815 bp, Artificial sequence
  DNA replication origin
tgcagggggctgggccccagcatcagctctggggtgggcagaggacagaaatgctgcggttggccatcagaggtgcccccagcagagttatacattgtcaagcatcaccgtggggctcacatgccagatctgtgtgggggtaaggatggagggagtccagcctgttggggtggggggattccaggcagccttttagcttttaacattaaggatttgggctgaaaggccatggtgccagttgcgcaatttggcaaaacgtgggctgttacgttccgtttcaaacctttccctgtggcacagagagagagagagagagagagagagagaaacagagacagagacagaaagagagagaagagagggagaatgaaaggggttagggaatgtgttcaccattcccctgtctaacaggtggggcagagggcatgggagggagggaacgggcttggagaagctatgcaatccatggggtacattgtaacccaggtcaggcctgggttaggggaagaccgagagtcttggggaccaggatggagggactgaagtccctgccttgagtgagttgggggctgtggagaagggacctggctaatggccctgagggcagactgagcaaagagggcctccctggtccatgtagtgagggctgggcagggctgctttggctgtgagctctcaggattgaaccaaacagacaggtgcacctcgcatgatctctgtcccctagctgggcatcaagaagaaggagcacctatcccccgtgatgaggcttggtgggcagacctgccccttccctgtgctgccctggcctcgaa

SEQ ID NO: 19060 - DNA, 1899 bp, Artificial sequence
  DNA replication origin
gttccggggagcggccgcccacctcgggcgccagcgataagatccggcctgcgaacgccgccctcggcccggaggaggccccggggggagctgcggctgcggccgcggcgctccgggtcccgcgcgggctccccgccctctctgacgcccggatccgaagagcctggagggaaggggagcggaggggggctcgggaccacacgccccacttcatacggggccgcctgccagccgcccccggactccgcttggcagccgggcctcccggagagggaggtggaggcaggccgactccagcgcgcgcccgcccggccgcctctttccccctaggcaggaatgagttaatgtctgcgcggcctgggaacggcgcgggggcccgcggctccggcccgtctcgctcgcctgggccccagcccgggaaggaggaggaaggagacgcagggcgggctggccgcgcgcccccggagccctgacgccgcctggcgggctgggcgaagacagccggaggccgccccggaaggtgccagaagcgcctccccaggaagagacggaaatgtcctccttgtgccccggcaaggcctcgcctccacccgccgcttctcctccaactcctctccagcctcccctccctgtgttcccagtctctgcaggggcagcctcttcccactgctccatctaaggcttttcactactgcaaaatgccacctcgccctgcggagttttcacctcagaaccgtctatccttgccccttctctgtagggacagagaagggcacctcccgtgtgacagacgctgtgctgggtgcttcattccatccccagaacacaaggtgtccatgaacagcgcagcctggatggatgaggcactttgccttcgagagcagagcaggccgtggcaccggcctctgtctcgggcaaaagccgcttcgaccgcccacactcagccctgctgtcagagcgagcttcatgaaccagcgccccgaagcaaggcctgccctgactcagtgcctgtctcatctccctgggctccagcggcagagaaaacttccctggggtttctccctgcgcctggataggacctgctcccgagtctaggctccttatgtgctgttctgtacccccatggctgcggccaaatctcgcacactggcatgacacagagaagatggagtctcattctgtcgcccaggctggagtgcaatggtgcagtctcggctcactgcaacctcggcctcccggcgattctcctgcctcagcctcccgagtagctgggattacaggtgggtgccaccacgcccggctaatttttgaatctttagtagagatggggtttcgccatgttggccccggcggtctcaaactcccgacctcaggcgatcctcctgccccagcctcccaaagtgctgggattccaagtgtgagccaccatgcccggtccggagaagacttctctgctctccttcgctctcccttagaatcatccaccgctttcttgctcacctgtctcccccagaccagatgcaggctccataggattctgacccacagctaggggacggagggcggagcatcattagcaaggccttgcttcccattcttctggggatgtgcccccagagccacttcttggctcttgtggctcctggagcccgcccatggctttcgacagcctcccctcctgctctgcctcttacctggctggtagacagaaggccggatgctggcagtggtgacaacccggggcttgggtgcaggggcggcggggccctcactgtagctggtgtgggtggcaggtgctgaagaggcggccactgcggggctgtaggaagaggcctggggcctggaaccaagcggggaggggttacacccagaaggacagcccccactggggcctgcagt

SEQ ID NO: 19061 - DNA, 1133 bp, Artificial sequence
  DNA replication origin
gagagggcggggagcccgcgcgggacccggagcgccgcggccgcagccgcagctccccccggggcctcctccgggccgagggcggcgttcgcaggccggatcttatcgctggcgcccgaggtgggcggccgctccccggaacacctgaggcccgggagggggcgggcggcggcggcgcggagaccctgcgcgcgggccggggacggtcacgttggcccgcgggccgggcggcggccaggcgcttgcggagagccgggcccggcccggcgtgagtcagaaatcaccttgtttaattacatatccccgagcccgccgagtgcgataggggacttttgaacttgccaattagagatgaaatatcaccttctaatttagactggcttaattccgtcacgcaaaaatagcaacagccccggggctgcgagatgggatatcaggtctctcctggcgtgacggcgagccaggctgaaggatgcagaagctgagggctgcgaagcgccactgcctgctcgccccccgacggagtcggggttgcgacgggggaacggagctgccgggccgggccaccgaggccggggaggttccttctctgggtgggttagccccaagcaaggaagccgtcaaatcggggtccagattctagcctgcctctgtgagacctctgtgttgtgggggctggaaaagaaaaggaggtggatccgggagtctgtaaggccttccgatggagggaagcgactgccaggcagggggaatagggttagtattgctggagggaggcaggaaaggtgggccagggccctgtttacttgaaagggggcgtactaaagcctgttttgctgcttggggagtttctaagcgggcatctgctgttgagtctggcagcctgagctcgtttcggctaagcagttcaccagctggatgacttggaggcagccatttaagctctccaagtctcagttcctcatctgtaaaatggacttgcaaatattatctgcctccttggattgcagcgagtaataaggcacgtaaagggcctggcatgtggaagcagtcattttggtgaaggcagcaccacgcaatagaaatttcctattagccacatttttaaaaaataaaagaaagcaagttaaatt

SEQ ID NO: 19062 - DNA, 990 bp, Artificial sequence
  DNA replication origin
aggctttctccctacacctgcctcctacccccatctctcccaaccagggctcagactgtgggcaagcaccccacacacacgcccttccagtgccccagtgcaggggcacagctggaccataccggatgacattgttgcagtgaccgcagagtggagtccggctgctggctgggaatcgctcagccctctggacggtccccctggcaagtggtggcacctgaggacccgctggggtgtaggctgggcctccccggggcagggtctgcttgctgatggaggtggtgctcttgcccggggcaaacttctgggagaagctatcatctgtcacccagggtggacggctggcaggctccgcagggcccccgctgtaggccaccgagggtgcagggttatagttgggggcaggtgagggggtataggctggtgctggggatggagtgtaggtggggacaggtgagggggtgtaggcaggggcaggggagggggtgtaggcaggggcaggggagggggtgtagggagtgggactgtaattggcccctggggacgggctgtaggtagatgcaggcactgcaaaagccaaaaaaaacccaaagaaaggtgtgtcaggaattcattcttcccagttcccctcactcctagccagagaaatgcaaaaggtgactttaacattagagcagtacaatttcagtttttttgggagacttgttcctgaacttcttgatggcccagatttgaattctcagcagggtgttcacagagctagggagcaagcacagcagaaccctcgacagggctggaaaagggacatggctataaatatttgcagctgtgcagggtggggctccgccaggccttgactgcccaaggcctgcataagacgcagagtgggggtgggggtacctgggcggggagaggtgggagtgggtcacctcgcctttgactgcaagatgctttcagttgcactctgaccagtgatttgacatctgaaat

SEQ ID NO: 19063 - DNA, 1108 bp, Artificial sequence
  DNA replication origin
gcggccgctgcagagattggaatccgcctgccgggcttggcgaaggagaagggaggaggcaggagcgaggagggaggagggccaagggcgggcaggaaggcttaggctcggcgcgtccgtccgcgcgcggcgaagatcgcacggcccgatcgaggggcgaccgggtcggggccgctgcacgccaagggcgaaggccgattcgggccccacttcgccccggcggctcgccgcgcccacccgctccgcgccgagggctggaggatgcgttccctggggtccgggtgagttgggagtgcgcgtgcggaccggaggggctggccgcagcggggaggccagaggggctcgggcgaggctgcagaggcagctgggcgcgcggtggccggagccaggggctgcccggcccggccccggcagctccgcaggcctcggcgcgcgctgggccgggaccgcccagccagagacccacggcaccccgcgccgcgtcccccgccggcccctcttttgtctcccactcgcgggttgcaggccgagtttggggatgcggagtgggcgaaagtcgctccggggacgcttctggaatccttaaatgggaaaggcgctcacctccccgccccggagcggcgaggctgatatttgtgatttggctccggacgctgtggggaggaacaggggagaacaaaatgagtttcgggcgggggtcgagtgagaggagcagccggcccgcccccgagtccccgcgggaaggggccctggcccccgagctcccggagctgcttcacctgttgtcctgcgcggcctccgctccgtggcctggtgattccgtacttcagttttggaaaactttctgctggattgcctggacccttttttctctttccagactcctagtggaaagatttggcaaggaaaaaaaaatgagcttgcgtcagggaagaaaaataatatgctgtgtgttagggtctggcgtttgagcgtggtactctttcatgctctcagatgttttaatttggtcaaactcctgcaggttttctcttttaagcggttaacaaactgttcagagtacatagtatgaacttggcacctgtgttacgtcatttaatccttacaa

SEQ ID NO: 19064 - DNA, 1249 bp, Artificial sequence
  DNA replication origin
acgtcgcggctccggagccaagtgcaggcgctggatgacgaggtgggcgcgctgaaggcggccgcggccgaggcccgccacgaggtgcgccagctgcacagcgccttcgccgccctgctggaggacgcgctgcggcacgaggcggtgctggccgcgctcttcggggaggaggtgctggaggagatgtctgagcagacgccgggaccgctgcccctgagctacgagcagatccgcgtggccctgcaggacgccgctagcgggctgcaggagcaggcgctcggctgggacgagctggccgcccgagtgacggccctggagcaggcctcggagcccccgcggccggcagagcacctggagcccagccacgacgcgggccgcgaggaggccgccaccaccgccctggccgggctggcgcgggagctccagagcctgagcaacgacgtcaagaatgtcgggcggtgctgcgaggccgaggccggggccggggccgcctccctcaacgcctcccttcacggcctccacaacgcactcttcgccactcagcgcagcttggagcagcaccagcggctcttccacagcctctttgggaacttccaagggctcatggaagccaacgtcagcctggacctggggaagctgcagaccatgctgagcaggaaagggaagaagcagcagaaagacctggaagctccccggaagagggacaagaaggaagcggagcctttggtggacatacgggtcacagggcctgtgccaggtgccttgggcgcggcgctctgggaggcaggtgagttcctgggctggggagactggacgagcctaggaggccagggccggctgccggcagctcttctgcctccaagagggccaggaagaaagagaacaggatggccatccgtcacccctactaggtccaccttccccttggcccacctgcttctcaggggtgtgggtctctcaagctacctggcttatggggagacagaagtcacaagaaccacctgctagtgccagagcccgtgagcggcatagcctggaggccacaggcacaatagtgccgcctactgctcctgctacagagagggcatcgcctcctgccctgccagggcagccttcaagtccccccatctcatctcttcacctcacccccttcattcccatgtgcgtttaagccactgtatctaggaagaatgtggatagggactgtggccacttgcagccccacttagttctgtttcattttccatga

SEQ ID NO: 19065 - DNA, 1972 bp, Artificial sequence
  DNA replication origin
cgggggctccgaggcctgctccagggccgtcactcgggcggccagctcgtcccagccgagcgcctgctcctgcagcccgctagcggcgtcctgcagggccacgcggatctgctcgtagctcaggggcagcggtcccggcgtctgctcagacatctcctccagcacctcctccccgaagagcgcggccagcaccgcctcgtgccgcagcgcgtcctccagcagggcggcgaaggcgctgtgcagctggcgcacctcgtggcgggcctcggccgcggccgccttcagcgcgcccacctcgtcatccagcgcctgcacttggctccggagccgcgacgtggccgcccgcgcccgctcgccctccgctttgtgcgcgtccacggccagcgacacggcgtccacggcgttctgcagggcctgcagggaggagccgtccagctgccgccgctcgtccaggctcacctgggtctcctccagggcacgcgtggcgtccctctggccctcccggatgacgtccaggtctaaatagagcttctggcaattgcagtccttcacgtacttgatgaggtcggcatggccaccctgcaggtgctgcagcgtgaggttgagctccaggagctgccgctccacctcctccttgttctcctccatgatcagagacttctccatcaggatcacgcgcagctcacggagcgccgtgtggttcacctgcagctcctccacctgccgctccaccttgctaatctgatcgaaagtctcgtccgattcggagtacagttccttgatctcatccacgtgccgggtcagggtggccctcatgtcctccagggtgtactgcaactcctcctccctgcgggccgtggtcatgtgcagctctgagaggttcctctgcagctggcccagcctggcctgcaggctgtccggctcaggccttgccccagccccaggcgttgccaacaccagactgccattggtccctggggcctcctgagccttgtgcagcctcttcaatttggtgtccacatcggcttggagctctgagatcgagcggtgcagggtaaagtgctgggcgtgcaggcggtcctccacgtcctgtcgcagctgacccactctctgagtgttctcctggaccttggcctcaaatttggcaccaagctcctggaagtcagccctggccacggcactgtcctggactctggagatggcctggcggttggcctccacgtcaagagacaggtttcttatggcctgggtaaggctgtgcaggctttggttaaagctcctccagatggggctgaaatgcacttgtaggaaggtgtccacgtggggtagcagcacctgctccaaggatctatcagggaactctgcaacagacatgtggtgtgacacaagccctgcaggagcagacactcctcccaggctgggaccagcggggtcctcccctcctcccctcaatgtgaccaggctcttcctcagcccctagagcctgccactcaccgtgccctgtttgatttgcttccatcactgcagctgtgaggttaccaggcagggctttccacaggcctggcaggctgtctgccacccggtgcacatcattctggagatctcccagcagatgttcctgctgttcctgttgcacctcaacctcattgatcactgcagcaaggtggcctaaatacacagcagacataaatgtcaagggctaactcaccaggcctgggaagatcacaaggttcagagaaggagagttgaaggctgagagcagggaagttagctgctgatgtcctctgagcaggagcttagaagccttaaacccctggagggcaaatgcatagcaagtgagccctcaccctgcctcctacacctacagcagacatgactaatcaatcatggtacactcccctcctcagcacatgcacatggcctcacaacttcattcttggcagcccttgtcaataaatacttcaccacataa

SEQ ID NO: 19066 - DNA, 1377 bp, Artificial sequence
  DNA replication origin
ggggtgctgggaacaccagtccatccggaacccactagacaaaaccttccagggccggaggttaccggtttgtcccgaaaggaagtggtgtggaagggaggggtctcccgcacgcgagcgcgcacgtgcatgccccccccacaaccgtgcttcgttctcacgtgcacggccccgtgccccgaagcccctccccggggagtggcggggcgggaccccgccgggcggcagcgccccactcaacaaagcttcccgcgggccctgccccatgactcaccgctgggtggggcgggcacgcaggcaacccgcgggccgagacggggtagtgagggccggaagcccggctcccgactccgcttcgtccccacaacctccggccgcctgaagtcctgaggggccgtggccctgggtcgtctcccctgttcccagcctccagtcgcagctggcggagagaagttcccgaggcccccccgacttgcaaggtcccttgccccgcccagagctgagccttccgaggatctgaggaccgagtccagcccagctcccaggaggggccgggatcctggggcagggaataaggggcaggggctggctctaaagtcgggcgggagaggggcactaaccgagatgggggctgagcctccggtctgggagcttcgggaggcgcgtggcgggatggaaaacattcctgagaccgttggattggatttccgaatttgggaggctaggactccggctacggtggctctgctcttgggatgagaggactgggcccagcttgcgaggaatcatgaagtggacacagggtgggaacgtgaattttaatgagggggcagaccgaggaggtggtggctgcccggagatcagggccaggctgtgctagatggcgcctggaaggggggtcacccaagtctccctgctgtcatttcaggaggccgacccaagtctccctgctgtcatttcaggaggccgaattttttcccaatcccagagaaggtgtcagaggcctggttagcagtcttgtcgatggtttcctgggtggtcttggccagctggtccatggctggggaagggcgggagagagggcaggtcaggcagggcccgggaaccacagtgcctgtaggcttagcctggcctgggtctcccgggggacctgcttggggcattgtggacagagggctctgcagaggagaggatgtgcctgggccccagccgggatggggcggggagtgggaggtgtgctggggttgcccgcctccctccagccccaccagacctttctgccccgcctctgtggcctggtccaccacttgctgagctgccgctccggccgctgacactggaacagagagatgtggcttttagcccctgttgaggcac

SEQ ID NO: 19067 - DNA, 1340 bp, Artificial sequence
  DNA replication origin
cacttcccagtaggggcagccaggcagaggcgccccctcacctcccagaagaggcggctggccgggcggggggctgacccccccacctccctcctggacggggcggctggccgggcagagggactcctcacttcccagtaggggcggccgggcagaggcgccccctcacctcccggaagaggcggctggccgggcggggggctgacccccccacctccctcccggacggggcggctggccgggcggggggctgaccccccacctccctcccggacggggcggctggccgggcggggggctgacccccccacctccctctcggagcggctggctgggcagaggggctcctcacttcccagtaggggcggctgggcagaggcgcccctcacctcccggacggggcggctggccgggcggggggctgacccccccacctccctcccggacaggtcggctgccgggcggagaggctcctcacttcccagatggggtggctgccaggcggaggggctcctcactcctcagacggggcggctgccaggcggaggggctcctcacttctcagacggggcggttgccgggcagagggtctcctcccttctcagatggggcggctgggcagagacgctcctcacctcccagacggggtcgcggccgggcagaggcgctcctcacatcccagacggggcggcggggcaaaggcgctccccacatcgcagacgatgggcggccgggcagagacgctcctcacttcctagatgggatggcggctgggaagaggcgctcctcacttcctagatgggatggcggcagggcagagacgctcctcactttccagactgggcagccaggcagaggggctcctcacatctcagacgatgggcggccaggcagagacactcctcacttcctagacggggtggcggctgggcagaggctgcactctgggcactttgggaggccaaggcaggcggctgggaggtggaggttgtagcgagccgagatcacgccactgcactccagcctgggcaccattgagcactgagtgaaccagacaccgtctgcaatcctggcacctccggaggcctaggctggcggatcactcgcggttaggagctggagaccagcccggccaacacagcgaaatcccgtctccaccaaaaaaatacgaaaaccagtcaggcgtggcggcgcgcgcctgcaatcgcaggcactcggcaggctgaggcaggagaatcaggcagggaggttgcagtgagctaagatggcagcagtacagtccagcttccgctcggcatcagagggagaccgtggggagagggagaccgtggggagaggga

SEQ ID NO: 19068 - DNA, 899 bp, Artificial sequence
  DNA replication origin
cccctctgcccagccagccgctccgagagggaggtgggggggtcagccccccgcccggccagccgccccgtccgggagggaggtggggggtcagccccccgcccggccagccgccccgtccgggagggaggtgggggggtcagccccccgcccggccagccgcctcttccgggaggtgagggggcgcctctgcccggccgcccctactgggaagtgaggagtccctctgcccggccagccgccccgtccaggagggaggtgggggggtcagccccccgcccggccagccgcctcttctgggaggtgagggggcgcctctgcctggctgcccctactgggaagtgaggagcccctctgcccggccagccaccccgtccgggagggaggtgggggggtcagccccccacccagccagccgccctgtccgggaggtgaggggcgcctctgcccggccgcccctactgggaagtgaggagcccctctgcccagccaccaccccatctgggaggtgtgcccaacagctcactgagaacgggccatgatgacaatggtggttttgtggaatagaaagcggggaaaggtggggaaaagattgagaaatcggatggttgccgtgtctgtgtggaaagaagtagacatgggagacttttcattttgttctgtactaagaaaaattcttctgccttgggatcctgttgatctgtgaccttaccccgcaaccctgtgctctctgtaacatgtgctgtgtccactcagggttaaatggattaagggcagtgcaagatgtgctttgttaaacagatgcttgaaggcagcatgctcgttaagagtcatcaccactccctaatctcaagtacccagggacacaaacactgcggaaggcctcagggtcctctgcc

SEQ ID NO: 19069 - DNA, 835 bp, Artificial sequence
  DNA replication origin
cgaggcggtggccgaccgcgaggacgaccccaacttcttcaagatggtggagggcttcttcgatcgcggcgccagcatcgtggaggacaagctggtggaggacctgaggacccgggagagcgaggagcagaagcggaaccgggtgcgcggcatcctgcggatcatcaagccctgcaaccatgtgctgagtctctccttccccatccggcgcgacgacggctcctgggaggtcatcgaaggctaccgggcccagcacagccagcaccgcacgccctgcaagggaggtgagcgtcggccgggccccgtcccgccctccctgcctcccctgcggccctcccctccggcctcctgccggtgcggggccgctgctcagcccagcccagcccagctggagcgggccgggtccccgcccgggtcaccccgcctcggatgtggccggctctgtggatggtgatttttccgccttaaaatcatcatgcgattggcctgccccctcccccgcgccgtcaccccgggcctctgtatatgctgatcttgcatgcagagtagacgctgcaccggtctccttttggtcccggtgtctgtgtcacacacggcgggtcctgccgaaatgcacttctaggaaagggaatgacctgcccgtgtgataatgcctcgtcagtgttcttgggcttttgtgagtctcccctaaatgcaagctgtcaaattattttctggtatttgttcactcctgttccaatagtgacagatgatatccgaacatagaaaatgacttggcttctaagtttgaaatctagacagttttattaaccaaaggaatttactaatcacgcgt

SEQ ID NO: 19070 - DNA, 738 bp, Artificial sequence
  DNA replication origin
ctatgttcggatatcatctgtcactattggaacaggagtgaacaaataccagaaaataatttgacagcttgcatttaggggagactcacaaaagcccaagaacactgacgaggcattatcacacgggcaggtcattccctttcctagaagtgcatttcggcaggacccgccgtgtgtgacacagacaccgggaccaaaaggagaccggtgcagcgtctactctgcatgcaagatcagcatatacagaggcccggggtgacggcgcgggggagggggcaggccaatcgcatgatgattttaaggcggaaaaatcaccatccacagagccggccacatccgaggcggggtgacccgggcggggacccggcccgctccagctgggctgggctgggctgagcagcggccccgcaccggcaggaggccggaggggagggccgcaggggaggcagggagggcgggacggggcccggccgacgctcacctcccttgcagggcgtgcggtgctggctgtgctgggcccggtagccttcgatgacctcccaggagccgtcgtcgcgccggatggggaaggagagactcagcacatggttgcagggcttgatgatccgcaggatgccgcgcacccggttccgcttctgctcctcgctctcccgggtcctcaggtcctccaccagcttgtcctccacgatgctggcgccgcgatcgaagaagccctccaccatcttgaagaagttgggg

SEQ ID NO: 19071 - DNA, 1221 bp, Artificial sequence
  DNA replication origin
cgggggcgcgcaggcgcgggcgggctcggcgcgcacgctcgcgcgccagtggggaagggaggggaggggagaggaagggcggggaggagagtggaggggaacggacgggaggggcagggaggggaaggtcggggcgggtcggggcgggtcggggcgggcccacgggcggccggatttgcccggaggccgcacccgcctccggcggggctctcaggtatgtgcgccgcgggggtccctcaggggggttgggggtagcccagggaggtcggggtcgggggctggcctctgtagggcgctcagaggccgagtccccccgagcgccgcgtgggtgaggcttggcggtctggtcggggaccgggtcatgtgagtcacgggcgcccctcctttccgcccgcgcgccctcggaacgggcggcccaccctggcctgtcctctggcggcctcaggccggggccgggcgtgcaggggctgacacgtgggcaggaaagcgaggcagagccgccgccgcgtaaggccgggctgagggctcggcgtcaccagccagggctgcagagagcggcgtggcacccggagttggattatgcgtggctggcgtgagctggaagggagtcactcgcccacaagctctcaccacgcgagcttttattgtcccgttcaactgctccgcagtgtggagatcgcatagttacgcacgtcgtggttgtgtcgccccacagtactgactgcttcacctttgcagacagaggctccggcccggcgcggtggctcacgcctttagtcctagcactttgggaggtcgaggctggaggatggcttgagcccaggagttcgaggctgcagtgagctacgatagctccactgcaccccagcctgggcaacagagggagaccctatctccctctgaaatagtctaaaataaggaaactagaaatgcgataatgcccccaggaaattctttctcaggaatatatgtatttgttaaatggttcagtatatgatttattttttattttatttatttatttgagatggaatcttgctctgtcgcccaggcgggagtgtagtggcaccatctcggctcactgcagcttccacctccctgggttcgttctagcgattctcctgcctcagcctcggggtagctgggattacaggcccgcgccaccacgcccggctaatttttgcatttttagtagagacggggtttcgctgtgctggccag

SEQ ID NO: 19072 - DNA, 826 bp, Artificial sequence
  DNA replication origin
aggatggtagggagagacgtgcggggggtagggagggcggaaggaaggtctaggggaaggagcggagggggaagggaggaaggaaggcaggaatggaatgaaaggagaagggaggaaggactcgttgaatgcacagcctccccggtgctgcagcggcaggagcggctctcacaggcatggggcccccagcagaccctaccaggctgcgggaatgttgcggccctgcagggcgtctctgtcttttttgaggtgtctctggtaatatgtgataatgatagtatttttagacatttggaatgtgatttaaattctagctccaccaccttctagctgtgggaccctgagaaacagcacatcctcccagatcctcccttctctcttgtccacacgtggggaaggctcctggcggggtggggattgggggtggtgggaggggggaaggtggggggctttgcagatttaccaagctgatgtacaaagacctactacagctgtaagggctagctcctttctcccactctggcagtcactccactttgagaaacatacctcttgaaataaagctacaagtggagaggggcaggtgatttgggcaaataattccatactaaatattaggacaaaacatcctaggcaaatatcacaatccggagtcatagtggcatactaaattcaaccaagaaatatacccatgatgttgaaagagccaggcttatggaatgtaaacagcaaactattttattcttgttttctatttaccaattcaaacttgctctgcaggtcactcctccctgcccctgggataaaatctagggcatgttctgtg

SEQ ID NO: 19073 - DNA, 919 bp, Artificial sequence
  DNA replication origin
ccaggcgcatggctccatgaagcaagaggaggaggcagagcgcgagagatcccgtccgccccagccgcgtctgggccaggagaaaaggtgggaaactcgggctgcgccgcacccttctccccgctgccgggccaggcctccctcggtccgccgccgccttgcccgccgggcctgttctcgccggggcgggcggcggggccgggaagagaccccgcggtcctggggcgagggtccgggggcagcgtgggggaggggtcccgggcggcgggcggggcctcaggccatgtcccagcggagggcagggggtcgggaggcactgccggggaggggcgggcggcgccgtgccccgggccgcgaggctcggctcccgctcctggtccttgtctgcactccctccaggaagcaggctcgctcgctgtaatgtttggtggtctccggcgccgcctggtggcccccacccaccgtcccgccgccccgccgccccctcccccgcccggcgtctggattccacccccgcggctcggcccaagctgctctacccgtcgctccatcgtctccccaaatccccagcgccccggaccctctttcctcataccctcctttctcacctttcaccctgtccctcggcccgcttttcccctccccgctctgtcctgtcgttttcttaacactcttcacacgcgcacttcctcctcctcctcttctctttttcccacccctacctttgggccctccttccttaacctccgctggccccccattccatgatccgtccacctgacacgctgggtttcatgcctctctttcccaggctgtgggttgtgcccttcactccttgccctcctccattccctgtcctgatctgaactcctctccttgccacgctccctcacccttatccctctgcacactccaaaat

SEQ ID NO: 19074 - DNA, 922 bp, Artificial sequence
  DNA replication origin
tattactccaactctttcacagcaggaacactagagtgggaatgagaagtgtggcccttgtgtgttacgttacttcttttgagagtatggtcatatccatccgtttgtagcattacacaaggagtcagttaaggtacaaggggtgtgagacccagtgactgcccccaaagtgcttgtcactagagcttctctccctcacctctacttggccttgacatttgggttcgttcagagggttgccccatactgcctttgggttcgttcagagggttgccccatactgccttctggtaaaatcttggcgccctaggcctaagcctgctcatcttgtgcctccttttcctcctcctcagggcccattccagtggaacagaagtgctactttgggggtggactgaaacaagttgctgggcttccattggccattgccacttgcttgtcgttgtgaggaggggccgtgcctccacaggcccatacctgtaacctgacgatactgttgtgagcgggaatggaggaagtgcatggaagcccctcagcacgatgcatagtgaacagacaagctgtgaaccttgggagttatcaccatgtgtgatgatgctggtgaagaaagcctgcactgaggaggctgtcagcctgggtttgaatcccctcatttggaatataatcttggcaaagtctgaaagcctcaattgctcgtttgtaaaactggaagatagtaggacttgctgcccggggtcggggcaggatggagggggcccatgagaattaaggcagagcccagcggagtgcattgtaaggatccatgagtgtgaaccttcgtttttactactgcatatgaggatcctgccaacaaacctggcggcttcaagcatccttgcccttaaccaaataagctcttaggtcctagaggcaggaagacttc

SEQ ID NO: 19075 - DNA, 1302 bp, Artificial sequence
  DNA replication origin
gcatccttgcccttaaccaaataagctcttaggtcctagaggcaggaagacttccttgaagaggcgcgggaggctggtgaggggagtggaggacgctctgggaccctctgggggtggggcgggcggggtgaacttgaccccaggccgcgtgccgggcgtgccatctgccgctccgctgcaaggtctcgcccgggaccggggctggcggagcgcgcgcccgcgagtaggggccgggccggggaccccgcctaggcggcggcggccgggtccccaaggctgggcgctgcttgcggaaccgacggggcggagaggagcgtggcgggaggaggagtaggagaagggggctggtcaagggaagtgcgacgtgtctgcggagcctttttatacctccttcccgggagtccggcagccgctgctgctgctgctgctgctgctgccgccgccgccgccgccgtccctgcgtccttcggtctctgctcccgggacccgggctccgccgcagccagccagcatgtcggggatcaagaagcaaaagacggtaggcttccaggcgccggcttccctccccgccaccgcactgcacgcgccgacccccaacccccaattccccggcacttgggtcccaccctccccgggagggggcgtcgggaggaggagtaagagtggggcacggagggaagcaagagaaagaggctctgtgtggaattcccggggcagtcctcgccccgcagcccctctccaccccgcgactctgggaatctgcgctccttggggtcgccgcgcccgcgagagacctcccgagcttctcaagtgggtccggatctagatccaggaccagggacaggaaatcccctttctttcccaagagctcttccagacccgccttttcttctgtagggtctcggagcagatcgagctgactcccgttctgccaggtctggtcgctggggttttgtctatgggaacttccttggagtgggctttaatgacggactttcatagaggaaactgcaattatcaaagcaaactggaggaaattgcatttctacactggcgggatttagccctctagcttgatttcggcattgggtggcatctcgagttcagtaatgaggggtgagggtgcccctcggtttggtggagtaagatgaggggactgtgttgaggaggcacacttttacccagaattaataatctgagctgtcctcctttaatgggaaatatgagggcgtgtcaaagagaaaagtttctttcccagcaacatgggcacctataaattttgcattcttaaaaatggcagca

SEQ ID NO: 19076 - DNA, 989 bp, Artificial sequence
  DNA replication origin
cgccttttcttctgtagggtctcggagcagatcgagctgactcccgttctgccaggtctggtcgctggggttttgtctatgggaacttccttggagtgggctttaatgacggactttcatagaggaaactgcaattatcaaagcaaactggaggaaattgcatttctacactggcgggatttagccctctagcttgatttcggcattgggtggcatctcgagttcagtaatgaggggtgagggtgcccctcggtttggtggagtaagatgaggggactgtgttgaggaggcacacttttacccagaattaataatctgagctgtcctcctttaatgggaaatatgagggcgtgtcaaagagaaaagtttctttcccagcaacatgggcacctataaattttgcattcttaaaaatggcagcagttctatttgtcaattataccccaataaactgaaaaaaaaaaaaaaaaaaaaaaaaaaaaaaccgggagcagtaatcatagactcttagagttggatggcgccttctagacagcactggggccacgtcagatgtggtcagcaagccttgataaaatcctactcagcagtttggccgctgaacattctatcttcagccaccaccctgcaagcctcagatgattgtactggttactgaatgggttgacctctctctagtagatagacgtgcaatggacacatagtaggtgcctgataaatgtttattcttatataatgtgtattaccgaaatatctttgaggtgtatttgtggtgggccggggagaggtttaaaaaaaaaaacaaaatataaagccaagaagtggggaaggagtgtggaggggccatgcagggctagaagggtcatttgagcagcaagagaacagggtgggggctctgtggctccagggaccatactggaccagcaggagggtccagggtgtaggtggcatcaatttgggaagggacatttatcaaaatccagctgcct

SEQ ID NO: 19077 - DNA, 1040 bp, Artificial sequence
  DNA replication origin
gagcccctgtttccgccgcggcgcaggaagggttggggttccgctgcctgcaccaggcaagagcaccccgagcaaaggaagaagacgacttgcctccggagctatcactggggagtgggaatttggaaagttccccaactagggacacacgtgacctccttcggaaagtagttccgactgtggcccgtgtatccttccacctccttttgaaccctcctaggtctcctcgccccgcccactcgctgggctgcagcttcctaccgttccgtactttccactcaacccggtaaccccaaacgtgcacggtccggccggggcgcgcggagcctggccccgggcgatccatcctgccgggttttcacggcggccaagggggggcggggctaggtggtctctgagaaccgagcttgactccgacgccgcgaaccgacctggagcccgaggggaaagatgctcgactctcttgggggcaccggagcgggcgcaggagaggcctgcggggtgcgtcccactcacagggatcctctttcagttcatttagataggtgccctttgggcccttgaaattcaacggctatgtgttcacgttcagcacgctcggctgagagctttcatttttagggcaaacgagccgagttaccggggaagcgagaggtggggcgctgcaagggagccggatgaggtgatacacgctggcgacacaatagcaggttgctctttgtgctaagactgacaccatgaggacacagatttgggggaagggggaatctctaggcaaaggctgttacagtcaaatctctgcgaacgattgtgatccgacagcggtgcaaaaggaaagagcgaatgcagtccacgccgcggaaatctaggggtagaggcaaggggggagggtattccccttgcagggaccgtccctgcatttccctctacactgagcagcgtggtcacctggtccttttcacctgtgcacaggtaacctcagactcgagtcagtgacactgctcaacgcacccatctcagctttcatcatcagtcctcca

SEQ ID NO: 19078 - DNA, 1213 bp, Artificial sequence
  DNA replication origin
tttatgtgttaggcacaatgctaggctctatggaaaccacaagaaatataaaaagtagtctgcaatcttagaaaatttactataaagtggttttattatacttattttacttatttaaacatgaatcaccatttcccctgcctaattctttccccaccaatattggggacttttgacagatacatatacgaatatgattttaattaccttcaaagttctagaagccagaaacagagaaatcagaaagtccccaccagggcatcttgaagcggtaggacaagaacaggaaaggtagactaggacagcaaaaggacagaggaggaggggaactgagagagaaggggacaggagcgaggaaggagggggaagcaggaaggaggggggaagcgggaaggaggggggaagcgggaaggagggggaagcaggaaggatgggggaagcaggaaggaggggggaagcaggaacgagggggaagcaggaacgaggggggaagcaggagcgaggagggaagcaggaacgagggggaagcaggaacgagggggagcagaaggagggggaacaagaaggaaagggaagcaggaaggcgggggagcaggaaggaggggaaaacaggaaggagggggaacaagaaggagaggggaacaggaaggagggggagcaggaaggagggtgaacaggaaagaagggtttgaatgaaagagtctgaggcaggagaaagtggagacagcagcaagaggactgaggaaagaaaggagaaaggaaggaacctgtgcatcgcgaggcaggtggggagggaaagagaacttgaggagagacagcaattgaggctggaagaggctcagggctgctgagccttagtcaccacccaatgaatagaaatgttcaaattacacacgagggttgtttttttttttcccacagctaagaggaaactgaggtaaagaccagagcagaggaggtctgtaatcccacttcagctctgcctctctctccattttgcctgaggttaatctgctccaggcatgtgtctgtcacctctttctgataccacaggagccaaagatcctgccctttctgtgtccagctaaggctgggtctgcgttggcaggggccacctcctccaggagtcagcagctcccctgagctgtgcaggctgctacttccccaaagtgcttccctctcagaactggctctggtgcaactttgacagcac

SEQ ID NO: 19079 - DNA, 1156 bp, Artificial sequence
  DNA replication origin
tcccgccgcccttccttgaaggatgcccgtgtcacctgagccaccgcgccctctgcacaaccgtgtcagggagagggaagagggggagccgaggaagcttcttggccagggcgctggggatccgggagcgggggccgccggcgagactgagcccgggacagcccagagctccagcgctccagcgctctgcagcccgcccagagcgcgcagaccacccccatgccccgcccgccctcctgccacacccgcccccagcccggccccgccgcctcctcacctcgccgggaccactgcagccctggcggtagcgcgcggacatgcccccggggcgcacccgccgagccgcgtccctgcgcagtggccccttcccgggccccaggctgcgcgatccgcgcttcggtggggcggggagcggactgggcggaggcgccggcgaggctggggccgggggcctagctggcaacgccgggagagggaagcgtagcgcggaaaatcccagtgctcggccttcgaaatgcaccggctcattcagccccgccagctccgccggggactctgcctggccggcaaagaggatttagcgcggggatccgctctaagtactgtggcttggctaggggcgaggggcgcagcggaggagggacgtctcgcggttatgtaatgcaccggctttctgtgtccccagccaaaccgctctaggactgccggaccctccccgggaagagccatgacccctgacctcggcaagccgaggggagctcggtgttcccaaaaagaacttttcccctcagggtcaaagagcaagatctcgagaaaaaatacaaggcctcctttaggtgtatctggcagggatccggaccctgctagccaatccttcccatttcacagcacaggaaactgaagctccagaatgctagtgaaaagcgttatctcttggagtcaaaaggacctgggttcaacgcatctgaaaatctcataaccttgggcaatttaactctctgagcctcacttttgcttgtaaaacaaaggatgatagcgcccacttcatgttgttgctgcgagtatgaaatgagtgaggtgtaggcgcccggtacataatacaattccccaaacgttgactcaaagcctgaaaagggagctgccaggacgtacccca

SEQ ID NO: 19080 - DNA, 1093 bp, Artificial sequence
  DNA replication origin
aaataaagacgccggagaatgacctccagcgaggccgcctgagccggggcccgcgcacagccccgccagcccccggcatgggcgaccgcagcgggcagcaggagcgctcggtcccgcactctccaggggcccccgtgggcaccagcgccgccgctgtgaacgggctgctgcacaacggcttccatccgccgccagtccagccgccgcacgtctgcagccggggtccagtgggcggcagcgacgcggcgccccagcgcctcccgctcctgccggagctgcagccgcagccactgctccctcagcatgactccccggccaagaaatgccggctgcggaggaggatggactcggggagaaagaacaggccgcgtaagtcccgctgggaggggagcgcgggcgcaaggcagacgcagcgtgcggggcccgggactgggagcggctgaggcaggcgccgcagcacgccccgtgcgcccccgcgtctgcggtcgagggactgcacagagtaggttcccgggactgattcttttcctaggggacatcaagcactacaggtctttgcctgagcctgccctttgctcgcttctatcagtagaacgaggattggacacgaagcttgagcgggtccctaggtcaaggatatataataagcgaacgctctgtccgcccttctaattggtggctgggaaaacgcaggtgtgtgaacatttgctggggtccaggagtgaggataaagtgggcggcacaccgagggtgctctctcctttctcacccctctcgcttctctgagcgcgtcctactggggttgcctgccctttgaatcacagagtagccagcagcgtctcgggtctattggagagcgcaagtctggaggcgtggagtttaactaccccccaaaatcacagcctattagaagctgtttcttcacggccaatgagagggttttttgggagggacacacccactgataccatgtgggccggaactatgtggaccaatgaggattggaggtggattttttttttcaacgaagggggaggttgagttgagggtttgtaattgtaatgtacaccggagaaagccgaagtgcattatt

SEQ ID NO: 19081 - DNA, 2278 bp, Artificial sequence
  DNA replication origin
ctggaccccggctgcagacgtgcggcggctggactggcggcggatggaagccgttgtgcagcagcccgttcacagcggcggcgctggtgcccacgggggcccctggagagtgcgggaccgagcgctcctgctgcccgctgcggtcgcccatgccgggggctggcggggctgtgcgcgggccccggctcaggcggcctcgctggaggtcattctccggcgtctttatttccccggatcctccctgcggcttccgattcagcagccgcagagccggcgcctggggatggcgaacccggcgctcctcccctcctcctgccgactcccccacctcctctgcgccctgccccccgcgcgccggccccacggcgccggcctggagcacgccagccccgggcgcggaatcggggatccccgcgcacccccagccggggctcccgccgcccgccttcccctgatccccaggccgcgcgacttcaaacgcggcttcctcgcctcccagactggtccccgccactgagcatgcccagtcctgcccgccaccgccaccgacgagtttcaacatggggaatcaagttctctgggcttgcagagaggagatgggcgggttgggctttgtatggcgatgtgaaaaccagatgggtctgggagagacagcgaaaggagcgaaccgtttcaggaggaatacgggaggaagacaattatttgcagaggtgtcaggtttgctaatcctgtccccagtgagcaagatacctttgcaaggtcattcacgttaccctccccgctttgtgagtgtgtgcttacgcgcgcgcgcgtgtgtgcctgtgcgtttggttaagtgaccaaactacttagaggcctgaggggagggagaacaattatttatagaaaagttggcagacttggggagggaggggagtgaaatttctttgctggcacgcacacacactcaaacaccatgtggtctcatggagttgtcttttgcagggaggaaacctaggaatacagtgtaaggacagtgaaggacaaaactgtaggcaggattaatcggtgctgaaagagatcaagtaaacaggagcaattccatgctataaaaagcactttcctcacccagaaaggacttcaaaagacaatgtcatgttatttatagagtaaggagttgcctcttctaagaagggaaggcggcatcacgtggtgaccagcactacgagctttggagttagcactgggttcaaattccaactcagccactgagcaaacccagataacgttaatgctcaaggtaacacttctagcaataggaaacgggactgtccatgctcactatgcaggactaatttgggtggtgaataccttcccaaagttatgcaatctcttgaggcctcactttcctatccataatggggctgttgtgagaaaatctactaaaagtacctggtacaatcctggcacacagtaaatgctcagaaagctagttttccttattacgctattatgattagcagttcaccctttgtttcgacaggggaacaaaccatgcttacagccgtatttattgtgtgatttattttgtgatattctccgtgatttgcaattaatctacagaggagtcagagtctggcaggtgctggctggctactgggttgctgggcccctgggcttcagtgcattcagcagcatctagggcttgcatctggcaattccttccagcagagccttacctagaatcagagcttgagaaccatgggggccactggagcactctggtctatccactcttgcatacttttttcgtatcaggaaactgagctgcagacagatggctgaggttattaagagcaaaggtgggactaaactccaaatctcaactctcttagcttccctaaccttatgctatttaaagacagagaaaaaaacccaggtgatctggcccctccctacctctcctgcctcatcaggggctccctgtgctgccttcaattccttaaacaacattctgctgtttccattgccttagagaagtctcttctctaagacctcttttgtctactagactccaactttagatctcctctttaacttctcatatttagagaaatgttccctgacccttagggctacattaggtctccctgccataccctcttcctactccttgtactctgtttatgactccttatcattttgtaactataccatgcatctgttccctcatttgtaacttgagaataataggacatcactgagttgttagactgatgaaatgcataacacatgcgta

SEQ ID NO: 19082 - DNA, 1141 bp, Artificial sequence
  DNA replication origin
gaaggaagatttgggacgagttgcactgggcacagagactaggaagggactgatgtgtaaaagaatgcctggacgtcaggcacctcagaccgtttgcctattttatgacaagaattatttagatcttgcaggatggaaaaattcaaagtgccattttctggctatttggaactactgtcgagtttgtattggggtcaagcggcattgcagaagaaaataaggcatttaggttttaggtcaggtgtgagttgaagaggttttaagtttttgagaacacaggccaagggagtagaaggaggaatggagggtagaaggttgcctataatgaaggaagcaagcctagagaaaagagagagtagagaaacagagggaaggggttcggaggttcttaccttccagaaaagtgggaaaaggggttggggtgcagagataagaggttggggtgcaaaaataagggatggggtgcagaaataaggggtaggggcatggaaataaggggtcggggcactgaaataagggattggggcacagagatacgaggttggggtacttgccctcctctagaaaagcgggacttgccgctaagagtgaaggagaaggggttgaggggtacttgcccctgccccaggaaagcagagaaggggtagagacaaggagagaaggggttggggtacttgccccttccccagaaaagcgggacttgctgctaagggtgaaggaccaaggctggcatccctgcgtggtctgacacctttgaaacgtgggtgaataatcagagaggtgtccctccaatgattaaacaccaagggaaggctgccttcccagcccgtgaccggcactggagttttgggtgcacagataaaacgtatctcctttgtctctcccagaaaatgaaaggaattgaaattaagagaagggagagattgacgagtggaaagaagaaagtggttgagggacagtgagagaggttggagaagagagaagaggccgcttacctgatttaaaattggtgagatattccttgggctggtcgatctgaggacctgaggtcataggtggatctttctcacagagcaaagaacaggaggacaggggattgatctcccaagggaggtcccctgatccgagtcacggcaccaaa

SEQ ID NO: 19083 - DNA, 892 bp, Artificial sequence
  DNA replication origin
gctctcggcgcagccgagctgctgctgcgaactgtggagctgccagcggagcccagcccgagctccctcgactccgcgcgtcccaggcgtccgtcgggggccgaagcgcctcccgcagggagtccccgtgaggccgcgctgccgcgttacccgcagcggccgggggtccggggagtgcggggctccgagacagagccaggcgccccccagcggtcggcgcgggccccatggctgggccgggcggagcggaaccggtgaggtgaagccccggggccggcagccggaggcgcgtggccggggcgccggctccatgggcagcggcacacggcggcgcgatgatggacgttaacagcagcggccgcccggacctctacgggcacctccgctctttccttctgccagaagtggggcgcgggctgcccgacttgagccccgacggtggcgccgacccggtcgcgggctcctgggcgccgcacctgctgagcgaggtgacagccagcccggcgcccacctgggacgcgcccccggacaatgcctccggctgtggggaacagatcaactacggcagagtcgagaaagttgtgatcggctccatcctgacgctcatcacgctgctgacgatcgcgggcaactgcctggtggtgatctccgtgtgcttcgtcaagaagctccgccagccctccaactacctgatcgtgtccctggcgctggccgacctctcggtggctgtggcggtcatgcccttcgtcagcgtcaccgacctcatcgggggcaagtggatctttggacactttttctgtaatgtcttcatcgccatggacgtcatgtgctgcacggcctcgatcatgaccctgtgcgtgatcagcattgacaggtaagggccggaccgccc

SEQ ID NO: 19084 - DNA, 1579 bp, Artificial sequence
  DNA replication origin
gccggccccggggcttcacctcaccggttccgctccgcccggcccagccatggggcccgcgccgaccgctggggggcgcctggctctgtctcggagccccgcactccccggacccccggccgctgcgggtaacgcggcagcgcggcctcacggggactccctgcgggaggcgcttcggcccccgacggacgcctgggacgcgcggagtcgagggagctcgggctgggctccgctggcagctccacagttcgcagcagcagctcggctgcgccgagagcgcccgggcggcagcggcagaagttgcggagtgcgccccgcccctcgcgcccgccgccgccgccgccgccgccgccgctcccctgcggcagccgcgccgcgtccccgccgccgccgcctccggccgctgcccgctccctcgcgctcctgggacgggatacccgggctgggcaggcaccgccgcctctcccgcgcctccctactgtgagggggcggcgctgcacgcgcctcccgggatcccgggtcccctcgcccgggaagctgtccttgccgcatgatagatacttagaacccctccagccgaccccagcctccgcacactagtcagccacagttcagtgggggcatttttcttttgttaagaggcctaatgagccagcggatgtttgggctcattgcgaaatgaagaacctagagggggattttatttttcttaattaaacaacaaccaaaaaaacgtctctgagcactacactaagcaacaaataggtacttccgttttctattttgaccgcttatgggaagaagcgaagatggaaaagaagcagccgaatggggtgagggtgggagctccgagaagaggaagaaagaaaaaaaggagggagggggattccttaagcccctggcacccaggagatgaggatgctctggggacaaggcctccaagggggttacacccatttggactaatccttcctggatgtctagaaacagtcctctccgctctgaaaatagaccctgattgcctttatatttagacttcaaagcctaatatattgaaaagagagttaattttcccgtagcattctggaagtcttacacataagcaaagaaatgaccggttatactcttctataaaggaatcctggaggtgtatgttgatttaatacctattggctaaaattccccttggtatccaaaccctgtcagagcggctgatttttattatttgtgagacttgcttcattccattttgtttgaaggtttcattggaagccagcagtgatttctgtagtttaagactctaaaaataatcaaatctgttttttcttgttaggccctagcggattataaataagaagaaaaggaataaaaacctcaaagtatattgatcagagtgctgaatagtactttcattcttcaaggtgggtattagctctgtttttccagatagggaaggttgttagctcttgcaatcagctggtaaggaatagttatgtttcaaacccaagtttatctgattactatgcccatattcttccctgtacacattcagaaaaagttttaatggaaaaaaaaaaaa

SEQ ID NO: 19085 - DNA, 1382 bp, Artificial sequence
  DNA replication origin
ctagttgaacgtccagttctttcaacacttgtaactaatttgctgcattaaattattgctattgactcgcttgggaaagaatactttcgctggattcacttgcagagttcaaagacacttttcctaatgggactgcaagcagcgcatcggagaaaaaaatctagcagtcccaggagtcaagaagggtcagggtctacttcagtgtgtgatcagacagcgacaaacccacactacctaacagggccggaaggctcttagcctaggaattagctgtaaaatgactgggttcatgtctactttttcatgatttactctattctctttgatcaccgccagccttggcttaaggaacatctctgtagaattcaattttattcctcaagggttacttaagtgcccattatgagtatggagggcacatagctaggtgtggtggggaggagatatagagacgcaggaaaaatggagggcatgctcagtttttggaagtgtttgcttcctgcaagatgaggtttgcggacctatcaggagagcctcttgataaagactcctgaacttttccagtctcaccagagctgcagacactcggaggcaatattagtcttacagctttcatttctcccatcaccagagctctgttaaaagcagactcctctttaaggaatccacagatcagagagggtacagcacatgcacacaactgacccccaggtcagaatgatgccagccacaaggggggattctgcttgggggagcaggaagactgcacagagatggtaggagacggctacaggagctgagtccaacaaagtttgacaggtggaggcggctaaggggtattctggcagagaacagagaaggatcaaaataaagtgtcaaaggacagacacatttcaggtgttgtctgtaaacggaggctttggggtgagggtagggaagtggaggggagactgaaaaatggaggcccagctattgaggactctgagaatgaggcattaaggctcgaggccatggtgagtcactggaggatcttcagcatcagggcggcaaggtcacttctggtggggtggcgggggtggggtggggtggggggactttgcgattagaagcaaagaagctggaggcaggaaaagaaactgcgagctctcgggtggagggcagcttatacgggaagcctggacttgaccatcgccagggaggcatactgacattcgagctgccttccatctattcaagggcacgcttcctccgtctgtggggggagaaggtgccccctcagaggctgtacgattcgaagtctccggcctgagaagtttcgaatttctccttgccaaggtcgggccactacaggtgggagactgcgagccccgagcgaaagcttg

SEQ ID NO: 19086 - DNA, 1118 bp, Artificial sequence
  DNA replication origin
gagcagcggctccctggctggagggagaccatgaaatgtgttcgaagaagctgacgcagtttgtgacgctcgcggcttcctgatggggaccggcagcagcggcgcctccgccgaggagggacgacctgagtcggcgctcgggcccttcccccgccggcagccgcgcgccccggcgcctagtttgggggccgctggctcggggcgcgagcatctgctcccggctgcgcgcgtcgcttccgttttgattagctcaggttattatataagatgtcacggagaggaaaggggcgagcgagaggcgcgttggggagggcgcggtggccttccgcgagtggcagggaggggcaggaggcaggacccggcgggacccacctgtacgccctccgcgccccctgcgggcgctgcccgcgcgcgtgccggggtggtggggtgggggggcacggacggacgtgcccgctgctcccatcccctccccgccaacactcgggcagcggccgaaacgtgctattttttcgctgccacctctcctgggtctacaggtttctggccccaggcgtttgtactttgaaacatttgtttaatattaagaaagctgcgtgtgcggccgtcatagtacacccggaacgtgtggccgtgagctccagggcggtgaatgaatcatcgccccgcggaccgggccccgatgattcatgcggggtacacacacgcgcgcgtactcgctatgtacctctgacccagggagagtggcccctctgcagtgatgacgcccggaggggcggggaagacttagtgcaaaaggacagcggggtcccccccttccacaataacttgtgggggggtcagggacgcccggagggacgggggagacttagtgcaaaagggcagcggggtcccctcttccacactaacttttggggggtcagggtccacacattccccaaggcttgttttgcgttctcgaaagagttacaaaattccacctggctacattaaccggttgaggagcgctggttcgctgcagggctgggtcctgtctcattcagtatttggtgtcaagtgagggaggtatcagactctgaaggaatcctcctagtaattgcgtctacctaactggttct

SEQ ID NO: 19087 - DNA, 1112 bp, Artificial sequence
  DNA replication origin
tgccatctttcacatacttactaaaccaaagttctgaagtcggagatggagccagtcgggggacagaagactgtctgggaaagtcctgaagtctatgtcagcaacgcttgtctttctgaaattcagtttctttccccactgtatactggtgccagtaactatgcaagtgtgtgtgtctgtgagggtggggatataccacaataactaagtcagcatttcttccaaagctcacaatctaatgagagggcaaacaaacatcaatgactgtggttgtggtaagagaactaagtgttatagaagggggagaagtctggataagcttgagatgatggactataaattggtctatgtagcatgaacagggctttgtaaagagaaacaggcattggtaggaagaacaagcttttggaaggtggagcaagcttggtaggaggagcacaatttctaatgagaaggggtgttatggtgctgagatttgtaagaggagttgcactttgtgaaggcatgcgggctttgtaggaggcacagggatttaggaggagcagggcttttctagaaggaatagagctttgtaaggaggagtgggctttgtaggaagagtagggcttttaaataagaaacagggtttgtatgatgggcggggctttgcaaggagaggctgggctttgtaggagagcagggctgtgtaagtaggagcaggtctttgtgaagaggagcacatatttataaggagaaacagtgcttgtagcagcatcaggactttgtaaggtggagcagggatctgtaggaagggcaaggctctatagggagaagtagggctctgtaaaggagcagggtttgtagggggattggggctttgaaggaagagcaggactttgtaaagaggagttggactttgaagaagtggggatttctaggagcaacaggacattggaaaaagaagctctctttaaaaaggaggactttgtaagtaagagcagggtttgcaggaggagcagggctttgtaaggataaagtggaatttgtaggagtggtgctttgtgaggaggaacagtgctttgtaggagaaacaggacattgttaggaggagcagggcttcctaaggataagtt

SEQ ID NO: 19088 - DNA, 1132 bp, Artificial sequence
  DNA replication origin
aactgattttgggagacgtcagataaagaaaaaggagcattaaacttgactatgcctttagctccagccacctttttaagaggaaattgctggacaggtgggggaaggctagtccaggaaggaaactgtaagctagacagggtctgaggaggggaggtgataaaaggattataggatgggggagcagaggctgaggaagaattgggacctggctgggcctggtgaggaggggagaagtcagatgggtctttagaaaggaagattagaaagactcagcgacacttggggttgggactgaggggacaggcgggagggaaagaaggacgatttgggacgagtcgcattgggaacagagactagggagggaacaatgtgtaaaagaatgcctggatgtcaggcacctcagaccttttgcctattttatgacaagaattatttagatcttgtaggatggaaaaattgaaagtgccattttctggctatttggaaccactgtcgagtttgtactggggtcaagcagcattgcagaagaaaataaggcatttaggttttaggtcaggtgtgagttgaggttttaagttcttgagaacacaggctaagggagaagaaggaggaatggagggtggaaggttgcctatagtgaaggaggcaagcccagagaaaagagagagtagagacatggagagaaggggtttggggattcttaccccccagaaaagcaggaaaggggttggggcatggaaataaggggttggggtgcagagataagaggtcagggtgtggaaataaaggatcagggcacagagataagaggtcggggcgtggaaataaggaatcagggcacagagataagaggtcggggtgcagaaaaaagggatcggggtgcagagataagagttcggggcgtggaaataagggatcggggtgcagagataagaggttggggtgtggaaataagggattgggaggttcttgcccccagaaaagcagagaaggggtacagacatggagagaaggggttggggggttcttgccccctagaaaagcactacttgccgctaagggtgaaggagaaggggctgggaggttcttgccccccagaaaagaggtacttgctgctaagggtcaagga

SEQ ID NO: 19089 - DNA, 948 bp, Artificial sequence
  DNA replication origin
agaggtcagggtgtggaaataaaggatcagggcacagagataagaggtcggggcgtggaaataaggaatcagggcacagagataagaggtcggggtgcagaaaaaagggatcggggtgcagagataagagttcggggcgtggaaataagggatcggggtgcagagataagaggttggggtgtggaaataagggattgggaggttcttgcccccagaaaagcagagaaggggtacagacatggagagaaggggttggggggttcttgccccctagaaaagcactacttgccgctaagggtgaaggagaaggggctgggaggttcttgccccccagaaaagaggtacttgctgctaagggtcaaggaccaaggcaggcatccccttgtggtcaaacacctctgaaacgtgggtgaataatcaggcaggtgtccctgtgtgattaaacaccaagggaagactgtcttcccgagtccatgaccggcgccagagttttgggtccatggataaagtgcgtctcctgtctctaccagaaaaggaaaggaactgaaattaagagaagggagagattgaagggtggcgccaagattgaaaggagaaagtggctgagggatagtgagataggttggagaagagagtaagaagaggctgcttacccaatttaaaattggtaagatgttccttgggctggtgggtctgaggacccgaggttgtaggtgaatctttttcacggagcaaagagcaggaggacaggggactgatctcccaagggaggtcccccaatccaagtcacggcaccaaatttcacttgcatccgtgtgaagagaccaccaaacaggctttgtgtgagcaataaagcttttaatcaactggttgcaggagggctgagtctgaaaagaaagtcagcaaagggagatggggtggggccattttataagatttgggaaggta

SEQ ID NO: 19090 - DNA, 920 bp, Artificial sequence
  DNA replication origin
gagaagtgaggagcccctccgcctggctgccaccccgtctgggaagtgaggagtgtctccacctggcagccaccctgtccgggagggaggtgggggtcagcccccgccaggccagccgccccgtccgggagggaggtggggggtcagccccccgcccggccagccgccccgtccgggaggtgaggggcgcatctgcccggccgcccctactgggaagtgaggagcccctctgcccagccagccgccccgtctgggagggaggtgggggagtcagccacccgcccggccagccgccccctccgggagggaggtgggggggtcagccccctgcccggccagccaccccgtccgggagggaggtgggggggtcagccccccacccggccagccgccccgtctgggaggtgaggggcgcctctgcccggccccccctactaggaagtgaggagcccctctgcccggccaccaccccgtctgggaggtgtacccaacagctcattgagaacgggccatgatgacaatggcggttttgtggaatagaaaagggggaaaggtggggaaaagattgagaaattggatggttgctgtgtctgtgtagaaagaagtagacatgggagacttttcattttgttctgtactaagaaaaattcttctgccttgggatcctgttgatctatgaccttacccccaaccctgtgctctctgaaacatgtgctgtgtccacccagggttaaatggattaagggcggtgcaagatgtgctttgttaaacagatgcttgaaggcagcatgctcgttaagagtcatcaccactccctaatctcaagtactcagggacacaaacactctgcctaggaaaaccagagacctttgttcacttgtttatctgctgaccttccctccactattgtcctatgaccc

SEQ ID NO: 19091 - DNA, 1131 bp, Artificial sequence
  DNA replication origin
ccacctccctcccggacggggtggctggccgggcagggggctgacccccccacctccctcccggagggggcggctggccgggcgggtggctgactcccccacctccctcccagacggggcggctggctgggcagaggggctcctcacttcccagtaggggcggccgggcagatgcgcccctcacctcccggacggggcggctggccgggcggggggctgaccccccacctccctcccggacggggcggctggcctggcgggggctgacccccacctccctcccggacagggtggctgccaggtggagacactcctcacttcccagacggggtggcagccaggcggaggggctcctcacttctcagatggggcggctgccgggcggaggggctcctcacttctcagacggggcagttgtcaggcggagggtctcttcacttctcagacggggcggctgggcagagacgctcctcacctcccagacggggtcgcggctgggccgaggcgctcctcacatcccagacggggcggcggggcagaggcgctccccacatcaaagatgatgggtggccgggcagagaccctcctcacttcctagatgggatggcggccgggaagaggcgctcctcacttcctaggtgggatggcggccgggcagagacgctcctcactttccagactgggcagccaggcaggggggcccctcgcatcccagacgatgggcggccaggcagagacgctcctcacttccagacggggtggcggccgggcagaggctgcaatctcggcactttggggggccaaggcaggcagctgggaggtggaggttgtagcgaggtgagatcacgccactgcactccagcctgggcaccattgagcactgagttaacgagactccgtctgcaatcccggcacctcgggaggccgaggctggcggatcactcgcggttaggagctggagaccagcccggccaacccagcgaaatatggagaccagtcaggcatggcggcacgcgcctgcaatcgcaggcactcggcaggctgaggcaggagaatcaggcagggagtttgcagtgaggagagatggcagcagtatactccagcttcggctcagcatcagagggagactgt

SEQ ID NO: 19092 - DNA, 1034 bp, Artificial sequence
  DNA replication origin
gcccgcgcctttgcgcgcgagcccgaggccgcccccgcgcgcgccagccccgcggacgcggctccccacaggtcccacaggtttcttgctctcgcctcccccgcccgcccggggctcgcgcgtcgcgggtcgggagcgccggcggtagtccccctcgtcaaccccgagggcccggagagaaggcgccacggtcgacgcccgaccgccatattgtttgcagagtgtcgcccgagatgacgaggagaccccgcacccgggccgcgcaggagaacctggactaaggacgggcagtcggggagacaagtcgagccctgcaaagggtcggacggggatagagtgtccgagtggtaccagtagggcaggacgtaggcacagactacccttcacggacggccctggcctgcggcgccgagtcccgcgggcaagcgccctcggggtctgggctggtggcctttcgccttcttccaggcgcccacaaagctgtccgccttggggcttctgccttcttatccttgcccgccctcctgagcccaggagaggcggcccggagcttgcgcagcccggggagacagccttcctggctcagcaaccgactcttttgtacacgcctggatggcttcagcctacacaggaaaagcctggaggtggggaggagtgcgacgtggtgggccccccctttccccttcccccataggattggacggccagtccacactttccattcctgttcctctcgtccctctttgactgccaaatccgcctctcccttcccgtccccacgcgcctacgttttgctctctccccgcaaccctttgctgtctcctatccgtcccttccttgttcctttccgtttatgttagagatgtacatacccaaactctgctgcacagtcctcaatcaaatcattacaaataggagtaaaaacttgaaagccgaagaagagagcttttaattatgaaattaaaataccccccacctccaccaccaggacacctagacaatttcctttcctttcttgtcgccccctccttttc

SEQ ID NO: 19093 - DNA, 1121 bp, Artificial sequence
  DNA replication origin
aagaaacctgtgggacctgtggggagccgcgtccgcggggctggcgcgcgcgggggcggcctcgggctcgcgcgcaaaggcgcgggcgcgggcgggggcggagtggcggcggcagcggcggctagaagcggcagcccagagccctctcgcggccgcggcggcagcagcagcgccagccccagcaacactgaggccgccgccgccgcctggcgctcccgccgcccggcccgacatgagtgaggcggttcgggtaccctcgcccgccactccgctggtggtggcggcgcccgcgcctgaggagaggaaagggaaggagtcagagcgcgagaagctgccgcccatcgtatcggcgggcgccggcgcgaccgcggtaggtggtgggccggggccgtctggcgccccggacggcgggagttgggagggacggcggccgggcgagggccgtcaggaggcctgcgtttaccctgggcacgccctggcactccagggagacgcactcaggccgcccttccttgggcagaaataaaagagttgtgcctcgtggacagccccgaacacttcgcgaggtacacctaccaccctcgggaaatgttgggggtggtcggttccgctggatgtttgggttattttctggggcttgggcccccactttctctaagagaatgacctgcatcttgagtcggcatgatctgttggatgagcataggtgtcagcaggcgggagtgggttttccacggaggtgcctgcctgcctgcctgccttggaggcgcgcagatttttgtccttttcttcgcttttctttcccttcccccttcagattaaacaggctctgcggcgagtttccacttaattgtgacctttccgttgctgtcagtgtagtgggaggtagatgcatcagtgatggttttatttttcatatggtacagacatgtgactcaggtggggggaggctttttgaaccttttatttaaacccaagttatctaagcttgacagggatgatttcccagctgtatcttcgtaagggttatttggagagcgctgtcaggcttcaaactacatattgccagatgatgtcatgggacagccccctccccctctttccctatttttactggtggt

SEQ ID NO: 19094 - DNA, 1123 bp, Artificial sequence
  DNA replication origin
cctgctgcccgccccggaggccgcagcgggcagcgagctggcgctgcgctgccagagcccggacggggcgcgccaccagtgcgcctaccgcgggcatccggagcgctgcgcagcctacgccgctcgccgcgcgcacttctggaagcaggtgctgggagggctgcgcaagaagcggaggccctgtcacgaccccgcgccgctccaggcccgcttgtgcgcgggcaagaagggccacggcgccgagctgcggctagtgccccgcgcgtccccgcccgcacgccccaccgtcgcgggattcgcgggggagtccaagccccgggcccggaaccgggggcggacccgggagcgtgcgtccggcccagccgctgggaccccgcctccccaaagcgcaccgcccaaagaaaacccctcagagaggaagaccaacgagggcaagaggaaggcggccttggtccccaacgaggagcgacccatggggaccgggcccgaccccgacgggctggacgggaacgcggagctcacggagacctactgcgctgagaagtggcactccctctgcaacttctttgtcaatttctggaacggctgagactgcctgccggcttagggagggttgatgggggaggcgtggggaagggaaagctaagggcgtcttagaccggggggtactgtgatagagattggggagaagtccaggttctcgaatgggggtgggggcaagggtaagggtgagatgcttgggatgagagtgtaaggggtatggagaatctctgggatagcagagaagttaaaaattttgaaaagtctcagtcctgattaagagcaggaaaaataatggaaacagaaataggcgtactttaaatgtgcaaaaactggagactggggagagaaatcgatgcagagggaggctgagaataagggggagatagagtgactaaagtgatgtgagtcccatgtggggagggggatgcaatgtttattgtttaacatttctattaaatgcagccatgagcaattgccaacctgagccaggttgaatcaatgtcttctcacttaatcagctaacaagactgcagactttttttccgtttctgaattggtataaacttggatgcggcgtggt

SEQ ID NO: 19095 - DNA, 1095 bp, Artificial sequence
  DNA replication origin
cgcggcggcgctcctctgcgcgtagggcgcctggctggggctggcgggtgagcggcgctgctgcgggggctgcgcctgtggtggctgcgctggctgtgccggctgcggcgcgggcgcaggcggcggcggctgctggtggtgctgggtctgcgccaggccgatctgcggggagaaagtgcctccgaagactgggttgacatggtgcgggaagttctggaagagcatggtcccgttgactggggtgatcccctggaagaagctgtcctctaccgcgttggtggtgcccgtggaccaggtgctgccgaaggacggcgacagcgacgcgcccggtgccgcgggctcctgaggcggcggcggctgctgaggaggctgatggaaactcaagcctggcaggagcggtgattccatctgcatcttgtccgggccgttgggggccgggggggcagcggctgggctgagggccggcactgcgctgttttcctccggcttgggggtctctgaggagaggggcgtggacggggcttcggatacgctggactcaggttggggctgctgctgctgccgctgctgctgctggggctggggctgggttttgcttttgtccatcagtaaatcatcctgcatggtttgcgcagctgaaacgggaaaaaagagagacgcgttattgtcaatgtgatcatgaatgtccctcgctgaagcgggcgggtgtttcacttgcgaaaatccatcgccaccgctactagccaattgcaatgcaaatccataatctcccatttagaagaacaggtcaggctgttgggtggggaatagggaaggtgtcgagcaaggtctctaaaaatactgtgagagcgtcttcaacctttcagatgtcttggttccttttctgtattagtgagagatgtgcttataagacagaaaagacagcaatttcgccacgtctcttttcccttcaccggaactcagagcgttcgccctgcaatgagaaactgattctggttcctgttttttcccaagcaccaccctcccccacttatttgcatacgtcaataaatactgctgcgtccttcagcaaggttaaaaagacaccgcacacac

SEQ ID NO: 19096 - DNA, 1142 bp, Artificial sequence
  DNA replication origin
cctggcggcggcggtgcagggcctgcgggagtccggcggaggcggcggagagcgaggaggaggagcctgaggcggggaggcggcgatcgcggcccgggttcccgtccgtcggcccgaggttccggtccatggaccgcgggcgccgagttgctgccggcggaggagctacctttgtgaggtaagagtcgccgcctccgtgcgcgccagggttacgacgcagggcggcccagagcagcctgggagatgtagtcttcggaccgtctccactagaggctgcacagcccgcccggaccaacgcctccgcgcctgccgccgtctggccggcgccctcccgtttccttcctccagggggaaaaaatgtctttcgggccgctttccaggaagcagcaggatgcgccgctccactgtcggtagcaacaaggtcagccctccctgcctgtttgtttttgcctccgctcttgccctcaggtgggaccgagccaggtgaggggagggggctgaagggccatttcttatcagggtccccggccccggccgtggcgtcggggcggtcagtggcggcagtgggggtggcagaaactccttccgaagcccccggcgctggagccagcctctcctgcggcagagcccattttgggggaattacaccacctccgcgaggggtcggttggtttggtgcgtgaggttcttcttgagggggcgggcaaatagggactgcctggaccagacagcttccacccgagtctctctgtgtgtttggggctggggagttgggggaaggaaagatgattctctccctctccaggaaccttctcaaatgtgcctgggctttccagggctcgccgacagtctccaaatggaacacgttggtgaataaacagctcttgcttactcagctgtgggttgtcagggatgtttgtttctctctctgctgctggtcactgttaaccgtttctagtcgcgttgacaccttcaagcaggtggattgggagtggcgggggtggggaatcaaaaaggagaaatcatcagtcactccttgggtcagcttctgacgttcgagggatagctttggcgggaggaaagagctgtcggctcaaacgaatgcgttttttggacgacctgtggcgttttctctagggctg

SEQ ID NO: 19097 - DNA, 935 bp, Artificial sequence
  DNA replication origin
agggtctcaacagaatagaactggcagtggcaggtggtttcctctgggcatattttaatttgccacaatttgccaatttacaatgaaaggaaaacctggtaaattatcagaccccctagacaactggggaaactgacaaataagtttgtgcattagttcatacaacaaatacttactgattacctactgagtaccaggctctgttctgggattcaagataaacaatagtaagtttctgcttccaagagcttataaaccacacacatatcacacacatatatatataaagcagtcaatacaattgtcaggatgttgacctgaaacaagggctggatgaatcaccagttatctcaactgaaaaaaatcagtgacataattcctattaactgagatggctcaaaattctaagctccaaaaaaatgtctgtcactctggaaggatgtgtacccttgggtcatttgtgttctgggtgtggcaggcccaaaagcatttaactgggtataaactcaattaagggagggccttcatttaacaccttacagttggaattttactgagtacaaagagttggtaccacctgctgaaatgggtggcaagtggtgtctattgagaattgtaagcaaccacaaacatcatgaattagcttgtacaacttgctatgccaggaagtaagacttggctcgggggaaatgtggatctagagtctccaaaaactcatggtaggacccacggaccagaatttcaacagcagagggcggtgcacccgacttcacaaagagttttaccgactggggccccccaagaatgggcaactggactcctgtacgagctgaaacgtcttcaatgaactcaacgatcgtcaagtacactaaatgttcagcgttggactcatttggctgttttccataacctctactctggtctgaccgttaaat

SEQ ID NO: 19098 - DNA, 1115 bp, Artificial sequence
  DNA replication origin
gtgaggagcccctctgcccggccagccgccccgtcccggagggaggtgggggggtcggccccccgcccggccagccgccccgtccgggagggaggtgggggggtcggccccccgcccggccagccgccccgtccgggagggaggtgggggggtcggcccctgcccggccagccgccccgtccgggaggtgaggggcgcctctgcccggccgcccctactgggaagtgaggagcccctctgcccggccagccgccccgtccgggagggaggtgggggggtcagccgccccgtccgggagggaggttggggggtcagccccccgcccggccagccgccccgtccgggagggaggtggggggggtcagcccccctgcccggccagccgccccgtccgggaggtgaggggcgcctctgcccggccgcccctactgggaagtgaggagcccctctgcccggccaccaccccgtctgggaggtgtgcccaacagctcattgagaacgggccaggatgacaatggcggctttgtggaatagaaaggcgggaaaggtggggaaaagattgagaaatcggatggttgccgtgtctgtgtagaaagaagtagacatgggagacttttcattttgttctgcactaagaaaaattcctctgccttgggatcctgttgatctgtgaccttacccccaaccctgtgctctctgaaacatgtgctgtgtccactcagggttaaatggattaagggcggtgcaagatgtgctttgttaaacagatgcttgaaggcagcatgctcgttaagagtcatcaccaatccctaatctcaagtaatcagggacacaaacactgcggaaggccgcagggtcctctgcctaggaaaaccagagacctttgttcacttgtttatctgctgaccttccctccactattgtcccatgaccctgccaaatccccctctgtgagaaacacccaagaattatcaataaaaaaataaattaaaaaaaaaaaaaaaaaaaaaaaaagaatggactttcccaggccagctgtggtggctcacgactgtaatcccagcactgtggcaggccaaggcgggcagatcacctgagatcaggagttcaagacc

SEQ ID NO: 19099 - DNA, 1016 bp, Artificial sequence
  DNA replication origin
cgggcactgagtttccaggaccgtgtggaatgcccgcgctgggaaaaaagtttgcctgcctcccgccttggaagacgagtgtggggtttcctatcgggggacatttaggagccaaaagatacctcgggatcctctacagcagctcccttgttttacgtcggagacaaccggagctccgagagatggcttgatttcccagcaactgccgagattgtggcaaaaccaggattaggacacaggttttttgccatccggcggcgtgccctctccactgcaccgttgatctgcgtacgctaggcgttttcaggcttgtagtgaacgctgaatactttttactacgaatggaagaagataggcagtattatcttgccctccctagaaacgttatttgaacccctgctggttttaatcagtaatagccagcacctactaagtgcagggcactgtgctggaccctctatgtaaagtatgtgtctgccttccaaggaactttgacttgattggagcggattgggatgccacgggaattgagatagctacaagggtgtgttgatgagggtcagaagatgggtagtatgggtagtgtgtggggccagagatgggggggtaggctggctttggaaggaatggcagaaaggttggagtgagggctggcgtgggcgtaatccagcctagatatgcgggcagtttgtgttgggggagcagtgagccgattagtctggttgaagctttatagaatttccttggggtaattagaaggacacaagtcctgtattataacagtagggtaatgctggcctgggtcttgaattttagttgggattttcccaatgcgtagtaggtagggagccattaaagtttttgagctggaaagttatctgatggaactgggggtttaggaaagtagtttggtggctgtgtgcaggatgtcaggaagtggagagagtcctaaggcagagaaacctgttgggacttagtctttactgcctgtattaggatggtagcagtggggcact

SEQ ID NO: 19100 - DNA, 963 bp, Artificial sequence
  DNA replication origin
gtgggggggtcggccccccgcccggccagccgccccgtctgggagggaggtgggggggtcggccccccgcccggccagccgccccgtccgggagggaggtggggggggtcagccccccgcccggccagccgccccgtccgggagggaggtgggggggtcggccccccgcccggccagccgccccgtccgggagggaggtggggggggggtcagcccccccgcccagccagccgccctgtccgggaggtgaggggcgcctctgcccggccgcccctactgggaagtgaggagcccctctgcccggccagccgccccgtccgggagggaggtgggggggtcagccccccgcccggccagccgccccgtccgggagggaggtggggggggtcggcccccctgcctggccagccgccccgtccgggaggtgaggggcgcctctgcccggccgcccctactgggaagtgaggagcccctctgcccggccaccaccccgtctgggaggtgtgcccaacagctcattgagaacgggccaggatgacaatggcggctttgtggaatagaaaggcgggaaaggtggggaaaagattgagaaatcggatggttgccgtgtctgtgtagaaagaagtagacatgggagacttttcattttgttctgcactaagaaaaattcctctgccttgggatcctgttgatctgtgaccttacccccaaccctgtgctctctgaaacatgtgctgtgtccactcagggttaaatggattaagggcggtgcaagatgtgctttgttaaacagatgcttgaaggcagcatgctcgttaagagtcatcaccaatccctaatctcaagtaatcagggacacaaacactgcggaaggccgcagggtcctctgcctaggaaaaccagagacctttgttcacttgtttatctgctgaccttccctccactattgtcccatgaccctgc

SEQ ID NO: 19101 - DNA, 1301 bp, Artificial sequence
  DNA replication origin
cccagtaggggcggctgggcagaggcgcccctcacctcccagacggggcggctggccgggcggagggctgacccccccacctccctcccggacggggcggctggccaggcggggggctgacccccctacctccctcccggacggggcggctggccgggtgggggggctgacccccccatctccctcccagacggggtggctggccgggctgaggggctcctcacttcccagtaggggcggccgggcagaggcgcccctcacctcccggacggggcggctggccgggcggggggctgacccccccacctccctcccagacggcacggctggccaggcggggggctgacccccccacctccctcccggacggcacggctggccgggcgggggggctgaccccccacctccctcccggatggggcggctggccgggcggggggctgaccccccccacctccctcccggacggggtggctgcccggcggagacgctcctcacttcccagatggggtggctgccgggcggagaggctcctcacttctcagacggggcggttgccaggcagagggtctcctcacttctcagacggggcggccgggcagagacgctcctcacctcccagacggggtctcggccgggcagaggcgctcctcacatcccagatggggcggcggggcagaggcgctccccacatctcagacgatgggcggccgggcagagacgctcctcacttcctagatgtgatggcggctgggaagaggcgctcctcacttcctagatgggatggcggccgggcggagacgctcctcactttccagactgggcagccaggcagaggggctcctcacatcccagacgatgggcggccaggcagagacactcctcacttcccagacggggtggcagccgggcagaggctgcaatctcggcactttgggaggccaaggcaggcggctgctccttgccctcgggccccgcggggcccgtccgctcctccagccccacatcccatctctcaacactgttgcattagggattacatttacaacacaaaactttgtgggatacattcaactcatagcatttgcataatttatgaagttaaaaaatcaatcaaccaaaaaattgttcccccttaaacatgggagaaggaaagatgggctgaactaaggttttcggtttttttttgtttgtttttgtttttgtagagatggggtttcaccatgttgcccaggctagtcttgaacttctgagctccaaagatcctcctgcttcagcctcccaaattgctgggattacag

SEQ ID NO: 19102 - DNA, 1566 bp, Artificial sequence
  DNA replication origin
ccggggtgcgggtactgcatggctccgccgcgctccggcccctcgcagagctgctggcccgcgccgcggcgctacatttatccgcgctccgcgctcccggcgataggctccgccggccgcggggtggggccgcgctcgctggccccttcctgccgccgggccctgcggccaatggcgcggggccccaagagcagccgcccgcccccaccccggcccgccccgccggccaagctccccgcccccgggacgcgcttgctaccaggctccggggaactggcgccctggtgccccgccgcggctgtcgcccctggggactccaggcaccccggccgaggacgccctcgagggaagccctgggccgcgtccgtcgggggaggcgcgaggaagaccgccttctggagtgcgggctccagcggccctgtccgcggccccgaggcacctctgccgaaattcgggggcgccgtccaggcctgggcccggggtggcagcagctgtttccaggcggggagcagcgggactcggcgggagcagaggccgctggcctaagacgcctcctcggtgggtgcgctccctggattaacagtggcgctggctgtcacaccggccgtttcccgagctcagagcgggacagtgccctgggttcctagggctgctcggcggcccttagctgcggcccggcgggattcggatggctggagttcaggtgctgcggactcttggccgctccacctggtttcatttggaggcctcggactcaagccacttccgcgaggatgctggcagaagccgctgcgagcagcaatcaaggggaggcccgggtcctacagcgccgggcagaggctgtgcagtcttcaatccagtgggggccgctccgtgtcttttctgctggctcttgagggtcgcagctgtgcgcagtctggctctctggttttgcacgtgttttctattgaagcagtccgtactgctggcccgtatggcctcggctctgtgcggctccactcgcctccggggcaagggggcattttcttgattgacgccctcctgcggtcgtcacacctcgcggtgagccgtttctgctaaggtcctccattaatcatggaaatggaaagacttccctgctttttctattgagacttctcaggttttaaagtttataatttggaactatttgtccaaacacagcgggaccacagtaggaagaggcgtggactgtgagcctgaccgcctgttcgagtttcacttcgcacatttttgttgagcaactactgtgtgccagcagtgaaaaggacagatgtagtccctctcctcatggagacaggaaacaaattttaatatatgtatgtgctaggaaggagatgtacataatggtctaaaacctgtaacaaggggacatcacctatctgggggacattaaggaagggaaaagcttcccaagaattgatgtttgaaaagtgagtgggtgtcagcaagcccagggtgcttggacattccaagtccggagaatagcatgtgagcgttgttagttaatgcaacttccgtcaagtcaccatccctgagtttttctca

SEQ ID NO: 19103 - DNA, 1331 bp, Artificial sequence
  DNA replication origin
atccatccagccttctcgcaccactccgccgccgcgctggccgctgcctacggacccggcggcttcgggggccctctgtaccccttcccgcggacggtgaacgactacacgcacgccctgctccgccacgaccccctgggtaaggcggccgggcgagggtgggggcgaggaagcgccacccggcaggtggcagcgcccgggaggccgagggggcgaagggggcaggcggtagacggctgtggcaaaagcgatggaaaagcagctgtcgggcacgcgcggggacgggaggcgcgcggccggggctgaccgcaccgtgactcagattggttttcctgcaccttgcaggcgtcggggcgcgcgggccggcggtagacctcgcggcgagggcagccgtggaccgcgcgtgttacccggggtggggctcccttagcgggagggacggggaaaggggcgtcgaggcgcccctggccggcccccgtggggcagggatcgcagccgggcccgggtggctacggggctggacctggttcaacaggcttgtgcagtgaaagagcctgaccctttccgttcatacaggaaatcttgagttctcgataggagtaaatctggtttcagaagctgttaagtgttttcctggctgcatgaagcagacccttcccccggagtagtgcacgctgctgattattttatcgacatcctcaatacagacaaattcaggaaacactcgacttctgatagccgggatccgtttttctgatattgttcatttcctctgtgtgggatgtgactttatggcagctaaaataaccagttgcttcctattttttttcgaggctgttttgcaccagtctgaagcctgacgcaagcaaaatctcgaaaaaacaatgctagctttcaaagcgttgaggtgcaggcctgcagacggacggacggaccgaccgacactactttgggagtaggaagcagcagctcctggtcgccagttaggaagggaagcagggacacatagggcatatattccagaacttcggggcttgtcccctcaatgtgcggcctaacaaataagccgcccgtggtccgcgctgtgggtgacccttggcgccttcgaggtctggagccctagggtaaataaggaaacggggcgcctctagagttttaaatgaactctgttattggaagcttcagtagggaccctgaaaacaattaacgtcttaattagcattttaatgtctccattattacggcgcgggctctagctcagccctttaccttaccttctcaccgttaacaggggagggggattgtatttttagttcatctttttatgtttt

SEQ ID NO: 19104 - DNA, 1589 bp, Artificial sequence
  DNA replication origin
agccgtccgtgggacgactgacctcgttgcaagtctaattctttgattttaaaaagtctgcacaccttttcttgacctcctgggtgcttggcgcggtgctgggctctggggacaggaagtgactggggctggatcttgctggggctctcgttccgagtcccaggaccgcgggtgggtgcctggaacgtgggttggggcctctcccgggccgtttgccttggggctctgctcctgccggcggattctgagcctgatgggttcgagtcccgggcacgccaggcgacgggaagagccgaggcccaggcccgctgcgccgtgaagcgcggggccgtccggaccccatcgattctcctcggcagccgggctggccctcgccgtccttgaccggctgagtcaacaccgcgtcatccctcggcggccggggctcgggaacccgctccgcgcggcggggcccggggtggggaagtccgagtggggggatggggggccctggccgaggggagcggggaggtggtttgcgctgagaactgttctcgaacccggggaacttcagaacctccttcagggcttgtggaaacccagccctgttcctggagttctgatctgttaggactggactgggctgggaccgggaatttgtatttccaacaagagctgaggtgacgccaaagctgcgggcccggacaccacccctggggaaccactgatgtgagcgcacggggtgcggaagaagcaggtgggaccggcactcctcctcccacctgctttcccgggtaactttggccagcaagaggctggggcggagggctgagaggagggaaaggcgagggggaacagaggaacgaggggcttatccaggctagtgggagtgaggtttgatggctgagcagagggcgcagggtggaggaaggggcaccatgaaatggagggagaatggggtgctgaggttaggtgggtgtgggggcccaggtttctgattgttcagggtattgctagtctgtgccagctgcttgcctagctgagccatcaggtctctgacattccaggaaaaccatgacagagatctgttggggagaggcctggaaatctctctctagccttggcctccatggaggaggcctctagttgtagagttgggtacttctggctaaggacctgtgaaggaatgacccgacccctggcctggcttctagggctgtggcgcccccagatatggacactcagatgaagacagtgaaaaagtcattgctgttagggagttgtcacatccggcttccttagattctaagaaggcccctggaattgcaggggaattaagatttctgagaaaagcagtactagtccttaagcagagaggtgtggatagacttggaagtttgaagatttgggttggtgttttagttcttggcctcaaatcatttgtagaacgaagatggtctagttgaaccatatgaaccccttccagctctcaaattcccaactcagttcatgccgtccttattgttctccctactccccatgtctcctcagccttggcacccaaagtggccacccagtgggagagtttcccttcccatcagctgtaggct

SEQ ID NO: 19105 - DNA, 1352 bp, Artificial sequence
  DNA replication origin
cgggtaccggctagagttccgccacccgcgagcgcccccgcccgcccccgcgcgcaccacctgtcggggagcttcgcgcgcggccggcggcggacgccccgcccggctcgtgaggagcggccggcgtggggcggggggccgaagtcccggtgggatgagatctttaccggagggtgggccccacacaggcggtgtcggtgctctcgatctcctgcaagatccgctcgtgctcggggacggtgcccagactctcgctgttctccgccattttggctggaagctgaggagccagcgaggcgcggcgccgcgggaacgacgggggcgagctccaagtggcgcgagcgcgaaggggcggggcgggggcggggcgctcgggccggcggcgcgggggcgcgcggaacgccgggcagaaggcgcgcgacccggttcccgcccccgcacctgcaggagtgagcgggggctgtgagctggggctacgggcggcggccgggtacccagctggcctcctgccctctctcgcgactagtccctcctgggcgtcttgtgcctggcctttgggctttaacatatctccttgtcttctgtgtgtgccacaccctgtgccacacgcgggggtaccgtagtaatcagcaaggtggacactcagatcatcaccctgaatctgtaataagagccacggggacatttaacaagggcctgatgtactctgggtcgtggggagtcagagaaaggaaaacatgcactcacgaaaagcaaaattgcatgtgatagtaagatttattttaggaacgaataaagatcccagttgaccatgaagaccgctccaggtggattcatgtccccgcctgcaagaagtccacagcggccagtcaacttggaaataaattataagcgacataaaaaattaaatgatgagaagttaagacacttgatggcagagataccaaaaaaaaaaaaaaaaaaaaaggcccagggcgatgtgtaattcataccaaagtccgtgaactcaggtgcccccaggtcagagtagctgggttgagaaggggtgagagctcttgaaagggggttagcagcagggaggtgggagagagaggcagggaggcttggacaaaggtatcagtgtagaaaaaagtcgtgcttaatgacatgtttgtgggacactgagtaaaccagtttgtcatgatcaaagcagggaggaaggaagactaaacaggaacagaatggaaacctagcctgaggaacaactactttctgctctacattaatccagggctttgaaaagcttccctttgagtcaaccaagctctttatccagctgtgtaactcactcacccttagtgagcttttacttg

SEQ ID NO: 19106 - DNA, 1288 bp, Artificial sequence
  DNA replication origin
aggggctcctcacttcccagtaggggcggccgggcagaggcgcccctcacctcccggacggggcggctggccgggcgcgggggctgacccccccacctccctcccggatggggcggctggcccggcggggggctggccccccgacctccctcccggacggggcggctggccgggcagaggggctcctcacttcccagtaggggctgccgggcagaggcgcccctcacctcccggacggggtggctggccgggcagggggctgaccccccaacctccctcccggacggggcggctggccgggcagggggctgatccccccacctccgtcccggacggggcggctggggggctgacccccccacctccctcctggacggggcggctgggtgggcggggggctgaccccccccacctccctcccggacggggcggctgccgggcggagacgctcctcacttcccagacggggtggctgccgggcggaggggctcctcacttctcagacggggcggctgccgggcggaggggctcctcacttctcagaccgggcggttgccaggcagagggtctcctcacttctcagacggggcggccgagcagagacgctcctcacctcccagacggggtcgcggccgggtagaggcgctcctcacatcccagacggggtggcggggcagaggcgctccccacatctcagacgatgggcggccaggcagagacgctcctcacttcgtacatgggatggcggccgggaagaggcgctcctcacttcctagatgggatggtggccgggcagagacgctcctcactttccagactgggcagccaggcagaggggctcctcacgtcccagacaatgggcgaccaggcagagacgctcctcacttcccagacggggtggcggccgggcagaggctgcaatctcggcactttgggaggccaaggcaggtggctgggaggtggaggttgtagcgagccgagagcacgccactgcactccagcctgggcaccattgagcactgagtgaaccagactccatctgcaatcccggcacctcgggaggccgaggctggcggatcactcgcggttaggagctggagaccagcccggccaacacagcgaaaccccgtctccaccaaaaaaatacgaaaaccagtcaggcgtggtggcgtgcgcctgcaatcgcaggcactcggcaggctgaggcaggagaatcaggcagggaggttgcagtgagccgagatggcagcagtacagtgcagcttcggctcggcatcagagggagacg

SEQ ID NO: 19107 - DNA, 1001 bp, Artificial sequence
  DNA replication origin
gccccctgcccggccagccaccccgtccgggaggtgaggggcgcctctgcccggcagcccctactgggaagtgaggagcccctctgcccggccagccgccccgtccgggagggaggtcggggggccagccccccgccgggccagccgccccatccgggagggaggtgggggggtcagcccccgcgcccggccagccgccccgtccgggaggtgaggggcgcctctgcccggccgcccctactgggaagtgaggagcccctctgcctggccagccgccccgtccgggagggaggtgggggggtcagccccccgcccggccagccgccccgtccggtaggtgaggggcgcctctgcccagccgcccctactgggaagtgaggagcccctctgcccggccagccgccgcgtccgggagggaggtgggggggggggtcagccccccgcccggccagccgccccgcccgggaggtgaggggcgcctctgcccggccacccctactgggaagtgaggagcccctctgccgggccaccaccccgtctgggaggtgtgcccaacagctcattgagaacgggccatgatgacagtggcgattttgtggaatagaaaggggggaaaggtggggaaaagattgagaaatcggatggttgccgtgtctgtgtagaaagaggtagacatgagagacttttcactttgttctgtactaagaaaaatacttatcctgttgatctgtgaccttacccccaaccctgtgctctctgaaacatgtgctgtgtccactcagggttgaatggattaagggcggtgcaagatgtgctttgttaaacagatgcttgaaggcagcatgctcgttaagagtcatcaccactccctaatctcaagtacccagggacacaaacactgcggaaggccgcagggtcctctgcctaggaaaaccagagacctttgttcacttgtttatctgctgaccttccctccactattgtcctatgaccctgccatc

SEQ ID NO: 19108 - DNA, 1027 bp, Artificial sequence
  DNA replication origin
ctgcagacccccgccccacctgtccctcctccagtcgtttaacccttcttggcccacgctggacacgtttatatagatattggctccccccctacggaccgatcccggttcacacaacgtgacgtgtctttgcatatttaaagcgctccacgcagagtggtgattggaggcggtgggcagcggcgcgctcacggaggggctctgagtagggagtggcaggcgccggggcggctcgagctgggctgggggctcgccccgcgagcgtcctcgggcggggcctgcgggttcgcgccagagcttccccgctcttcgcaggcgctcagaaagtgggcgaacccaacgcgcagaactgacccgggcttgcgccccgcagtgctcctggcccacccccggccgctggctccctctgccgtccccgccctcgagcttctaggtgcctttctctcgccactccaaggtgaaagaactgggcttttctctcctttgctccgactatttcagggaaactgcagtcgtcgacgcctgcgttggcatcgcaaaagcccaggagggatagcgcagccgagattctccgacagctccccacctctcccggctctctgatctaccacgtcaggtatccttccaaagatggcagttccactactgccctaggcttcataaagacgtcctaagcctccagaagcggatacccacgagcacctttccggtctcaaggaccgaattcatccttccctgcacatccttccctccctcccccgagtttgcccgacgactcttgtcaatctacattgttgcgttttgggctttgtgcgtcccattcaagggttccaaatgcctcaggactcactcgttcttgtccctacagtgcaacctggggtgtgtgtggaggggtgcagggtgtttatattattggtaagagtaaagaggtcccacagtggtctcctccaggcagtgcaaaggcagtatctctctgaatcccgggacgtctcagccaaagcagggaagacaccccaagtacgctgga

SEQ ID NO: 19109 - DNA, 1162 bp, Artificial sequence
  DNA replication origin
ctgatgcacacagtccctcccaaccatccaggctccagctgccatctcctctaagaagtcttccctggcccctttctaggtctgagtctccagcgcttctgctatcacagccacggaagatgggagatgaaagaatcttttagcgcagtcctaactttataaaccgaagctgaaggtaacggacccgcccaaggccacccgctagttaccagggaccttggtcgggttcacagtgtatccaacaccggggccccggcctggcccatggcagatgccggggaccgcggatccgacgtatctacggtccattcccgtttccactcaccttgcgccgccgccggtgcggctcgccgaccgcacctagcagtgtgtgcgagcccagcaggatgtgcgcactctgcggccactggctgcgcaccaggcggtgctcgcccagcaggatggtgcgcacgttctccgcgccgctcacgcggatcactggcctgcccagcaggtgcgtcttgaacactgtcccatagcgctctcggcgagaactgtggaagcgcgagccctgcgggcgaggcggagggtggagagctggaacttctgggcctgggctgggatctgacccagaccttccagctgccttttgatcacaacttcctgtccctggctggcgcgtttacaaaacaagatccccagtgggcctggtatctactctacgggaatgtacatgctcctgttcctattggtgagatgaggaaacagactcagagtgaagaagtgagggcccaagggctcacagctgggccaagctccaggctccttttctacccttgcaggacgtgctcctcagaccccttcctaaaaccccttatgtttaccccctgcgttgtgtctgggagttgctctggggggaattccagtgacttgaggtcccttcgagggaacggagtatctaggtaaaggcgagagttgtgcgcgcttcccggggtcgtgggcgatgggcagggactggctacaaatcccatgggcattgagactgaggagggtccagtgggagccgggggaagaagggaccgtattagcgctcggggtcgaaggactgctcacctgaactaaccagtgcagcgtttcgccgaagaagggccaccccatggagcccttgggcagaggcagggtg

SEQ ID NO: 19110 - DNA, 904 bp, Artificial sequence
  DNA replication origin
ctgtttcctcatctcaccaataggaacaggagcatgtacattcccgtagagtagataccaggcccactggggatcttgttttgtaaacgcgccagccagggacaggaagttgtgatcaaaaggcagctggaaggtctgggtcagatcccagcccaggcccagaagttccagctctccaccctccgcctcgcccgcagggctcgcgcttccacagttctcgccgagagcgctatgggacagtgttcaagacgcacctgctgggcaggccagtgatccgcgtgagcggcgcggagaacgtgcgcaccatcctgctgggcgagcaccgcctggtgcgcagccagtggccgcagagtgcgcacatcctgctgggctcgcacacactgctaggtgcggtcggcgagccgcaccggcggcggcgcaaggtgagtggaaacgggaatggaccgtagatacgtcggatccgcggtccccggcatctgccatgggccaggccggggccccggtgttggatacactgtgaacccgaccaaggtccctggtaactagcgggtggccttgggcgggtccgttaccttcagcttcggtttataaagttaggactgcgctaaaagattctttcatctcccatcttccgtggctgtgatagcagaagcgctggagactcagacctagaaaggggccagggaagacttcttagaggagatggcagctggagcctggatggttgggagggactgtgtgcatcagagcagaactgggggaaatggcgaaagcaaaagccaggaagtttaggtctgggccgcttggaagagggagaaaggaccggaactggccttctggctactccggaatcgccaagcagatgaggccagaccgccgccagcgctgatcacgcgcgctccca

SEQ ID NO: 19111 - DNA, 1247 bp, Artificial sequence
  DNA replication origin
gcgctcccacaggtcctggcgcgcgtgttcagccgcgccgcgctggagcgctacgtgccgcgcctgcagggggcgctgcggcatgaggtgcgctcctggtgcgcggcgggcgggccggtctcagtctacgacgcctccaaagcgctcaccttccgcatggccgcgcgcatcctgctggggttgcggctggacgaggcgcagtgcgccacgctggcccggaccttcgagcagctcgtggagaacctcttctcactgcctctggacgttcccttcagtggcctacgcaaggtacggccgccccggctccagaccttcctccgaggctccgcggcgcgggcgggcctcccagacccagacgggacgccctcggcgcaccccgcgcgtccgtcacctctgctgggaacggcggcagggcccgggggtgggaggcgttgtggcggtggcgtggcggtgggctctgggcctggcctctgtgctggttcgctggtgtgacctggggctggccacacgacctccgtgggacgcgcctgccgcgacgcgctccagcctgagcaagcgcgggccgccagagtttggggtctcggtggcaggcgtcctgccagtcggtcggactccttcccacagcggcgcccctggggccggcctccatcacctcttcggaagcccagatggctgcggaaccgaggagagcgtgagggctgcagatgagccccggtccagcccagcgccagccccggacccaggggtgtgggcgtcagctccaccagccctggacccgctaggtttcgggatcagagaactgctgcttctccagacttcagaacaatgggcaggacccggagagcagctaggatgccccatcccgccttttggtccccctattctgggacttcccactgtttgattccctggttttcagtcacctgcataaaaataatatgtgtaaaggatcatgctataggctgatcaccgtggatacgttttctgatctaatcctcgcagcctgcaaagtgttatgattctcattttattggccaaacttattttattgacttacccaagatcacaccgttagtaggggcacgaacaggactttaacctcatctcctccgactatggaactcaagtgctgaattacagtgctttccccgggggaatgcttttgctgcggctattccctgaactctggagaggcatcccctattgcccacgctcttacagaggctaatgcttacaaatccaatagt

SEQ ID NO: 19112 - DNA, 1008 bp, Artificial sequence
  DNA replication origin
cgtccgaatccctccgccctcctcccacctgggcgccgccgcggcaggcggcaggcggcaggcggcaggcggcaggaggcaggaggctggccatgggctggcacggcgcacttacgtcgagctcgaaggtgcgcagggcggtgcggtagcccccggacactggcggcaggaggcgcagcacctccttgaccacgcagtcgacgtagcgcagacggcccagcgccgcgaggctgaggtcgggctcgcagccgcagtcgggcgggggcccctcgctgcccccagcggccccgggcgcgcagccgcacgcgcgccccagcccctgcgccaccagctcctcccgaatcttggcgatggccgccggatgctgcagtagcagcaggacgagcgaggtgctggcactggccgtggtgaagaaggcggcgaagaggagctccacagccgactcctgcaagacagccccgggctgcactgagtctcgggcggtggagtcgcccggggcgctgacccgacggccccgtggagatgaaaagcacccaaatttactattgcgaaaagccagggggcagggaagtgctattaccgccgcgactgtgtgtacggttttgaagtcgattaaatctcaagtccaccatttgggaaagtcagctgtagcaacaggcaacattaggatctatccacccgccttgcgatggttcccagagagaatgcgggaacttactctaagcactcttcttggtgctttaagcatattcactcattcggttctcacctcccctctgtgaggcacaattgctgctcttgttttatggagttgaaaacggagactccagagtagtgctcaaggtccctacagctagcactcccggcaggagtccagtgctcttcaccacctggtggtgcggccgccaaccccagtggaacagcctgacaatggctgcagtgcaacaaaggcacctgcagcagcagtgccagcctcgtaccaatgccggcatcatggcttcatcctct

SEQ ID NO: 19113 - DNA, 1761 bp, Artificial sequence
  DNA replication origin
tccaccgcccgagactcagtgcagcccggggctgtcttgcaggagtcggctgtggagctcctcttcgccgccttcttcaccacggccagtgccagcacctcgctcgtcctgctgctactgcagcatccggcggccatcgccaagattcgggaggagctggtggcgcaggggctggggcgcgcgtgcggctgcgcgcccggggccgctgggggcagcgaggggcccccgcccgactgcggctgcgagcccgacctcagcctcgcggcgctgggccgtctgcgctacgtcgactgcgtggtcaaggaggtgctgcgcctcctgccgccagtgtccgggggctaccgcaccgccctgcgcaccttcgagctcgacgtaagtgcgccgtgccagcccatggccagcctcctgcctcctgccgcctgccgcctgccgcctgccgcctgccgcggcggcgcccaggtgggaggagggcggagggattcggacggcgcggtcacctcttttgccctcagagcctcagccttccgtcctataaaatgggctgagccttgttccacctccccggatcccccgctgagggacgcaaagcctggcgagactgcaaggttagggatctcgtacccttcagcttttggcagcggttcggaacggtcaattcaatgagagcggagttttagaataaaaatactcttctatccgtgcagcaccccctcccagccagtgagtgtggatggagaacaaagagaacccctcagtatgtcctgtgctccacccctctggctccctcacaagatgaaggaacccctcattgcgaccggtccagggttctggctggggccagattccaggggagggggggattaaaataccgggtagacgcttcatctctgatcaggccggtttgggctgagcaaggttgaggtctagaactgactccatctccgtatgaccttgggcagttccctcttcactctgggcctcagtttactctctgcaaggaagctgtcttggtcctttccagctctgacactccatccaggtgggtccgggctgtgggggtacagtggtggcctcaggcagtggtgctctggctgtgccaaactgtgggtgtttgcctgaaaggctgtcgttgcagtcccctgagcaccatgcttggtggctgggtggctccagataaaaatgggcattccacagtgaacatttgtggcacattgcgtgccagggttcaggaggcatcaaagggactgggattctaccctggaggggctccacttggagaggaagggggccgggactgacagcctcatcccacttgtagtgtgacagcctcatcccacttgtagtgtgaagagagtgatctctagtgctggatgacaccaacacattctgagagctggagtttgaactggagcagtgaaaggtttggacgggagagcctattacagagagagcagactcagacaaaggtggatgttgagaagtgtcttgaatgcggaatcagtcttggaatgcaagcttcattctgcaggcgctggagtgccctacaagaccttagggaagcacagaaccagggtggtgagcagaggacaggaaagggtcttagccacctccagttcacagatgagaacactgatgtctagagaggaaagagagctcctgggatgattccaagatgttctgttctccagttagaaactttgagtattcaccctggaacttgatatgagggtagcagtgtagtcagggggttggaagacgtat

SEQ ID NO: 19114 - DNA, 1478 bp, Artificial sequence
  DNA replication origin
gcagcacgaaggtgcagagcgcactggccagcagcgccgggagccccatggcgcgccgcgacctcccgcgccacctgccgccgccgccagcgcttcaaaccccacggcgctgccgctttataggcggcccaggttgctgcccacgttaccttggtcagacaattagttcacccaaagttcatctttaattgcggattgggcccctggctcctccccccgcgaggcgctgcccaaaatctttaaccgtttgttccgcgccgaggcagaggcggcgcggtggcggcttccctccgagcgcgcctcctggggtgcggggctaggagctgcccgcctcccccatccaaggtgtgctgagctccgaggcggcggtgggggagggccaggactccgaggagccggaattccaagctctagccttcccggcggtctctttggaatccctcccgcccggtcccacccgctgccccggcccaaagcagccttcactggctttccatttccaggtgccgggtgggctctcttccacgtgatgaggaagcaagggaaagtcctttcaggaatcgtccagctgcctcctcccacgtgtggggaaactgaggtccaagagagatgcataaagcaggcctccagacgtctccgaaggatcgcgcagaagaactcagggccagagtccaagagagagcctcggggcatcgggcgcaataggcagatctgggatccccagctccccaacccctgcaagggggccaggactcatgaagtcttagaaggtcctacttcaggatacaagaaggcctccaggtccctcaggtccccaggtgctaccctgcacaagcctgatccccgaccctggggcacttcgtctggggctcggcagtcggtgcccgtctctgagatccaagcacagctcgcctattcggagggccctgctgcttggcgccccagctggacagcagggaagggggtccttagccctggcaggataaagagacggtataagaggaaggggagcccaggagtcctggctccgaggcccggctccatctgtactgcgtgtgaccttgggcaagtcaccacacatcactgtgcctgtttcctcctccttaaccgggaggcgatcattcccgacctgtctaagcctcagggtagtgagttcccaaaagggggctccggttgcaactactcttcccagctccaggcacggtagactgcgttacctgggtgtccggtacaccgggcactggagtcctcctcctctctcccaagtcccacccagagtaaagccactgtcctcatccaggtgagggggtgctcggccctaaactcagggctctaccgacccctaatgggaggggtgaagggatccgtactgggaagtcttctgtactttgcccatctacaatcagctgctactgagctgccaatgcccggagctcagacgctgcgggacgcgcacctgctctctctgctctccacct

SEQ ID NO: 19115 - DNA, 1191 bp, Artificial sequence
  DNA replication origin
aagcgctggcggcggcggcaggtggcgcgggaggtcgcggcgcgccatggggctcccggcgctgctggccagtgcgctctgcaccttcgtgctgccgctgctgctcttcctggctgcgatcaagctctgggacctgtactgcgtgagcggccgcgaccgcagttgtgccctcccattgccccccgggactatgggcttccccttctttggggaaaccttgcagatggtactgcaggtaagggagggtggggcgggacaggctgcttccccggagcccggcgcggctctgggcttctgctgaagtcggggtaggcgcccccgggaggcatgctattgcggctaggagcagggctggcgggagcgcggcgctccccggcgccccctcatgcccacttctctcctccgccttcctcccacagcggaggaagttcctgcagatgaagcgcaggaaatacggcttcatctacaagacgcatctgttcgggcggcccaccgtacgggtgatgggcgcggacaatgtgcggcgcatcttgctcggagagcaccggctggtgtcggtccactggccagcgtcggtgcgcaccattctgggatctggctgcctctctaacctgcacgactcctcgcacaagcagcgcaagaaggtgggggcaggaggcgacggctggacagggagggggaccccatttatgagcggaattccggctgatggatgctaggcgcgggctagcagcttgaggtgggctaggaccctctgccagctccaggttagctttcccagctcggagagtgccatgtgtctggcaggactgggggtgtctggaaggggacggcggtagacgagaggggcggatggaggcttttaacgctgtcccctcctcgggactcaggtgattatgcgggccttcagccgcgaggcactcgaatgctacgtgccggtgatcaccgaggaagtgggcagcagcctggagcagtggctgagctgcggcgagcgcggcctcctggtctaccccgaggtgaagcgcctcatgttccgaatcgccatgcgcatcctactgggctgcgaaccccaactggcgggcgacggggactccgagcagcagcttgtggaggccttcgaggaaatgacccgcaatctcttctcgctgcccatcgacgtgcccttcagcgggctgtaccgggtaagggcgg

SEQ ID NO: 19116 - DNA, 831 bp, Artificial sequence
  DNA replication origin
ttgcctcatttcacgaatgggtaaactgaggccagggagagcggccgctgcttgcctgaggctgtggctgtcgagggttggggcagctctgaaccccgggttgttcgcctccccaggtggagcccatcgcgatccctgggctccgagggagccgcctggccacccagcacatcgggtgtccttgactggccgcctgggcaggcgagaggaatacgggctgcgcttggaggggatgctcaagtacctcgggaggagaagctttctgttttgcgggagaggaaatagaagcccttggaagaagagacctcatcccagaaaataaaagcttaggacaggctgtaaggcgtcccctggcggcgcctgcctgctctccgcgtcccgcggcctctgcgcccctgatggagccgggcccaccccgcgccgccgccctcacttccttgcgaggatctggaattccggggagccccagcctggccccccgagcccaggacctcattgacggccaggaattcaatagcaacgggccgggggaaagaaaggagggagcagaggggctagagagagagaggaaaggactggaggaggagaagaaataaaggaggcaaagaagcaaaggtcggagagcggcacactctgacattcatgaacttccaggaaaccgtctgggatctagactcctccccccaaccccggatgtttctggtctgtccttgattggccccatctatgtttgtcttagtcccttttctgttgcttataacagaatacctgaaactaggtaatttgtaaagaaaagaaatttattcctaatagttatgcaggcttagaaat

SEQ ID NO: 19117 - DNA, 1460 bp, Artificial sequence
  DNA replication origin
caccccgcgcggttacgaaagcgcgaccccctccccccggcgctataaagcagcggggcggccgcggcgcgctcgcctccctcgctccacgcgcgcccggactcggcggccaggcttgcgcgcggttcccctcccggtggtgagtcgcggccggggcctcggggccggcggcgggatgggccggggtggggtggggtggggtgaggtgggatacggcggcgggggtcggctgccgggcactgacggaggcgcgtctcccgcagggcggattcctgggcaagatgaagtgggtgtgggcgctcttgctgttggcggcgctgggcagcggccgcgcggagcgcgactgccgagtgagcagcttccgagtcaaggagaacttcgacaaggctcgcgtaggtatcggcccagggggcccaggcggcccaggtccccaccccatccccgccctccccgcggcccgccgtgcgcccccggacgccaaacccctgctgtcatccttctcacagttctctgggacctggtacgccatggccaagaaggaccccgagggcctctttctgcaggacaacatcgtcgcggagttctccgtggacgagaccggccagatgagcgccacagccaagggccgagtccgtcttttgaagtcagtggccgccggggcagctgcgccctttgcgctccagggttccccaagggccctgcctgctgatcgccacgtgggcattgtgaagggaagggagcaccgaatgggtggagggagggaggaagccctttgcccggcttggctgaggatccccttggcttttgcagtaactgggacgtgtgcgcagacatggtgggcaccttcacagacaccgaggaccctgccaagttcaagatgaagtactggggcgtagcctcctttctccagaaaggaagtgagtagtcagctctgtgggactgtcttgggaatggggcgcctaccgggccaaatcgctgggtttcttctccagaggtacctacccttaggaagaatggcctgcggaaaggtctggaagtgtcaggaacccgcagcaccacctgaggttaggggaacaagattgggagcagctacctaccccctccccaaacctcagctcaagaaacctggcctaagctcaaaaggacctttcggtttgtcaggtgtcattttccccaccagccactgtgccaaggtgtgtgctttctccatgctttctcctcctgtctttcacatcaccactccacctagctctgcatttcctccgtctctttgggctgaatccctgagacagcttgactatctggggctcccacagaggccgagagagccctatccaaggacggagggaacactgtgcataggggtggatgcctcccaagtgcctggcctgctgatgctgagattctgagccaggcacagtgtgctgtggctgtggcctcttccctttccactaagctgt

SEQ ID NO: 19118 - DNA, 1258 bp, Artificial sequence
  DNA replication origin
ctgggccagctccattcccactccctgtttagacaatgactgcttaaggttcagactctagaaaatcattgtcgcccttttgctgacatgcatcctattctgacatccacgtgccataaatataggggtcaggcctgggcacagcatggtcacaaataagcttcaattgcaaggaggaaggagctagagcagccatatggtgtttacatgttttccatgtcaatcggcaaagggaggagcaggcagatgcacgtaacgaagcaagtgtgtacagctttccccaaggtgtggtgtggttctgccgctaaggaggcacgctgcagcctggggaaggctggcttttcctaaaaggcagagatggggctctgtatgtgagagagacagaaaaacagaccccaacggtacccaccggggagggcagtctctatttgtgactgagatcagggctctaaggggatgtttttttaaatacaggacagagaataacaagtgcccagaggcagaaaataagaggctgtggagccaaatgccagtttatctctaacagtcaggttgggaggaggtgacaggtggggagtgggtggcagagatgacaggtgaggagggatgggcaggtagagaagggagtggcagagatgacaggtggggggtgacagttggggagggggtggtgaagatgacaggctggcccttctggtgggctggatgaactcggggggcggggagggatcaactcgggtctgcagccaggttccagcaggaagccctgatggggagaagtgggtcaggtagagtagcacatacagaagctgattcctgggagcatctggcggtgagtggaggcagattccccaggcagtgggtctctgcacagtggagaaggaaggatacaaccgagtctaacagcaggagaagctctgaagactcagtcagaattgttgattttcctgagaacagttgcaataagctgcagggaagggctgctgagaaaaccaccaggagagcaggattcaggatgtaggaggtagccagccattcatgcatgcagagaacgtttattgagcatgaatgctgtgtcaggaactgttgagcccttagatcaggggtccccaatccctggactataaaccagtactggcccatggcctgttaggaaccagcaggttgtacagcaggaggagagcagtgggtactcgggtgaaacttcatctgtatttacagtcactccccattgctcacattaccgtctgagctccac

SEQ ID NO: 19119 - DNA, 1416 bp, Artificial sequence
  DNA replication origin
ttatagagagacagacacaagtactacccagttctcgaccctcaccaggtttgtggctttaggttctgtgcctctcttccttatgtgtaaaatgaggctaataacacagcagcacagggttgttggaagagtaaaatgaagcaacaaacaagaagatgctagggatggtagaaaaatgctaataaatgtcaaatatggatagaaaggaaattggatatgaggtataggtctgtttagttttattaacaataaaataattatatatttaatatatttaccaaaaaagaaactgcttgacaaaataattccatatactataacgtcaaattgtaaggcttcctattgctttcactttttttagtaaaagtttttattgaagtataatctgattgcattttggaataagttaatttacaataatttaatttatcttatagccttttaagatcacattcagtgcaatggataaagcagaatgtatctataatttattgtcagggttagagacttgaactgataaggatatcgttatctactgtttagggcaaaagatgtaaaatgactgtgcattaagtgccaaggttttctctaaaaagggcccactgtaaacgccagaagcgtgccagttcaattcaacaaatatttaattagcacttgtgatttccaaggcaccgttttgggtactgaggaggaagcaaaaaatgaatagctgctaatgccagcgagagacaagacatgaaccaaacaactagagtggaaagagtggggcgtcgtgatgtagaaaacgcaaagcacaggaagaacctagtggcgcttaaaataatccaacttttcctgccttttttcttcttctttttaagattctattttggatcccttttcgcatgtgccaggtcgcttgtcggcagagaatcctcaaccctgagaaatctctcctcctattctttctttcctcacaaattcgatgagctcttctgccatcagcactgcttttggaatggtatctattgtgtgggtggcgaaacgatggagagatatttttgttctaattatgagaactgttttactgggggaaggagggagaggctgatctgaagcgctgatgagctgctctgagaggatcctccgaggaggcgttactaaggttactagagagaggacggcaggtgataggcacggtaaaacaaaatatattttcaaatgagaggcgtgggctaagcagcaagcagtgccagcggtactagatgccggattccctagaggggaaaggaaggaggcccagggaaaaactgggagccgcgacttggcgaaagctggaagcctcttcgtccctttccgggccgtttctcccgctgcccttgtttcccggagctgttctggctgtagcacaaggtcggcgcactcgggggacggtgc

SEQ ID NO: 19120 - DNA, 1398 bp, Artificial sequence
  DNA replication origin
tcgcccgccggaagagcggcagcccaggcgctgctgctggcgccagacggcaccggccgctggtagagcgcgtgccgcgagatgcggcctcaggacagcaccggggtcgcggagctccaggagcccgggctgccgctaacggacgatgcacccccgggcgccactgaggagccggcggccgccgaggcagctggggcgccagaccgcggtaggtgctggctctgcctttcctcgccgtgttgctcccgcaccgagccgggtgagtgcgcggtgtggatcgggctctggtctcgctcgggggtcccgagcgggcgccggcgggttggggtccccgcaacccgggcacagtgcccgccgcgcctccgtccccaccctgcccggggctcgggaaacccctcgagctgtcagctggggggctgcaaagcggaattcccggcgccccagccggcgctaagacggaagaaactttccgattgttagcagtccttttgggattccgaggctgctcctgtaattagtgtcggggcagggctgtggagtcagactgcagtttggcgtaccctcccctaggtcgtaggtggggggtcagcgagagaggccatcctgcagtggggcgacgttgcgaggaagctgaccctgaaaagtgatcccggtggttaagggttctctccgaaaaggaagctgaaaagcatcgagtctagaaaaaatgttcgtcctagagttttagaatcttggaaaggcagagataagtgggaccgctagtttttaacctttagggatacaaggactttttagcaaacgatgcagaacaaggcatatcttgttaagaagctcacagccccgtccccaaagtcagggacccctcgtgaagaacactttatgttcagtccccctccttcgacacatgagcaaagtgaggcccaggaaggtgagggcttttgggttttcgtttgctttgtctcctccaagatgtggaacgtgggggtgagatggggcgcatgtccagggagcaccagggttaggatcccagcttgccatataccggcctagggccctttccactggccacaagtgctgcttcaagcacattcctcttagaagtcgaccatctaccaggagcagcttcctgcaagaagaagggaataggcagatctctttttaggacagttacacggcctgcaccaccttgtcctctgggtcacctcccctaagtgtgaccctggatttctgttcctctcctctcactgcgctttcccctcctccctttgtgcactttccccaagttagagagacagactctaggaagactattcttgctccatttctgtcctaaaggcaaaccgaaatgatcagacttgtgatcatttataaatgggctggtgcctctagaacaggggt

SEQ ID NO: 19121 - DNA, 1317 bp, Artificial sequence
  DNA replication origin
cttgcaccgcccttaatccatttaaccctgagtggacacagcacatgtttcagagagcacagggttgggggtaaggtcacagatcaacaggatcccaaggcagaataatttttcttagtacagaacaaaatgagaagtctcccatgtctacctctttctacacagacagggcaaccatccaacctctcaatcttttccccacctttcccccctttctattccacaaaaccgccattgtcatcatggcccgttctcaatgagctgctgggcacacctcccagacggggtggcggccgggcagaggggctcctcacttcccagtaggggcagccgggcagaggcgcccctcacctacccgacggggcggctggccgggcggggggctgacccccccacctccctcccggacggggtggctggctgacccccccacctcccccccggacggggtggctgccgggcggagacgctcctcacttcccagacggggtggctgccgggcggaggggctcctcacttctctgacggggcggctgccgggtggagggtctcctcacttctcagacggggcggttgccaggcggagggtctcctcacttctcagacggggcggccgggcagagacgctcctcacctcccagatggggtcgtggccgggtggaggcgctcctcacatcccagacggggtggcggggcagaggtgctccccacatctcagacgatgggcggcccgggcagagacgctcctcacttcctagatgggatggcggtcgggaagaggcgctcctcacttcctgtatgggatggcggccgggcagagacgctcctcattttccagactgggcagccaggcagaggggctcctcacatcccaggcgatgggcgactaggcagagacgctcctcacttcccagacggggtggcggccgggcagaggctgcaatctcggcactttggggggccaaggcaggcggctgggaggtggaggttgtagccagccgagatcacgccactgcactccagcctgggcaccaatgagcgctgagtgaaccagactccgtctgcaatcccggcacctcgggaggccgaggctggcggatcactcgcagttaggagctggagaccagcccggccaacacagcgaaaccccgtctccaccaaaaaaatacgaaaaccggtcaggcgtggcggcgcgcgcctgcaatcgcaggcactcggcaggctgaggcaggagaatcaggcagggaggttgcagtgagccgagatggcggcagtacagtccagcttcggctcggcatcagagggagaccgtggaaa

SEQ ID NO: 19122 - DNA, 1097 bp, Artificial sequence
  DNA replication origin
agcgcctcttcccgaccgccatcccatctaggaagtgaggagcgtctctgcccgggccgcccatcgtctgagatgtggggagcacctctgccccgccaccccgtctgggatgtgaggagcgcctccacccggccacgaccccatctgggaggtgaggagcgtctctgcccggccgccccgtctgagaagtgaggagaccctccgcctggcaaccgccccgtctgagaagtgaggagaccctccacccggcagccgccccgtcagagaagtgaggagcccctccgcccggcagccaccccgtctgggaagtgaggagcgtctccgcccggcagccaccccgtccgggggggaggtgggggggtcagccagccaccccgtccgggagggaggtgggggggtcagccccccgcccggccagccgccccgtcgggtaggtgaggggcgcctctgcccggctgcccctactgggaagtgaggagcccctctgcccggccgccaccccgtctgggaggtgtgcccagcagctcattgagaacgggccatgatgacaatggcggttttgtggaatagaaaggggggaaaggtggggaaaagattgagaggttggatggttgccctgtctgtgtagaaagaggtagacatgggagacttctcattttgttctgtactaagaaaaattattctgccttgggatcctgttgatctgtgaccttacccccaaccctgtgctctctgaaacatgtgctgtgtccactcagggttaaatggattaagggcggtgcaagatgtgctttgttaaacagatgcttgaaggcagcatgctcgttaaaagtcatcaccactccctaatctcaagtaccccgggacacaaacactgcggaaggccgcagggtcctctgcctaggaaaaccagagacctttgttcacttgtttatctgctgaccttccctccactattgtcctatgaccctgccaaatccccctctgcgagaaacacccaagaatgatcaataataaaaaaaaaaaaaaaaaaaaagaaactatccaatcctcagcctgctcagctgcttactctgtttcacccatgccttctgtga

SEQ ID NO: 19123 - DNA, 1404 bp, Artificial sequence
  DNA replication origin
ttactaatcatgcaatgactcatttggaggattcaatgttaactgcttgtgcatctaccagtttgtagctatctattcccatgtgccaaattaaaaaaaaaaagtctttgggggtgccaggtgatggatgaagtttgatattatttgatcattaaatgaattataaaaccataatataatactgtatattaaataaatagcctaccttgtttattgtcagtgatgctacctctttcctcagccctttatttacttgttcaggataacatagcctcagggattgagtaaattaccacttctcactgtcctagtgctaaaatgccaagatcttaaggaacaaagaatttctttagagccctctgcagagacctttctgaaatcagctctccagggaggcaatcatgttagttttcattaaagtcctagtggtgagaaaacagcaagacagtttaaggaccagactggcagatttttcttaacagcaggattctttgggcctcctgtgctttcttgctccaacctctcctgtgttctggagcctccaagaaggagagatcacttttaagagggacccgaaagaaagggtcaaacatgagcaggaggaaagtgtgtgggaggagatgctccaggtagaaggctcagcttaagttcaggtacagagctagagtgggagagacattctgttgggtgatccttattagccagggcatgctgggttacacagccatggagagttagtttggagggcaatagggagccagtgaagttttctgcatagattaaagttgtaaaaaaggaagaataatacagcggtggtttgaaggattgatttggtccaagggagaggacagtgggaggcgatatgggccacaggaatgggtcctgatcggatgtaggagaagaggtcaggcctagggaacggtcttccattagaacaggtagagggaggaggcacaggtttaggcgaaagggaggaggatgatgatttgatttttttttccaggtccttggctctcctaagactcataaaagccgctccagcggctaaggaagttctgtgcaaagcctgtagtttctagttgtgaagatcttcaggtttgcttgagcaatgaaagagtactggatttggagtccgcagtcctggatggccaccattaccagcaaaaggagtatttccggagcctggcacaacgctgggcacattgatggggctcaatgaatatgtattaaatgaacgagtgacagaacagattcgagacttggtgctgccatctactacagagaccttgatcgtgtcctttatctgccgtgaacctcagtttccatatctgtcaaccaggggtggttccctggggtagtgtgagagtaaattcccgccgcctgaggtgtgcagagttcccgccc

SEQ ID NO: 19124 - DNA, 948 bp, Artificial sequence
  DNA replication origin
gctgccgagggcggcggggcgccggcctggccagcggggagcggacagtagcagagccccggctccagctgctccccggccgccgcgaggtaacgctgaaggagctgccgaggcggcgtctcctcctcctcgtcagcctcctcctcctcgtcagcctcctccggcggctccacagcgccgacgcctccgccaaagccgcccgtggcccggattaccttcctgtcctggcccacggggtccggcgcaggcaccgggagcaacttggggtttcttcccgagcaggctccggcatcctccggacccaccatctgggggtgggtggcggccgccccaggaggcaaagaaggactacaggcgcaggcttggccagagaacagctctgggtgctggggccgcggcgacagccgccgcaacgttcccagacccacccctcccacccgctgggtcggacagttgcttgagggcgggcacgcgccaggactcgcgcacgcgcaaaagtcggaccggtcaagccccgacctggagattccccgaaccatagagacggtagctagagagacgcaggctgccaatctaggatccgccatctggatggtggaagctggttggcccgctctaagcgtgacagttcttaccgaagcgcgggtattgctcgcttagcaaaaattcacttgatgtatttcatttatggtagtaaaatactcccatatttgggaggtgttagcgtgggtaagtccttccagctctaattggtcaccagtcgactttacgatttttacatccttctccggcatcattgccacagttcagggcttcatcacttcatccaggagggtcaacaccctcccttcttcacttcatctaacacaaaagaaagatatcctaagttatcttgctcacctagcaccatgtttcatcacagtcctctgtttaaaagattatcaccgg

SEQ ID NO: 19125 - DNA, 1054 bp, Artificial sequence
  DNA replication origin
ggaccttacgcttcccggcgtctttccctctgccccgccggctgctgagggagcggcggccgccctgcgcctggaggtcgttccctcgcctcctccgggccgcgggtagcgagaggcggcggcggccggagccggtgtgggcggcctgaggcgaaagcccggccggcccctaggggaatgaaacaaccaccggctaccagagcaacaacggcctccgcggctgcaccgccgacttcccggaggagcgaaggcgccccgcaaaaacacgccgcagagcggaacccgggccccgccgccccagcagggggcagcagcgacgcagacaggaagcccaggtcctgggcgctggacacctcggcggcctccgcgaccaatgagcgccacaccaacctccaggcggcgctcccaccgcacctgccgccgccgccgccccggggcgagaactgcgccgtcggccctgccacgctgacccgtggggccccggccgccgccccagggtgacgaggaggagcaggacggggccccagagaagggcaagagctcagagctcgggctccagtgccaggaaaaggccaggagcagaagatggagagatggagaagcagcaggtgcggagaagcggcgctccacgggctgggtcagcatccgctggcggatcttagatgactttgaagatgaggaagcagggcagaaagagcggaaacgagaaggtgcaatgacacaacggaacccaatgcagaatccagccccaggactcaaacgctggctttaattccaactcacaccccgtgcccctaatcagagaggatcaggggagatggaggacccaaggaaccctggcacctgaagggtgggaatctgaggccaagactgattgtgggaaattgtgggaatcaggaaaggaggaagtgaggcagaatggggggacggcgggggtggggggatggcggggagctgggctaggaaggattaaaaatcagaagctcagaggcgagtagatcatctgacgtcaggagttcgagaccagtctggccaacatggcaaagccccgtct

SEQ ID NO: 19126 - DNA, 1113 bp, Artificial sequence
  DNA replication origin
ttgcattcgttacccgtgcttttgaggtcttactcaggaaatctttgcctagaccagtgttctaaagtatttcccctatgttttcttctagtagtttcatagtttcctacatgtaagtttttaattcattttgatttgatttttatatatgatgaggcatagaagtctagttttattcttcacgtgtctcattttcccagtaccatttattgaagagaccatctgtttcccaaggtatgttcctggtgccttggtcaaaaatgagttggttgtaaatgcaaggatttatttctgggttctccattctgtttcactgggccgtgaaatccttacttttcgatattataagtcaccattttcagctttccatcctgtcaaccttgctgtatttgggccaagcagggcatgcaggacccagaacttggtgtggacaggtggggccagagcccctgtaggctgctcaagaaatctgcactgaggtctgcagggaggaccaaatccccatagatgattccacaaaaacactgttaggtaaaccacagtgtgaaacagcttgagaaatagaatctgtgtcatatccaacatttactcacactcataactgcatgagcgggatacttgagcaggaggacccagaagaacaccctcttcacctgcatgtccaggtcccctttgtgtcacctagggcaagaggctggaaggagaggcatctgggataggggcaggctatggtcggggcagtggggtggtaggacctggacagtgggggtggtggggttagtgaaaggtctggggcagggcagagatcaggaggaacagcattccagcagggctgggagacatgtcagtaggttggcagacacaggagcaggtggcctgggactcagaggagcagctggagttggaggagaagggctctgttttcctccagtcttctgcttggctgctgcattagcaccccactgcacccccaacactcgtctctcccttgccctcacttcctgagtcttaaaaccaattccttcatccccagcatgcaccttcctaaggacagttcccctctggatccttcctaaggttctaactatttatttatttattgagacaaggctt

SEQ ID NO: 19127 - DNA, 1145 bp, Artificial sequence
  DNA replication origin
cgccacagccgcgccatgaccacccagcagatagacctccagggcccggggccgtggggcttccgcctcgtgggcggcaaggacttcgagcagcctctcgccatttcccgggtaagagcagctgggacgtgcgtggaagcggggcgctatgggaggtgatatgcggagactggggccccgcgggcgcggtcggggacggagtcggaaccgcagccgggcgcgtccaggtgcgctgttagttgagcgctctccgcgcgcccgggccccgccgctccccgccgccccttcgcggaggctgcgctcccgggctggtcggcccgccgcgggcgcgctccgtgtccgccagaaaaaaagaaggcagttttcgttctttggccccggaagcgcggcggggcgggtgttagttctttgtcaaccagcgaggggacgagggtccccgcagatcccgcgcgctgggagatggcacttctcccttcttcccagatcgcagtgcagccgaacgcaacaggaaagacctggaaagtgaggtggggtgggtgggaagtttactggggtggggggcaagtgggattaacctaaaaaaacaaccgaaacacgctctttggacttgacccacggccgaggctcgcccctcgaatggcttttggagaatgtgctggattcgggaaataaacacaacaaacaaactcaagtaaaccctcttggtcattctcccctctgcagaacgtggccccgccgtcattcttcctagcattcccagattatctctttcccctccccgcaccagcccttttttctcagggcatgagtagatactgcgatggggtgtccacctggggtggggttgaggtgcttgaaatctaagaggggcttcggatctttagaaggactcacgttgaatcaggggccaccagaaccattgcccccctaataaagtgaaacccccagggagacccagactcagtgttcagaggtctgggctttggccatttaatctggccaaacacaggttgatgtcccactaagagatgtcacgttcagtgcttgggcaccaagaagagactcagtaagtacctcgaatgaggaaagggagaaaaagaagtcccctttctccccacccatggccactccttgcctgtaggcgg

SEQ ID NO: 19128 - DNA, 1357 bp, Artificial sequence
  DNA replication origin
cactggggcacagcagtgatctaaacagataaaaacccctgtccttatggaattaatgcttaagagtgggggtggaacaaataaatatacaaaatatagagaatgccagatggtgatacatacaaaagaaaaaaataaggcaggggaaggtaatagagcattctagagaggatatcttaaatgatgctcagagatgacctcagaaaatgacatttgcattttttttattttttagtttttgagatagggtctcactctgtcacccaggctggagtacagttgcacgaccacagctcactgcagccttgacctctccggctcaagccatcctcccacctcagtctccctagaagctgggacaggtgtgccccaccaaacctggttaatttttatttttttaaatttttttgtagagacagggtcttgccgtgttgctggggctggtctagaattcctgggctcaactgatcctcctgactcagcctcccaaagtgccgggattccaggcgtgagccacgtgtccggcccctagaaaatgacagagagtggtggggatgtctgggagaacagcattgcagacagggccctgaggcaaggccctgagttaggagcaaggagcacagcctggcagactggggggcaggtgaggaaagggcaggaggagttggggtcagagagggagttggggccattctaggggtggccttgtaggcattgtaaggatctgggttttcactggtggtgaggtggggacgccatggacagcatgagaaatggtctggtccggcgtggagaatgcactccaccgggagggcgtcagggggagcctggctaggaagctggtgggaggctgggaatccaggtcccggactcagctcttcttttgcattgacttggcccttggcccgccccaaacttgaggtttgaactgttgaggtcagaacctaccatgaactccagcctggaggaaagatttctaggaaggccttgaagttcagttataacctgagtgatggtctcattagcattataaaagttccaggatggggttctgcagcactgggcccgggcagtggtccagatgctgacgagtggtgtagcgtcgggcaagtcttctcacctactgagcagactcagttacttcatctgtaaaatgggactaaacgtcccggttgcctcagcatcaaatgagatcgttcgaaagcaccttttaaacatcattaccgattacaaaaagcaaatgggaagtcggagccgacctcagagggctgacttggcacagcacttcaaatttctcgttttacaaagcacgaggcgcgagtttgtctcgctgtcaggacctgcttccctctcacct

SEQ ID NO: 19129 - DNA, 1330 bp, Artificial sequence
  DNA replication origin
atagggtattgtgggaggcccagctatgagtaaggaacagaagtcctagatctcagggaggacatggggaaatagggcctgagagtaaagtggagagatggctcctggggacagggtggggggcggtgtggggaaggattcacagaacaggtagcatttaacttgtgctttgaaatgtaaggagggtttcaagaacatggacaagaactttctgggtctattggagacactcagataatatttgtgggatgaatgccaggctgaggttggaggcagaaggaacatggccatattggtggatggtcattttgcagtttggtgatgaggtcaagcttgtacagctcagacagtgtagtgacaactcacagccaggaggccaacaggcttaggccctgagtgtgtagtgaggattgtgtgcagaggagtcagagagcactgcgggggtcatgggaggcctccttgtggagggaaacttggacagagccttgaaggaccaataggagggaggaaaggggagaaggaaggaccctccaaaggaagggaatgacatgggtacctagagagggattagagaggagataatccccgcaagaggggaggggtacataggggagcagggtgaaaccagcttggcaggggtgggtaagactggtttctgggggttgggcatgttgggcaggacaggattgatccagtgggatagaggagccatggcagattgttggacaggtgagtggcatgaaaaaggcatgttagggccagaggaatctggccctggtgggtgggatgggctctggggagctcagcctcagctcctgggcatgaggtggtagggaccaggcagtaggcttgggaggttggggccctctgcagtttcttatcacggaagggttctggtcttggatgagagaaataaggcaagggaggagctggaggtatttgcaaggtcccagcctgggagaatggagatacttgagacaggaggggtacccgctgttggggaaagagggcgtgagtggggacttggtatgttgagggccccaagatccctcttctaacccccagttgtgatctagtggagagacctcaggccagtcccttcatctcctgagctccatttcattgtcagcaggagtcactgcctttacggttccatctcatctcagtgcagtcattgcagccctgggctcaggcaaggggaagggtctaggctgaggatttgtgaggccatcccttagaggtgagaggagaaacacattgtcctgttccttgttctcctggagtgagcaggagcctgggggagggcctctggctgaccagcttggatgag

SEQ ID NO: 19130 - DNA, 1315 bp, Artificial sequence
  DNA replication origin
ccaggagccgggcgccggacacttcttcgcctcccatccgcgcacacgccccttcctgtcacggctgggcccggccccgcccccggcaccgcccgctggccgggcgctgccagagtggacggttccagaggcatgctaatgagggggcgggcaccgcagcccattggttgtccgcggagtgtcggtgaagtcagcgctgagtcccagaaaaacagagcggggccagctgcagcgtgtagtgcgagtggggcggacgcgcgcagcccgcccgcccggcgaccagcaaggtaagcccgcgctcgcccgcccggccgcgcttgcccgctcggcggcggcagcgccgggggtgtgcgcggctcggcccccgcgggcggcgcctttgttccgcgctcggaggaggcgcatttaaagggccagctgttggagggacttgggggaccccctcccccagagcatccccccatgggcacagggaaagcggtggtccctcgcggccgaaccgtccatcctgcctgctcggcgaatccccagtctttcaaggaaagttccccagggtgcggaggatctgggggcttccagggttgggggtttttaaatttccttttttggtgggtgtggggtagtacgatcatggcctctgctaggagagaatgtccgcccgtctcagggtggctgcaatttgggtgggtggaggagacatcaaagcccgaatgggtttgtgctgtaaagtgaaactaccgaggaggggcacctctgcagcagccagaggaaggcggagggagcgagcggcgggatggaggcatctcaggtgtgttcattcatcagcatcccctggagagggcggcgggaggggcgcaaggacgacgcggttggccggacccgcctgaatgaacggggactagtatgcgccggggacacggcgcctgcccgtgccgcccgtgccccttcttctccccgagtggctgacagcatcttgctaggcagctcatcaccgacatggacagcaagcaactcctttctccgaattccccgggcatcccctgctaccacctcgctgctttccgatgtggcttccttgatacgtggtagcgccattcaagatagaggggaaagaggcttgaagtcattatgtttccttcatgggggaatgtgctgtcgaattctgcatccccatgcatccgctgtcgtaagatggctttgaaattcaccagtgcatgctttctccaggcagacaagaatttattacgctattacattgctacgtaaaagcagaagggatcccactgagcatggctcgttttgttcagtcctcggt

SEQ ID NO: 19131 - DNA, 1287 bp, Artificial sequence
  DNA replication origin
agtgtgtacctgtagtcctagctactcgggaggctcagacaggaggataccttgagcccagaagttccagcctccagtgagccatgatcacatcgctgcactccagcctgggcaacagagcaaaatcctttaaaaaaagaagaaaagagggagggagggagagagggagggagggagggaagaaggatggcaggcaggcaggcaggcaagcaaaatcctgtaaaaaagaagaagaaaagaaggaaggaagggagggaggggatgggaggggaggagaaaagaggggaggggagaggagaggggaggggggagcagaggggaggggacaagaagggaggagaggggaggggaggaaggaaggaaggaaagagggaaggggaaagaaggaagttgacctcaatggacctttgagagaaattacaagtacagaatacacttctgtcaacttctactgtgtcaatggaaggttggggtttgggagagggtaacacaaggtgccaatctgaaggcagctgctgagagatcagtttttttttctgactggggcaggggatttattggttagaacatgctgagtttaccttagaaggcttcctactctaaagtaattacattaatgaagtgtttacttgagaaaaccatttttaggttggaggatacagctgataactctaagagaggcattgtgattgagactgaagagatgaggagaggtgccaggaaagaggaataaggagagagagaggaggaagaagaaggtggcacagggaaattgggagagagccagagaaagtgagatcatcttgatggactgagagaaaaaaactgcagcttcagaaacagagcaactaggctcactaatataaccctaacaaggttaaaaaatcaacgacaatggtgttaacagaataactgatgttctggaagctgctggaagcttgtcagaggtgattggaacagttcactgagggaactcattacacaggaccaaatcaagtcacaggggtgccctgggaaggctaattccacttcttcagcgtttctcaagtggagatgcagagtgctggggggagtggaggagggcagaagtgaaggtggctggactgcgcattgggtatcaaccccttctccattacctcagcaagtctgtcctgtccccgaacttgctttgcctgccccctctcagcaaagcctaaaccttgagttacctcgacccactttcttgaagggcagtttagtaaccatctctggtcacctggccatgccccatagggatcttaccacctg

SEQ ID NO: 19132 - DNA, 1641 bp, Artificial sequence
  DNA replication origin
ggcggctgagcgccccggcaaccgaagcgccaggccagcccaggccacgccgcgccgtgcgggatgctgaccgtacccaggcgggagccgccgcgccgccgcctggcgctgcacctgggcccggcccggccgccaattggacggctcggggcgaccccgctgtatcgcgagacgagattggcagcggcggggcctcaagtgcccccgcgctggctttgtatgcggagccgcctgccggtcctttaacaatgggcggcgcgagcgtccaggcgctgggctctagctgaggccggcgcttagcggcccactgtccgcagcatgagcggggccggcgtccgccgcacgacggcggggctggggctgtgagggccgcggttccgggtaagggagccagcgtggggccgggcggcccggcaggcctggggtaggcgtggggcagcggaccctcccggggtgaggcgcagagcctggctggcccggccttttgttcccctttctgaggccgcgcggaacgtgcgtttctcggggctcccggggaggagcaggctcccgacgtccatgcggagacccgcggccaggcagacgctcacccccgggctttgccatgggagcgtttcccctcagcggggctatgagcgtgtcacctctccccgctcctcagggagggcgggagaactccagccccggacgcagggagccccagccgggcctcccccagctcttcccgagctcgcacctggctccgcgctttggcaactcagggcccgagtggatccccttttgcccgacacatagtcgagcagtgagtctcagagtccttcggctcttcctgcgggggcagacccggcttcgcgtgtggcgttgggggaaacgactcgggtcgggctgggttgaggaagagtcaagtgaagatgagcagccacaccgggtggcctgaggtcacaccccccggggagggggcgcagagggtcgcgggggagccggcagtgaccgcgcctggggtgtgtcttacagactcgagttgccgcgtcgggctgggcgcgccgccgggtcccatggagctggaggggcagtggtggcgaggacagctggccgccgatattcaccaagcgcttcgctacaaggtaactccgaggcccggcctgccttctccttctgtgtgtcgcgccagttgttctgaatctcggctctctagaaggtctagtcaggttctttactcactatcttccgggccagaaaaggcgagtttgctcatttgctcaaggttaattaacttcttggctccttctctgggatgtatcaaaagaacctgcaacctgaatgagtagggagatggtagttgggccagggaaggtggaaaggggcgttctggcttccaggtgggtcatgaatttgatcttgtattttaaaagatatatacactgaatttttgttgggcagaacagccctctttgttcgagagttgccgttgcatgcagccagtttaagtcgcttttgtacataaattcctcagcctttccgctaacttgccgtgagacgtggacaagtgaaatttctgtttcttgatttcctcatctgtaaaatgaggaataatgagtgtgccttatgattctggcgattgtgaaacttaagttagtaccg

SEQ ID NO: 19133 - DNA, 1328 bp, Artificial sequence
  DNA replication origin
ggtatgctaagtgtacactcaatgtggactacctggtattttaagttgctatttatcgagtgcctatggtgtgccaggcatagcaatatacactctatatatggtttctcgcacagtcccctcaatagcacagtgatgtgtgtattgtgttacagatgaggaaactagagggcaagtatttccccaagactccagagctagtagatggagctgagaagcaaatccagatctaggtagatctaaagacaccggctctagaatcattataagacagagggtggggcgttccaaagaggcaaagatcaatcgtgttcatcagggcaatcagacacaggctcgaggagggggacacttgagcaggcctgggaagggtttctctgacatgggactgtcagggaacactgggaaacaggttgcacaggacaggctctgggggtgtggaaagtaagcagaatttaattcatgagatgggggcacagagagccactgaggtttcctgaggggtttggtcaacatgatatatgggtggaagattgggaggggtctggtaaacatgagatatgagtggaatattgatctagaagccccagtgtgtagaaaaaatggggccacagcagggaggagtccaggaatcgtgtgggagcaatccaggagggggtgaggcaggaggagcgagatggggttagaggggagggatgcggatatcttaaaaagagctgcagcatggatgctgaacagatatgggggatcaacagtaaggatgaaggaaagataataccaaagcttggctccttgaccatcggggcaatggcatctcctacagtggaggaggctggaaaggaaatgctttgtttggaggtgctctcacctagtagggagcgggaagggcagaggagcaagagcagtggggagaagataggccagtgtggtgaaaaccagaaaggataagctctgggcagaggggtcatggggcacaaggccaaataacagtcctttagatttggtggggagggaatgggaacctttgaggaagccttccagcctaagggtttacttagagctagagggcccctggggctgtttgaatataaagaagtggctagtggaggggcagtgagtggagatgctggagagagaggaactgctgagagcaaagtcctccggggttggaaaacgaatagagtcaggggtgcaggggctgggtcagggctggagatgaggaagagtggagacgtgatggagcaggtgtgtggggcatgaggaaaggtgagcctgggccagacaagccactgcacctcaggacagtgggaggagccacaggcacctgg

SEQ ID NO: 19134 - DNA, 1228 bp, Artificial sequence
  DNA replication origin
gcggcgccccaggacgtacgggcctttcgggcgcaatcgccgcccgggcgctgcagctcccgcttcctcggggccactgatcggctcgtgagtcctgaggggagcggcttccgagctggagtcgttgaagcgttagcctccgaagggccaagcgcatgttccagcaagctgatgagtgtggggcagttccagcacggacagaggggtgctcacgctcacgctcccagggagatgctgggctcagaggctcgcacagacgctcctggcccatggccagtgtcccgcgagtagtggtgtttatctccggctttgtggggccccgtttcacttggcggtcggcagagaagaatggggagggaagagcgcgacctccaccctcggcgaggcaggtgctccttcccggggctgtggccggccaggtctctgcggggcctgtgggccagtggttgccccttcacgccctggaaacctctatcagttccaggttactcatctctaaattggtggcagtaattataggaggactcaggtgatttgtgggaaaattctctgcaagtgaaatgatggcattgtcgttattttttattgtttctatcactgcagtggctcgggtctaggctgggggttgggagggtcagaactgggtaaagtctggggaagaccaggttactaggaggcaggaggagtttgtgagacttgagaatcttgtgaaggtttgagatcaaactagtcttgaggggcctggtcttagtaagggaagtttcctgcagaatatctacctactgctgtatctcttggggcttctgagttaggaaggtgggcagaggagttggttcctggacaactggagaaaacctcagcaggtagcatgcctggcccaggtaccatgagttccttatgggacctaattcaaggccagggagaagaggctccagagcactattggaatggcagcctggccctgaaaagagggccactgaagctgggaaaataggtgtgggataaagggagtggctggaccacctcccccacttgtcagatcctagaccctgctgggtgtgacctggggactctgggaggcagtgtgggccgctgaggcccggagtggggaagtgattgatttgctcaggaatgtattgtgcatctccagtatgctgggtgctggtctgggcacttgtgaatccagatgtgaaagaggcatgccagctccccgtctcagccttggagg

SEQ ID NO: 19135 - DNA, 1346 bp, Artificial sequence
  DNA replication origin
tgacgtggctgagtcagaggaagaggctgaggaggcgcggggggcgggggaggctcaggagcgggcggtgacggcgacggcggcggcagaggaggcagcggctgggccgggccccgtgcgtctgtccgcgccccgtggatgcgaatcggccgcggcggaggcggcggcggcggaggaggcggcggcgggaggaggagtcggtgagccggctccgggccggaggggcgcggaggatgaggccgctgcctggcgctcttggcgtggcggcggccgccgcgctgtggctgctgctgctgctgctgccccggacccgggcggacgagcacgaacacacggtgaggcgccccggccggcgcggccgccccgggctagctccccagttgcccactgaggcaggccccacgcagcctggagtgcccggcggcccggtggtgccccactgcggcccgaggactccttccggttgggcctggcggagcaggaaccttgggagcgtggaggaggcatttccgtgcgctcccgggacagggctccgctcccgagtgacagggtctccttcccccggtctgggcctcagtggcgccgcaccccagggtctcggggttcctgggaccctggggccaggaaggagcctgggaagggttgaggttcatccaccgcgggagcggggcaacgggcaggctgggctcggggcttttgccccccagggaaggagactgccttctggctactgagggctgcgacgccgaggaagatggatgcatcgtgattacccggcagccactaaccaggaaatatcctacactttatggtctcctttggcttttatcgcccgcttctgcccagaccggattaaaaccctggggtggggcagcattaataaacttgaattgaagagcagtttatacttacttgtaagtgcacccaacctacacgcgttcaattcctaggcctttcttgtaactttctcctcaccttccagcccctaagtgagacccccatcccgatagtctctaactaaggcagcttctgacagtaaagggtcttgacgtttcccagtcttcaggtcagggccagaaacagtcccttttgcatttggcctaaaggtgattggcagtttgtttaattggtattctcacatcaaaacgtgcatgtgaacgactcttcaaatggctttcacttagggctgtaactgtggttttcagagtggtagacttgagcaaggcaggaaggtcaggtaaattgagagtttgcttgacgagtaattgttttttatacctttaccattaatgataggagtttctatgagagactgtgtttgtactaaatcagaacgatctgaggga

SEQ ID NO: 19136 - DNA, 1400 bp, Artificial sequence
  DNA replication origin
ttggacagctggtgctcacacacacacacacccccgccctgtctcccagaggcctggcagccccacactctccccctccgcctcctccccacaccccctccacctcgggctgccctttggtggcagatcagggctggtttcccgaggagtggggcgcacgtggcgcgaagcccccgccttctcgctgcccctgagcagggggccgtggggggagctggccggcggccggcatggggttctcacttcccctccccaacggccgcgggtgcaggtgccgcgggccgagtcccgcaggcggggcggactctgtggacacgccctcgtggcgaggccgggctgccctgagggaggaagcgccagagcggcggccggtcccgcgcggagcccggcgcccctccagcccgagccaggacgccgccggccccggtcccggccccgggcacgcagcgagccagggatgtgagcggcgccccgcggcatggcagcctcaggtgggtaggcaggcgccgcgggtccccgggctcccggcccctctctcgtaccccgcatcccttgaggcgcgctcccccgcttgcttctgtttgcgtcctctgtgcggggatcttgccctctttctgctcttttctatgttccctgtcgcaaacttcccactccaactttcccacgtttcccgtcccagcctgtggcgcgattctcttcagcccctgcctggcccgaccccctcccacttcttcagggtctccttcgctccctccacctctggccctaggagtgtctgagcgtcgcttcccctgtccctccgactctgaagcgagaggcgagttgagagaagcggagggcgggcgatgtggatggtctacagggccaaacgcgtctcctgggctccgtggacccacagggggcgctcaggcagtcctaggtggtgcggagagatcagccggggaggcccttgggacagttccccaagccccgttcctccacccctcccaggctttgtgttttgggtctagaactttgctagggatctaggaacactattccttgaactttacttttcctgcgtcctttgcagaactttggggaatggggagagttggcggtcactgggtaaatgtactcatcaaagggtgccaagcgtcttttctggctggtcttgggttgccttctggttcatgggtgtacacacttggcaagtcgctcactgacggagatccaggacaagccacataatgatgataacggagacaattaatgagtccttactattgcactccaatggatactgtgcacctaatatgttctccatggtgggcaggaaacacctagtctctgctctccaggagtttatggtcctgtagaggaaagcaataagtaaacaaggaattactagatgagaggag

SEQ ID NO: 19137 - DNA, 1534 bp, Artificial sequence
  DNA replication origin
cgggggagcgcgcctcaagggatgcggggtacgagagaggggccgggagcccggggacccgcggcgcctgcctacccacctgaggctgccatgccgcggggcgccgctcacatccctggctcgctgcgtgcccggggccgggaccggggccggcggcgtcctggctcgggctggaggggcgccgggctccgcgcgggaccggccgccgctctggcgcttcctccctcagggcagcccggcctcgccacgagggcgtgtccacagagtccgccccgcctgcgggactcggcccgcggcacctgcacccgcggccgttggggaggggaagtgagaaccccatgccggccgccggccagctccccccacggccccctgctcaggggcagcgagaaggcgggggcttcgcgccacgtgcgccccactcctcgggaaaccagccctgatctgccaccaaagggcagcccgaggtggagggggtgtggggaggaggcggagggggagagtgtggggctgccaggcctctgggagacagggcgggggtgtgtgtgtgtgtgagcaccagctgtccaagccacctcctcatcgcctggggctttgtccctaagcccctgctgccccagcaggaaaggggaggggacaggaaggggaagaggaggagggctgggcacctggccctgggtgctcggcgttgcccttgagtgccctcctgtgatctttctgccgttccttggatctggtctcctgatggcacatgaacattaattataatgtcacatgataaatgtctaatagagtttctctgccattcatttcctgtgttcctgtctgctgggcgctgcgtttagcaccttacacacattatcgcattgcatcctcacagcaaccttctgaggtagcacctatcactgtctttacattggagccaaagaaacaagccaaataccttgctcaggcttccacagagaacaaaagctcccggaggttcagtaccaagccagtctgcttccagagctagaactcttgcttaacccttgccttcacctgccctcttcttggactcctccctttgcctgctgccgaaattcaactgaatagcacatccccttggagttctcaacaatccaggggccagaagatggacccagagagcagagatgaggcaaggttagggctgaagtccaggtggaaataaaatgaaatggatttaagaacgggaatatcaggatgaggccgtgcattcattttcttctgttgccataataaattactacaaatttagtggcttaaaacaacaccaacttatcattttacagttctgtagctcagaagtgtgacatgagtctccatcggctaaaatcaaggtggtggctgggctgggtttctttctgccaaatagaagggaatcaatttccttggctctttcagcttctagaagccatccacattccttggctcatggcctccttgttctatcttcaaagccagatggccctgcttctgtcatcatatccctttctctgactctcttctgtct

SEQ ID NO: 19138 - DNA, 701 bp, Artificial sequence
  DNA replication origin
atctccacctcacgcttcgcacacgcccgagcgccgggcgcccgcctgcagcccgccgcgcgtgcacgcagacccgggggcgcgccccgcgcgtgggggaggggtggcgcaggaggaggacggcggcggccacagcgcgggtgggggccgagcacgcccgcgcccctcgcgcctcccccagtacagcggcagcgccgcgaggcgagtcgccacaataagccggcggcggcgccggggcgccgggcctggagcgggagcaggggcgggagcggggagggaggggagcgagcaggcggggatggagagcgggagggggaggaacccgcgctcccgccgagagccagccccggggaggcgcgcggaggggaggggccggcgcgcgctcggccgagcaggggagcccgcctggaggtcgcgcgcgctcacactccggggggtgggggaaggggggacgctcgagccaaagagggcgggcgggccggagcagcaattgccacttccccagcttcctccctggtctggggcgaccggcggcggggcggccggaggggcggcggcggtcggcggagggtctcacctacacagtgaatgagcttgtggcgccacgaatccagttcttgccgaaagccgcgtctctcaacggagcattgctgccgcctacacaccctcgccatcttctgccgcccgcccggcccagcctc

SEQ ID NO: 19139 - DNA, 877 bp, Artificial sequence
  DNA replication origin
cctcccccacgcgcggggcgcgcccccgggtctgcgtgcacgcgcggcgggctgcaggcgggcgcccggcgctcgggcgtgtgcgaagcgtgaggtggagatgggggcggagggagctggagctgtcacagtccccgggtgcgcctgaccgagccaagtggggtgtcatggccgcggggggcagcggctgcacttcctcagcgggcggcggtggccggggagttaatcctcgacgcacgggtcggtgtgtgcgtatttgtgttcggtgtcgtgctgcgggaggagggggtgggaccgggtccgaccgaggagccccggcgggggtcgctctcgtcccctcccggggattggccggagccgcagcctcgcccgaatgccccgtccgccccccgcctcccggaccttgggccgccctcgggtggctttttccctgcgggccggagggagcgcggacgggggcgccccgggaggggccgggcggccgagctgcgcctctcacactgtgtgttttgtctgtttttctctcccaaggtcccgtttccctctgtgcggcggccggcgggaccataagggcttaactcatatatttaacccccctccaaaaagtaagtggcccgtgtggtgtctccgctccgcccgccgccccctagccccagtccatccttgtgtctgactctcctgtcctccagcattgttacttccccgtctttgcttcggtgctgctggtgtgtggggagatgccctctcgtcgtccgctgtcccccacgcccagtcctcggggaggcccagaattccagccccttctcccccaggggaatattcttgggaaccaggtctttcccggcagaatctaggagagtctatccgttcgcttggg

SEQ ID NO: 19140 - DNA, 931 bp, Artificial sequence
  DNA replication origin
gaggtgaggggcgcctctgcccggccgcccctactgggaagtgaggactcctctgcccggccagccgccccgtccgggagggaggtggggggatcagccccccgcctggccagccgccccgtccgggagggaggtgggggggtcagccccccgcccggccagccgccccgtccgggagggaggtgggggggtcagccccccgcctggccagccgccctgtccgggaggtgaggggcgcctctgcccggccgcccctactgggaagtgaggagcccctctgcccggccagccgccccgtccgggagggaggcggggggggggtcggccagccgccctgtccgggagggaggtgggggggtcagccccccgcccggccggccgccccatccgggaggtgaggggcgcctctgcccggccgcccctactgggaagtgaggacccctctgcccggccagccgccccatccgggaggtggggggcacttctgcccggccgcccctactgggaagtgaggagcccctctgcccggccacgaccccgtctgggaggtgtgcctagcggctcattggggatgggccatgatgacaatggcagttttgtggaatagaaaggcgggaagggtggggaaaaaattgagaaatcggatggttgccgggtctgtgtggatagaagtagacatgggagacttttcattttgttctgtactaagaaaaattcttctgccttgggatcctgttgatctgtgaccttatccccaaccctgtgctctctgaaacatgtgctgtgtccactcagggttaaatggattaagggcggtgcaagatgtgctttgttaaacagatgcttgaaggcagcatgctcgttaagagtcatcaccactccctaatctcaagtacccagggacacaaacactgcggaaggccgcagggtc

SEQ ID NO: 19141 - DNA, 1395 bp, Artificial sequence
  DNA replication origin
cgaccccccccccgcctccctcccggacggggcggctggccgggcagaggggctcctcacttcccagtaggggcggccgggcagaggcgcccctcacctcccggacagggcggctggccaggcggggggctgacccccccacctccctcccggacggggcggctggccgggcggggggctgacccccccacctccctcccggacggggcggctggccaggcggggggctgatccccccacctccctcccggacggggcggctggccgggcagaggagtcctcacttcccagtaggggcggccgggcagaggcgcccctcacctcccggactgggcggctggccgggcagggggctgaccccccacctccctcctggacggggcgactggccgggcagaggggctcctcacttcccagtaggggcggccgggcagaggagcccctcacctcccggacggggcggctggccgggcggggggctgaccccccccacctccctcccggacggggtggctgccgggcggagacgctcctcactttccagacggggtggctgccaggcggaggggctcctcacttcccagacggggtggctgccggacggaggggctcctcacttctcagacggggcggttgctaggcagagggtttcctcacttctcagacggggcggccgggcagagacgctcctcacctcccagacagggttgcggcccagcagaggcgctcctcacatcccagacagggcggcggggcagaggtgctccccacatctcagacgatgggcggccgggcagagacgctcctcacttcctagatgggatggcggcggggaagaggcgctcctcgcttcctagatgggatggcggccgggcagagacgctcctcactttccagactgggcagccaggcagagaggctcctcatatcccagacgatgggggggcaggcagagacgctcctcacttcccagacggggtggcggctgggcagaggctgcaatctcggcactttggggggccaaggcaggcggctgggaggtggaggttgtagcgagccgagatcacgccattgcactccagcctgggcaccattgagcactgagtgaacgagactccgtctgcaatcccggcacctcgggaggccgaggctggcggatcactcgcggttaggagctggagaccagcccggccaacacagcaaaaccccgtctccaccaaaaaaaaaacgaaaaccagtcaggcgtggcggcgcgcgcctgcaatcgcaggcactcggcaggctgaggcaggagaatcaggcagggaggttgcagtgagctgagatggcagcagtaccgtccagctttggctcggcatcagagggagaccgtggaaggagaccgtggagagaggg

SEQ ID NO: 19142 - DNA, 1074 bp, Artificial sequence
  DNA replication origin
cattcagtagagcacttaaatgtatctccaaagacagtggaatgatttagaattagattagaggaacgttcaggaggagaagatgaaggcacggcacatcgttgcattttctaaatgtttcctgagctgagagcgcatgaagtgggcagacgtgaaggccccgaagtcatggccccctctccagactgtcatggtttagggaggatgcaggggaggggagggagcgcataaagtcgtgtgggtgataagggttccaacagaggtcaatgctgattagggctgtggctcaaggaggatgtgatcaactcagggaggcggcttgcggggagggcatcttggaacacgagctggagttcattggtgggcagagggaataagctgtctggggccacagagtgtagtctgctcagagaacttcaagaagcttagtgaatcctaagcctgggaagtcttcggagcagggagcagagggagggaggggcaggggctagacccaggagtgccgacaggtggccagctagagggcctggagtccacatgctaggcacatgggtgccactgtggggtttcgtcagctttgtgtcatagagaaattgctctggtgccaccctcatggcagatggatcaaaaggggcaaagcagtgggtgagagatgaggtcagaatcccaggcaggagccagagagagaggacgctggctcaggaggagggcacggtgcgagaggtgaccagggccaccagccaggggcggatcagatgggtgggatgagagggcagatgtgtgggcaggcagcattatggagctggagcctgggggatggggcgtggtagggagaacaagatgcgggcggagtttgagtatctgtgggcatcaggaggaggagttcatgagaggacaggctggggccatggggaggggggcactgtcagcacaggggcgtccccgagggcacccagattggactaaacagggcacagatgggctttagcaatccccatgcctctgggctgagtacaaaggaagcttctaccagagactgaggaggcacagccaaaggcccccaaagacagtcgg

SEQ ID NO: 19143 - DNA, 1016 bp, Artificial sequence
  DNA replication origin
gctggcaggcccagtccacgggtttgggagaaacagtcagcctctaaatcctctgtcacaaatctgagaactgtcccttcattcagcaagtatttcctgtgccaagcaaagacaaagtgctgaggatgcaccagaaacacaatgcgggacctcatgtaggatcacagaaggctccctgggccctgccctgcagggtgaggaggagtcggcaggcaacaaagagggaagggtgtgtccagcaggggagcagcctgtgaggccagggctgggggcacctgcaccaggaaggggcagaggcaggccaggcacagctgggggagctgcaggcagcaggaggcaggggaggcagcggtggccctggccaagcttgcagagcctcagactctcgacacagtgctgacggccaggtgagtacacgagcagtgacctcccagacttgcgggttctttttggtcttctggctgtagtataagccaggggccagggaggatgtaggcaaccagtcaggaggctatgacagaaccccagggggaaggtgaaagggtgtgggctttgaggcccacctcttttggagccaagtttagagggcctaattcaacgacttgtcaaggcagcagaggtgaggcgattggaggatggaaaagggggtgatagcagtggcaaggagcccagaggacatcggaggaggcactgagtagaccagaaagagatcggggtggaacaaagagggtgatgagtggacaaggcaatgaggggacaggagggaaaaggagaggaggcaagaagtgacatgcagagacaaatgccatggtgagaatgggaggtgatggatggggcaggaggagcagacagtggagtcaggaggtgatggatggggcaggaggggcagatagtggggtcaggaggtgatgggcagggtcaggaggtgatgggtggggccaggtgatgggcggggtcaggaggtgatgggcaggccaggtattaatgtcgagattaggggcgggaacaagaggcag

SEQ ID NO: 19144 - DNA, 1222 bp, Artificial sequence
  DNA replication origin
gcctaggctaggcgggtgctagtgaggagcccggaggcagggtcagcctcttttggggtgccaggcgctgtgcactctcatcttgccttcctagtatccctgagaaaaaatgggagctttggatggtacagaactccagagaggagcaggaaggctgtacgtttggcagacagctggttgggcggtttaaatttgtccaaatgaggataaagccacccaggaggggcttgttggtggctctcattaaatacaaaactaaatgggatttaatttttctgcctctatgagtcttttcacacccaggcatttctaaatcacaccacgtgccctgattcttgagagagaaaatgtggttactagaagtgagaaaaccgctggcccctgggtttttctgggtttgctgggggaagggggctctccgcctcccctctctcggggtcgagctggggcgggtgggctgtgctgtgggcaggtggcgaagcagccctgcaagaggtgggagtgaggagccgctgacatttcattcctggcccctcctgctcgggctccgtgaagcctttttagcttggctgctggaagcttcgagctgataatcatgagggagtgtaaatgtcagcgggctcccggcttcaatcagagctgttaaaaataagcctggcaaggcagctctgccagaggtgcgctcagagagtggtggggagggcaggaggggttgagggaacagggcgctggcgggggggctcgagggcgtgatggcgagaggatgtcaagcctagtttctggcaagtagtgagtgggggcaggaagcagagacagacacgaaggaaatacttattttcttttctcagccttttttgtgattaaaaaaacaagtgacatctcaaatttcatttggaaaggaaaaagcagaaggcagtggtctgggtccctaagctcgggccgcagctggctgttttgtttgctgggctgaaattctaacggtgcctgaaatcagagtgcctggcacaccagggcagaggcagggggtagggggacagctgccagcctcactcagggtgagagattctttctctgcttggccactggggaggaagcacagccccaggtgagatccgggagggaccttgcacctctcaactcaaagggtgcccttggctggcagcatcagcctccggggtaacacagactctcaggcccaccccagacctgcccatctgaacaa

SEQ ID NO: 19145 - DNA, 1817 bp, Artificial sequence
  DNA replication origin
ttggtttcaaggctaaaaggaagcccagaggaactgggtttccagaagcagcttctggatgacgaggggatcagcaagagcagagctgcacggcagcagagatcctccccagattggaggccaaggaggcggcatgcgtggtgggcggacaccctgctccccacctgaacctggtgaagactgagttttgctgctgtaagaagcaatcaggtttccagcatatccctctaaccttcaacttaacacctgtgtatgtccatggaaacaacatctccacatcctctgagggttcactgtcaggtgacggagctgacctccaaacctaggtaaccccccaccagggtatacctgcccccccgccggaaggagatataggtccagccagtgcagcacctgcccccacccactccaatctgctgataggtcagagggtggcaggctgctctcaaagagcactgatgacagacctgtcacctcctaagaggcagggccacactcatccatcttacctagacatcactccaagggttcacagtacctaacacagagcctggcccacaggaggccctcaggaactattggatcagtgggtgggtgagtagaagatggaaggtgagcaggagcgaatacaggggtggaggaaggtggggaggagttgggagatagaagggtatctgggtttataggtaggttggtagatgcgtacgtgggagggggagggttgatgggtgggggtgggagagtggatggataggcaggtggtgagtgggtggggagtgctggatgggagaatggatgggaggagatgggggatggagggatgggtcaggagtagggagagagatgggtgggttgactgatgggttggtagatggtgggaaggtagatgggaggtgaagggcagtggttgataactaggtggatggacagatgggtggatgggtggagggggtggatgggtgaggcaggctaggggtggtatgtaaggatgagctttattgtcagacagactggggttcacatttggcttagccccttggatgtgtcacatacccgctgagcttgcatttctttatctgtaaaattcggaaagtgctgacctcgtagagtgttctgatgatgaaatcaggtatatctgtaagttgctcagcatgagcctggcacacaacaaccttccattctttctaaccgttactatgatgattgcagtccctgagacctttcatgaggccctgggagagtgaggcagtgaaggaggtcatggggcaggttcacttctgcagtggggttggggaagggggtgtgctctcttctgaagaggtgtgagtgctgctccagcccaccctcaatgggggcatccctggggaagtacagaatacatatgtaatttcagggcaccaataaatgcctccagggcagcatcacctacttgctccatgtttgctctccctggcctgctcaggaaagtgcccaagaggacagaaagcatatctcccacatcctcagcccgggcactgactgtgccaaggtcacggccctcctgcccaccacatgccagcctccctccacagcctcctcagggtgtctctgcagggtcacctaagcccctcgagaaaaaaaaacaaaaccctgttgggggaaggtccctgcaaattgaggggatggttgtgagttaagagtggtgaggttgagttggcacaagggacaggggaagccaacatcaatatgggacgcaggtccaggtgcaggtcacgctggggctgcaccaccctccgaagtagccctgatgtggactcatctgacatttcctgggcacc

SEQ ID NO: 19146 - DNA, 838 bp, Artificial sequence
  DNA replication origin
cagaaactttggtgggaataaggatctcctgggaggccggtacaaaatgcggattcccagcccatcctagaggtgctggctctgtagctcttcagcaaggcgattccggtgatttggattctggagtgcccagggcacagtttaagaaatactgcttggtgctgggatttcctggagaagaaagcacatccttcgaggactcacacacattagctcccacccacattagagggcaggaggaagggaaggtgttgaaggaagagatagtggagaggcgggaggaactcctatcctgtgtttgacagtggagagcagtggctacacgtttgtggatttgaacctgggccgaggaatcattgcaaaggccaaaggaggagtttggtgaagaggaggagggttagcagtgtggagagcattcagtccgtctgaggaggagggttagcagtgtggacagcattcagtctgtctgaggaggaggtccaaggaaagcttctggaactcgagatcggggtcactggtaaagtgggcagagcagtttcctgggagaagcggaaggcaggaggcagatggccggcagcaagtaggtggtaaggaagtttgcagaggagaggacaggcatgggagctctgagggggagcaggctcaggagagagttgcctgcagcatagaggcaggtggactggagtctcttggggagggaaggagggagccaggggtcttggggaatgtgggaatggggagggctggcaatgggccagagaaggacagaggcagagagaggtgagagggagttttgatggtggctgtggtcgtggtcgtggcttagagctcctccctc

SEQ ID NO: 19147 - DNA, 1295 bp, Artificial sequence
  DNA replication origin
cacaggcgccgtcgcttggaggagcaaggtgcctcccagcccgcaggggcgccgcgcgcaagcccgcgggctcttcggtggctctgccccgggactgcacctggaggcggccccggacggggatggtcagcggctgctgccgtctggctcgcgagcgggacgctgtgagggcaccatggcgctgactcccgggtgggggtcctcggcggggccggtccggccggagctctggctgctgctgtgggcagccgcgtggcgcctgggtgcctcggcgtgccccgccctctgcacctgcaccggaaccacggtggactgccacggcacggggctgcaggccattcccaagaatatacctcggaacaccgagcgcctgtgagtatggtccccgcccctggctccctggctccgaggttgccctcccacccagacgcaattccggacttgggggtgggggcaggaccattggggcccgtccgggctccgcagcccacagacgggtcagtgcctgccggggtctttcccgagccaggagccaggagcgccgtggtttccccatccctgggattcaaagggccctcggcggggttgtcagcttccgtcctcacacctgcaccctgcaccctgcactccgcaccctcaggccctcctcactgcgccagcgctttattcctccagggtgcctgcgaactggtgtcagaaagccttccttgcacccaggagggacacttcccacactcgccaagcacaatgtctccttttgggcacatggggctacggccgcgttctgagccagctgcgcagattcccgctcccagagcttgctcctgacgaagggcagcagggtgggatggaggcgaagtttctggtctgccccttcttctccattgtttgccccagagccttgagaattcttcccctgcaggtgccacgcgttggtcccctactcacccgcctccctccacacccagccatccccaacacaggcagacaatgggacctgagggctttgggtatggggcttggggtatgtaacattcagcacccgaaaaggggcaggtgtgtcttggatggagaacccggtggataatgccaagaagtcaggagcttggagaggggggcccaaggttaaagatattgaccatgacaagtaataaaaaaatagcatttctcttcccctgttctgtctcacttgtgaattcttgaggaaacttgatccttttcttttctagacccagtaagctagtagaatgtgtgtgtgtgtgtttgggtgtgtttgagtgtgtgtatttacagac

SEQ ID NO: 19148 - DNA, 1171 bp, Artificial sequence
  DNA replication origin
taaattgtaacatactgtgctatgacagtagagagactgcaaaattctcatcaacatggaaaagaaaagcaaagaaaacgcctgagccttgggtacctggtgggtgataaggcttcaaccttgtggagtctatcaacctcccctatccccaccctgcccgacactctccccaccaaatgcgtccatgctgtgtctggacccaggccgctcctgagacgggaggtgcttctcgggctacccagctgtgtcctcttgccaagcagcctcacgtcaaggccccgactgctggacactgccccagcgagccacagctgtccttggcgttgaggagatctttcgtcttttctggggttgaggagaattctctccccacctggatgtcccgttcacacccacgtccacacatgccttacggtgacgaaggtccctacccagccgggtgtgaggcctgggtctgacggggctggcctgtggggttctctcccaagcaggccgcccagcgctatgccagccctctctgtctcctttgatgtcaagatggaatattcattttcatctgtttccacctgtcagaaatggaggaacgctggtgtgagtggaggaagacgtttgccagatttccaagtccccttaatgtctgtccctctcttctacaacgggggaagaagcccgtgtaactgtatggtacaaatacgccctgctgagcaagtgttccaatcagagccattctcatcctgggcatgcggctagcttgttcccctctgagaagtgggtgcattgaggtaggaaggagactgtactccgcctagcgctttcgtggaccctcccccccgacaaagctccatcctcaaagtccaggctaagtaaggttggtggcttgaggatgctacctggggcacaggcacagggtttcccttaaccaagaattgacacagcgagtcgggtggggccgagaggccgctgctgccgtcgggggatggggggaaacgggtctgactccccgggaaggcgtccaagcggcaaaataagatctccctcccaccctggactagcagctggggccgcgggtgccggggtgcgtgcgtctaaatgtgcgcatcctcgccgtgtgtgtgtgtgtgtgtgtgtgtgtgtgtgtgtgtgtgtgtgtacagccaggacttggcgggtc

SEQ ID NO: 19149 - DNA, 1618 bp, Artificial sequence
  DNA replication origin
aacctcaaatttcccttccagggggttgccctgctggtggcaggtgagcagggacaggcttggtggagtattcctggcagaagcaatgtgccaggcctgcctcctccccacccgtgcagcgggagcaggtggcccggctgcagggagggggtagggagacccaagagagggaggggcatgggagaggaaattgaaaaaacagagtggggcttgggggtgtgcggccagccaggcagttgtttaacaagtaaatgtgccgggcacgctaatgagctgcgctcattcatggcgagccgcctcctgaattggggagctggccaggttctggggtggaggaaccagggacaggagccaagctggggagctgcccgctgcttgggcagggccccctgtgatgggctgctgggggagtctttgtcctgggtctggggggctccttccttccctcccttcagaggaaaagccaggctttgccaggcagcagcaactcagcccagggcctgcttgggattcactgtccaggctggtctggaagcttctagggcaggggctggttctcaggagccataggcagggctgatcttgcacccctgctcactcccacccttcctcataccccttcactctgtcactctgaggacctaggggcatgtcgcctggctaatcaacactctctcccttctccacatgggtcttggcttccaaggggccctccgaggtcctgggaccagggagctactgctggagcagaaggctggagacatcttcaacagcctgagtgctgtctgtgacaggcctactaagtgccaggtgctggggtgtgtgtctgggtgagcgagtgaggatgccagggggtgggcaggggtgtggagaagcagctgcaggtactaagaggggataaacaaagcagcgggcatggaggaatgtcactctgaggctgcggggagagcatggatagaggggctggggccccatggagcaggagctggtgagctgcagggcaggggcagccctctcagactccggcctggtttgtgggaagcttccctaatatcccaccacacaggcacccctgagaaagccctgccccctgagaaactgaacttatgctcaagaacccacttaccggatggaggtcatggacagggatgtgtgaaaactttaaaagaactgtcaaaagcccataaaatcagccacctaaattgtaacatactgtgctatgacagtagagagactgcaaaattctcatcaacatggaaaagaaaagcaaagaaaacgcctgagccttgggtacctggtgggtgataaggcttcaaccttgtggagtctatcaacctcccctatccccaccctgcccgacactctccccaccaaatgcgtccatgctgtgtctggacccaggccgctcctgagacgggaggtgcttctcgggctacccagctgtgtcctcttgccaagcagcctcacgtcaaggccccgactgctggacactgccccagcgagccacagctgtccttggcgttgaggagatctttcgtcttttctggggttgaggagaattctctccccacctggatgtcccgttcacacccacgtccacacatgccttacggtgacg

SEQ ID NO: 19150 - DNA, 1031 bp, Artificial sequence
  DNA replication origin
gggggctgacccccccatctccctcccggacggggtggctggccgggctgaggggctcctcacttcccagtaggggcggccgggcagaggcgcccctcacctcccggacggggcggctggccgggcggggggctgacccccccacctccctcccggacggggcggctggccaggcggggggctgacccccccacctccctcccggacggggcggctggccgggtgggggggctgacccccccatctccctcccggacggggtggctggccgggctgaggggctcctcacttcccagtaggggcggccgggcagaggcgcccctcacctcccggacggggcggctggccgggcggggggctgacccccccacctccctcccggatggcacagctggccgggcgggggggctgaccccccacctccctcccggatggggcggctggccgggtggggggctgacccccccccacctccctcccggacggggtggctgctgggcggagatgctcctcacttcccagatggggtggctgccgggcggagaggctcctcacttctcagacggggcagctgccgggcggaggggctcctcacttctcagacggggtggttgccaggcagagggtctcctcacttctcagacggggcggccgggcagagacgctcctcacctcccagacggggtctcggccgggcagaggcgctcctcacatcccagatggggcggcggggcagaggcgctccccacatctcagacgatgggcggccgggcagagacgctcctcacttcctagatgtgatggcggctgggaagaggtgctcctcacttcctagatgggatggcggccgggcggagacgctcctcactttccagactgggcagccaggcagaggggctcctcacatcccagacgatgggcggccaggcagagacactcctcacttcccagacggggtggcggccgggcagaggctgcaatctcggcactttgggaggccaaggcagtgctttaaaacaggaaacacagct

SEQ ID NO: 19151 - DNA, 921 bp, Artificial sequence
  DNA replication origin
agccccacgaccggccagccgcctcgtccgggagggaggtgggggcgtcagccccccgcccggccagccaccccgtccgggagggaggtggggggggtcagcccccctgcccggccagtggccccgtccgggaggtgaggggcgcctctgcccggccgcccctactgggaagagaggagcccctctgcccggccagccgccccgtccgggagggaggtgggggggggtcagcccccctgcccggccagccgccccgtccgggaggtgaggggcgcctctgcccggccgcccctactgggaagtgaggagcccctctgcccggccagccgccccgtccgggagggaggtgggggtgtcagccccccgcccggccagccgccccgtccaggagggaggtggggggggtcagccccccccgcccggccagccgccccgtccgggaggtgaggggcgcctctgcccagccaccaccccgtctgggaggtgtgcccaacagctcattgagaacgggccaggatgacaatggcggccttgtggaatagaaaggcgggaaaggcggggaaaagattgagaaatcggatggttgccgtgtctgtgtagaaagaagtagacatgggagacttttcattttgttctgcactaagaaaaattcctctgtcttgggatcctgttgatctgtgaccttacccccaaccctgtgctctctgaaacatgtgctgtgtccactcagggttaaatggattaagggcggtgcaagatgtgctttgttaaacagatgcttgaaggcagcatgctcgttaagagtcatcaccaatccctaatctcaagtaatcagggacacaaacactgcggaaggccgcagggtcctctgcctaggaaaaccagagacctttgttcacttgtttatctgctgaccttccc

SEQ ID NO: 19152 - DNA, 1142 bp, Artificial sequence
  DNA replication origin
cagccaggggccccggggcccgcagcggcgcccccgggggcccgcacggcgaggccgggctgtgctgcgccgcgtccagctgcagcgtctcgccgatctgggccaccagccggtccacctcgcccgagctgcccagcgccactgactgctgcagtaggaggaagctgtcctcctcctcttcctccccctccgcctcctcgccggcttcctcttcctcctccctccggcacggcatggccccctgtctgggcacccggagctgtgcgggcgtcgctgggggctcggctgccggcgggcgcggtgggccgcggcggagcgggcgcggagctgaagactaagtctggaccggggccggggcggacgcggaagccggagcccgccaggcactctagccgcgcgcctgcagccgcgggagccggaatcctgccggctcgggttgatttgtaaacaatgggtgacgtcacgtcgggccctaccaccgcgccggggagggggtgctgtgccgctgggggacggcgcttctgtgggattgggggtctgggtgaagccggactgccttctgagctccttcgctcagggtgctgtctgcaagggcgccctggggacctgatcctggctcccgcagtcgggcgcgattggcatttccagaaatgggcaccagcgtgaaccctgttggtttcttccacacacaagcaagcacgcacactaacacacacccacccacccacacaccccttctctccgtgcgtcaactcaaccggtttttagcgtttgcgcttttgaggtccggcatgcgggcgtctggtgaggatggaaaggaaagggagtcaggctagggatttgtacggagattagggaaatgaagctgacgggaatggaaaggaagaaggggaccttgtcgttcgatggaggtggcagagttggaaatggcaaagaaaggccacagattaatgttttttgatcgagatcctgggcggatgggggcctggactggggttggcattgctggagaggaggttgctagtctttttgtttatttgtttgtttgtttttttgagacggagtctcgctctatcgcccaggctggagtgcagtggctcgatctccactcactacaacctccgcctcctgcgtttaagcaa

SEQ ID NO: 19153 - DNA, 1354 bp, Artificial sequence
  DNA replication origin
ccgagctcgccacaggccccagcgcgctgtccccactgccccctcaggccgaccttgatgggcctccgggagctggcaagcagggcatcccgcagccgctgtcgggtccgtgccggcgaggatggctccggggcgccgccgcctcccgccgcctgcagcagcgacgcgggtcccaaccagaaacccgcacaggcgacgacgacccgcaccggcttctgcagcagctagtgctctctggaaacctcatcaaggaggccgtgcgaaggcttcattcgcgacggctgcagttacgtgcaaagcttccccaacgcccgctcctgggacctctgtcggccccggtgcatgaacccccttcgcctcgcagccctcgcgcggcctgcagtgaccctggcgcctccgggagggcgcagctcagaactggcgacggcgttcttgtgcctggcagctaacacgcccggggtggccacagcgccagcctcagactggagggcaaggggttcccttgagggctgcagttctactcaggctggtggagaactctggcttttggaagcgagagtaaaaagctaatgacgaggaaccgaaaaatcgcgagtgtttcgcgggtaactggggttgagggccaaaatatttggaatgaaggactttggccctatttaaggcagattttacagagcgcacctcaaacgtacaagtcagtaggactccttatttggcgtgacccgacctggccgcggagcctgcatttcctcgcagcctctcagtgccctccagccccgcgaccatgtggccacaatccacgcttctccggatcgcggtgcgccggaaccacggaggatgatgccagttacttgctttaccttttcagggctggctcctgatccactttgggggaggagaacatgagtagataatttcagggtgcagcccaatctgccagacttaaaaaaaccatcttgtgtctttggaggtgctgcttaataccaaacatgcggtgccatgaagggaccctttgggggttgaataggagttaacccctgcgctctctttgcaactgtctctcttctcagagtggtgggggaaggctgtacgacacgggtggggaaaggaggtgggggcggggagtattgaatggtggtggaagggtagagaggcgcggagtgaaccccacgccctgtctaaagtgtattttcagagccggcccgcctctcctcggttcaaggtcactgtttcctgggcacgcactgggttgcgggacagagtagccaggttctgccggtgctcggagaagagcgcagtgttttgcaagtgctggagtctcctgaggacacgcgcgtcgccgccaccgcgggtg

SEQ ID NO: 19154 - DNA, 907 bp, Artificial sequence
  DNA replication origin
gaagggaccctttgggggttgaataggagttaacccctgcgctctctttgcaactgtctctcttctcagagtggtgggggaaggctgtacgacacgggtggggaaaggaggtgggggcggggagtattgaatggtggtggaagggtagagaggcgcggagtgaaccccacgccctgtctaaagtgtattttcagagccggcccgcctctcctcggttcaaggtcactgtttcctgggcacgcactgggttgcgggacagagtagccaggttctgccggtgctcggagaagagcgcagtgttttgcaagtgctggagtctcctgaggacacgcgcgtcgccgccaccgcgggtgtgggaaagcgcggacgtgctgggcggctgtgcttcggtaggcgaccaccgcccctggccgcgctccgggctttcacggaaactcccgagaccgggccctgggttcctcctctcctactcggctctgcagtcctactcaagcgggtggctctgggatcctgggggcctgggttgggggctagggagacgccatgtgatggacactccagggacacacagcctagcacagcagcttataatgggctctccggggccatttgcaataacagctgcaattccctggatagacgagttgatttcctccctctgcccctcccccagccatgccagctggcctttgtaagtgcaggaaaccgagtagaaaatgtgaccctccaaatggagaagctgcaggctttgccattgtgaaccatggtgaagtgcttggaacatactgttcactcactctaaaggcgctgagactgtgctgttgttctcgtttttatagtcaatggcttgttcatcatccagatgtggctactgacatatctacacttcgcaccggagtgtctggaa

SEQ ID NO: 19155 - DNA, 1121 bp, Artificial sequence
  DNA replication origin
gggccctgcgctgcgccctaggggaccgcggccgcgtgcgcggacgcgctgcgccctactgcgtggcggaggtcgccgcaggccccagcgcgctgccggggccgtgccggcgaggatggctcagggacgcggtcacctcccgccgcttgcagcagcgccgatggacccaagccggggcacgcgccggcgacgacgacccgcatcggctcctccagcagctcgtgctctcgggaaacctcatcaaggaagccgtgcggagactccaacgagccgtcgccgcggttgcagccacgggccccgcaagcgcccctgggcccgggggaggccgcagcggacctgaccgcattgccctgcagccctcaggctccttgctctgacgcaggcctcctggaggaggaagtggaggccgctgcgtagacccaacagcgtccagttcctactaactctgagctgaagccgacgtcgccagcctgggagcgaccactttggctgcggggaggcgcgtggggagagatctcaaccagagaagttaccagccgcggcgaggccgtcggagaaaacttaagcgtggagaaatgtatgcgccagggtgcttccgtggggcatgagaatttcccgggccatccaagcccaaggacctgggataaactgggagaactatggcagctacttgcatcgacttgtacctcacttagcccttgggggcgtcgtgagcttggattgtttaaggagggctcaggggtaggaatcgcgatggctttataacaatacttgaaaactaacgacacgcatacattttcttattttctggtggaggagcttagtaagtggtgctacaattgctgtgcaaagaaattccagaggggagaagaatgtaaaagtttggtggtgggtggcttggcattgcccctttttcccaccgattcggtggctggtgaaggtgggagatgtgaactccaattaagggactggagagaggtgaagaattttgcaggtgggagatttggatttgaatgtggacttgtaaatgacttgaccttgccatctgtgttcaaggtcacggtttgctgtggggttcctgggagagcttactcaccccggagtcttttctttctcttgct

SEQ ID NO: 19156 - DNA, 1118 bp, Artificial sequence
  DNA replication origin
tctcattggcttcccccgtggtgcgtaccgcccctctccccacccagccaggtgcccgccccgcagcccgtctcccggggagccgggctgggaattattcgccctcaatcgcctccggctgcgtgcccagcagccgccttccctctcggtgccaccgccccatttcaggccccgcccctccctggaactgcctaggcagaagccggcaggcacgtgaccccggcgccccgcccccttgcgcttccccggagattggctcgggaggcgcatgcgcggagagcccgtctcgagccaccgcccatatcccctcccacggtctctagttcgcgttatggccgctgccgcggctgtggaggcggcggcgcctatgggtgccctatggggcctcgtgcacgacttcgtcgtgggtcagcaagagggccccgctgaccaggtggctgcaggtacggcagacggcgccgcgcgccttccgcatgggggccaacaggagggagcggcctcagtacaggcgccgggcgggaagggaggagcggggtgactttgagagattggtctcaaggctggttagtgagcaccgcgaggttcagagccgtaacaagttagagagttgcctgtgtcttccttaaaaccatttacacttctcatctccctgtagccaattatagggaatcattacattttacagatgaggaaactgaggctcagcgagggcaagaggacttgcgcagggctgcagaccaggcaggagggggaggtgggactcggacccaggcgttcaggtccgaaccgggtgctcacgccacgaagccatgctgtttgtgggaggttgacgtgtggaggtgcatcctcgcagcgtccgctcccgtcgcgtggcatcctgggagtggcagatggccccgcgctctgactggctggaattaagaggagttgaggagacgggccaggaggagctggagatgttctgggtgtcctccttaagactttctctccgtttcttgctaaagttcttgattagtttgctccatgacgttttatgtggcgtttgtttttgtcttcttcccagacccccactttcctgcttttgaccagttcagagatctcttagttcagacagctta

SEQ ID NO: 19157 - DNA, 1472 bp, Artificial sequence
  DNA replication origin
tgcatggggactggctgaggagccagcatgggcaactgcgtggggagacagcgccgggagaggccggcagccccgggacacccccgcaagcgagcaggtaacgatggggaagggagcagggcctcgggcatcccgccagttgtccccctcctcgcccgagtcctgggcttaccgatggactccccactggtgctggcgcttgggtttccccgatgggctgctccgcagccagagggggccgctccccagcgccgggcggccgggggagctgagttggggcaactgcgagcactgagccggctgcgcgaccaactctctccaactgggtagctcctggtgggggtgggggcaggaaatgtttgcagaccgcagcggggccgacggatcgggaggaggccgggggcgagggcgccgctggcctggcagctccggccggggtcggacgccggcccgtcggggcacggcgcgggcagccaggcgtccccagaactcggagcgagcgaggcgagaacagtcgctccttccaaagactgtgtcattatcgagctgcagatcgtgtctgcgggaatccgacttgcaaagcagcgcaggactctgggaaagaaatctttatttttcccgcaggggtttttagagcctctcggccgtctgggagtctataaaagatggggtgcggggtgagagtcacccttgggattgttgggatccttcccagctttgggagtgagatcgctcgctggtgatcctccaggcccgcgcaacgctttctcactttcatggtacaccccgcctgccctggcatttcgccccgggaagaggtctgtcggtcatttttctgggtcttacactcacttccttctttgagggtgttgcaaggacccgctgggaataatatcgtagacttgagagctcaaacttgtctggattccagatggacccatctcctactctgtgtcaaagcccagatcctgagaggttgaacaccttgtccaaagtcacacagctagttaggagctcacctggggctagaactcagcctcctctcccaccccattgccacatatccccttatgtaagaggagccacaggcagagttgttaatgaagtggaaactctagttggagtttcctgtctcccttgacaccgaaggtgtgttgcttgggttgcggaaactgggaaggaagatgggggaaccaggggaagcagggaaggatgtctgcatggtggacaggatgacttgtggaggcagaaatgtgtttttatgggaaggatgcagtaaaacttattgaaattctcttgtctgaaggtaactctggccattcttctggctgaggagagatgactctcaaaaccaagggctggcttgctttcattcattcatttgttcaacaaatatgtgttcaggccccataattgattttgcagcattttttgctgttgacaactctctcctacgagacattccccccctt

SEQ ID NO: 19158 - DNA, 960 bp, Artificial sequence
  DNA replication origin
actgggaagtgaggagcccctctgcccggccagccgccccgtccgggagggaggtgggggagtcagccccccgcccggccagccgccctgtccgggagggaggtgggggggtcagccccccgccaggcgagccgccccgtccgggagggaggttgggggtcagccccctgcccggccagccgccccgtccgggaggtgaggggcgcctctgcccggccgcccctactgggaagtgaggagcccctctgcccggccagccgccccgtccaggagggaggtgggggagtcagccccccgcccggccagccgccccgtccgggagggaggtgggggggtcagccccccgcccggccagcctccccgtccgggagggaggtgggggagtcagccccccgcccagccagccgccccgtccgggaggtgaggggcgcctctgcccggccgcctctactgggaagtgaggagcccctctgcccggccaccaccccgtctgggaggtgtacccagcagctcattgagaacgggccatgatgacaatggcggttttgtggaatagaaaagggggaaaggtggaagattgagaaatcggatggttgctgtgtctgtgtagaaagaagtagacatgggagacttttcattttgttctgtactaagaaaaattcttctgccttgggatcctgttgatctatgaccttacccccaaccctgtgctctctgaaacatgtgctgtgtccactcagggttaaatggattaagggtggtgcaagatgtgctttgttaaacagatgcttgaaggcagcatgctcgttaagagtcatcaccactccctaatctcaagtacccagggacacaaacactctgcctggaaaaccagagacctttgttcacttgtttatctgctgaccttccctcctattgtcctatgaccctgccaaatccccctctgcgagaaacacccaa

SEQ ID NO: 19159 - DNA, 1599 bp, Artificial sequence
  DNA replication origin
ggccgggcagggggctgacccccaacctccctcccggacggggcggctcgcctggcggggggctcacccccccacctccctcccgaacggggcggctggccgggcggggggctgaacccccacctccctcccggacggggcggctggccgggcggggggctgaccccccccacctccctcccggacggggcggctggccgggcggggggctgaccccccccacctccctcccggacggggcggctggccgggcggggggctgactcccccacctccctcccggacggggcggctggccgggcagaggggctcctcacttcccagtaggggcggccgggcagaggcgcccctcacctcccggatggggcggctggccgggtggggggctgaccccccacctccctcctggatggggcggctggcctggcgggggctgacccccacctccctcccggacagggtggctgccgggcggagacgctcctcacttcccagacggggtggcagccgggcggagggtctcctcacttctcagacagggtggccaggcagagacgctcctcacctcccagacagggtcgcggccggccgaggcactcctcacatcccagacggggcagcggggcagaggcgctccccacatctcagacgatgggcggccgggcagagacgctcctcacttcctagatgggatggcggccgggaagaggcgctcctcacttcctaggtgggatggcggccgggcagagacgctcctcactttccagactgggcagccaggcaaaggggctcctcacatcccagatgatgggcggccaggcagagacgctcctcacttcccagacggggtagcggctgggcagaggctgcaatctcggcactttggggggccaaggcaggcggctgggaggtggaggttgtagcgagccgagatcacgccgctgcactccagcctgggcaccattgagcactgagttaacgagactccgtctgcaatcccggcacctcgggaggccgaggctggcggatcactcgcggttaggagctggagaccagcccggccatcacagcgaaaccccgtctccaccaaaaaaaaaacgaaaaccagtcaggcgtgcaggcactcggcaggctgaggcaggagaatcaggcagggaggttgcagtgagccgagatggcagcagcacagtccagcttcggctcggcatgagagggagaccgtggaaagagagggagagggagaccgtggggagagggagaccgtggggagagggagagggactgggactgatctgcccttctttggcttcattctgaccacctcctgcctcgtgtgatctacctggcagcactgcttgcagctccacaaacctgagcccagagtaggctcacactgcctcctctgtctggcgagcccagcccccttgcccttttgcctggctaactccagcttgttctttggtacttggagcaaactttaagaccttccgcagagggggtgagaccacattcacgtgtccccctgattcctgtgcatatcactccccttgcatgtgtgcattagtttctaacaatctcctgacatgtctgtctccctca

SEQ ID NO: 19160 - DNA, 809 bp, Artificial sequence
  DNA replication origin
ctgctccctggggctgcccgaggtgaaggtgacaggtgggggaggcaggtggagaattgggccagtgagctcatggcaaaggcgcccagctgggcaggggtgggtgctctggcctataaagcccccgaggccctgtggcctgcagaggcggttatggacggcaccatggaggactccgaggcggtgcagagggccacagcgctcatcgagcagcggctggcacaggaggaggagaatgaggtgcgagcaggggtggaggtgcccaagggggtctgaggagatccagttctgctgtcaaggggagggagatcctgtctgctacacctgtggtggggaggggggcagatgtccccaggggcccagttgggcctcattcctgtcccagggtattactggcagggggtattgctggcagcagaagactgaggcttcagccttcaaaattaagtcagtgagatggggagctgggctgggcttcctaagactgctcaccctcctgggccttgagagacagtgggctgtacaaagcagacagctgggtgctgcctgggactttcaggaatgtgtggccctgtgatgccccagtgactgagtgggaggctggggcaggggaaactccagtatttggccagtgaagaagagagtgaggaagggatgctgggaaatgaagcatggattttgccagcctgctggccacccttggggagtcctttggcgtgtggtgttctgggcaattgcattttctctgggataaggaagtggagcggtggcagggggtgctggcttgtcctattctgcatttttttttt

SEQ ID NO: 19161 - DNA, 1548 bp, Artificial sequence
  DNA replication origin
ccgcgagcgcagtggtgtggagcgcgccgggtcccggagccggctgtctgagggatggacgagacgagcccactagtgtcccccgagcgggcccaacccccggactacaccttcccgtcgggctcgggcgctcactttccgcaggtgcccgggggcgcggtccgagtggcggcggcggccggctcgggcccctctccgccgggctcgccgggccacgaccgcgagcggcagccactgttggatcgggcccggggcgcggcggcccagggccagacccaaaccgtggcggcgcaggcccaggctctggccgctcaggccgcggcggcagcccacgccgctcaggcccaccgcgagcggaacgagttcccggaggatcctgagttcgaggcggtggtgcggcaggccgagctggccatcgagcgctgcatctttcccgagcgcatctaccagggctccagcggaagctacttcgtcaaggaccctcagggggtgagtgcgggggtggggaccgccgccgcgggctgagggccggcggcgctcctggggagttgggggcttcgcacagccagagggaaaagggagaaacttcacagtaccagcccctggcaggatttagggatgccactgaggactggagctggggacgctctgcggaatggagaaataaatcagaacctacttggtgggggaggagtgagcggaaaatgaaaagaggaaattgaccagatacgggccgggggctcagcggtgtggtggggcaatccgccgctggacagagactgctttctagtagggtacttagcttcacactactgggacagctattcggccgccgacttgcagatttggggctttaggcctgttctctctttttggaccgaccgaaccagtgtgtcgctgttcacggaggaggatgggtgacctatcaggggatctgagaattcagttccagccttctatgttgtgggggatgtcccctgccaccgtcccagctcttattaacagacgttgaagaaagaatgggcggactcaccagtttcatctgccctgggtattgctcacttctgggaaagggttcaaatactttttgacgactccaaagtttagatagaacttggagttttagaaacatggggccatcagctactttttctttcatttctctcccagggctatcaacagcctgcttttcaactaaggcagagcgtttgccgacctttattttgtcccctgcctgtatataaagggggatggttataggatggggcatggagtgaccagggtatctgagaagtgacctttatccttttgagaactgcagaatttaagaaataccaagtcttccctgttttcagggaagtttcagggaaattttcaggtgtgctgcaatgggtcattggaaagatgtattgttatttaaattatgggtgtcaaagtttcctcagattttccctgacatctctcctgtgtgaactctttagatggccagggtgctgttttaataggagtcctgagtggccaggacgggctgttacttgtagctcttgg

SEQ ID NO: 19162 - DNA, 1424 bp, Artificial sequence
  DNA replication origin
attggttggggacaaattgtgaaataggccacacagaagagacagcttctgtcctgtctcagtaggggaagcagtgtaacaaacatcaggtctgtcttttagaaagatgtcatgacctggcttggtggttcacgcctgtaatcccagcactttgggagccaagggggacagatcacttgaggtcaggagctcgagaccagcctggccaacatggcaaagccctgtctctactaaaaaaaatacaaaaattagctgggtgtggtggcactcgcgactgtagtcccagctacttgggagaccgaggcaggagaatcacttgaggccgggaggcggaggttgcagtgagcagagattgctccactgccctccaacctggacgacagaacagtactctaccccaccgccccccacccccccccccacaaaaaaaaggaaaaagaaaaaagaaagatgccatgggcacaaaggttgagcatgaaggagagaagagagactggtggtagttaccagcttcctggtctgaacccaggtaggcttcattcctcctcagcaaaatgaggggagttgcgtgtatctctgtggttgttttgagggttaaatgagaactcaggtaaagcggtggcacggaataataataatgtaaagcatcgttagcctccatcacaggcagttcggcctagtagttaagtccgtgggctttgcttcctcttggccctgggtttgtgtcccagccatgttaggtagcgtattttgaatgtgggcaagacagaaggatggcaaggaagggttggataaaagagggtgtggacaataagcttgtgccgagtggaacgagtggcggtgcctctggtgggtgatggactcttactccgacatgggtaactcggacagctttggacaggacgaggcgggccctggcaggagactgcggatgtccaggtgacagtggatgccagttcaaaaccagcactgctctcctcccgcgcccaggaagagcccagaggcccggggtgggcgctatggcaggaaagagggaaaaggaggaggcagggcgggcaggggcggccccagatgtggcaaacttggcgcagcagcgcacgggcggacagggcggaaggcccgcgtcgggctgggagatgcgccctgccctggcccgaggacgaaggaatccgagctgggggcctggcgcagaggggaaaggggggcgccagggtggtgagcgagatggaaagagagatggcaggaagccgggaggagcgcgcgggggaggagacagccgaggggaaggggaagggaaaggggcgggtgggaagggtggagagctggagacagaaggcgaggagggccgaggggaggagagaggagaggaagggtggggaaaggaggagaggaagagaggactaagaggggagcaaggcgaggag

SEQ ID NO: 19163 - DNA, 1221 bp, Artificial sequence
  DNA replication origin
cgctggctcatggtcaacgtggcgcacgatgtgctggcggccgcgctctacggcgccgccaccggcatcatgagcgaccagatgcagcgccacagctactgcaacctcaaggattacccgctcccctgcgcctaccacgccttcctggcggccgccgtctgcggcggcgtctgccacggcctctacctgctttcggcgctctatggctgcgggcgtcgctgccagggcaagcaggaggtggcgtgaggccgcccgcgcccgccgcggccccgatcggggcgggggaatccccggagaccagcctccttaatcccttcccccgccgccgccccgcgcgggtgcgccctggcaccctctccctgccctccagcgtttccactgtcgcccgcgcccgggaaccctgacgctcagctcccgcccgacggcagcgccgccgccgcccagaatcccagcccagaatcccgaccgccgcgccggacgcgccgtctcccgggacaagcgcaggctgcgatccgaggggctgacacacactcgcagacgagccgccccgaggcgaaacctcgcggttcctcttcccttccctgctgagactaagacgtggacaggggccgcgcagatccgggggaggctcccaaattggaaccaggcttctggctgcccccttccctcccgccccgtggtcggaagagcactcccttccctggcccctcatccagcctccggtgctgtaaaacgcaggcgctgggccgcgggcggagctgaggacaggccttggctggtcccaggatgagcgacgagtttggttttagctggggattgtgctggcatcctgcgaagctcctcccagccggtctctctgtgctcggttgtcttggggtggggcccatccgccgaggtggggaccgataggagaagccggtgggttgtacccttacacttgtggagtctcctcttgcctctacctactccgcctttgtccttaaggtttttgcaggccagtgccaaacacacactaactgtcctggcctctccgtgacacaagtctcttcccagccttcctcacaggcttctgccgcccccctcatctccaccctcccccatatctgtttgcattaggagttccacgaccatggtggaatgttaaggtgaaccccaccccttcttacagatggggacccagagcctgctcttgggaacagccagagtaagattggaacccag

SEQ ID NO: 19164 - DNA, 1366 bp, Artificial sequence
  DNA replication origin
gctcacagagtgattgacaatcaccagacaggctgtgcagtgacaaaactgccaggtgggcacagtgactgccccatgaccctggcggctgcagccatgatgtgcattgtcttttaaattttatctcctctcatcctcagcctatgaaatagggattcttattcctattttatttttgagatgtagtctcgctctgtcacccaggctggagtgcagtggctctctaatctcagcttactgcaacctctgcctcccaggtttaagcgattcttctgtctcagcctcccgagtagctgagattacaggcgtgtgccaccacgctcggctaatttttgtattttcagtagagacggggtttcaccatgttggccaggctggtctagaactcctgacctcaagtgattcacccaccttggcctcccaaagtgctgggattacaagtgtgaaccactgcgcccagcccttactcctattttggagaaaagggaaccgaggcccagagcggttactcaagtctgacagcagacggggaggaagggggagagggcatggagccagcctggaagagctatgtggaccagcacagaaaaggggaggctgagaccagggagaaattagggttcaggggactgaggggtgggtgggaggagggacttaggacctcataggtttcatgagcctgggatggcttcctattttatggatggggaaactgaggctcagtgaagtcaagcaacttgcctaagggcttctcttcaggggcagagcctaatctgctcttccttccgcactgagccttacccgaatgactcccagccaggggaactggggaagagggtggagatcttagggttccaggtacagaaaacggggacgcagatcatagtccagaacattcttagtccccagtctttctccacatcccttccctcacctctcctctcttcccaaggtcccaacacggagtggggatgatgcttgctttggtgcctcgggatccaggtgaaaggcattgtttaacgaccccaggcattcttgggctgagaggggtcataaggcatttatcaggacgtcccaggattggggggacggcattgggggattctcagcagcttggttggatgggtactgagaggggtgccaggggtttccagggaacgagagccagagggaaggtctggagccgccgggaggcactatgctgccactccctggggaggtgggaaggcgggaaggctgcgggggataattccggggacgctgggctgagctaggacagcgtgtgtgtgtgtgtgtgggcggagggggggagctgcacctcttggggggttcgcagagctgtgctaggggagctgcagggccgtcg

SEQ ID NO: 19165 - DNA, 1804 bp, Artificial sequence
  DNA replication origin
gcggcttggagtaggagcggccgtgcagcggctcggcctgccagccatagtagtcgtactcctcgcagcgcgccggcgcccagtgcagcgcccccagcagcagcgccagcgcggccgtccgcacgcccccccccgccgccgccgcccgcatggctgcgccctctccaggtgcgcgccgcgcagccccccgacgctcggtgcccggcggcccaggtgttccggcgtgcgcccccggccctgactctacccagccgccgccgccgccgccgcggaggtcgcccaggtgggtggcagcctgcgctgcgggcgccccgactgatcctggcgcctcccacctcggggctccagcccgggcctcgccgtgcgccccagccaatctccggccgcctggccccagctccaaggcggggaggcagtgggggcggccctcagcccctcccgcaccctgcccgagcgtcccgcccagcgccaggtcttgcgcccctctcccggctcggctcccctgccgcagccctggcctcgcccagcgtttctccccagggctccctgcctccctgggcattttcctcgaccctcgccttctccatccttcctccttatctctctccgccacagcctctcctgttccttttctcactcacttcacttgcttatctctctgccttggcttttctccctctgctctgttttctcttccccgacacctcggttcctcttctccctggtgggaggctcgtgccaccccacaccctggatcttctggtcctcctggcaggtcttcattgagcttggtgccaggccccatgctggctgctggggaatcaaagatggatatgacccagaacccacctccagggccaggatagtctagtgggggtgaaggtaatcatagcttctatttagtgagctcttactacctgccagggacggtgcaaggtgcaaggtgcggtgcaaggtgcggtgcaaggtacgttccaagcttatcagctattgctaatgatagccaatacttagtgggtgctaattgtgtgccaagtctgatctgagcacattgcataaactccctcagctaattctcacaataaggctagatggtgggtaggtactattattgtccccaccttacagataaagatcctgcggcagagaggttaagcacagattagagctgggatttgaacccagatagtctttttcgagagtcagagcccagaaacaaccaggaggcctggattctgagtctgtaggcctaatgaccaaggggatagggagttcagagaagtggagtaactggcccttggccacacagctcatatgtgaaggagctaggatttgaatccagatgttgggctacaaaggccagggcttaaccactctgtggtaagataacttccaacccatggtagggaacacagtgggaagagggggaattgatggtgtgtctgagcagggcacccaggcaagcatcagaggggaggggaccttcaggagccccatgcttggtgtctttctctcctgtctgagtcctgcctttcattggctctcccttgagaggaatttggactggaggcttgaagggaggggaattccttcctgagagcctagcctgacacctgacctcccagtctttggtggggagggtaccttggggaggtgtctcctaggagggcgtggggagctgggggctggctctgctggaaggcaggagtactgggcactttccccctctgctcctccccttagtcccactaatggatgtttccagggctcctgtcttcctctgggtctgtccttgcagtggtag

SEQ ID NO: 19166 - DNA, 1004 bp, Artificial sequence
  DNA replication origin
gtgccagaacaggtttacagaaggacccaatgtctagtttataagtgcctgttaagagtatttcagagatgaatggactcacttcccacaaaccgagggaagatgagagtctgaccaggtgggaggaagccaggccagccaagcctcagcagcagagaagctcctccccctgagtgttctggtcgggacacaggtgattcctggctccctgtcttgtagcctctgaaactgacttggctcccaaatgtcttagaatgaaagcagggaaggggcatttccttcagccgacaatgaaaacataagaaaccatgtgataaaagcagcataaacaaagtgctatatggggaacaaaggaacagtgtacagtccttccttttctgcacaaagcttcttgggaggtgtgggacctgggaggggtgggacctgggaggggtgggatctaggaggtgtgggacctgggaggggtgggacacgggaggtgtgggatccgggaggtgtgggacctgggaggtgtgggatccgggaggtgtgggatccgggaggtgtgggatccaggaggtgtgggacctgggaggtgtgggatccgggaggtgtgggacctgggagaggtgggatccgggaggtgtgggagctggtaggtatgggacctgggaggtgtgagaaggctattttgaccagcagagttgggaggagagcagtccagactacagaaagagcacggacagaggcgtggagaggaggcagtcagcaagttcttgtaaccggcccatttggaattagagaccatcctgatcctcaccaatccccacgtgagttgctccctgtgactttctacctgatccggtatggggatgtgggacaagacatggaggcaggaaatgaaagtggggttccctgtggggtccccagcacactgttcaggctggtggggtgcagtggagacagcaatggatggggagtcaggaaatccaggtttgaaccctagctcagtcctttacaagctg

SEQ ID NO: 19167 - DNA, 918 bp, Artificial sequence
  DNA replication origin
cggctgggaggtggaggctgcagggagccgagatcacgccactgcactccagcctgggcaccattgagcactgagttaacgagactctgtctgcaatcccggcacctcaggaggccgaggctggcggatcactcgtggttaggagctggagaccagcccggccaacacagcgaaaccccgtctccaccaaaaaaatacgaaaaccagtcaggcgtggcggcgcgcgcctgcaatcgcaggcactcggcaggctgaggcaggagaatcaggcagggaggctgcagtgagccgagatggcggcagtacagtccagcttcggctcggcgtgagagggagaccgtggaaagagagggagaggggagaccgtggaaaggggagagggcgagggagagggagagggagagggagagggagagggctattagaggctttctctagatgttacctgacttttccaaatcttgtctttcaagaggaaaacaggaaaagatttatggtgatgccttgagagagatcttcccacactgacatttcttccaggcccagtgggatttcctaaagcatagaagagatatcggcaaacatgcttcatttcactcggcaagtagttaattaggcacccactgtatgcctcagagagatgaccatgggatgtttccaaccccctaaggacacaaaatataatcaagtgatggccagggtctgtgataagtgctaaggtggagacagattctccacagttgggggcccagaaaggtcttactaactacgtggcatttgagcttggccttcagggattagtgtcagatccccagacaccagatgaaaaacagtgtgcaaaggcaaggatgcatgaaaggtgcctggaaacacaaaacctctggaacctcaaattcaagaaagcagctgccaggcaga

SEQ ID NO: 19168 - DNA, 1113 bp, Artificial sequence
  DNA replication origin
gagcacagggttgggggtaaggtcatagatcaacaggatcccaaggcagaagaatttttcttagtacagaacaaaatgaaaagtctcccatgtctacttctttctacacagacacagcaaccatccgatttctcaatcttttccccacctttcccccttttctattccacaaaaccgccattgccatcatggcccgttctcaatgagctactgggcacacctcccagacggggtggcggccgggcagaggggctcctcacttcccagtaggggcggccgggcagaggcgcccctcacctcccggacggggcggctggccgggcggggggctgaccccccccacctccctcccggacggggcggctggcctggcgggggctgacccccacctccctcccggaaggggtgtgggcggagacgctcctcacttcccagacggggtgtcagccgggcggaggggctcctcacttctcagacggggcagctgccgggcggaggggctcctcacttctcagacggggcagttgccaggcggagggtctcctcacttctcagacggggcggccgggcagagacgctcctcacttcctagatgggatggcggccgggaagaggcgctcctcacttcctaggtgggatggcggccgggcagagaggctcctcactttccagactgggcagccaggcagaggggctcctcacatcccagacgatgggcggccaggcagagacgctcctcacttcccagacggagtggcggccgggcagaggctgcaatctcggcactgtggggggccaaggcaggcggctgggaggtggaggctgcagggagccgagatcacgccactgcactccagcctgggcaccattgagcactgagttaacgagactctgtctgcaatcccggcacctcaggaggccgaggctggcggatcactcgtggttaggagctggagaccagcccggccaacacagcgaaaccccgtctccaccaaaaaaatacgaaaaccagtcaggcgtggcggcgcgcgcctgcaatcgcaggcactcggcaggctgaggcaggagaatcaggcagggaggctgcagtgagccgagatggcggcagtacag

SEQ ID NO: 19169 - DNA, 874 bp, Artificial sequence
  DNA replication origin
aggagcccctctgcctggctgcccagtctggaaagtgaggagcctctctgcccggccgccatcccacctaggaagtgaggagcgcctcttcccggccgccatcccatctaggaagtgaggagcgtctctgcccggccgccccgtctgagaagtgaggagaccctccgcctggcaactgccccgtctgagaagtgaggagcccctccgcccggcagctgccccgtctgagaagtgaggagcccctccgcccggctgacaccccgtctgggaagtgaggagcgtctccgcccacaccccttccgggagggaggtgggggtcagcccccgccaggccagccgccccgtccgggagggaggtggggggggtcagccccccgcccggccagccgccccgtccgggaggtgaggggcgcctctgcccggccgcccctactgggaagtgaggagcccctctgcccggccgccaccccgtctgggaggtgtgcccagtagctcattgagaacgggccatgatggcaatggcggttttgtggaatagaaaagggggaaaggtggggaaaagattgagaaatcggatggttgctgtgtctgtgtagaaagaagtagacatgggagacttttcattttgttctgtactaagaaaaattcttctgccttgggatcctgttgatctatgaccttacccccaaccctgtgctctctgaaacatgtgctgtgtccactcagggttaaatggattaagggcggtgcaagatgtgctttgtttaacagatgcttgaaggcagcatgctcgttaagagtcatcaccactccctaatctcaagtacccagggacacaaacactctgcctaggaaaaccagagacctttgttca

SEQ ID NO: 19170 - DNA, 893 bp, Artificial sequence
  DNA replication origin
gcgggtgccaccatgcctggctaatttttttttgtatttttggtggagatggggtttcagcatgttggccaggctggtcttgaacttctgccctcaggtgatccacccgtctcggcctcccaaagtgctgggattacaggtatgagccactgcttccggccttatttttatttttttaagagacaggctcttgctctattgcccaggctggagtacagtggcacaatcatggctagctgcagccttgaactcttggattcaagtgattctcctgccttagccttctgagtagctgggaccacaggcacacatcacaacgcccggctaatgttttcattttttgtgcagacagggtcttgcccaggctggtcttgaactcctgggctcaagcaatcctcccacctcagcctcccaaagtgttgggattacaggtgtgagccactgcacctggtctcctttttattaaacaaatagatcatttagttggaatttatgatgtcaaaagtgcgaaggtggcaccagagccagacctgccatccttggagagtgagcataccggtttggcaccatctgcttgtggtttttgagtggtggtggtagtggtggtgcgtgtatgtaaactcgggttgcagaggagagagggaagagtaaagggtggggaccaggtccaggaagagcagcaaggagagactggcttcaattctggagctgcctgaaagaagggaccccaggctatggctgagaacgaaatgtgggcacgtatttaaagaaaggaaatgattctctgcggtcggcaggatctttgtctagctagtggggttccaggaagtgcaaaggagaggggaaaagaggggccgtccgtgcaagcctgactgtgtgtatatggggggggg

SEQ ID NO: 19171 - DNA, 1099 bp, Artificial sequence
  DNA replication origin
gagctccggggctctcacgagggggagggcaggaaggggaggcggggcctcgcgcggggcggtagccgagcctgtggcccgggcggggctcctctccggcggcgccggagtctgggggccgcggcttccccctcccggccagcggcggctcctggcccctcctcccccggccgcccccatccccgccgccgccgccgccaaagctaaacccggccgttgcctgcaggagccgcggcagcgggcgatcgggccgtgaggagcctcgggcgcggcctcgcctcccgggcccggcgcctgcctcagcacagcggacagcgccgcgccccttgcctggacccagccgcccgcccgcccccggcccacctgagcccgggcccgcggcgcccgcatcagcactgcggacagcgccccgggccccagctcgccgccaccgccgccgcccacctgctcccggggtcagcaccgcggagacccccctcgcccggccccgcgacagcctccgagcgcccccggatcatggccaccgaggtaggggcgagcgccccacccgcaggcagtgcccgattgccgcgggaccaaatgccctaggggtgggctgggcaggagtgggaggcgggagttgggggtgggatggggtgattccccaggtcaggtctggagggaggaggtaggggcttagtgagggctcatctcccccttgcgtgtcaatcttcccctcgccccacctgagcccccaagctgtccgcgacacttgttggcattagcgccagggttgcttcagggccccaggctggggtttccccttccctggacttcacaagtcctgaaaccgctttcctagagggttggagacgcgtgtgtgtgcgtgtgtgaggggagggaaggcggctgtccgctgttgctatgcagtcagcttctgaacccaaaagcttggctaagggatgacagacttacctctacatccgcatttcctttgcgggagggaggggacaaagacatcctcaggctgagaacccaaatggttggtctccacttttgcatatcacccttcttgcttttttaccccattcgagttttttttttttttttgtcccagggt

SEQ ID NO: 19172 - DNA, 1446 bp, Artificial sequence
  DNA replication origin
gcagcctcgaagccagctggtcctgccaggcctgtgtataggggagggctgagcagaagagcgccccccattaaccagcagagacatgaggtcaggagcagcagtgagtcacctctggcagcttttaaaggacagaggccaaggaggcagagagaattgcacttttcagaagaattacaaacaaaacagatggtgggaatacagttggtagaatatttttgcactttaataaagcaatttttatgtgggccactgaatttcccttccctaaatgagcatcagccggctcggagaggcagctctgagtcacctgcaagcaattagctgaaaggcggtggcatgtgtgggtggggctggggcaccagcaataccaggggcagtggaggcgggagggaagggggggagggggaaggggggagggagaatggttggggtggctgcctgagccagtgactcccagtggagctggcggaggcaaatagatgattggtgttgtttttattttccgggtttgggagtgagctgcctcagcccgctgccagctgggaagtggagggtgggcatgtggggcttgggggtgggttccgagcaaccaggttggcggtgggggagccctcgaccagggccataagcagaaatgcttattttcagctggaggtccgtctgcaccgaggagcagcagggacaggccagggtgaagaggggctgtggaacttggtgggggggggtccactgagcaaggcagggtccactgagaagggaccccacagcaagatgtcgctatgagagctctgcacaacacagtgggccctctgggaaccccgcatgcactcattacccatggacggaggtggggagtacaggtgagggcctgcgtcctctgggtgtgctcccgcgggagcagacacgatgtacatggggcaaggctgaggctgtctgagagatgcacacgtgtacacactcacatacatgtccgtgtactcacacatgcgcactgcaccttgctgcaaagtcatggggaggcagcgcgtgactcatggaggcaggaagggggcaggggccctgggggcaggcaagctgaagccttgtgagtgctggcaggggagcttcccgccggcccctcccctctactcctcagtcatgcgggacctcaaggcaggcctttctcagattcatgttgttgacattcccgcttctcaccccaactgctcagaattggaaacaatctaactgtccttccagaggggactgggtaaatagatgatgagtgtgagtgctgtctcacagtgaaatactccacagcactgaaaggaaacaagatatatgcacagacttggtatgctgtccaggatgtgtacacacacacacacacacacacacacactctcacacgtgtatgtaagacaggctctcactctgttacccaagctggagtacagtgttgtg

SEQ ID NO: 19173 - DNA, 1156 bp, Artificial sequence
  DNA replication origin
gtgtgagcatgagcgagagtgagcattgtgagagtgaatgtgtgtgtggatgtgtgaatgagtgagagtatgcaggagtaagagccagcatgagtgagagtaagagtgtgtgagtgggctgggcacagtggctcatgccagtaatcccagtactgtgggaggccaaggcgggcagatcacttgagcccaggagttctagaccagccaggcaacatagcaagaccccatctttacaaaccctccccctcaaaaattagccaggtgtggtggcacatgcctgtagtcccagctactcaggaggctgaagcaggaggctcacctgagcccaggaggtagaggctgcagtgagctgtgattgtgccactgcactccagcctgggtgacagaacaataccctgtctcaaaaaaagaaaagggtatgagtatgtgaaagcaagtgcgtgagaaaaagtgtaagcatgagaatgagtggtaggtgtgagagtgagacaatggctgagaatgagtgtgtgtcagcatgagagtgggtgtgtgagtgagggtgtgtggtgagtacacgagagtaagagtgtgtcagagaatgagagtggacaagaacgagtgagtgtgagagagtgggcatgagtgagtgagaatgtgggcatcagtgagagtgagtgtgggaaggagtcagagtgagtgttgagaggggatgagtgagagtgagtgtgagagtggggatgagagtgtgagagcggggatgagtgagagtgagtgtgaggggagggtgagtgagaatgagtgtgggcatgagtcagagtgtgagaggggggtgggtgagagtgagtgtgtggggggatgagtgagtgtgaggggagggtgagtgagaatgagtgtgggcatgactgagagtgagtgtgagcgtagagtgcgcgagaacagtcaagtgtgtgtgtggaagtgagcggatgagcgtgagtacttgtgggagtgtgcataggtaagaagcgtgtgtaagtgaccccttgacccctcaggtggctccacccaggagaggacaaaagggttggtctctgagggggcctcacgttgggaccccttgagaccacaggacccacaggagcagaagcatcatctgtgaggtctggagttggcctcaagggtcctcacccgacag

SEQ ID NO: 19174 - DNA, 974 bp, Artificial sequence
  DNA replication origin
ctgattctggcatcttggcattaaaggagacttgaaggtctcagagtccagtccagtagaaccaccatttgctgccaggaggccagagggaagggtctgcaggtgaggctcaggtgcccaccatgccctgcagggggccaggtgctacaccagatgccgttggaggctgggggaagtacgccttggtccctgactaggggcttttagagtccatccacaacaccagggacaggtaaaggagataccaagagacagccatgaaatgaatgatactgccacgtctatagcacttgccaggtaccaggcaattcacgtatattctcattaaccctcaccaaaacccctcgaggtgggtactattttcatgacccctttacgtatgaagcgcctggggcatgagaaagaaggggacttgcctaagatcccacaactggcagagcccagcagggcagaaccagacagtatgtctgggagatgccttgaaatcaggatggaagagtcgctgtgatcagggagggcttcatgagggaggaggcaactgaactgggactggaagggtcagagtaacaacagcaatgcactctacagtttaggcaggatggcgagaaaaaggcacagaggggacattgagtttgcccagggaggggggtttgtgcaggtggaggaggcaaagcatggcagggcaggggagacccagtaattccaggactgagggcaaaggggccattggtggcttctgatctggggaaagtcaggggaagacagtgtttccggaagattaagttggcagtggagtgaagggtgaatgcgccagcaaaggagaaaatgcagcgagtggccactattttaggagctcaggcttgatcgggatggggaagaagcaccggtgcaggaggggttggctgagtgtggccggcagagtgagggagctgtccaaaatgtggaaacagtgacccaagcagggacactgagct

SEQ ID NO: 19175 - DNA, 826 bp, Artificial sequence
  DNA replication origin
gggctccaaggccaggagtgatcacaggtctgggtttcattcccaagcaatgggaagccaccaaagggttttagctatgatctgatttatgcagtaaaaaagatgactctggctacagtgtgggggagttaaattaggggacggtcaagtgaggcaacagagaagggtgtctgcccagagatggtggcagtggaggaggaaagaagaaaaaggatttgtgaaacatttttggaggtagaaacgacaggatgggccaattaatgagaggcgaagacaaaggggagggacagccaagtctgacgcaggttcctggccttagtatttgggtgctcctttgtgggagggaggggtggagtggtcagtagctccactttgaacatgttctattggaggtggcagtggacgtccaaggggtgatgtcaggtagccagtcagagatatgcatctgacctgggactggggatttgggttggaagtatgaatttggaattgtcagtcagggtaatgaacattatcccatagtgaaaggggagagaaagaagagaatgcccaggactggggactccaacattaaaagggaagggagaggaagaaggaattacggtggggaaaggagaggaagccagagagagcgcaggaaaccagaggaagttggcctccttggcctagaagagagagtgctttcagaggacagcggtggggaaaaggaagagagagagcagcaactgtgccaaatacagctgagaggccgagggggatgaggacagaaaagggcaccctgagatatggcctcataaaagccaccgatgatggtagcaggaaaagc

SEQ ID NO: 19176 - DNA, 1438 bp, Artificial sequence
  DNA replication origin
taaagtgcagtcctgtaatcaagaagattgtaacctattacagttgaacctgtagacacatccacagataactagtacgaaaaatagaatgcgataaattctggattagaggctgggtcagagtggagtaggagaggataaattctaactgaagaagtctggaacaattttgtggaagcagtggcaatggatcggtttgctcatgaatagatagaatttcaactgagggatgagcatttttagtaaaactaaaaattgctgcgatgtagtaaggtctttccatgtatccgacaccattccaagtgctttgtatgtgttagctcatctgatcatctctttaaccccatgaggtttgatgcatgtgattcccactttaaccccatgaggtttgatgcatgtgatttccactttataggtgagacaggtgaagcctagcaagatcaggaaacctgcctcaggccaaatactaccctatggggagctgggatttgaacccaggcagcctggagccagtgcccatgctgttaattatgaaacacttttgcttctacatgcaagatatttggttttctttcttattatcctcactttaaaatcactgatcaactctgttaagctttgttagaagtggaatgagcgcagaggacctactgaagatgtttgtttattcctcgctgtgggctttggagccacctataatcagtgaaggtctggatgagagtacgctgcggcggcctgcctttccgagctctagatggccaggaacaggctctccaggcacgcacctccctgtccctggagtgtctttctggtcctcagaggcagctaagctgtctctcttcctctgggtttgggggctccacgtcagtggtctctataggggcccgaagatgtaagatgtggttcggggaacgggccacacaccaggtagatggttcctctttcttccaaggcttcatgacctcaaggggcagccgggagctagctcctcattgggggcccaggagcacgctcaccgagtgtgcgtagcttccctggcaggtggagaggctcttggcacagagggcggaggagcatttagacagggcctctgtataggagtgaggggctggaagcccagtcttccctcgtctcccccagccctacccccgtgtgaggctgtgcaggcttggaggaaggggcgcctttttgtcattcacagggagagtccatcttagaactatgcagaagactggctgccagttgtaacagaaatggtgccccacgtcctttaggaaaaggtgactccattccgactgggccaaaatgccgacagggtaatcctctttctgctcttggatgccaagagatgttgagtcttccagctgcttcttccctgaagaagaagaagaaagcgaggtctgccggctccccatcccgcccctccacgccccatgca

SEQ ID NO: 19177 - DNA, 1553 bp, Artificial sequence
  DNA replication origin
gctcttcctcccctgggaagccgagttcccgggcacagcgctgggtggcagagagctccgggagccagccccgcgcgcggcgtagctgctagccgccttatgctggacgaggtgtggtcttcccttcaggctgcctgaggcaagccggcttcaggcattccaggggaaccctgagtcctcctcgaccccgtgggggcacttggaggctttgatggggcagccaggccgggcttgggggcatgcccagcaatgcagcgcgcttctttgcagtacagtagttgggagccctggttagtcccgcttctgcagaaagcaactcaagaatccaaagtcatcccagcctggatggaagcctcccagagtggcggggaaattctcctagggttgagagctgggggggcttcctccaggaatgactaatgaatattgctgctgctgccgccgccgccgccgccgccgccgccgccgccgccgctgctgctgctggtgggtgcacccagtgtggcttctgcacatcccaggagatgcttccgttctcctgacaggacacattcttgagttgcacttgaggtgtcttctgggatgggtgcaggactttccacgtgaagccaagtggaaaagaagggaagagggtcccaggacaggggacagttctatagtgttttcttgagtcaggggagaactcatgtgggaagagataagcgattgacggagatttggaacccagacgacttggggctggagatgtccaagactgaattagagctcattgagagtcacagagtacctcaccctcagccatgggggagaggtggaggctggaaaagtgggaacatggtggctgttccagcatggttcttgagaaaatgttctctctctctctctgacttggttaagaacatccttctggcagtaggtcctaaagtcaatttaagaggtaatgaagggagttgagggtcttgatgatggcacagaggaccacaattagaacatttccatttccggtgggtactaatggactctggaaaaggtcgaaacggtgtgtagggagtctggggaacctgctctgtggctgctcatttgagcctgaatcctccaccttatcccatccctgaatgtaggtggatgttcaaactcctagggtacctgcttcagcctggagatattttatgggtgctatcaatctatatcccaacccccagctccatcgttgtctgctgcagtcaacatttttctgctgcatttcccaagaccttctctccactggggatttgtgcagcgaaatacctgcttgttgctctttcttcccttctccatctgggctgcacctggtgttctgaaccctggtgtttattccttggtaccttgatgtttggttaagacgtcctatggctgcgcaggggtgcccctgtaaatctgtggaccaatggcctgtgtaattctagggagtgcaatagacttctatagaaagaataccaccaaccgggaaggcagtcctactaaacagcttgtgacagcctctcatgctcaagcgctcccttgcttccgtgctg

SEQ ID NO: 19178 - DNA, 1136 bp, Artificial sequence
  DNA replication origin
cccgccactgcgtcgcgtaaccttcaggcggcagcgaggcctggcgaggaggggagagggcgcctggctgggcgctgggggccccaggccggagggaagcgagggtccctcgggaggcagcgcagggaaggaacgcgaagggggaggggagggcggcgagccccaggaccccgcggccacccctgcgcgcaggaccgagggtggaggcgggagcggctgcactgccttcccatttccccccaggatagcgatctggcgtcgccgggccgggccaaagcggccgagcgagccgcgctgatggcgagatttcgactacggagctagagccgagccgatctttatccagcctggggacgtgtccgagcacctcccggggactgctcagtatggagagcagggctccgcgacggcccccgcaggcggggagcgggcgagcgcagctcggagatcaggcgcgcagaggcccaggcggctgcgggcagcgccgcttctaccccaccccgtccccaccagcagtgcccccaccccatcccacctagtccctaccccagcagtggccgagtcgggcctggcccacccgctcctgccgcctgcgtcctactagcctccctcaccgctttgatcacaggtactgcccgcctctcctcgcccccaacccgctgccttggtggtggtggggggatggtttctgcctctctggaccaggggaatgggggtgctaagcgccagaaaaacacacttgatcagcaatgctcaaaatacccctgttcaggcaggaaactggccttggtgggtcacactctgaaggcaaatcctttattttacgcctagaatagagcctggcacatagtaggcgctcagtgtttattgaatgaattctgagcttccatgagtgaggtctttgggtttctgaaagccaggtaaaggggccacagaagagaaagacttgggaatccaccatcggagagggaaggagctaggactgttttcccatccgttgacgcttttgtgaccatcacccactagtctggcttctgggcccttgactcttagaatgatttgaatgtgttcttttatagagggccacacatccagcctctggcccctgttatccacagattttgagcagaactacc

SEQ ID NO: 19179 - DNA, 1621 bp, Artificial sequence
  DNA replication origin
gaggccttggctccctgtttgctgttgtttcttgtggatgtgcatctgtatatttgcattgaaggatagttctttgttccagtcttttcttttggccttgttttctgtttttcaagctcccatgtttggatctacttgttttggtttttattatgtgtttgcttagtgattctttgtaatacatctcttgattttctttttctttttttttttcctgctagattgctgcctccttttcggcaccagctgtcaccttaagcccaggtttgcctcggttctagtaaccaatcagtatgctgcccctcctgcatgggaggcatcccacaggagatattccagtagtgtgagaaggctggctatgggttcatgcccaggtgacttgtggaatgaacctcctacagcgtggtgctgctgaacagctgttttgatttggcatctcgtttggctgagtcacagagcagagtttctagggctgggaacagtagtcccccctcccctctttgtctctggctgtcctcagggatacttcttcctttacatactcccaaaactgcctgtaatttgaggcagagacaggtctcctgccagagatcctacgatggtgggaagctggttgtccaccttattctctttttccggtgtagtgattgtgagtcggggggaaattttctgcattcttggtgctgagcatgttggtgaaaggggcatcatggttatggaagttcggttttcctttcctgcttagattttctcacttctccatggccctgaaactgtctcctcctcatttttgaattctgggatattgcttgtgataatctcagcactttgtatttgtttttggttttctatggggcagttgagtgaagccagcttgcttctacgctgccattttggaactggaagaatgtgtgatagtactttggaagaaggtctagtgtgcgctggttaagaggctgggttctggagacctaggtttgaatgatctctttagtgcattgtgtcttgagcaatttatttaatttgtctgggcctcatttcctcatttgtaaaatggaggtggtgataatactctactttgtaggattgttgtgaggattggctctgagaacagtggctggcaaatactaagagctcagtaaatattagctatttattaccaccaccgcaactactattattgtttctaccaccactttgtctgtttatctattttgttttaaaaattagttatgttcctatataattatgtcgcatgctagtggaatgataggcagctgaatataaaattggagctcaatagatgagacatagagatatgttttttaagactgtttggcctaaaccttagagaagagcagaaaagactaaggatgaagaattagggaatacccatagtaagggtgcaggaggcagaaaaggagccagtaaaagagtagagggagattgtttagagaaaaaaggaaaacaaggcacatatgttagtgtagaggttatatgaattgggattagatttagttgcaaccaagtaccagagacttaaatgtgatagaagttcatgtctgttgagtaagaaattccagctcgctctctctctctccctctccctctccccacggtc

SEQ ID NO: 19180 - DNA, 1114 bp, Artificial sequence
  DNA replication origin
cagatggggtggtggccgggtataggggctcctcacttcccagaaggggcggccgggcagaggcgccccccacctcccggacggggcggcggccgggcggaggcgggcccccacctccctcccggacagggcggctggctgggtgggggctgaccccccacctctctcccggacagggcgactggccgggcaggggctgacccccctcctccctcccggacggggtggctgccgggcggagacgctcctcacttcccagacggggcggctgccgggtggaggggctcctcacttctcagacggggcggctgccgggcggaggggctcctcacttctcagacggggcggctgccaggcggaggggctcctcacttctcagacggggcggcccagcagagacgctcctcacctcccagacggggtcgcggccgggcagaggcgctcctcacatcccagacggggtggcggggcagaggcgctccccgcatctcagactatgggcggctgggcagagacgctcctcacttcctagacgggatggcggccgggaagaggcgctcctcacttcccagactgggcggccgggcagagacgctcctcacttcctagacgggatggcggccgggaagaggcgctcctcacttcccagattgggcagccgagcagaggggctcctcacatcccagacgatgggcggccaggcagagacgctcctcacttcccagacggggtggcggccgggcagaggctgcaatctcagcactttgggaggccaaggcaggcggctgggaggtggaggtcgtagctagccgagatggcgccactgcactccagcctgggcaacattgagcactgagtgaacaagactccgtctgcaatcccggcacctcgggaggccgaggctggcggaccactcgcggttaggagctggagaccagcccggccaacacagcgaaaccccgtctccaccaaaaaaatatgaaaaccagtcaggcgtggcggcgcgcgcctgcaatcgcaggcactcggcaggctgaggcaggagaatcaggcagggaggttgcagtgagccgagatggcagcagtacagtccagcttcggctcggcatcagag

SEQ ID NO: 19181 - DNA, 873 bp, Artificial sequence
  DNA replication origin
ccgccaccccgtctgggatgtgaggagcgcctctgcccggccgcgaccccgtctgggaggtgaggagcgtctctgctgggccgccccgtctgagaagtgaggagcccctccgcctggcagccgccccgtctgagaagtgaggagcccctccgcccggcagccgccccgtctgagaagtgaggagcccctccacccggcagccgccccgtctgggaagtgaggagcgtctccgcccggcagccaccccgtccgggagggaggaggggggtcagcccctgcccggccagtcgccctgtccgggagagaggtggggggtcagcccccacccagccagccgccctgtccgggagggaggtgggggcccgcctccgcccggccgccgccccgtccgggaggtggggggcgcctctgcccggccgccccttctgggaagtgaggagcccctatacccggccaccaccccatctgggaggtgtacccaacagctcattgagaacgggccatgatgacaatggcggttttgtggaatagaaaagggggaaaggtggggagaagatagagaattcagattgttgctgtgtctgtgtagaaagaagtagacatgggagacttcattttgttctgtactaagaaaaattcttctgccttgggatgctgttgatctatgaccttacccccaaccctgtgctctctgaaacatgtgctgtgtccactcagggttaaatggattaagggcggtgcaacatgtgctttgttaaacagatgtttgaaggcagcagactcgttaaagagtcatcaccactccctaatctcaagtacccagggacacaaacactgcggaaggccgcagggtcctctgcctaagaaaaccag

SEQ ID NO: 19182 - DNA, 1117 bp, Artificial sequence
  DNA replication origin
tcactgttcctttccctctatctaagactgttaaactcctacacatcccacaaggccagctcaaatgccaccccctccattaagccctcccacaaagccttccacaaagcacattgtgtgtttgcttcctgaccccacaaccagactccacctgtctgttcccctagcactgagcacagaggaccaagctgtgcatcctccctcagagaaggaagcggcctcgaaagtggccgttactttcccaaataaaggagaaggggacagaagagggaaggaaggtggaagggaaagaggaggggagggaagtgaggataataactatacattttaaaatacggattaaatacttatctccattttacagatgagaaggtaaggtccagggaagtcaagtaacttgcccagccaggattcaaacccaagcagcctggctagacgccggactctcaaaaccaccaagaatggatgttggaagagggggaggaggaaaggaaggccgggagccgactgaaattccaccctgttctggtggatttatgacccaggccgtggtgtgagggcactgggcagggtgctcttcgctgaatgccgagtgacagatccaagatcttgccagcttgaggcacagaggcacctgctccaggtgtgccaggagatgctgggacctggcctgacctagcgcaggtagggagggctgaagacagcaaatgcccgagtattcaagagagagcatggggggtgctgtcctgagggtgcagcaactttaggatggctcatcccttctctgccgttgggcagctcttctcagcagcctcctctcagccctgtagcctccccggggttactgactctgtggacctgaagcagtgccaacaaatggtctctgagctgtacctgtccaggctaggaaagagggggcttgaagtcttctgcccccttcccttcggtgtttctgtcacacgccgaccccccaacataatcagctccggtctggatagttggagagcccagatcagccctggttcgttgtcccccaagtcgtaagtgtgacatctgaacccgccttgccccttccctgtctcctccctggaagaaggcagagcaatggttacacacg

SEQ ID NO: 19183 - DNA, 1346 bp, Artificial sequence
  DNA replication origin
tgacaactcagccgagaaaatcccactgttagtacgccatgggctggggctgggaccagagcccctcacttctcagggttgggggctcacagcgcatgccttagagatccccacttccactgcttcccagccttggcctctgcccagagttgtgcaaattaaaggacttccgggcaacatccattcattccctggtctctatcctccgcccgcccctgcgctccagggtatttttagttctgggcagccaggcctggtgagtgattggcagcaggcagagcccacgtttccgaaccctctgtgttgcttctggctcagcatgagaggtggctgggccctaggagagggcttaggcatacctggcacccaagcccacagctgcctcattgtccctgggggaggagctgggctgctgccactgacccgaggctgggagcattctttcctgctgattcatcatggggaatgttttgggcccagctggggtggggcaggggcactggggggacatcttggacacgggcagccaggagtggatggcaggtccctggcagcagggtcattaagacctggctgtcacccaggatcgaaaaggtccatcttgacatcctagctctatcacactctgcctgtccaggcttattcttacttgcacatctgcctcccccaccagactgggaaggccccctccagcgtctagcactccagcaccctgtctagcatgtaggagaaaatcaataaaggcttgtgggatgaatgaacctttggaaggacgtttaggcaaggtgggggcaagagggggaaccaggttgggcagctgtgggcctagggaggaaaccgggaggctggaaccctctgcccattttacagatggggccagtgaggctaagggcaggaccaggtctaggggaaagaaactgggggcttggactggggttcaggcacctaggtgctcagttcagctgatgggactcctctctgtcagccatgtccacatttctttaattctacagtccctgctccctgcactaacaccctcctcccgtgagtctgacaagggccaggactgcatcattcagctctgtgaaggggttctcccattcactgtgtattgcctggaggagcaagttatgtcgcctggggctcagtgttcccagctgcacaatgggcagcgcagagtttcacacggagggcgggggggggggggggggcggtattcagtaaactctgggtgactcgcctgttcctgcaggagagcaccgctgcaccgcgccacctcgacctctctgaactgagccccggcctcccagaaagggcgtctacattgtcctaagtgaccgagctcg

SEQ ID NO: 19184 - DNA, 1087 bp, Artificial sequence
  DNA replication origin
agctgaggagccaggaaacctgggttctgagcctggttcggaccctcagcaagttatttcttctctctgcgcctccgtttcctcttctgtaaaatggggcatgggcaaggcctggcaggggcggggctcgaacccgcggaaggcgacggcggctccggcccctcccggggcgggcggtcacgtgcgcgatcacgcggtcctacccggaagcgcgcccgggctcctgcaggcggggcgctgtgcgcgccgcgatccggtacgtgggcctccgggctgtcccctctgggggcggcgatcctccctccggagccccccttcaaccctcccggaagtgaggtagggtccctaggggtcccggagcgggcccactcctagcctcacccactccgggcgtgtggccgtgggccggtcgcttcctcgctcggggccaaagttcctcagccgtgaagaggggtggatgtcacaagtcaagcctccttcccagggtggccgtgaggttcgggggtggggggaggtggggatttggggtgaaactggacagaaactggcgtgctaggcaaacgggagccccgcggcggcgaactgctgactcgctctctccagagactcaggggcagggccgggctccgaaggtgtgggaccccagaaggagctgctgaagacgggaccaagggccacagggaggtttgctggggtccagatggtgaaagtgggcgctgggggtcgccccaggttggccccccgccatctggagctcctttcgtcagtgagtcccctccgagttccctttctagggcaagatagcgaggtgaagcggaagtctcagtgtgacaccggcgaggttctcttcccagcagcctttgggaagcatccccctgtttcgggaatatggcattcgggccaatcatgtgggtgatggagcccgtctcagggttcggctgctaaaggccgaactcgtaacagcagtctctgtggcgggtagtcacttgcctcttactggctcacagtgcttgacttcctaattaagttttctgttgttcctgccctctattcaaatatgaatgattccggaaccagattgattaat

SEQ ID NO: 19185 - DNA, 1133 bp, Artificial sequence
  DNA replication origin
ccgggacgcaagggccccaggacttccacgtccgatgcccagtcgctctgctccctgcagcgctgcggtcccggggggcgagtggggaccgcgctgggggccacgccgccaccgcccgggggctcctcgatgaacacgagccgcggagcccagtcgccggtgccattctcccccgagttgagggtcggtgagggcaccggtgcggcggtggccggcggtcctggctggaaatagacacgcaggaggaagctggtgccttcggcggcgcgcagggtgcccccctccagggacacgcggcctccagcagtgtcctcgggccgcaggcccagcagccaggcggcggcggccgggggccgaggagacagggaaaagaagagcaggagcacagcgcctcggctgcagcagtcccggagcctgacacccaccgctgctgccgccgccgcggccgccgccatcctgcacccagcgcagctgcacgtgatactgcaggaagccgagcgagagctggagggaggaggagccggagctgggaacccagccgcaggcaggtcaccacgtgtacgcccactgcgcgcgtgggctggtggcggtgggcattcagactccacctgggcaggaggtccccgctggaggctggaggtggccaggcatcaccgcactgtgcgtagcgggtacacacttcggtatatctgagatgcagcctgaaaagtctgggtttgcagcatggcctcctactccaaaagtaaggtgctcctctgcgaactcctacccggcagtaattccctgccggctccactgcttccccattggcccgggaaatttcccagcttttcgcttctcctgccacttgcattcccccttctggtcaaaagaatattctggagtcaagtcttgaatatgtgaaaacttttagcctcaactccagccgacctttcattattgtaaacatttctggattatttaagttcaattcttagttaagatccgaatgtccatcaataagaaactgttgaaataagtgaaaccactgtgcaatggaatactatgcggcaataaaaaataatgcggtggatctgttgtatatgtgatacggaaaaaaatctccaaagtaattgtagaaacaaagtaaggtg

SEQ ID NO: 19186 - DNA, 1703 bp, Artificial sequence
  DNA replication origin
tcggacgtggaagtcctggggcccttgcgtcccgggggcgtggcaggctcggccctggtccaggtgcgagtgcgggagctgcgcaagggcgaagcggagcggggcggcgcgggcggtggcgggaagctcttttcactctgcgcctgggatgggcgcgcgtggcaccaccacggcgccgccggcggcttcctgctgcgcgttcgcccgcggttgtacggcccaggcggggacctgctgccccctgcgtggctgcgggcgctcggggcgctcctgctgctagccttgtcggccctgttcagcggcctgcgcctgagcctgctgtcgctggacccggtggagttacgggtgctgcggaacagcggctcggccgccgagcaggagcaggcgcgccgcgtgcaggccgttcgcggcagggggacccatctgctctgcaccctactcctgggccaagccggagccaacgcggccctggctggctggctgtacacctcgctgccgccgggcttcgggggcaccggggaagactacagcgaagaggggatccacttcccgtggctgccggcgctcgtgtgcaccggcgcggtattcctgggcgccgaaatctgcccctactcagtgtgttcgcggcacgggctggccatcgcctcgcacagcgtgtgcctgacccggcttctgatggcagccgccttccccgtgtgctacccgctgggccgcctgctggactgggcgctgcgccaggagataagcaccttctacacgcgggagaagttgctggagacgttgcgggccgcagacccctacagtgacctggtgaaggaggagctcaacatcatacagggtgccctggagctgcgcaccaaagttgtggaggaggtgctgacccccctgggagactgcttcatgctgcgctcagacgcggtgctcgacttcgccactgtctccgagatcctgcgcagcggctacactcgcatcccagtgtacgagggtgaccagcggcacaacattgtggacattttatttgtcaaggacttggccttcgtggaccccgacgactgcaccccgctcctcactgtcacccgcttctacaaccggcccctgcattgtgttttcaatgacacccgactggacacggttctggaggagtttaagaagggtgagcagtagtctatcttctcccccaactcctatccccttcaaaggtattatcctttcctaaccacgtgaggctctaggtacccaaagcaatttctctcctatggtactaaaaacccaaggaagactctacctcttggctccctggctattttcatctcacttctgcctcacttcttgctcctgattgagccccaggcctctttcctctctacttgattcacaagatgcaccatattccttatttgttccattctaccaggtttttccaaggcctaccaaatgtcagatactgtgtaggtgggagatagcccttgaaggtcattgcatagctccccacctattacaggagacacctctgcaggttcccatacaagcagcctttgctttaaactcctcccagggccgaaagctcactatttacagagcaaactaattccattgctggacagctccagtggctgacaatgtttcctcatatagagcagaatttgtgtctccaaatccttctacctcttctgccttttgaatcatgtagactaaacccagac

SEQ ID NO: 19187 - DNA, 1028 bp, Artificial sequence
  DNA replication origin
gcgggccctgctctggcgtcggggttgcagataccgcccaggaggaggcgagcgaggcctccgggacaataggtcaaccctgcgggggtcgcggggggaggcggggtcacttggaaaaacgcctccctggggccggatggccgtggagtcatggttcccggagtctggctggggcaggacgttgtctccagcccacccaggcgtggagcggaggcgtcctgcacccactccttacttgcttcgtgaccttggacaaataattttatttctggggcctcaatgtccaaggctctaacatggggcgggaggggcgatgatacttttctccgagggatgtagcgatcagaagagacctttgtgtggaacgctttgttcaccggtggaaagtttattatcatgattagtgttaacttgacagtgggcacttcagaaggcggggacgagggctggcagccccatactgaatagaaagcgaaggacggaggtagggagaaaggaaactgctctggggggcggaggtgggggtacacgtaggagggaaggggagggggctagaggaggctccgccccaccgtccggcagtgtttattttcaaggcagcttcccgtcaatcctgtcaccggggcacattcttttcgggggctgtgaaccaccgtcagggctctgcaggaagatttgaggagggggagggctgtcgagtagggagcaggaattcgcagagtagagagaactgcgtctgggcaggcagtccctgcgtggcgcgggggaagagaggaagctgagtgttcaaggcaaggaattttaacaactttgggcaatttacctcacccttctgagcctcagttccctcctctgaaatggttatattaatagggccaaagacaagagctgttgcaagaagcagaagcagtaacaatggcggacacttagcaagagtttacagcagcctggagatgttctgggatcttcatacccaatgagacagcggactctcccagcccagtagaagtctcttgaccatggtctgc

SEQ ID NO: 19188 - DNA, 1400 bp, Artificial sequence
  DNA replication origin
gagcagctagagtgctctgtccttggctggtgtgagaagccagggaccccactcttttctcttagatttggcccctgcattttaaggcaatctctgaaacaccttccagttggggtgatctcaagacaatacaacccccagtctaaagtgggactgttgggaaagaaaggaaagtcagtttgctctcacctgtgtgtggtgcagtgggggtgggtgttcctggtctgggagcccccatctgctctcagggatgcctggggcccaggcctcatggtcacctccagctctgttctggttctcttcagactgccacaatagaaggaaatggagaaggatctgcctggagtggggatttccatggggagggcagccaagcctgccacctggagccccacagaccagctagggcccactgctgaggccatgggggagtgggggcttgggaggtgggagaggtcttaccagttggaacagggcacagagtagcttccctttcacaagcccagggatgcatgggcattttcctgagcagccctgagggtcagaagcagaggggtgggataggggaaggaatgtgaggctcaggagtggagtcttgctcagttagtctcaccccacctcggcgaagccctcctgtgctgccctgattcccttcacatcaaacatctgcaggggccacaatcaaaaagcctgagagcatcagagtggagggggtaagaagggagagaaaagaggggaatgaaacaagatgaggggaagagtgagaaaatgggcaggagggaaacaggtggggaggagtggaaacagtaagaaaggaagctgaggagatgggggaggaggtgaggaagaaaggaagtgggggaagggcagaagggaaaaggggtggcagagtaaaatgggctccgtcagagaggaaggggctacgaggggaaaaaggctagcagtgagggagaggaggaggactgcaggcggaagagcgcgcgcgttttaggatccccgactcagaagctctgcctggcctcaggatgtggcgagcctcaagaggtaagaaggtcctcgcctctggctggcaggagtgcggagaggtggaggggagttcgagaacgtagaggcaggttcaaggacaaaggcccaccttgtgcgggccaaccaagtctccctagtcctcttcgctagggccccaggcccttggcgggcggatggagagagatgccccaggaaaaagcccagcactgctaggccctacgtgcacgggcttggagacggggcgccagtaccaggcagggcacaatgaggcttggggcccttacagtcgctgcaacctggaggtaccgaaccggggactccgacctgacatgcaggcgaggctgcgaggtccagagcctggacctggttcctag

SEQ ID NO: 19189 - DNA, 1474 bp, Artificial sequence
  DNA replication origin
cagcgcctactcctacaacagcttccccgcctacggctatgggaactcggccgcggccgccgccgccgccgccgccgccgccgcagcagcggcggcctacagcagcagctatggctgtgcgtacccggcgggcggcggcggcggcggcggcgggacctccgcggcgaccactgccatgcagcccgcctgcagcgcggccggaggcggcccctttgtgaacgtgagcaacctaggaggcttcggcagcggcggcagcgcacagccgttgcaccagggtactgcagccggggccgcgtgcgctcagggcaccttgcagggcatccgggcctggtagggacggggcgggtcacgcggcgggcaccccagcgcagcctggcgccgcgggactgaagctcgagaagggcctgacctaaaggtcaggtcccctcgttaaaaaaatatgtacgtctagctcctcagggcttcggatcgcagctcactcgaggcctggggaaggggactcaggggcgaggaggatgactgggtccggtcgccaggactgtctctgaggcagaaacgccggctgggcgccggggaggacgatggccccgaccctggcagcgagaggagaccaggaggctaggaccctggccgcgcttggttcttccaaagcgagaagggcttctctccctctgcctttccgcggcctccgcgaagcgttggcggggagcccaaggacataacaaattaaaagcatgaaggagagaaaaatgggggtcgtggcttgagaaattccaggccctaccgatcctctgccccctttgcgggcctggagcgccatagcacagtcgatttcgtttcgcagctgtctcccctccgcagcagatacctcggtccagatctccggattgtcgggggacgcaggactcttcgaggaaaaccagccgaatgagatcaaaagttgggggtggggggaggctgaacaaactcaggacctggtggcccaccggaggtgttaccgggtttcctttctgtttcgtattctgtattcagcacatgttatctatctatctatctatataactataaccacacgccgtgtagacacccgctgccacacactacaggagtcaataaacaaggtgcaatattttcaaatcgttggccggctacagaatttgtttagccccaaagagtggagaggaatcctttaaatagggcgggaaggggaggaaaaggtgcgagggggaaagccatcctccctgggcgatcgcaggcctggtctcccatgagccaggccccaggctgcaagtctgatctcttcggggctttgttcattaatttctgtttactcttgagggctggacaggtcgaaggctcagggccatttgaagtccctggctttgcagttccccctaagttttacccagatgcttggactagctgtatagacctgcgttcggtcaagtcttgcactctgccccacctcgagggt

SEQ ID NO: 19190 - DNA, 816 bp, Artificial sequence
  DNA replication origin
ctccgcggggcttctcccgggcccgcgcgcgccgccggagtgacttggggccgcgcctctgccagggtggggccgggtgggcaggggcttccctggagactcgcgcgggagaccgggaggtccaaggccccagtcgcagccgcccagttcctcgctttctggttcaggacgccagtggggacttcccgggcgcctcctcccaactccaggggcccgagccctggaaggactgtgatttgtccgcgactggagagagttcagtgcagtctggccccgcgcgagagggaaggatcctttctaaccgcccggagcagcgcaggtgccacggggcggggcgctcaggggccggccgctgcttcccaggcgggcccggggcggtcagagccagctgggccgggagtgccccggcgagccccgggagagcctagccgactctgcaggtgagagtccaaactgcaagagccagcagtcctgacggtcgcggaggtaggacgtcctgggtggggcttaaggggcacggggaggcccctgcagggagtcctggggaggcgtcagggggagggggcactgatctctaaaccacgtttgctttgttgaaaatatgcccccaccccaccccacctagattgtaagtaacagattaataacagctgaggttttccaaaggagcgattagtaaacttcttattggagtgggagatacatatagaaaaccccaagcgtacggctcgctctatctttataaacggaacccttccatgctaccaactcccagatgaagaagcagaacattatcagtccccggaaagtaccccc

SEQ ID NO: 19191 - DNA, 1647 bp, Artificial sequence
  DNA replication origin
gaagcttctaagatcaaaggggaaaaggtgggatgtaggcgctagcaacgcctcagggcggaggaatgacaggcgacttcgctaatactaccggctgatttttcgtacgtaaggaaaggggtgggtctaacttggcgtctccaccaatggttgcttggggggcgtgtccgcggggccaagcgggagccggaggccccgggctctctgggccgcgcctgaggcggacactacggggccggggggcggcggcggcagtggtggcagcggcggcgggggtgggcgccgcagctggcccgggtggatggagttggaggggcggggtgctggcggtgtggcgggggggccggcggcagggcccgggcggagccccggggagtcggcgctgctggacgggtggctgcagcggggcgtgggccggggggccggcggcggggaggccggggcctgcaggcccccggtacgacaagatccggactccggcccggactacgaggcgctgccggctggagccactgtcaccacgcacatggtggcaggcgccgtggcagggatcctggagcactgcgtgatgtaccccatcgactgcgtcaaggtgagacctgcacccggcttcgaacccgacctggggctgacccgacccctgggtcttgtccggagccaggatcccggctgagagccggagccgacatgggttccttcctggctcctgccactaccacatgattcgaaccgacactccattcaagcaaggtcccagctgggagttgatcccagtcaggaaccaggacctatttctaaccgtcagtgaaatctgaatcgggactcaggatcgaaaatctgtcagccaaagccctggaccccacctgggactaaacaggaatagggtgggatggggtatcccgaagctcaggtaagtgctactaactcgattaaggtgaagccaactggcgtgaaccagaccctgaaatggatctaacggcttgagatgttttctgggctagtgcttttacaaactccttgctgtatcttcccttactgacggggcaggaacccgaatctgggatctctcagctagataaaggacttacatgttaaatcttaacacatgagtgattggaaatcattgtgcagtgagaatgcagaattccagactggaagtaatgtgggaaagatcgtattcaggaataggtttcagtttctctgtgaagcaagcatgataccccacctatttcctgaacatgaaaattgagctgggattaggactgtatgttcagggagcacatcagcctccaaacaagagagatgaaactgatagcatatttctttggccacctgaagttggcaaaaagggagaagttgcctagaaaggaagtgtgacggtattagaaagtagatgtaagtatgaagaaaatggaaagagatcaacaagaggacacgattcttgtgaaagtaaaactaattgcattcacaaccaagcaggatgatttatgtgtactgaagtcaggtccttctgaagaaagctgggtgaagaaagaaacagattattgttctttacagttcttattcttgtacattagtaaaggtgccagccattaaaggtgaggactgaattgagggagaggtaaactagaggggactgttgatatg

SEQ ID NO: 19192 - DNA, 872 bp, Artificial sequence
  DNA replication origin
cccagtgacagccggggcccggggaacctcattcattcaacacttgttgggtttactctgcgaatgtggatgcgaggctcagtgccgggcgctggggcctgaggagcaccgagtccggccagagggcccaatactccagacccgaccagagtctagcgggccgccgcggtcccccctggaggtgaggcggttcccagcccgcatgtcgcaacggcttcccggacaggctgcgggtcgcgccagccagggatgaccggcccaggccggccccgcctcacgcccgcgacgagatcccgcgggaacacggctctccggggccagggccgcccgctctccagccacgcgtctcagaatttgaggagcgcacgggagcgcgggtcgtaacggcgcccgtcagcagtttgacgttgaaggcctgtcgccgccccgcccccgacgcgatcccgcgcacagggaccgcagctctgcaggcgctagtgaggggcccgaagtcggcccctagagtccctgggcgcgtcgctctttctgtagccaatcggggaccgacgtggtgcgggccaatggccgcggtcaaagtatcaagagtggttgagcctatcaaagttcagccttaagtttctcccgcccttctaaaagtcagaggcgggttgatcgcacatgtcggccaatcagtgaccaataaacaagaagcttctaagatcaaaggggaaaaggtgggatgtaggcgctagcaacgcctcagggcggaggaatgacaggcgacttcgctaatactaccggctgatttttcgtacgtaaggaaaggggtgggtctaacttggcgtctccaccaatggttgcttggggggcgtgtccgcggggccaagcgggag

SEQ ID NO: 19193 - DNA, 931 bp, Artificial sequence
  DNA replication origin
ccagccgccccgtccgggagggaggtgggggggtcggccccccgcccggccagccgccccgtccgggagggaggtgggggggtcggccccccgcccggccagccgccccgtccgggagggaggtggggggggtcggcccccctgcccggccagccgccccgtccgggaggtgaggggcgcctctgcctggccgcccctactgggaagtgaggagcccctctgcccggccagccgccccgtccgggagggaggtgggggggtcagccccccgcccggccagccgccccgtccgggagggaggttggggggtcagccccccgcccggccagccgccccgtccgggagggaggtggggggggtcagcccccctgcccggccagccgccccgtccgggaggtgaggggcgcctctgcccggccgcccctactgggaagtgaggagcccctctgcccggccaccaccccgtctgggaggtgtgcccaacagctcattgagaacgggccaggatgacaatggcggcattgtggaatagaaaggcgggaaaggtggggaaaagattgagaaatcggatggttgccgtgtctgtgtagaaagaagtagacatgggagacttttcattttgttctgcactaagaaaaattcctctgccttgggatcctgttgatctgtgaccttacccccaaccctgtgctctctgaaacatgtgctgtgtccactcagggttaaatggattaagggcagtgcaagatgtgctttgttaaacagatgcttgaaggcagcatgctcgttaagagtcatcaccaatccctaatctcaagtaatcagggacacaaacactgcggaaggccgcggggtcctctgcctaggaaaaccagagacctttgttcacttgtttatctgctgaccttccctccactattgtcccatgacc

SEQ ID NO: 19194 - DNA, 974 bp, Artificial sequence
  DNA replication origin
cccggacggggcggctggccgggcggggggccaacccccccacctccctcccggacgggccggctggccgggcggggggccgacccccccacctccctcccggacggggcggctggccgggcagaggggctcctcacttcccagtaggggcggccgggcagaggcgcccctcacctcccggacagggcggctggctgggcgggggggctgacccccccccacctccctcccggacggggcggctggccgggcggggggctgacccccccacctccctcccggacggggtggctggccgggcgggggggctgaccccccacctccctcccggatggggcggctggccgggcggggggctgaccccccacctccctcccggatggggcggctggccgggcggggggctgacccccccccacctccctcccggacggggtggctgccgggcggagacgctcctcacttcccagatggggtggctgccgggcggagaggctccttacttctcagacggggcagctgccgggcggaggggctcctcacttctcagacggggtggttgccaggcagagggtctcctcacttctcagacggggcggccgggcagagacgctcctcacctcccagacggggtctcggccgggcagaggcgctcctcacatcccagatggggcggaggggcagaggcgctccccacatctcagacgatgggcggccgggcagagacgctcctcacttcctagatgtgatggcggctgggaagaggcgctcctcacttcctagatgggatggcggccgggcggagacgctcctcactttccagactgggcagccaggcagaggggctcctcacatcccagacgatgggcggccaggcagagacactcctcacttcccagacggggtggcagccgggcagaggctgcaatctcggcactttgggaggccaaggcaggcggctgctccttgccctc

SEQ ID NO: 19195 - DNA, 1176 bp, Artificial sequence
  DNA replication origin
ccaaactcgccaaatcataagaatcacctagggcaactgttaatatacaatgttacaaattcatgtggaaaattcctggaccctttcctttaagattctgatttcagggggcctaggatgggattcaagaatctgcatttttttttgtttttgttttatgagacaaggtcttgctctgtcaccaaggctagagtgcagtggcgtgatcatggctcactgcagcctcgacctcccgggctcaagccatcctcctacctcaacctcccaagtagctggaactataggtgcacaccactacacccagctaatttttttgtattttttgtagagccaggatttcatcatgttgcccaagctggtcttgaactcctgggctcacgtgttctgcttgcctcagtctcccaaagtgctggaattacaggcatgagccattgctcctggccaaaaatctgcattttaaatgaacgctccaaatgacttcttttgatcaggctggggaagcaatgccatagtgaatccatgtgtaagattaaaaagtaagcaccataggaagggtcaacgtgccctgtttgatttcagtatttgtaaaaggggaagaagaagctgagggtgaaaggaagttaggtgcaagttggccacagggagatatactggggtttcatagagaactgaagaatacatgtgtatagacacagtttataagaatggacttttactgtgacaggcctagggggtctggagggctctggttcacacctcaggatgcctggagcccctaggttttctgatttcctatctccatcctcactggcaggaaagcttctggaactaggagagggttgcttaagaggatgaggggtcaggaccagagatggaggaggaaaagaaagctcacaggtggctgggcgcagtggctcacacctataatcccagcgctttgggaggctgaggcgggcggatcatgaggtcaagagattgagatgatcctggccaacatggtgaaaccccttctctactaaaaacaaacaaacaaaaatagctgggcgtggtggtgcacacctgtagtcccagctactcaggaggctgaggctgaggcaggaaaatcgcttcaacctgggaggcagaggttgcagtgagccgagattgcaccactgcactccacccagacaacagagc

SEQ ID NO: 19196 - DNA, 1238 bp, Artificial sequence
  DNA replication origin
ggagaccggcctggccaacacagcgaaaccccgtctccaccaaaaccagtcaggcgtggtggcgcgtgcctgcaatcgcaggcactgggcaggctgaggcaggagaatcaggcagggaggttgcagtgagccgagatggcagcagtacagtccagctttggctccgcatgagagggagaccgtggaaagagagggagacggtggggagagggagagggggagggagagggggagagggagagggagttctagtacttttatcattccattttttaagattttaaaatctttttttaagttttaagattaaatcattgctctgtctggactttagtaaatcaggtttgaagcagggattcaactttatttttccagctggttacccagtggcctatcatttattgagtaaatagccaacttccacccttgtgttttaaaaatgtaactagggccgggcacagttgctcatgcctgtaatcccaacactttgggaggccgaggtgggcagatcagctgacgtcaggagtttgagaccaacctggccaacgtggtgaaaccctgtctctactaaaactacaaaaattagctgggcatgatggcaggcacctgtaatcccagctactcaggaggctgaggcaggagaattgcttgacgccgggaggtggaggttgcagtgagctgagatcatgccattgcactccaacctgggtgagagtgagactccatctcaagaaaaataaaacacacaattggggcagctactgagtatgtttctttgtcttgctgcttcataggactttcccctaatatccctctcatgctgatatccctctgttggccattttctccccaggttttctaaagtgtgacactatatacctgagccctcagcccttaaaaggctcacctccatagcagtgactgatacattttgggttgggatatatgtaatgttgaaaaccatctgatggaagtatcaatttagttctgactgctgacagaaattgagagaaaatgttgaatagttttgtcatgccacaaaatgaaaagcctgcccaataataaaattagattgactaacagcgagaaaaccagcaagaacataagctgagggccattggctggataatttggtatctacattggcatatgggctgatatttggggactttataacattcctttaaaagaaaacaagaggacatcacttttcacattagatctcccactcaagagga

SEQ ID NO: 19197 - DNA, 1113 bp, Artificial sequence
  DNA replication origin
tattccacaaagccgccattgtcatcctggcccgttctcaatgagctgttgggcacacctcccagacggggtggtggccgggcagaggcgcccctcacctcccggacggggcggctggccgggcagggggctgacccccccacctccctcctggacggggcggctggccgggcagaggggctcttcacgtcccagtaggggcggccgggcagaggcgcccctcacctcccagatggggtggctggccgggcggggagctgacccccccacctccctcccggacggggcggctggccgggcagaggggctcctcacttcccagtaggggcggccgggcagaggcgcccctcacctcccggacggggcggctggccgggcagggggctgacccccccacctccctcccggacggggcggcagagacgctcctcacctcccagacggggtcgtggccgggcagaggcgctcctcacatcccagatggggcggcggggcagaggcgctccccacgtctcagacgatgggcggccgggcagagacgctcctcacttcctagatgtgatggcggccgggaagaggtgctcctcacttcccaggtgggatggcggccgggcagagacgctcctcactttccagactgggcagccaggcagaggggctcctcacatcccagacgatgggcggccaggcagagacactcctcacttcccagacggggtggcggccgggcagaggctgcaatctcggcactttgggagtccaaggcaggcggctgggaggtgtaggttgtagcgagccgagatcacgccactgcactccagcctgggcaccattgagcactgagtgaacgagactccgtctgcaatcccggcacctcgggaggccgaggctggcggatcactcgcggttaggggctggagaccggcctggccaacacagcgaaaccccgtctccaccaaaaccagtcaggcgtggtggcgcgtgcctgcaatcgcaggcactgggcaggctgaggcaggagaatcaggcagggaggttgcagtgagccgagatggcagcagtacagtccagctttggctccgcatgagagggagaccgtggaaagagagggag

SEQ ID NO: 19198 - DNA, 948 bp, Artificial sequence
  DNA replication origin
tctctgcccggccgcccatcgtctgagacgtggggagcgcctctgccccgccgccccatctgggatgtgaggagcgcctctgcccggccacgaccccgtctgggaggtgaggagcgtctctgccgccccgtccgggagggaggtgggggggtcagccccctgcccggccagccgccccgtccgggaggtgaggggcgcctctgcccggccgcccctactgggaagtgaggagcccctctgcccggccagccgccccgtccgggagggaggtgggggggtcagctccccgcccggccagccaccccatctgggaggtgaggggcgcctctgcccggccgcccctactgggacgtgaagagcccctctgcccggccagccgccccgtccaggagggaggtgggggggtcagccccctgcccggccagccgccccgtccgggaggtgaggggcgcctctgcccggccaccaccccgtctgggaggtgtgcccaacagctcattgagaacgggccaggatgacaatggcggctttgtggaatagaaaggcgggaaaggtggggaaaagattgagaaatcggatggttgccgtgtctgtgtagaaagaagtagacatgggagacttttcattttgttctgcactaagaaaaattcctctgccttgggatcctgttgatctgtgaccttacccccaaccctgcgctctctgaaacatgtgctgtgtccactcagggttaaatggattaagggcggtgcaagatgtgctttgttaaacagatgcttgaaggcagcatgctcgttaagagtcatcaccaatccctaatctcaagtaatcagggacacaaacactgcggaaggccgcagggtcctctgcctaggaaaaccagagacctttgttcacttgtttatctgctgaccttccctccactattgtcccatgaccctgccaaat

SEQ ID NO: 19199 - DNA, 1016 bp, Artificial sequence
  DNA replication origin
aggcgtggcggcgcgtgcctgcaatcgcaggcactcggcaggctgaggcaggagaatcaggcagggaggttgcagtgagccgagatggcagcagtacagtccagcttcggctccgcatgagagggagaccgtggggagagggagacggagacggagacagagacggagggagacggagagggagagggagagggagagggagagggagagggagagggagagggagagggagagggagaggctaattggcaactattatttcaccgtgtggagactttctttttttttttttgtaaatctttttttggagatagggtcttgttttgttgcccagtctggtctcaaactcttggcctcgagtgatcctgctacctcggcctcccaaagttctagggattaaagatgtgagctgctgcacctggacccagtatgaagccatttttctaaagataagcaactctttcagctttgtttcaacttatttttcttgttaaatattcaataccatttttatttttaaaggcataaacactatgatctcatttttgtaaaaagtatttctctacccttctatctgcaaatttatttattcaacaaatgtttattgagcatctactatgggccaggcattgttctaaccatcggggcagagcagtgggaaaaacagacagtaatccttgccttcatgcaacttacattttagtgggggatacagacaaaaagttaaaaagaagcgaataattgcagagaatgctttcaggtaatggtaagtattacgaagaagaattgagtcaaggggtagagaatgataaggggtagcagctgggaccgagtttaggtggaggggtcagagccagctactgcaagatgtatttgagcgtggacttaaagtgtgggaagaggaaagctgtgaaaaactttagaagagcattcctggcagggaaaggagaaaatgtaaaggccttgggcagaaataagcttgatacgttcaagagtagaaagaaggacattgtgac

SEQ ID NO: 19200 - DNA, 1313 bp, Artificial sequence
  DNA replication origin
gggggccgacaccccaacctccctcccggacggggcggctggccgggcggggggccgacccccccacctccctcccggacggggcggctggccgggcagaggggctcctcacttcccagtaggggcggccgggcagaggcgcccctcacctcccagacggggcggctggccgggcggagggctgacccccccacctccctcccggacggggcggctggccgggcagaggggctcctcacttcccagtaggggcggccgggcagaggcgcccctcacctcccggaccgggcggctggccgggcggggggctgacccccccacctccctcccggatggcacggctggccgggcagggggctgaccccccacctccctcccggatggggcggctggccgggcggggggctgaccccccctcacctccctcccggacggggtggctgccgggcggagatgctcctcacttcccagatggggtggctgctgggcggagaggctcctcacttctcagacggggcagctgccgggcggaggggctcctcacttctcagacggggtggttgccaggcagagggtctcctcacttctcagacggggcggccgggcagagacgctcctcacctcccagacggggtctcggccgggcagaggcgctcctcacatcccagatggggcggtggggcagaggcgctccccacatctcagacgatgggcggccgggcagagacgctcctcacttcctagatgtgatggcggctgggaagaggcgctcctcacttcctagatgggatggcggccgggcggagacgctcctcacttcccagactgggcggccgggcagaggggctcctcacatcccagacgatgggcggccaggcagagacactcctcacttcccagacggggtggcggccgggcagaggctgcaatctcggcactttgggaggccaaggcaggcggctgggaggtggaggttgtagtgagccgagatcacgccactgcactccagcctgggcaccattgagcactgagtgaacgagactccgtctgcaatcccggcacctcgggaggccgaggttggcggatcactggcggttaggggctggagaccggcccggccaacacagcgaaaccccgtctccaccaaaaccagtcaggcgtggcggcgcgtgcctgcaatcgcaggcactcggcaggctgaggcaggagaatcaggcagggaggttgcagtgagccgagatggcagcagtacagtccagcttcggctccgcatgagagggagaccgtggggagagggagacggagacggagac

SEQ ID NO: 19201 - DNA, 1153 bp, Artificial sequence
  DNA replication origin
ggggggggtcagcccccctgcccggccagccgccccgcccccctgcccggccagccgccccgtccgggaggtgaggggcgcctctgcccggccgcccctactgggaagtgaggagcccctctgcccggccagccgccccgtccgcgagggaggtgggggggtcagccccccgcccggccagccgccccgtccgggagggaggtgggggggggtcagcccccctgcccggccagccgccccgtccgggaggtgaggggcgcctctgcccggccgcccctactgggaagtgaggagcccctctgcctggccagccgccccgtccgggagggaggtggggggtcagccccccgaccggccagccgccccgtccaggagggaggtgggggggtcagccccccgcccggccagccgccccgcccaggaggtgaggggcgcctctgcccggccgcccctactgggaagtgaggagcccctctgcccggccaccaccccgtctgggaggtgtgcccaacagctcattgagaacgggccaggatgacaatggcggctttgtggaatagaaaggcgggaaaggtggggaaaagattgagaaatcggatggttgccgtgtctgtgtagaaagaagtagacatgggagacttttcattttgttctgcactaagaaaaattcctctgccttgggatcctgttgatctgtgaccttacccccaaccctgtgctctctgaaacatgtgctgtatccactcagggttaaatggattaagggcggtgcaagatgtgctttgttaaacagatgcttgaaggcagcatgctcgttaagagtcatcaccaatccctaatctcaagtaatcagggacacaaacactgcggaaggccgcagggtcctctgcctaggaaaaccagagacctttgttcacttgtttatctgctgaccttccctccactattgtcccatgaccctgccaaatccccctctgtgagaaacacccaagaattatcaataaaaaaataaattaaaaaaaaaaaaaatagttgccaattaatgactctaaagaaaaaaaggcggccgggcgtggtggctcacacctgtaatcctagcactttgggaggcccaggcgggcagatcaattgaggtcaggagttcgaaaccagc

SEQ ID NO: 19202 - DNA, 969 bp, Artificial sequence
  DNA replication origin
catttaaaagatggaagcaaaaactttagttgctatcatcgtgcctgaaaaacccaagaaaattgactcctatagtcagtaggaacaaatccccaaatcaacagatatcgtgcaagggcgggtgacctcatcgccccgacggcagccgggccggggctgggggttggcggggggtgcggggcggccccggtgcaggcaaaagttcaggggccgaggcgcggccgtgcagctgtcgtccgaacccggccgggtccggggcgcccgccgcaggcggtgaaacgcaagattcaggccctgccgcagcaggcggacaaggcgaagactgcgcgcagggcctgcagcggcagctggactgggggcgcgagcggggggcgcgagcgagcggcgcgagaaagctgaaggcgatgtggctgtcctcgactgacgcatccagctctttttttttttttttttctttttttattattattattatactttaagttttagggtacatgtgcatccagctctttaaggaggagttggacggggctcgggaacgactggtcacggccctgcagaagctagaggaggggggaaaaggctgcagatgagcgtgagagagaatgaaggtgatagaaaaccgggctatgagggatgaggagaagatggattcgggagatgcagctcaaagaggccaagcacactgcggccggaggctgaccgcaaataagaggaggtagctcggaaactggccatcacagagggcgaactggccagagcagaggagcgtgcagaggtgtctgaactaaaatgtggtgacctggcagaagaactcaagaatgtcactaacaatctgaaaccgccggaggctgcattggaaagtattctgacaaggaggacaaatacgaagaaaaaattaaacttctgtctgacaactgaaggaggctgagatccgtgctgaatttgtagagataatggttgcaaaac

SEQ ID NO: 19203 - DNA, 926 bp, Artificial sequence
  DNA replication origin
agcctgggcaacggagcgagaccccatcttaattaaaaagaaaaaaatacaggagagactgggctgctttgaaaagtggatttgacgggaatgtggggtttggagagatcttatgttttccaagactagaaaaacattgtggttccgttcagccctcccggaaaatacgtaggggacttaaagagcggaccgagtacctgtttgtttccccatcccttagccggcagggctctggcagcgccctgggagaacttagggaagggccttctcgcagcggttaccggaagtgacgcattcattctcgcgagaacaaagacgcgcgagcatcggcggcccggaaccggccttggaacaactgtggaacctgaggccgcttgccctcccgccccatggagcggcccccggggctgcggccgggcgcgggcgggccctgggagatgcgggagcggctgggcaccggcggcttcgggaacgtctgtctgtaccagcatcgggtgaggcggggcgtgagagggagcggcggtgggttggagcggcggtgggtttgagcgtctgtggaacacagggctgacagtgtgggatagatggttggtgggaccttgggcagtatttgggggccagtgggcttgtgtgtgtgtattagagagaaagatactatgcctgtgtgtccaaagttgtatttgaggtactgggcatagatagagctgttgcggggaacttgggtatgactgtcaggctgtgaccaggtgtttagtgagtgtgacagtgcgtgtgtgtctctgtgaatgtggagtgtcagggtgtgtgaggcagatgcacgtcacagtgtgtatgtaggagcacgaatgtgtgagaagagggctgaaggggactgcctttgggaatgtgtgcgtccgtgtgtgtgtgtgtgtgtgtgtgtgtgtgtg

SEQ ID NO: 19204 - DNA, 1177 bp, Artificial sequence
  DNA replication origin
ctcccggacggggcggctggccgggcggggggctgagccccccacctccctcccggacggggcggctggccgggcgggggggctgagccccccacctccctcctggacggggtggctggctgggcaggggggctgaccccctcccacctccctcccggacggagcggctggccgggcggggggctgacccccccacctccctcccggacgggacagctggccaggcggggggctgacccccccacctccctcccggacgggacggctggccgggcggggggctgacccccccacctccctcccggacggggtggctggctgggcagaggggctcctcacttcccagtaggggcggccgggcagaggcgcccctcacctcccggacggggcggctggccgggcggggggctgacccccacctccctcccggccggggtggctgccgggcggagacgctcctcacttcccagacggggtggcagccaggcggaggggctcctcacttctcagacggggcggttaccaggcggagggtctcctcacttctcagacggggcggccgggcagagacgctcctcacctcccagatggggcggcggggcacaggcgctccccacatctcagacggtgggctgccgggcagagacgctcctcacttcctagatgggatggcggccgggaggaggcgctcctcacttcccaggtgggatggcggccgggcagagacgctcctcactttccagactgggcagccaggcagaggggctcctcacatcccagacgatgggcagccaggcagagacactcctcacttcccagacggggtggcggccaggcagaggctgcaatctccgcactttgggggggccaaggcaggcggctgggaggtggaggccatagcgagccgagatcacgccactgcactccagcctgggcaccattgagcactgagtgaatgagactccgtctgcaatcccggcacctcgggaggccgaggctggcggatcactcgcggctaggagctggagaccagtccggccaacacagcgaaaccccgtccccaccaaaaaaacacgaaaaccagtcaggcgtggcggcgcgcgcctgcaatcgcaggcactcggcaggctgaggcaggagaatcaggcagggaggctgcagcgagccgagatggcag

SEQ ID NO: 19205 - DNA, 1259 bp, Artificial sequence
  DNA replication origin
ggtcagccccccgcctggccagccgccccgtccgggaggtgaggggcgcctctgcccggccgcccctactgggaagtgaggagcccctctgcccggccagccgccctgtccgggagggaggtgagggaatcagccccccgcccggccagccgccccgtccgggagggaggtggggggctcagccccccgccgggccagccgctccgtccgggagggaggtgggggggcggtcagcgccccctcccggccagccaccccgtctgggagggaggtgggggggtcagccccctacccggccagccgccccgtccgggagggaggtgggggggtcagccccccgcctggccagccacccggtccaggagctgaggggcgcctctgcccggccgcccctactgggaagtgaggagcccctctgcccggccaccaccccgtctgggaggtgtacccaacagctcattgagaatgggccatgatgacgatggcggttttctggaatagaaaagggggcaaggtggggaaaagattgagaaatcggatggttgccgtgtctgtgtagaaagaagtagacatgggagacttttcattttgttctgtactaagaaaaattcttctgccttgggatcctgttgatctatgaccttacccccaaccctgtgctctctgaaacatgtgctgtgtccactcagggttaaatggattaagggcggtgcaagatgtgctttgttaaacagatgcttgaaggcagcatgctcgttaagagtcattaccactccctaatctcaagtacccagggacacaaacactctgcctaggaaaaccagagacctttgttcacttgtttgtctgctgaccttccctccactagtgtcctatgaccctgccaaatccccctctgtgagaaacacccaagaatgatcaataaaaaaaaaaaaaggcctgtgattccagctacttgagaggctgaggtgggaggattgcttaaggccatgagttcgagaccagcctgggcaacacagcaaggccttgtttcaaaaacaatttttttaaagtagctggatgtgatggtgcacacctgtagtcccaggtactcaggaggctgaggaaggaggatcactagagcccaggagttcaaggctacagcgagctatgatcacgtcattgcaccctagcctgggtgacacagcaagacctcatctcttatagaaaaaaaaaacaaaacaacaacaacaaaaaacccactaaattctttactttta

SEQ ID NO: 19206 - DNA, 1507 bp, Artificial sequence
  DNA replication origin
agtgtcaggagagcgggcaatccgtcttcagtggttttggtcagcaggccacaaacagggttgactattcccagacgggtcgtgagtggtacaagatgagtgatccctccagggtgtgactgtagggatgagctcgccctcagtcccagacgtcgcgactgttggcagtggatcaattcacaacagcctggcgtagcttcaatttcggctccggaatcgccctttgctgtgtcatagacctgaggctggactggaccgctaggcgcaggactgcagggccggccgggtgggcggggcacacccagtgcgcatgcgcagcaccccggcccggaaacagcgcggggtccgctatggcggcggcagccgagggcgtactggcgacccggagtgatgagcccgcccgaggtacccggaatggatggggaggaagcgtccggtggggggcctggggctccgtctcgggtgggcgaggttgagtgtgtggtggctcacctggcaggaacgggctggtgagaggagtgcacttgtcgctgcgcgcgagtgtttgtcctgtcagggtgactgggatggtgccaggatgagcgggggtgccgggtatgggcgaggggcggtgcgagggaggcgagttgatgtgtcagatgggcagggacgcagtgaaggacttgaaattatggcagatggagaatggagccgacttgatggaatgaaggcaagtggagggatgtcggaacaggctgctttggctggattagcaccgggtgtaggcgggacacttagtcattctcccttggcccagacgatgccgccgtggagacagctgaggaagcaaaggagcctgctgaagctgacatcactgagctctgccgggacatgttctccaaaatggccacttacctgactggggaactgacgggtgaggcggggtctgggttgattcgggtgcggtttggcccaggaggcctgggagatggttagcagcatcagtctgcagctcccttcctaccctgcatgccctgagacaggcctgttggaagttgggggaggccatgaatgggagagaaagaaaatacaactctgcaggcctctgtaacatagactaatgagaaaacaataacaaaaaagagttcatatccagcaacagtaatcaagaagtgcttccttggggaaagtgtattttgagcagggttgtgaagggaattattggtggaaaagggggagatgatacaactagcgaatgaggtggtatgtgcaagcagtgtgtttggctaaagcagaagatgtgtttaccgggataaagagaaatgaaattgaggaacggggagtgacctgcagatttagggacctattagtttggtctgaggatttgataacccatcctttgggacatgactagtgtttgatcgtttccaagtggacacatgacctatgtgtggaggaggatcagaaagtgaagtatgggcagggcgcggtggctcatgcctttaatcccagaggccgaggctggtgg

SEQ ID NO: 19207 - DNA, 1309 bp, Artificial sequence
  DNA replication origin
ctgtccccctatctggtacctctgatgccttgacagatatggaggcagcagctggacacctgggtcctgtatgccgtctcctggggttcatcttcaggcttcttgggttggggctggagaggccccgtgctggagatggtgcagactctcagcgtcccgtgtggggaagggggaccactgtaggcggggttgtcccaggctccactccccagcttttgcagctcctgcccctcaggacttcccacagcattcatggggaatgaggtgggggggcccggtaccccaggtgcccactctcagctagaggaagagggagcagaggcacagcccagcctagccagcagagagcaaatggaaaggcgtctgagagcagctgtttccacacagcctgggctcctgccttttgtagggggatgtctgtgcctgctggggagggagcggatgagaggacagggtggggaaggaccatcaatcctgtcaggagctctctctccctcttgctgcaagccccaggggaccagccgaaaggggaggtgagggaactggaaggtgggggtttgaagaggggagaggggagaataggaggaggatgtggagctgggagtggaaggagaaacgggaggaaaaggcgatgctggggatgaagggggctgctcgcagatgtgcctggtggagagatggcccagaggtcggacagaagagacgatcaaagagcaatgggaggagctgagacaggaggggagccgggggcctgtgctgcgggtctgagctcatttccactaaaagctcctaaaagggccgacatggattggggtggggaccaaggctgggaggaaagctgaagagcgctgtccccctcccaggctctgcccacctcccaggttcagtcaatgggtctgaggctcctgtcctgtctcaccttcagctgtcccctggtggagcagagatgggcagctcccttccctcacttcaccctctcagccgtggggaaaggacagtggcaggaggaaccccagtctcacatacttcagggcactgagggggcaggggagaggaccacagagtcctaggttgtctatattccttgttctgaagcttgcctttccatggcttacaggtgagatacaccaagagagggggttccttaagggtgtggggctcagtatgggaaaaaggctaagacctggttgggaggctggatcggagaacaaaggacaaggacagtatgatgtgggactaaaggggagtggatatctggacccagctgagctgggaaccttttcccatggctctgcttagtcctgggcct

SEQ ID NO: 19208 - DNA, 677 bp, Artificial sequence
  DNA replication origin
ggcgcgggcttggggatgggactgcccgcccgggtcctgaacaggatgcgtgcgcgcaggcacacacacaccagccagcctgtgtgtgcggccggagtccggtgcggtcccgggtgagcagcgcgtggctggtgggcggggcagagccattgttcgcaggcgtaccgagtcccccgcgctcgcccgggagggaggcggggcttcccgcgtcccccaagctccagatcctggggtggctgccacgtctccctgccacgcgcctggggggacggaagacgggacggagatgttagtggtgggcgccccccgagggttcaccactgtttcctgagaaacttccccagtgcccacccacccgttctccgtgtgcccgagggccggtcctgggctaggctccgcgccccagccccaaaccgggtccccagccccttccagagagaaagctcccgacgcgggatgccgggcagaggcccagcggcgggtggaagagaagctgagaaggagaaacagaggggagggggagcgaggagctggcggcagagggaacagcagattgcgccgagccaatggcaacggcaggacgaggtggcaccaaattcccttcggccaatgacgagccggagtttacagaagcctcattagcatttccccagaggcaggggcaggggcagaggccg

SEQ ID NO: 19209 - DNA, 976 bp, Artificial sequence
  DNA replication origin
acttcaaagcccacaagcacaaggttccaaagctctcaacccccagcattgacagtcctgcatctcagtacccccaggttcttcccagcccactaggcctgaagcaaccaaagagaaatgcctgagaaaaaccccaaccgggaggctgggaggggctggtgtcctctgtaagatcctaccttattaaaagagcagtgagtacctggaggactaggtcaggaggacagggaggctgcttaccccaaagccaggtgtagaacttgcaggtaggaatcaaagtgatcccatacagggctcccaagtgtagcagagacataaggatgatgtttctccagacatattcaaccttggggcttgggccttccttatccttgtaggtggggtcatatatatcatcttttatatcagggcgaatgtcgtcttccaagtagaggggcatcgtctccaacttatctcctccattctgcaggaccctggagggaggcgctgtaatggtggtggtggtggtataggagctagagatctggaagggggaggaagaggagagtcaggagaagagacacgtggaggcagctggggccactccgctctctaatcacgctgggggaagggtggacagtacggacccttccgcagcgccgtagttcactgagggtagggtgtatccgagacgcaacggagaaaagttccctgaaactgtacagatacattaggggcggagggcgagggggacgaggggcgcgaaacctatcgggaggcggcagtaggaaggagaagtaaagcactcacatccccacgaagacaaaggaaaacccgcataattcataaaagcaccagcacgaccggatttttctttaaagcttaagaaactaaagttggagactcaagtccccaaattacaatccacattcccaactcacggaaggcagcacaactcgaaaaagatgaccaagtcctccgcggagctctcccctct

SEQ ID NO: 19210 - DNA, 1386 bp, Artificial sequence
  DNA replication origin
gactttagtaactgggtgtccagagaggagtgaccgggagtggccgagcggttgcctggactcagcttctgattctgcagccgggagtcagatgcaggcccaagggtcaaggggagttgttcagcgcctggaatcaccatgcactgcgctgtgggccgcacgacactcctgctgtgttctcccaggcaccaacaggcacttggaaggcaactttgctcctctggccacccggagacctcttggcggtgcagatgggacaaactgggggcctgtcagaacacccactcattccaggaaggccaggcaccagcctgctctgatgaagtcaggatagtcagccatctctttaacaggaaattgttgggcagatcggggagagctagtcgaggaacgaaactgtaagctggaccaggtgtgaggaggggaggtgataaaaggattatagggtgggggagcagaggctaagtgagaattgggacctggctcagcctggcgaggagcagcctggggagaaggggggaggtcagatgagtccatagaaaagaaggattcagaggactcggaacttggggtggagaccgaaggaacagaaaggagagaaagaagaaagatttgggatgagtcacattgggagcagagactagggagggaccaatgtgtaaaagaatgcctggacgtcaggcacctcagaccatttgcccattttatgacaagaattatctagaacttgtaggatggagaactcgaaagtgccgttttctggctatttggaatcattgtcgagtttgtattggggccaagcggtgttgcagaagaaaataagacacttaggttttaggtcaggtgtgagttgaagaggttttaagtttttgagaacacaggctaagggagaagaaggaggaatggagggtggaaggttgcccatagtgaaggaggtaaacccgagaaaagagagggtagaggcacggagaaggcgggtggggcagcggggggcattgagcagccctgggctgcaatgtgggtgagcagccaaagcaggtgtccccgcaattgacttgtcaccaagggaatgtgggtgaatgaccaaggcaggcatccccgtggtgatcagacaccaatggagtgtgggtgaataatcaggcaggcgtccccacagtgattaaacaccaagggaagactgtcttcccgagtccgtgactgacgctggagttttgggtccacagataaaatgtgtctccttatctctactagagaggaaaaagaacgggaattggaaggacagggagattgaagggtagtgagagaggaagattgaagggtagcaagaaaggctggagaagagtgaaaagaccacttacccgatttgaaattggcaagatgttcctt

SEQ ID NO: 19211 - DNA, 1114 bp, Artificial sequence
  DNA replication origin
gagcccatggcgcggggggccactcttctgacgcaagggtctgtggggccgcgcaagagcctggggcccccgaccttccgccgactggccgtgggctggccgcagcccagctcggctctgtctcgagttccttcgctgttcaaagcagagtggcggccacgttcgggggcactggggcgaggggtcgggcgtcggacggggccctgggtctgtaccgtttcgggctcgccggaggggctgcaggcagggcgggtttcgggttccaccgccagaataattcggcagttctggatggggcccaggaatttgtatttgtgaccagtttcccaggtgagtctgaggtccgtggtcctctgacctcgtttagggatgagatctagtcctcagagcccggggcggggctgccgaggacaccggcttgctcttcaggcagctctggcccgggtggcgggaggaggcggccggggctgggatccgggcgcaccctggaagctccagatgggcgttggagacctagggcgagatgaaccgaggaccgtccatgtgtgtgggtgccgctcaggagcggggaggtgggggtgtgggtggacgggcgtgttgagggtgatggattgctgcagggagtggactcagcctactgggaggagtgggagaggggaaagaactggaggaacggcggagtccgttggccttttcttggagagctggagatggaggttggttctgtcctgatgggggcaggaggacgggtaatggaggctgccatgctcagtgaagccccatgggggcagccatgctttgtggtttgtggtgaggcactgagccccaggatactgactattcccttttttggagaaagaggggaagaggatgctccttaagagcttctaggggaacgtttctgcctccagggggtttaggtgaactgtgtgtgtgtgtgtgtgtgtgtgtgtgtgtgtgtgtgtgtgtgtgtgtgtaggttagcatattggagattttcaagggagttcgtctccaggacacttccctcacccctacatccacacacagtatcttatgatcctcttggtttctcttgggcctcaactccccaaaaggggggcactcttgtcag

SEQ ID NO: 19212 - DNA, 1282 bp, Artificial sequence
  DNA replication origin
aatcccagctacttgggaggctggggcacgagaattgcttgaacccaggaggtggaggttgcagtgagccaagattgcgccactgcactccagcctgggcaacagagcaagactctgtctccaaaatatgtatatatggatggaacactgtgacatgttggtcttcaggggagcaaagctacagaggcctgaatttcctgaggtttggagggcagtgaagagatgaagaggacagctctgaccattgttggagcacagtgagctcgtagggcagaggggtctggctgcaacagaaagtatctggcaacaacaggaggtatgaggctggaacccaggggaaagaaacagggttgggctcagcttcatagaggtagtgaggattaggcagatgagaacacccaaggagaaaaggagagaaaagagggtttgggcggggggtgggtaggtgtgaacatgcctgagagtcatttcccaggtaaataggagtggaactgagggtggagttcagtgagagggagggaggaagaacgacacaggaggggtgggaaccagggtcacctctgaagaggggtttgagtgcaggagacaggagtgaggccctagtgaaggtcattagatttggggatgaagaggtcagcagaatggtaggggttagagggtgagttggtggagaggaaatgggggcatagcaagtataaactgctataggttatccgttgagaagtacacagaggactggagacaggttggggttttgaaaaggaaactgcagcaacgcttttttagccaggggaagaggagcaaatctgtagacagaggacataggagaaggggccactggagagggggagatggaagctaccagagagagcagacacttgaaggagctgagttccagagggaaggggggacagggcctgcaggaggttgaagcctcagagaaatggggagaaggaggggaagtcatggggttcaacctggacccaggttttgatctcctaaaagtaagagtaaaggttgaggttggcttcttcaggtaagggtggccagggtgaggctgggctggacggacacagagggaggggtggaaatgctgttgtgaagaatttgtttgggagtcaaaggagcaatctaggcgtgtgatgtactgcctggtagggcggaggtgcagtgcagctgggctgggatttgccttgggtgaagctgatgctgcatcttggggcaggatggagtaagcaagccatggtctgacctgattacaaatgataggctcagtgccagg

SEQ ID NO: 19213 - DNA, 1179 bp, Artificial sequence
  DNA replication origin
tacttaatttctccctcaattttctcatctgaaaaacaggaataatagtaacactatctcatagggttgtaatgataatgaatgaatatatgtagaagatttgaaaaaaaaaacagtgtctagtacatagaaagtgctgcttaagagggtgctgccattgccagcatcctcctcctcctcctccttctcctcctcatcatcatcactccttacagcctccagccagaagctaaggacttacaggcaggtgaaagaaagtcctgaggcatattagtcatttagagaaggtcccatggggaaaggcaagagagtagcatccaaccagtggttctcaacaagggacatttttgctgtaacagtgtcctggaggaactactgactttttttgtgggggtagggagagggagtaatggggtggggcagcagggaattactgacttttggtggcaggagccaggagtgttaaaagtggccattcatacccagttgagagtgtggagaagttcagctggaaagggtgcttgggatttaactcctcagaagagttgcagctccagctattggagcagctggaaaaggtatggaaatgagcttggaggtctgtgaggggctggaaagaatcagacttaggagggggcaaggcttcctggaggggagggtgggggtgaggcaggctgagggatctggacagtaagcaggggcaatggagagccatggggttctggatgagggacatgatgtatttggggagatcactcatgcagccagggaagaggttgggttagagagggataaaaagggggcccatttggggattgggaacaacccctaaggcggtaaagacacctgggctggtctggggtttggggttggagcatgcagataaaagaccacactgaggcacatttgaaggaaaactccgtgtgaagatgaaggagtggtgagtgggctgggctggccctagcaggtgcatgacctgggaaggaattctgggagagatgggctggtcggggactcaaggtgatcacagtgaatttcaggtgatgctggggagtctgggagctgtctagtgaggggctagtgatgccagttggaagttaggactgaagtaccaatttgggagtcatttttccacatctattgacactcaatacacatataaaatagggccccttggag

SEQ ID NO: 19214 - DNA, 1144 bp, Artificial sequence
  DNA replication origin
cccaggccctggaggagcgggccgggtcagctgctagaagtgggtttttttggtggggcgagaggcacgcgtaggtgtaactgagaggaagagcctgggccatgccacctccctctcccactaaaacgtcaccttagctcagtctgtcttggacaggcaggatagggcagcagctggggaaacagaaaagcagaacgaacgtagaaagggatggctgtgtgtgtgtgtgtattactgtccagggtgtggactggacgtgcgtaaattaatgcatgtgaggccgagtgcctaagaatgtgtgagcaaggcagtatgtgtgtgtgtgtgtgtgtgtgtgtgtacgtgtgtattcagctctctgtgtgtgggaatttaaatggtaaagcaagagactgggccctggcttggcctgctgttcatgttcgacttcgggtagggcctttatccgccctgtgctgtgttgcttgtctctaagtcgagataagggtgtctgtttcacaggatgagtgtgagtcttcagtcggtggaaatgtctgactgtaagtctctaagtatgcaatgtcgttgttaataattgaatgcgggtgtgttgggtgactgtgtgtgatgatgtggatgtgtctgggggcctggggctctttgtgggtcagtcacagtgggtgtctgggtgagaggacaaggctgttagtgtgagctctgtctgctgtgagtccatcgtgagtggacaggtgtgtagatgtgtgtttggcagttgtattgaattatgtggatgtattggtgtggatccggaagtggtgagtgtctttgtgtgcttgtgaatgtctgtgtccttatcattgtgtgtaactatttgcactggattcctttgtgtctcttggggtacatctgagttgccctggagactgagatggagtgtgtgctggctctgtggggggtgtgtggggatggggttggtgtgtctttgtgccctgtgtgtgtcccaacatgagtgtgactgaatgtgcctttgtctcagtgttgtgagtgtgatggcatgtgtggtgccttggtgtggctgtgtgtggctgtgtgtgactgtgtgtgacagcgtgtgtgtgcgtgtgtgtgtttggtgagcggctctgctgccttaagcacctttcga

SEQ ID NO: 19215 - DNA, 1253 bp, Artificial sequence
  DNA replication origin
gccgggcaggagcctttgtttccccagaaagggacttcccagcccctttagcccctgtccctttgaggagggggcggcgctccccgggcctctgctgaggggtccctgcgctgggggcgccctcggctctgggggggcccccgcccccgcccccgcccagcccctccctggcggccagataccaacaagcacgctaaactccgggagatttacagcgggcggcggggcggcggggcggccgccggtgagatatctccaaacagcgcactaaccactttccattttatacctcaccagctttatagcatcttaaggatttctgtgcacggctggcttcccgcccagggaaaaaaacccagccttgtaaataaatactaaatatatatgaacagagacgacagcgagcaacgcggaggaggggaagggggtggggggctgcgggtgggggggcgcgagggtgtgggtagcagccgggggccggcgaccgatggggagctgggggaggcggggatatattggggtgtccgagacaaaggcgacagtgagaaagcagttgacaggcagagtgagggaaactgagccggcaacagaggtggaggcagagagaaacagagatggaggctgagcggaagtgctccacagacagccagtccgtctgtgtgtgtgtgtgcgtgtgtgtgtgttcgtgcttgtttgtgtgtgcagggagtcctgcttattaaagcttaaagagaagcctccccaaccctcccacccatccgtctcacagttctgaggggattgggactcagggatgggctacccaccccactctgtgtgtgtgtgtgtgtgtgtgtgtgtgtgtgtgtccctggggtttggggatacttggtgtgggtgggactgtgccagggtggcattggggtgttggtgggcaagtgggccgaatgtctgtggtgtgtgcagggtgggtctgggttaggatacattggaggtgtgaggaggcaggtgagttctgggagtgtgtgcagctttgagattgatcgtggagggctgagcgaggcataggtgttcaggtgcctttgagtgtcgtggggtgggtaggggcctggggagagatgagtcaagagggtcttctctcaagatgggccttggaaggactatgtgttgggcctgaaagcaagtgtccctttgtgtgctgggagtgtcagggttaggttttgaggtgatgccaggtggtctcacctcctcttcctcatcctccctccttgagt

SEQ ID NO: 19216 - DNA, 920 bp, Artificial sequence
  DNA replication origin
ttctgggagtgtgtgcagctttgagattgatcgtggagggctgagcgaggcataggtgttcaggtgcctttgagtgtcgtggggtgggtaggggcctggggagagatgagtcaagagggtcttctctcaagatgggccttggaaggactatgtgttgggcctgaaagcaagtgtccctttgtgtgctgggagtgtcagggttaggttttgaggtgatgccaggtggtctcacctcctcttcctcatcctccctccttgagtctttccagaggttctggaattttgtctgcaatggccctgcagggagggtcctggtgctgactgagccccagcactagccctgccccagctctaaggtctctggacaggagccagagttgaattagggggcaggagagaccatcctttcccctctcagggggcccagcgatcccttctcattccccccttgtcttcgatattaagtattcaaacctcatttacatccttatttttcaatttgctgccacagtagtttaatttattcgatataatttctttttctgaggggacattaatcattgccctgtgcttttgggcgcctgtgggatctctgcgtgtatatatgtgtgtgcgtgcgcatctgtgcgtgtgtgtgtgtacgatctatgtgttgggggtagctgtgtgtatctgtgagtgtgcatctgcatccatgtgtgtctgtgccggtgcatatttgtgtctgtgtgtaaacaaggcaccacgtagtctgtttgtgagtgttgtgtgtgagaaacatgggtctttgttgggagagtgggggcaggtgtgtgaaggtaagtgtgatgggagtgtgctaacctggtcaagtcctcttcttcagaatcctcctggcccttccaggatgtcaacaaggaggggaggtggcaaagtatttg

SEQ ID NO: 19217 - DNA, 1137 bp, Artificial sequence
  DNA replication origin
atttagtaggggtcatggagcaagccacaccctagagataggtgtcgaggaaaccactcagtaggtaagaaatgagaggacctgatttgggccagtggcaatgaggacaaagatattccaggacctgacagttgattggatgaggaggaagtgaggaaaccataacacgtgtcaaggacatgggctttgggggcaaaacaagtagatgattcagaggctctataattggaaagatgaaaggaggaaggaatgaggaggaaggtgaggggaggggagcctcatagactctaagctctctgagggcagggactgcatccttcacttggtatcctcagtgcctggcacagtgtctggacataatatgtgctggagaaatgtttgccaaagaaatgaacgtgttcagtcttgcacatggggaaattgatgtaccagctgaaacaggcaggtggaaatttaggcttgtcatttgggagatagagttgggggttagaaatctcaactgggtatttatttccagagagatgatgggtcaagttgggtttgacagtgcttgtgaaagggcagagaggggagggaagaggtttgagggaagaatggttaggcagagttaaatttaggggttgggagaaagcagagggctgtggaaggccagatcaggaacttcagagatggaggaggggaagcagggaggtgcaatgtcatggaaatcaagaaaggagacagtttcaaggaggaggggtggagctgctgccaaatgccgcagaggtcgaagagaagaaataccaagaggagcctgtggatttgctaattaggagaccggcagcagtggccccacctggttagggcagggggatgtgaggggaggctactctgggcaaagaacccaaggacaggaatatgtgctttctgtgtgtgcacgcgctctccactctgtcctccttcgtggacctgggaaatctgtgacaatcaagagtaaaaaccaaaacaaaaacacggtggtgggatgggggtggtatgcatgtcagaactcagagtttgcaagtcaggaaatgaataacatgggggtggaagagacagctcagagaaagggggagtagtttttagtgccaggcgaatcttctttgagggtggagagtg

SEQ ID NO: 19218 - DNA, 1416 bp, Artificial sequence
  DNA replication origin
tgagtggtcaactggaagaaggtggggagtagaaggtggtgagactggtgaaggtggtgggagtggcagaggtggcgggattggtggaggtggcgggagtggcagaggtggtggaggtggcgggggtggttggagtggggaaggtggtgggaatagtggaggtggtgggggtggtgggagtggggaaggtggtgggaatcgtggaggtggtgggggtggtgggagtggggaaggtggtgggaatcgtggaggtggtgggggtggtgggagtggggaaggtggtgggaatcgtggaggtggtgggggtggtgggagtggggaaggtggtgggaatcgtggaggtggtgggggtggtgggagtggggaaggtggtgggaatcgtggaggtggtgggggtggtgggagtggggaaggtggtgggaatcgtggaggtggtgggggtggtgggagtggggaaggtggtgggaatcgtggaggtggtggtgggggtggtggaggtggtgggactagcggaggtggtgggagtggtggaggttgcgggattggtcaaggtggtgggagtggtggaggtggtgggaatggtggaggtggtgggagtggggaaggtggtgggagtggtggaggtggtgggagtggtggaggtggtgggagtggggaaggtggtgggaatagtggaggtggtgggagtggtggaggtggtgggaatagtggaggtggtgggagtggggaaggtggtgggaatagtggaggtggtgggagtggggaaggtggtgggaatagtggaggtggcgggagtggggaagatggtgggagtgggggtggtggtgggggtggtggaggtggtgggactagtggaggtggtgggagtggtgcaggttgcgggattggtcgaggtggtgggaatggtggaggtggtgggactggtggaggtggtgggagtggggaaggtggtgggagtggtgaaggtggtgggagtggtggaggtggtgggagtggtggaggtggtgggaatggtggaggtggtgggaatggtggaggtggtgggactggtggaggtggtgggagtggggaaggtggtgggagtggtggaggtggtgggagtggtggaggtggtgggagtggtgaaggtggtgggaatagtggaggtggtgggagtggtggaggttgcgggattggtcgaggtggtgggagtggtgaaggttatgggcgtggtcagtgtggtgggattggtcaaggtagtaggagtggtgaaggtggtgagcaccgaatgctcattacttttccaattaatccaaataagagcagtctgcagttatgttctgggctccttgccaaagcgaccctcacatcgtggccatttggcactaggagagggtgcaactttgagggtgtggagccttgaaggggtctcctgcc

SEQ ID NO: 19219 - DNA, 1865 bp, Artificial sequence
  DNA replication origin
tgaggccaaatctagtggaagccctctccctgtggattttgactgccaggtgccctggtctgaccagggaatggctgtgggaacgggggatgaggtcagagaaataaagggggcccttcagtgagagaattagagggaaagggggtaagaatagttaatggagatttggtggtggaacttcaatgagtcagggaggggaagggcagctacatggagggggtgcaaaagggtcagggtagttaatggaggaagccagggagagggtcttgggggctaaagggatatggtggagggtcgggtgaagggcttggggaatccctggtgggagggacagtgtagctaatatggaaggctggccggggagaggagaagtggggctgtcagcatattaactgcagagacttcccctattaagagggaagcacctggtgaatgaaaacagcagcctggataacactgacaggggtcccgggatggatatggggaaccccccaggacagcatggggcacagtcagttccatccagcgtctccccctgtgaatggggacctctcagctggcaggaagaccccaagcttctcctgctaagggaatgaggtggacagtttctgctgccccaggcagagaaagaagataaagacaggagccatggagaactggggctggggtttaattctgctgggttgggcgagggagaggggctccaaacaggagcctcccccaacccccgccccccgggcacatgtgtccaaatccaccctaactctccacatgctctgcagtccgccactagctggtccacaaagcctttgcgaactgctccttcccctcactcaggggtactcaaagcctggtgcccaaagagaatggagcccagcaggtctggtctgcagcaggtaaagagaagggacaagaaattcctgttgcagaggcagagaaatcatgctccaggagtcactgtgctgccggtagtcatggtgaggtccagcatgaaagccttagagaaaatggcattaaatctggcttgatgggctttaagaccccaacccgcagaaaatgggatggggtaaggctaatggtggcatctgaggtagaagaaagagcatggacaaaagagggagagaaccagctcatgttcctatttgcttgggtggggctcaggagggatatggaggggctgggggaggcatcattgagaaccaaggacagaaaagcaggttgagggggaagggaacttcctattgtgaagggcttgttctgtctgatagcagaaggaatacaggctttattgtttgaggagtggggaaccatagatggtttctgaactatgggagaagaagttacagttgtggtttgggctgattacactgatagaagaatgcaggaggaaaaaggataagtggggggtcacgacaaggatgacactttgccggtgtgcctggatgtcccacctcctggaggacatcaaagaggtgtgacagaagaagccctctccaaggaggcctcccactcttcatcacttcgactcctgggttcctttacctcaggatttcagctctgaatgattctctcctccagaccttcagcaaacaactggaacctctgctagccaccccatgtttcctgcagtgacgtgttaagagggtagtgggcttcagacctgtggatatgtgggtgagggcattattgtagcgatgtgacttattggttctgtcctttccagctgagtggtcaactggaagaaggtggggagtagaaggtggtgagactggtgaaggtggtgggagtggcagaggtggcgggattggtggaggtggcgggagtggcagaggtggtggaggtggcgggggtggttggagtgggga

SEQ ID NO: 19220 - DNA, 1256 bp, Artificial sequence
  DNA replication origin
gcttaatcttatgcaccattaagcactcagcagcaagcccgtcctgttcatatacatcatccacgcttaataaacataatgatgacataagatgtaattctagatgaattttcattttatagggaaatggagaattcctgtagaagggaaaaaaagtaaattatctgggaagtgcaaaataaatgatgttgctcccagagatgaatagaggtgttagagggagagagggagaggaggaaggagggagggcgggagcgaggggagagagagaaggagagacacagagacaaggagagatagagtcacacagagagacagagacggggcagagaacgccacgcgggtgtgggggtggggcgggctgcggcgacgtgggggaggaacccggagggctggaggcggcaggcgtctgggtgggagccgcggggggccggggccagcgtttggcggaggggccgagggctgggggcggcagcggcccgggccgaggcgagggtgacggtgacggacggggccgggccgggcggctcattcatcaagggaaggatcaggggcccgcggagtcacttacgggcggaaattgaattctgatgaaagcgcggagaggcgagggcgggggagcgaggaccaggctggggcagagttcccagacttgctaagggggagggagaagggcccgcagagactttccagattgaagtccacgcctccttcctgtctggaacccacccgacccccacccgcatgcccagtcacctcgcagggctgtcctgcccggcttgggaaagtggtgaggcctgaggatgaggccaaatctagtggaagccctctccctgtggattttgactgccaggtgccctggtctgaccagggaatggctgtgggaacgggggatgaggtcagagaaataaagggggcccttcagtgagagaattagagggaaagggggtaagaatagttaatggagatttggtggtggaacttcaatgagtcagggaggggaagggcagctacatggagggggtgcaaaagggtcagggtagttaatggaggaagccagggagagggtcttgggggctaaagggatatggtggagggtcgggtgaagggcttggggaatccctggtgggagggacagtgtagctaatatggaaggctggccggggagaggagaagtggggctgtcagcatattaactgcagagacttcccctattaagagggaagcacctggtgaatgaaaacagcagcctggat

SEQ ID NO: 19221 - DNA, 748 bp, Artificial sequence
  DNA replication origin
aagtttgtcaaacttgggctttgatttttcgccctgatttccctcttgtggcgcgctctcgcacgcgctcccatataatttatgactgcctctggtcctgatgacagattattaaaagtagaattagtttttcgcgcagaatttttccactgggaattgggaaggcagcgctctccgcggaaggtctccggcgaggtctccattactaatagaagttttttgatggggtgaggagactaatgatttgaatttactgtggcagcagtcacgtgggcgggaaggcatcagccgaagagacaagaggttaactttctccctgtggagaggtttattggattgtttagcagcagaaggataatgtttttgtcatagactgctggtgccgcgctgcagtgcggtggccgccagcgccgggagaggggagaggggagagagggggaggggggagccgaggagaccgcgagaggcagacagaccgacggacgcaggccgggcgagccagggagctgcaggggcacccgcacggagacacagcgaggcgggggagggcgacagaggcagaaggactccagagagaccgagacgcagagtgacagacagaaagacaacagccccaagaaacactgcagagagaaagaggggagggctaggggagcgacaaccagagggcagaaccacagcgcgacaggaaggagtgcaggggcgggagggccgctcccagctgccagggactagagagaaggcccag

SEQ ID NO: 19222 - DNA, 1140 bp, Artificial sequence
  DNA replication origin
cttaggtagggaacccccaaaccctagccccagcgccctgcagtttctcgccaggccagaaggccggtggggcggggcctggggcgaggggcggggccccagttctgcccgccccttcgcccgccgctgcgccccgcccgccgcggccctagccggccggcccgccccttcccccggcccgggcacgctacagtaatccagaatgtgtatttctgcagatgattaaatcaatacaatcctgacaggacttgttggaacatgcttctttattttgcgcaattccttccccgcgtcgccggcatttatcacctgctcggctgtcagcgccgagattgtgcggggcgagggcggggcggggtggggtgggggagggaagctccggggggtgggggctgggacccgaggcgggcggagcggacccgccgccaccctgcacccacgccaacgaataaacttaggggtcgggctgtgcccccaacccacgcactgcccgcgccagtctccctctgtccgggtgggtgagggcggaggacagggagacgggatggggccgggaggcaggggaggccgcagaggcaggaagccaagggccgctcccgtacacccctttacacgccgagcccccactcgaggtcacagccccggcgaacgagactcccgcgaatcctctcaccctcctctgaccttggtccctgcagctggggacccttggaggtgggatgggggagaggagaatggggctccactgccctggggatcggtggacctcggcccgctggccagggagagaaggatggaggtttgaggcaggaagaggaggagaagggtaaagaagagcagggggaagcggaggacaacttggaggaagcaggggaggagggaggagagcagaaaagggaagaggaaggctggagggcgaggaagaggaggaggggaggcaggcaaggaggaggacgaggaggaaggctcggaagcggtggcggccggtgacaggtgcctcgcggtggcggccctcggcagacgtgattgccgcggtggctgcgcgccggagcgtgactttacaactaatcctgtttgtaagttattatttatcttcaggaaagtttgtcaaacttgggctttgatttttcgccctgattt

SEQ ID NO: 19223 - DNA, 886 bp, Artificial sequence
  DNA replication origin
ttgcgcaaaataaagaagcatgttccaacaagtcctgtcaggattgtattgatttaatcatctgcagaaatacacattctggattactgtagcgtgcccgggccgggggaaggggcgggccggccggctagggccgcggcgggcggggcgcagcggcgggcgaaggggcgggcagaactggggccccgcccctcgccccaggccccgccccaccggccttctggcctggcgagaaactgcagggcgctggggctagggtttgggggttccctacctaagaggtgctgcggaagggctgttctgccctgcgggcacctcctcctgcacccgcccccgaggtggccttgcgaaactgctgcacagggcggtcaaggaatcctcgagctggacgcgaaccctagaggcggagggtggggggggtttgttgggggtggaaagaagatggagaggaaaggacagcaggagagcgaaggccgcagatgggccctccttctacctctagaatgttttctggtggtttcccgctccatcatctcttgccagaggcaagacctcagctgccatgcttcagggtacttggaggaggtagggcactccagtaccacctcctggcgtggctgacctgtgcctgcagctactttggaggtagaggtggggatagatgagagctcatctcagctaacactttgtaggtgcttcatgaaggttaaacaaaccaacaaacatatctctgacttctgttccataatccaggttgagtcccgaggtgaggacttggggtaggattggatcttcatttggttgaaaacctggccctttggaaaaaacaaacaaacaaacaaacaaacaaaataaacttacggggtggagggtggcaaagggatgg

SEQ ID NO: 19224 - DNA, 1004 bp, Artificial sequence
  DNA replication origin
cttttcctcccatttgagtttcaatcactcgggctgggctgggcctttctcaagcaaatcctatgaaaaacagatcatcctgaaggtcactgagaggtttaggcagtcccgagcctggtgtggggagtttactcgattatttcctcccagctaaagtcaacagctaacactggggagtgctcatgcatgccaggctctgtgctaagccggtgacccgcattatctcataaaatcatcatttcagcaagcccatgagtcttttacaaatattctccccattatacagatgcaggctcagctcaaggaaatcagcccacttggagagtgtggatgaggtttgggggcctgtgatggtaggtgggctgatgaaggggatcaggtcgggggtggggtgggtgggaatggtagggagaggactcccctgaagcaggcctggcagggtccctgaaagcctgtcccagtgtgagctccctggagggaagctgatgtggggaggggatgtggacagtgttctctatgggaattgtgcatatgaggacaggcaggagatccggggacatgtatgggagaatagacactgaggacactaatatgggaaagggtatattgtgggtaggatctgaataagtcaaaagggatgcgtgtggggcagggcatgaggacaggtatagggagcaggcaagtagagatggggtatgagggctggtatgtggagttgtgggtgtggatatgggcatgtagggacaggtatgagtgtcaggagcatgaaaagggtgtaacaagacagttgatggtgacactaaattccaaggagttggccatatctgtgttggctgctgtattccccagatccaagctcagtgcctagcacatggtaggggcttaggatgtcgttgtgtaatgactgaatggggaaagagcttggttgggtacaggtgttcttggttaggaggtgggcagatttaccatgagatattctaggagagtttgggttctctattcag

SEQ ID NO: 19225 - DNA, 1060 bp, Artificial sequence
  DNA replication origin
cccagatccaagctcagtgcctagcacatggtaggggcttaggatgtcgttgtgtaatgactgaatggggaaagagcttggttgggtacaggtgttcttggttaggaggtgggcagatttaccatgagatattctaggagagtttgggttctctattcagcctctatgcactgggccaggctggggaatggtcagacctgcttccctggaacaggagaccagcccgggatgggagcccagtaaactgggggctgcaaagcattggatgatgtcgggcgggggtggggtgggggtgggggaggactgccgtcagattattaatggccatgcgttgactcaattaaatccagcctgcttttgttggcaggcctccgcaattatgcatctcattatgggcggccgcccaaatgcatcctgggaggagaccagaactccaaattaacttttcctggcgctgcgggggctggttggccggcactgcctgcatggcagccaatcagtgttggctccaaggggggcggggtcataagaaggacgaaggtgtggggagggtaggctgccctgcctggggtgcgtctagaaaagatgggctaaagacctgcatgttcatccagaataactcccatgcccaagccacccccatctccagcaagaagccggcctaggtgtttgggttcagtgttggagggagtcttgtccttatccctcagtggaggagatcaccccaacagggagtacagagaaccaggtgcccttggttcccccacctccccaaccatgcacgacccaaactaaatcaacgtgactccagaattacaccaaacccacaagaaccaagggaagtaaggggtagcagtgtagagagggcgtcctgctgggtgtggggaggccactcgggaggttggccagattggctcctgccctgctgggtgtcgcctgtgtgtcagggtgtgtatgtttgtgtgtgggtgtgtgtgcgcaagcctgctcacagcctgcctctgcagttacaccaccagtataaagcgcttcattaacctgtcaatcaaagcccgcttct

SEQ ID NO: 19226 - DNA, 1143 bp, Artificial sequence
  DNA replication origin
gccagcccatcctccggacccgcagaccgaggctcgggccgcacgcggccgccccctggtggacgtcggcgtgtcgggcacggcgcagtcacccggccccggcggaggcggcgggtctcgtggctctctcgggcgcccgctcccccgccgcctcccccgctccctccactttggggataatttaacatgtttcacactaactttcccgtaatggccgcggagcctttggaaatgcagcctccccgctttatcggcggctgcgctaatggttatctcgcagccgtgcccccggcgatcctgtcaggagtaaatagaagctgacacagtcatttgcttaaatcttctccacacttttgccgcatttccctccagaggatacccctgaaacaacaattatttgaaatgtcacgcgtttctgcccctgggctaccaacaaatgaacattaaatctattaacagcaaaaaaaaaaaaattaaatgtttacttttcggaaggtgtgaggggcctgagtcagggaggggcctaaggagagtcagggacagggacagaggcagagacagagacagggacagggacagagggagagacgggacagggacagagggagcgacagggacagagggagcgacagggacagagggagagacagggacagagggagacacaggacagggacagagggagagacagggacagagggagccacaggacagggacagaggcagagacaaagacggagggagagacagggacagagtgagagacactgataggggcaccagaggcagagagggaggcagatgccaggcagacagctcggagcagggggacagggtcctgggaaaggggagagacagacagacagggatatatccatagatatatagatatatccatctccctatctatctatctctctctcaaatttagagagagagatatacgtacatgcgtgtatatatagagagagcccaaagacacatagaacaagacaaagcagaaattgaaaccaaaaaaagaccactgtggaaaaacagactccaagacagaagggaggaggccaaggcagatgcccagagtatgagacaccaaaaaaggcagaaagaggcaccctccacccataaatggcagccctcccaccc

SEQ ID NO: 19227 - DNA, 1421 bp, Artificial sequence
  DNA replication origin
ggcatctgacggccccggcaccaaacctggggggctgcaggggggaggggaggagcagggaggcctctcattgtgtgagggaaattttatttttaacagatgctaaggcagatggcacagaattaacagaaaatgggagaggaaagagaggaagaacattactgactccggagagagtggacattaaaaaaataaagaataagggaatgaaaacaagtttaagtgctctctccgggggggaggggggaggggaggagagctgagaggcagagagggacggagcagcgtggtgataaccagaggcgtgaaattacaaaagtaaaatttgtgggactcgggaggggctgagaaggccccagtttcattgcaaaactcactcagaaattactgatgtgatgtttgagcttttatcattaataataatctagaggggaggggaagacaaaaggacttgtgggctgggtgggggggtgttgaggccccaggaaaaaaggtgcgtgcgctgtggggcaggggtgagagaaaagtcatttctgtgacagaaaaaagaaggtaagagagaaaaactcagggagacacagcagaaactgagacaaatggagagacagaggcagaagaaaaggaaaggaaggagagaaacaagagagaaaaaggaggaagaagagaagctgtgggagaagggttaagatagaaggggtggggggaatgaaaggcaactaaagagagatccggaggtggtgcggcggagacaaagagacagagacggcaaagaagacagagatgaggagagagacagccaggaaaactgtatcagaaacagagcaagacaaaacacacagtgcactcaggggtatggaaactagccccaaagccgagtgaacaatgggcaaagtgaccagaagcagggggcccagagaaacacggcaggaagacaaagacaaaagaacagcggcccggacagacagagaaatggatgaagaaaaagaaagagttgggaagagtgagagacagagtgagtgaaaggcagaacaaaacagagagagaacaaaaaaaaactcagacagactttgaacaagacacagaaagagttggaaagacagaaatttcaagagagagagaaagagacccccacaatcaggatgagaaaggtgagactcagaaagggagaaagaaaaactgagcctgaggcagagagagacagagaggctgtgggggagacgacagagagggcaggaagggaggaagggatgggagacaaagaggaatggccgtttatctctcctcccaaattaattgaggctacatcagcctgagccactaaaacggagcgattatgaatgggttagtcacaggtggagttaaaggccttcagagggatattagccaaaattgagtggcttttaatttctttctaacgagag

SEQ ID NO: 19228 - DNA, 905 bp, Artificial sequence
  DNA replication origin
agaaagatagaaatttaaaaaagataaatagtgccattaatctccaacatttctcttccattatccttgaaaattaggagttatttttgttcagatcttcatgtaattagctccctccacttgattcactagccagaaaatgaccatgttcagaaaattaaaaatttgtcattaagtggaatttaacataatatcatttatctttatctattccccagctgacagcaggaagccttggctgccttaccggctggtgtgtcagagtagagagggactgcttggggagagacactgggggagacagagatagagaccgagggagggagagaaggccagtgcagagggggccaaagccaggcgaggagggcaggcaggaggcctccggaactgagagtcagccagggtggggaggcagaggaggctgagggcagaagagaggaggcgcaggctgctggggtcagcaggggtgggtgtgggcctgagagcagggcagatgggaggggctgagggtggaagaggaaagccagagaggcacatcaggagcagatgcccaaagacgaaagtagctggctagtagggctggggtgaagaagtgacttggaggacagaaacccagcagaaggaaagaaacctccagaaaagggggctcaaggtgggatgggagaggtaggggacaccctgtccattgggaggactgaccacaatctggcttcaagagaagacagagagacaaaaagagatagtcagagagccagagaggaggtgacaaggcattgagagccaggaggcagaaatggagtgaggtggcggcaagtgtgagtcagagagagagaaacagacagaaggggctccgggaagtcaccatgtttgagaccccagacaagctcttgaacttctctggaagg

SEQ ID NO: 19229 - DNA, 1300 bp, Artificial sequence
  DNA replication origin
caattttttttatctttaccataatgtgaaaatgatacacattcagtagaaatcatattttgagtacccataataccattttgtttttcactttgagtacaatattcagtaaattacatgagatattaaacactttattataaaataggctttgtgttagatgactttgcccttaccctgtaagctaatgtaagtgttctgaacccatttaaggcaagctaggttaaagtaagtttcatacactaggctaggtgtactaaatgcattttcaacttaggatattttcaatttgtgattggtttatccgatgtaaccccattatcgtcaaggagcatctttatgtagttagacttcctcagcccttggtgctgtgagggaaaaagaaggagattcagtcttggggctcctgaaccggaactgactgaggaaaggatatggagtgtctaggcagtggccacagtgtgctggcccagactggctagattattggggttgggggaggacgaggcttcccggaggaacctggtgggccccctccttcccagaagcagcaggcagcctagggtgggcctgtggggccatgtgcaggggaagggccatttgtcccaagacaatggcagagaaggggtctccaagtggctgtcgagagccaatttgtagtggtgatggccgaggttgctctaaaggctgggaacagctggagctccgggtgactgatgggtgggcccaggagaggggccattggtcttgcagacacaaaggccccgatggtgtgcgggtggggcccgtcaaaatcattaagtgcggaagatgggagccggcagacttcagatgggaccagtgggttgggggaagaggtcaggagcctgcccctccctccctgcagcccctcctccaccctattcctgctctggaaacttggccactcacaccccgattatcatctgatttgcatagacacccccaccccagccttccagttccctcggctctctccgtgggagttcaggctccagtcctatttgagcagctctggctttgggggctgaccaaggcgagatgcctccccgtgcctcttgaggggatttgcccaccctcaggcactgcattctccagtcggtgaccccatccacttctcagggaacagggcattctaatttcagggacctccccctccccagtttcgaagggaagaaactgaggcccagggtgctgatttctcctgtctctcggcgccttctctgtgtgggaaatgcttctcccgcttgcccttccctgagggttgggagacagtgacacc

SEQ ID NO: 19230 - DNA, 969 bp, Artificial sequence
  DNA replication origin
ccacttcttcactcacacatagtcactctcaatagccgagacacaagccaaagtcataaatatccctcagctgattcactcattcacgaagaagtcagctgatgtgcaggagtagggaatgcaagatgaagaggagacttgcttgttttgtaggagcacacaggattcacagctatgaagagagaatcaatggtgaaggcacaaaaggaatgtcagtcaagtgagggatacagataggagtagggggccgaggggagcctggagaagctgggccccaggttatgccacagaggatgggtaggagtagggtaggagtagaggaggaggaagttctgttgtggagctgggcatggccaggggttcctaggcagaaggcaggggaggcctgcctgccccccttaagccctggagcccagagggagcccacataggcctcttatttggtggggctgagtagggggactcctcattttctcttacaggctctgcttttttcataccaactctggggctgctggtagagcaggcaaatttcccctcatatctcaagaccaagaaatggagtaggaggctggggagagggacaggagagcagatattgggaggaggaggagtcggggtaagcagaaagccagctgtagaatgaatgagggcatctgagatgaatggggcacttgctgtctgaaggggctgggctggaggaagatgagaactacagggctatgtatttgtctggggatttgaaggacagggtgtgtgtgtgtgcgtgtacaggagggcacaagtgttcatgtgttcttgggccagtggccatcactacaaggacatgctggcaggcatgaacatacgtgtgagtgtgtgtggatgtgtgcccctgggtatctgagtgtccatgtgtgaggaaatgcagaggggctacttgtgcacatgtaggcctttcccctacagccagcactcctccccacaccc

SEQ ID NO: 19231 - DNA, 693 bp, Artificial sequence
  DNA replication origin
gtgtgttgggaatgtatgtatcttcctgcacctatgtgtgtctgtacatattggggggctatgtgtgtggtagggaactgtgtacatattgtgggttgtgtgccgtgttgaggggggctgtgtgtctatgaggagggctgcatgagtatgattagggagctgtggggtaacctgtatcaagggctgtgtgtgttgggggctgcatgtgtattaggggttgtgtgtgtggtgcgagtgtggtgtgaggtgactgtgtatatggggagcctgtgtggtgtgttgagggcagtgagctgtagtgtgcgatgggcacgtacacatctctcctgtggccccacttaatttcctcagactcttggactgggcccaaagtgacccctccaatgatcctggggaaccccactttggaacacctccccagtccatgaggggaggctcaagctgctctgtcccaaatagcgcctctggttttttggttctgccagggaaatagaagatgaggccgtgggaagacagcaaagacccagagaaacaagcagagctggagacaaagatagggaaggaagggagacccaaacctggagagagagagaaaactgagggggaagggggaagaagcaagagtagatcaaaggcgagggagagatgagagggagagagagagagaaaagagtgcaggagagagattgatgg

SEQ ID NO: 19232 - DNA, 2289 bp, Artificial sequence
  DNA replication origin
gggagacggcgcaatcctagcccaggaagagtgaggggcccgggaaagggaaacccagaggcagagaaggggccaaaatggaagagggagatacagaaagagacagaagagaacaagaaggagagtgacaaggaaaagcgaacgaaaagaaagggaaaatgaggaagggaaataagttaaagaaacaagagcgaagagggagattaagaaggaagggacaggcgaataaagaaaataaaagaaaaccagaagagcaaacgcttttgtttatctacaaaacccccttgcagggcgcgctttcccgaccgcgacccgcggcgggaagggggccagggctctcgcgctgaggccgcaggcccaggaggccagggcggggcgctcagcctgtgcgcttggggcgctaggcggggtcccgcgcggacctggattccaagttgaacttcagggcgcggggcgcgccggagcatctgcccctggaaagagtggtgtctgggtgtggggtgtcgtcctgggtccatggcggggaaggggacgggtagataaaaggttcacggctcgttcttgggcacgcattgggcgcctgggactttcagccctggcgcgaagggaggtggggaggcggggtggcgggaacccgtggtgggcaggctgtggccgctaagcacagacccccaacgtccccgcagctcggacttctcattcttcagccggccctgggaaaactcccttcttgcggatctagtgtccaggctggcgcgccgggccacagatgcaaggaaaaagtaacgcagccagaaccgcgacccagcgccagcggagggcgcatttcctgagccgccttcccactgcgactcagagacgcggctcagattctgcccgttcccagggtcttctccagcaccggtgtccccaggccagagggtagagaggaagaaagaagaggagaaagaagcgggggcaggggtggggtggggaggaaaagggacgggagaagggtgggggaggagagggggcggtgcagaagagaagcagattgcaatgaaaagtggaaatgcagaccggatggaaaggagggcttaaggatgctaggaagcttcccccttcggtttgactaggtatctacgtagacagagatgggagcgcccggttccccggcctcaccattttgagcccctgtgctttggcgcccccatgatgtcgggctgaagactgagaccgcaacagggccgctgcaggctccggtatgagtgagaccgagatcacagagtggaagacttccctgcccactaggcggccctgggatgacaaacgccctgaaattttccagccttttgagacttctgggtcgacctggtccaacccactctgctcctcctctctcctcctgtcccctcctctggcattggctggtgggtcagctgcagagctggactagacgagtggaaaaacaaacaaaacaaaacagaaaaacctccaggaaggagactggcagctcaatcagttcctacttctgcacggagacagaatgcaactgatgcctagaccagaattctttggaagtaggaaggcagagactgagctgggctgactcaaagaatcagggcaccagtcagtcagtaaacctggactgggacaatggggctagagaggtaaatcacacactggccttgttttcaaggaagacattacctggttgcaaagagaaagagagagagctatcaaccaataaattccaggaaagtgtcaagataaaggtgactgggatacagagaaaggtaattgggagtgtcagggaacacttcataaagggaatggggttttgcaagatcagtagatgtccactaaatgcaggagctaagcaggtgaaatattcctaggcagaaggagcatcaagataaaggcatggggagggggcaacagcctacctagctggggaagcaaaaaggattctgtgaagccaatatatgggtcaagtaagggaaataaggctgggaggttggcaaggcctagagcaaggagaacttttgctaaggatttgcttttctcctttaggtcatggatgcaattgagagattttttgtttgtttgcttgctttgttttgtttttgtttttgagacagggtctcactttgtcacccaggccaagtgcagtggcactatcacagctcctcgcatccccaaccttccaggctcaagcaaccctcccacctcagcctcccgggtagttagaactacaggtacatgccaccacacctggctaattttttaatgttttgtagagatgaggtc

SEQ ID NO: 19233 - DNA, 1319 bp, Artificial sequence
  DNA replication origin
ccgcaggccatgctggggagtgggtaccaggcggcagcggagccgaggcaggagagtggaatgtcttcgtgatatgtttatcccctaatcagttcattagttataaacaacatgacattagaagttaggaggcagttgatattaatttttatttaactagttgatgtttaatccgtcacgccaggctgggtagcggcgagaaagatcttcctgacacaaaaccagttagaacttcataaggcacaatcagtgtccgcgccttgaaacaaacaagagagacagagacagagagacagggagagacagagagacagagagacagtggcagccctgccagagatggagtcggagacagagacagagtggagggctgggagagagctaacccagggcaagagctgggggaaaataaactagaaaggcagagagctcagacagctggcaaggggctgacagccctgaacctgggctccaagcccaggacagccccgacttaatagggaccaggagaccaacgccctgggaaagtccggccagggcagtggtggggtggtcgaccagggccctgccaagcctggccgctgcaactactagcgccttccgacaaggaaagtgtttagtgtccatcggtctggtgggtggcaagggtctaatgtcacagcgaggcgaggccctgactttcggaaactcctctcccaggtctggaggccaagaacttcttccctccctgctccaggaggagccggcccaggcaagagaggaaaggagaaaagggcgtgaactttgcacccagcggttcaagtttcacaaagtttgttgcggtcacagacagagaggggtgtgtgtgtgtgcacgtgtaagctcgccagtggcaaagagggaggaagtaagagacggcgtggggattctgcaggcgggggagggcatttccccgggtttgactaagccttcaggcgcgtccctgcatgcgggctcctcgggtggcggccctggctgcaagtctaaggtccccttggcttgcccggattaatctccccctctcaaccccgcccccgagcaggagcactcggctttttccaccttcactccgggcaccggcgggcactggcttggtcacggcttcctgagcaggcacgggagcgggggcgggctgtagttttccgccgtcgcgaaggacactgtttgaggcgacagaggcatcttcgcccgcgcgtagactcaagccgagcatctcactgtttgcgtgctaatctgagtccactgcgaaaaggaaatcgctgaaattccgaagaaaattgcctctcgccggtggttaatag

SEQ ID NO: 19234 - DNA, 718 bp, Artificial sequence
  DNA replication origin
gtgggagctgtggtgcttagaaggtgtgtgtgtgtgtctgaagtaggagtacaagacggtgcagatgagcaaagggtgtgagagttttgagggagagcttgtggctaaggtgtgagaggtgtaaattccaggttgggagggagtgatgtgggcaaagataaagtgggcctttcatcagggttggaagtatcagtgtgctggaagaggagggtgtgagtctgagggtataagagacttgggaccagaatgctatggacgggcatggctcaagcgggtggccctgtgagtgtggcaggagtttggaaggggtgagttcctcctccctttccccctcgccctcgccatctctttaaaggcaaggaagccagaacttttttcttttattcagtttaaaaataaaaaagctcctggagcaggagaacctgtgagggatttagcgagcacttccaccctgaacatagcggggacagggcccttctggaaccactgtgtggcctgagaaagttagggcatgtctgtggagatcctggaaagggaggctgtggagcctcacgttccagaaagtggaatgagccgagagctgagagtggtggggaaggggaaccgcacaaagttgggaagtaggcgagaagccaggctgtgggtctggaggggggcgtgtgacagtgaagaagagggggttgggtgagagggtgtgccggcgtctaggctgggctgc

SEQ ID NO: 19235 - DNA, 1332 bp, Artificial sequence
  DNA replication origin
gggagacttgctgggactgagaacctggttcacaaacctcaggcctgcaatgcaggcagagcgcctgcccggagggaaaatggaaaagttggagtctcaggagcttgagcaaatgggaaagggaaagaaggagggcaggggacaggaggtatcaaggggcaaaatagattcagaaagagtttgggagagagaagccctgtgcagagaggaagaaaggggagagaggttctcaggaagtcccagacgttaggtctgtccttgggctgaatatttatacggtcgagggggtgcacagatgggctctcaattgaattccatcttcaacaccatcagagattgattttgtactcgcttttaattttgccataattaattagatcattacaactgtttgctattgatctccctacttaaacctctggtgcagagggtctgcccagagccctaaaagctcaggtggccacagttgacactcccgggggttcaggtttcccagtggggacaaggccctaggaggggaattgggtacagcccagggattgggtcgagaagctagatcaagggtagggctgggggtgggacctgggttatcagctgaaacaactggaacctgagctgggggaggggggagcaaggaatgagatttgggaaaggtgaggagtgaggcaaaaaaggcctcaaattaggccttgacctctgtggaattatttggaaaactctggaaacctgttccaaccctctccctcccccgaagtccaaaactaaacttgggtgcctggcttcccaccgctgtacaacaccagggcacctaaagggcagtccagagctgagttggcagcctgggggacaagcgaaggaaggaagaaaaagagagcaacactctactcccttagccctttgggtaaacattttcagattcctctccccactgggtcccctggggcctgccacctgtccccatgctgcccttgatttggggttggggggacacagccttctccctacagaggttaggctcatctacattagtgttcataatcgaatacataagaccctacacacaggtacacacagagtttccccacccactggcataggcgctggcccagctcacactccctgcttactggaagcgaaggccttcccaatgctcccaacttggaggaagttgtgcaaaatatctgtagcccaaagtagaacgagaaagtcctcaacacacaacagaaaggaaaaagccaagttctgcaagcgaagttgtagaactcacattttctgagtggaaagttttcagaaggtttagaggacaccgggagggacggcccaggaggcccc

SEQ ID NO: 19236 - DNA, 1010 bp, Artificial sequence
  DNA replication origin
ttcgcaaacccggctgcggcagttgcgccaggacgtccggcaggcacgttcggtcacgcgcctctgtcattgtcattttaaactagccggatgaggtccaaaagggctcggggccgtctaggggggcagggcctccagggagttgtgccccggccaaacgtggctaccgaagagatgagggagggggcggtgaaaagagaaagaggcaaagggagaaggcggctgggagggcggaagactctgcagctctgctctgcggagccgcctcgaagtgcggtttccttttcccaaacacagccctgtctcctgcccagctccgcagctcccccccgcctttcccggagctgctgctgcctggaacacgagacccgcacccgcaaaggcgggaaaagagggaagggaaaggaagtgcggtgcggagtcgggccgctggccgctgtgccacgcgcgccgggtaagcggccgccctaacccgtcaggcccaagtaggtgcaggcgcccctgggtaagtggagagtgccctggtctcttctgtagtatcctgagggccagaaaatttggaataaggaccctgacaggcactcaaggatgctccccatcacactgccttctctttcccgaggtcctggggagggggcctagatgccttgctgggagacttgctgggactgagaacctggttcacaaacctcaggcctgcaatgcaggcagagcgcctgcccggagggaaaatggaaaagttggagtctcaggagcttgagcaaatgggaaagggaaagaaggagggcaggggacaggaggtatcaaggggcaaaatagattcagaaagagtttgggagagagaagccctgtgcagagaggaagaaaggggagagaggttctcaggaagtcccagacgttaggtctgtccttgggctgaatatttatacggtcgagggggtgcacagatgggctctcaattgaattccatcttcaacaccatcagagattgattttgtactcgcttttaa

SEQ ID NO: 19237 - DNA, 938 bp, Artificial sequence
  DNA replication origin
ctggagcctcggctcccggtgtgtgtctctctaaaagctgcaaagccccctccagacctcctccccctccccgcgccgggagatggatgacttgtcagacaaaggcaatagattccaccactctgtgattcgccagcgctggagccccgagcttcggcgaggagggccccgagcctgtcactccggtgccggctaggggagggcaggggagggagaaatgggagggagggagggagggagcagccggcgaaggaagagggagggaggggagcggaccgggggagggggaatgggagcccgggattaaaactacactgagaaacgaaactcgccgataagataaacgctagataaggataaagagcggtcagtctaatgaatattcaggtaacgacagagggcctcggagcgcgctgcgctgtgaagccgggctctcagttctaactcgcccagccctgccatccactggccagtgcccgcctgggccgcgcggccccgggcccagtgcgcatccctagccccaaccccaccaccctcggctctgagttcccttccgttccttcccggctcttccttcctctctttctggtccttccctttggcctttccctccggaggtaccttcccacccacgcaccccccacttctcattccacggaaaagtgtccagcagtttgtcttgtcccctcccgttccacgcgactgtgcgcagggcctccccagtccccttgcccaccgggtctgggcagtccagaacgcttggttcagaatcgagctgaagacctccggcgagtacccacctgcctcggtgggacccagcggatggcgggagagccgggggacttggtttctgaaccctcgggtgactgggaagggggtacaggggagggaaacagtgcggagctgcaggtcgctggcggcagaggatgtgggagacg

SEQ ID NO: 19238 - DNA, 1388 bp, Artificial sequence
  DNA replication origin
gcgaaaaacacagctctccctcctcggctctcttgtcctaaacacaggtccaagccgggtctaaagtttccttgtgaaaagttacaaattatccttaattattaatctgcagatagggaggagttttctatttagaattttagcttttaaaaaaaaaagcctgcaaaaaaaatctcagaatagtttttcaagctaaagacatggcataaattcaaattttattaaaataattccctcttttctctatttttttctcccttctcccttttcttctgtaacatcatgtcaactttctttctttaatttcctttcccgtgtttggatttctcttttcctttctcctcagctttggcatttgctttccttttgttctttccccctcattttttgctctttgctgaccccctggccaggttgctggctgcgtgatcctcaatggggagtcggcagtctaggcaaggagcctccagagctgagagcagagctgcactctgccgggggcccacctggaaggctgcgctgctggctctctccctgacttcgatttcttctcggagcccctctttgtttttagagcatcccccaggcagaggcagggaaagatgaccatcgtgtcttgacaacctgggattcccaatgtgaagggaagggaaggcaagggaaggggggtgggaaagaaaggaagaggaagaaaatatttcaaaccaacccacaagaagcctatgctgggctggaagggcctggagatgctgagagatgagggtcagaagggggcaccccacccccacactcttctgcccaattgtcctgacactgaggctgaatactcttggagtctcctggaccccacgactcttaagtttgagaaagataaagatgtggggagacaggagagggaggcaaacagaggaagagagaaagagagaaaagacagagaaaacaacaaaacaacaccctgaaaactgcctgctaatttgccccccagcccagggcaagaggctgactagggagagggtggctggaaccagggctccgaggccgtggatcccatgacctaagaaggagcggatagaaagagcaaaggcaggtgatagggatcagggaaggtaggaaggcaggcagacagagaggtaagaatgggtgacagaaggcaggagagaaactggaggcattagaaacaccgggcgagggagagaaagaacgaaaagagggaccagaagccagggaggcctccaagatgggacctgagcgcgaggggccggggccacgctgggactggacagggttgggacggagagccccgagccgggacaggagccgggcgccggtactcacggtgcatcgcggagaaggggtctgctttgcagtgcatatccatggggaggcag

SEQ ID NO: 19239 - DNA, 1121 bp, Artificial sequence
  DNA replication origin
tgtcctcaggtcactggctggaggagtctctttgccttcatttattcaggggcccttcagatcttgacaaatctgtcactctaaatttgcgagagattatggtgctctctccccggcccgcagagaggtgatatatgatatctgctgcccctattgattgcctgatctggtggcagaggccggcgaaatgaacttgaaatgaacatcatgcctcaactcattgtgcgtataatacactacttaatcccacatttttcagccgctatggaattcaattgatcaatcatgttccactgatagtactgttttaggggttattgctgctccctccactcactgacctttttatttatttatttatttttttgtatactcaggccctggtggtaagacaggttacagaggcagcaaaggaggggaagggggagggaaaggaggcaaaggctaaggaagcctgctactggaagaggtggcagtgggaggcggggaagcagaggagagggaagtggggaggagaaaggaggcgttagaggagaaggaaaacaaagtggtgtgatgaaagcatgcggagaacccccaccccccagagaggctggaggaggcttgcgggaactcctgtaggagaaggaaggcagcagtcatgatgaatggcgaaggagcacaaagaaacttatggggtgcagggaggtgagccgcagggcccaggagagggcagtggcattactggtgggggacagccagccagccctccaaatacaccacacgtaccataggctctcaagggctctttccagaggagggggtggcatccttccatcagctagggaaggaagggaggaatgaaggcaaggagagagggcaggaagggaatgaggaaaggaggttgggagaagccctggatcagaaggtccaaggaggataagctcagggaaggaggaagcccagaggcgtggaagggcagaaagaaggaggggaagaaagggaagaagccttccgcaccagaagctggaagtgctggctggggtgaggacacttactgcaggaataaaaccagctggctctactttcgctgaagactgggtgtcctgataccttctctgcccagggcctggatgagggtg

SEQ ID NO: 19240 - DNA, 686 bp, Artificial sequence
  DNA replication origin
acagcgttcaacgctgtggggctgcactgacgtgcatgtgtgggtgcgtgtgtgcatgcatgcaagcacagcaatgctgtcttgtgctgtgactgtgggcctggcctgggctgcatgtgtagcagggatgggagtgtgcccctgtgtgggagcgggtgtgctgggggctccacccagcgtatgtgggtggaggcatatgctaggggtatgctgagctggtgatctgggggcagcacacacccactggctccatgcggctgccggggctagctgtgagtaccgtgggctgtgggtgagggagcaggtgggcggtggtgtgtgagcacagtaccgtgggctgtggtcgggggagcaggtggacagtggtgtgtgagcacagtaccgtgggctgtgggtgagggaacaggtgggcggtggtgtgtgagcacagtaccgtgggctgtgggtgagggagcaggtgggcggtggtgtgtgagcacagtaccgtgggctgtgggtgggggagcaggtggacagtggtgtgtgagcacagtaccatgggctgtgggtgaggggagcaggtggatggtggagtgtgagcacatgcacaccagcacatagaaaagttcggagatggtttctgcgttgtgcgttttgctggtgtgttacatgctgtgccccatgctatgtgtcctgggctgctcagt

SEQ ID NO: 19241 - DNA, 1828 bp, Artificial sequence
  DNA replication origin
ctgctattctgtccctctctctccttagaggctgcagttggtccctcatcctccctcatgagcaagccggggaggaagcttgcagaagtgcccccttgtgtgcaacccactgtatgtcatggcccctccacagcgcccacccacccaagtctgtgcccgaggagcactcagcctcagctccaccctcagtgcccagcccaccccagccagctgacactgcttggaagagcctgccctggtttccatggaaacttggagccaagaaccatttccaggggcatgtcagtcactcagacaaagccaccctggtccacaccaagacacaagggaagaccaatgttgagaaccaaccccaaccccaacccagagacagtagggagctagtccctaagaggaatggaggtcaggctgcggcgggaagcagggagagtcgctgcagtgagacaggctagaacacccctatacctcttcagaggcacccagccttccattgcttccctggggctctgacccatccctaatcagaggagttgggtttgggttgtttgaatcagagagacagaggctgtatttaaggtctggtgactgcagctggaggttgtactatacctaacccctaaccccagattgggagcagggtcttgaagccaaagagagttgaagttcctatgtgcacaaacaccaaaacactcttgtcttaaggagggttagactcactcagccagcaactcactccctctggccgccctctatgtggcctttccctgaagttcaactctcattggtatggggaatggggaggatagaagagagtggttggccccatccatccagggacatttaggtataaccctgggtaagcagagcttggggtaggggcagcggcaaagagggagattgctgctgggtcttatggactaggggctgaagggagttagaggtgtgggtaaagggattcctgcccagatttaggggaaggaaagtagaagccttgttgggaggcaaggagattttagggagaaactcccagcagtgagcaggtgggggctggaggaggttttaaagaggtggggtgagggaagagtggggaggtgggggcagggagtctgcagggaggtggggaagaggggagccgcagagagctcgtggtgtcgaggggggagtcgttaaacagaatctagtgctgatgaggaaattacacttgtttcattagcgatggggaaggagatagctcagttcctcttggtcacagttgagctcagaagctcattatcctgctgcacgcatgctttccctcctcgtcaataaacaggctttccagtggctgcatcccccacccccaccccagctccctctcagagaggggccccttctcctctacttaacccgcggttagggatcactgtaaacagtctggggtcatcacacaggagaaagggcgagggggaaacctggaggcctggcctttctcccgcagagggagggaggtagcttccgacgacggctcccaacccacgggccctccgctcaccgctagcggaccagcgggcagtccacctgcgccgcctccatcccctgccgcgtagcccacgcatccaacctcttgagggaaaggcgggagggcggtgtctcccaaaagagctcccacctcttgtgttggcactgcacattgatgccattcttaggactttctgggagaaaaatgtcccgaaggcctttcttcgccaccgccccccactcccatttccacccattaggggccatgcctcctagaaccggagtggcatctataaaggccctggcccccagcgcgacagggtggacgcgc

SEQ ID NO: 19242 - DNA, 919 bp, Artificial sequence
  DNA replication origin
tcttctgggacagggcacacccggaaggcgagggcagtccggctggcactgggggaaaagaatttttcccagggattcggcagcgggctcttcctcctgcagaaagtcgttttcttcttaatctccttggcccagcccctccagcgaagcctcctggcgcccgagcgtccgaggcgggtgcccggggctgggccgcgctgcggtccgcgctgattgtgtgtcacagaaacatccggcgcgcgccagcaggtcgcgcccgagtccggcagggtggctggcgggcttcggggctggcttggtggaggccgggacgagctgggccgaatccccctcacggcgccgcgcagtccaggcaggcggggaggggcggcaggcggggctgggggcggcgggcccgggcctgagggtcccgcccacggctccacccgtcctgtccgaccttcgaggggggtgatgtgaagggttgcgggggtcgtgggatggggtgaggctggggcggtggccgggaggcatcgcgtcgcgtcggtcctccctccctccggggtggggtcagacggggacgatgtggaggccgaagctgtcggcctgaagcttgatgtggtccccgcggtaactagtggcggtcataggcagcggcagcagcggcaggggcggagccccggggggcggcactataataataaggggaacctggaagttaacacaggagaagaatgggctgggtgagaggacaaacaggagaacaaaaaaggaaagaaaagcacagaaaagacctcccctggctggggtccagcgggatccggactgggagaccttggctgggcagtggagccagttgccccggagaatagttgcgttcacggggcatgagagggacccgatctggtgacgcccggctgcgcaccctccaggggatccg

SEQ ID NO: 19243 - DNA, 1242 bp, Artificial sequence
  DNA replication origin
ctgcggagacagggcggccgggccaggtctggggagagaggccgaggaaagagcagagacagacagacaagagcgacagagacggagagagacagagacagagggggagagaagcggagaggagagaggggcagagggagagaggggcagggaggaaaaagcgaaaacacggaattacagagaaagagccaacaaaacaggccagaggagtccacaggaccatgttcgtcattttgcatagagatttcttttctttcgtaatttttttttgtaacataaaaaatgcccccctcccccaggacgtgctgtgctttaatgggcgtgtagctgtgtcccccccttcccccccagcgagcggcgactctcacagcacagacagcggggcgtatctacaggcagggccggcgggcgacagggactctacggggccgggcggggcggggcggagggggaggggttatgtacaccgggtttcgccttcacacgacacacaccgtctttccacaaagcagcagcctggtgggcttttgtgttgttttgttcctttttgcaaagaccatcatattaaataaatgtagactttttgtggttctgttcagttcctgccggaggaggaggctgggaggggatgggaggagtggagtgggcagccccccacttccaccccgcagcagctcagacgccagctcagaaccggttcttaccaccggcagattgagagtctgtgtcgggggagggggcatcaagtaactgctggaggaagaccccagtccgcagtctatggaaactggtcctgcggcggtcccgggagagcgtccgatggggctgcgagtcagggaggaggatgcagggcgtcaagggacaggcgaaggactggcaggaggggaaactgggaggccagcaggtggaagagacgctgaggtaggggcaaggcagggctgagagccgggtctcgcagcaggaggtgccgggccctggggaactaggcaggccaggaggagcagtgaagagccgagagtccggctcgatcggtgcgggctgctgggccccccgatccttgggtcccaaccttggaaagacctgacgcccccaaagcccgttcctagagccggacccccacacccccattccatcttctgggacagggcacacccggaaggcgagggcagtccggctggcactgggggaaaagaatttttcccagggattcggcagcgggctcttcctcctgcagaaagtcgt

SEQ ID NO: 19244 - DNA, 733 bp, Artificial sequence
  DNA replication origin
gacgcactgaaagtggccgaggagaccagaaccgtccggggacatttagcaggttaggcctgggcctgggtccggggtctctgcccggccagccccacaggactgggatgggccggacctcggcgccctcgccgccctcgccgccccgttcgggccactggagcctggctgggcgccgggttcccttaaacgattctcttttctctttttccttctcaaataaaaagggctcgcaggggagagagatctgggcgaggactccaagccttttcggatttgttcaaggatttttatttattttcactttattgactttgtttctgttatttcgagtcgtcacgatccacgggtgaggagacatgcagggcgcatcgccactaccgaaagagcaactacggggcgggacggggcggcccggccttcggccgcccggggcgcgcggggcacgcccgcgagggggcgagcccgggggctggagctgccacctcggatctagcctgcggagacagggcggccgggccaggtctggggagagaggccgaggaaagagcagagacagacagacaagagcgacagagacggagagagacagagacagagggggagagaagcggagaggagagaggggcagagggagagaggggcagggaggaaaaagcgaaaacacggaattacagagaaagagccaacaaaacaggccagaggagtccacaggaccatgttcgtcattttg

SEQ ID NO: 19245 - DNA, 866 bp, Artificial sequence
  DNA replication origin
acagctgggtgctggggtaggtggtgggaggtgggctgaatgtagtaggggtggatctggtgttggcgtagtgtggggtgtttgcgggggtggtggacgttagaaatgtggtgttgagagctaggcaggtaactaggtgtaggagaaaggggtgagcagaggagggaaggggagggagctgaacgcaggagcacaggagtcccccgagacctctccagggttctgacttttaatgctgctgatccagctcttcctcagtaaccagcttctccccagaaggagaggagaggagaggagacccgaggagaagagcctaaaagggtgaagaaggattttcattatgaagttaattagcttcagagccgctgcacctttcaggacgaggaattagagggatttaattgctttatcagccttccctttgattttcagcaaccaggccgattccatttaatttaactgccacagacgaggagaaaattgatgcgctcacctgcctcggagcagaaagagagagagtggggaagagggagagggggagccagagagactggcaaacacagagcctgcagattaatgaaaaccaacagcatttgctcacaattggagatgaagtgtgccctcgaggtgtttggagctgtacgtgtggccgtgtatccatggctctgtgtgagtttgtgtgtgcggccgcgtgggagtttgtgacgtgcatgtgtgtggggacgtgacaacgagtgccttggttgacatggaggtgggtgtgtgggtgaatgttggtatgtggccgtaggtaagtgatggtggaggcatgtgattgactgttgaagactcttcatacattgaaacgacagtgtgagggaggatgg

SEQ ID NO: 19246 - DNA, 1102 bp, Artificial sequence
  DNA replication origin
tgaaagccaatgttttatggttggggtgaccaagggaagcataggcagcctggaccttgggcccctcccacactagccccattctggggaggcttctgggttctggaagccagggcaggagtgtggtgctagcacccactgccttgttgctcacagagccctgctccctcccacgcagctgcctgcactgacatctctgagagggcctttgattaaagagacaagtgactttgcccattctattgatcagaataaattactaggaactaatttatgggcctccccacagccgatgacatggtggattgtgcgctattggtcagtaaattggattgtcaggctagattattggttcgtatacagttatctctcatagcaatatcaggcagcccaggtacaagagtgaaatcctttctctgctgccagatgccaggatgtgacgaggccttctcggggggctggtggggaggggcagtgagggaagaggaggagaggggaggagaggagaggcgaggcctctgtgcaggatgcttattaattagtgcagcatcacagcattaaaagaacattagtgtggaatcgtctgcagagtgatggggaaatgacattgcaggcctcctcctgattctccagctatggctctgctggggagagcagggagggggttgatgagcagacggggggatgggaaagataaaggttgttggggggataagaggccaagaagaggggaagagaaaggagaggccacatttgctgtgaattgcaagcagagaaggtctgctaagcgccagcgtcgctgagccccacgcgggggaaatggagctgccgttctgctccgtacatcacagccaacgatgaaaagttctagagctgggatttctcaggcaatttggccagtgatgcatggggcagtagatcctcgcgcactcttccgtgcttctgccaagccagcaataacaaaaacttattttttgccagggaaacggatatgagtcaggcagcccatcgggaattaggggggctttaccacgccgctgcgatttgtaccactcggctgtttccccgagctctaaagacctgccaggaggtgacaaaggcg

SEQ ID NO: 19247 - DNA, 1330 bp, Artificial sequence
  DNA replication origin
aaattcctcaggatgggatgagggtacaaataaaaaatgaagcaggatattctttgtaaaagtgtgtgtacattttttattgtgtttctccccagctaccttccctctccccgccacacacatcctatttgcagagtgttgggggaggtggaactgtgatgtgggccctgctgtctagcagtctgcagtcacacacagccatccaaactacgagattgtatatgattcagtgccaaactgtgagctttggggaatccagaaagaaggatgaagcctttcccaagtttcctttagttaaatgtgccacttgaatcctgttctgactcctaggcacatgcaagagtcaatcacatatgttcctgtggcctttatcattttggtccatctcttgagcccacatgaatactgtcatggatggaggaggaaggaccaggctgggtcagggcctgaatgcaggttttgtttggactataggggctaagttcactttaataggctgtgacctattaaaggaggcaggaaccaagtttgcacagaaggaccatcctagttgagttaaaggagttggggagttgattgtgaggggtttcctagattgctgctgggtaaggtgattgaatctgggaaggatagggtacttgattgcctagaagggtgcactctaagttctggataagaatggtgcccaagatgagctggaggggaaggcaagtgtttgaatgacccagtccctgaggtgagcctaggttagggttaagatttggtgagtgaacaggtgcaaacgcttgtggcttatttatccagaaaaagcattttctgtgtgcctttcaggtcaggctgttactttatccccttcaggcctgaccccatctcccccacgcatagctcaagctgaacagcccctgaagctgggaatcaagcccctaccttgtgttcagagcttccctaacgtccagtcgccacctagggtagccttccctccacaccctaggccgagagcagaagcgggtggcaggagcacagggagtgaggtccaggttagaggacaggccagaaggccctccgagagggtcccccaaccccgcaacgccaggacaggtttgcacgtccccagcagtaggcaagtcaggggggtcctagggttacagcggaggagaggacgggctataagcatgtggagggtgcacggggtggcgaggccaccaccagggggcgatttcagggccgcagcgcctagaggtggggggtcgcccgatggccgaaggctgtgtgtgagcctcgccctcaaaccgcctctattgtgctagagtagggggcgcaaagaagagag

SEQ ID NO: 19248 - DNA, 1393 bp, Artificial sequence
  DNA replication origin
gcgtcgctgtctctatggccccggatccgagcgcaaaggtgagcaaggcgaggagtgcgggcggcgccctggcgtgagcctggggctgcgggccgggggtcgggcaaggcctcccccacgtccattctaccctccaagctgggccaggcctttctcaccaccaagtcccccggtcctgcatgacggctctagaggggcgcgggccaggcctcgggctgcgcggggtgcaaaccggccaccacggagtcggggaccagcgcggggagggggccgcgtggcgaacagtgttccccaggatctgggtcacgtctcccggcgtccggcgggatcgaaggagagcttgtcctcgagctgcagcagtagagactgaggttagacctgacgaagggagaggaccgcggactgtccaggatgttggagggagggggtcccgggggaggggctctctcaagccaggagagaccgccatcctactaggcagagggaaataccgcctacactaggcaggtggacatctgggatgaaggtcgagagcctgctgatcctccattgatcctgtttgaagggtctctcctccccagttccctccaccccaagatctaatagaggaaaggtgatcagagttcagggggctggccctggggaagaacccgaactgtggaacttggggtggagtgtggggcgtggactggagaccttaaacccgtacttcgccactgaagggaggggtgatatgctccgccccgcccacttagccccgccccctcccacaggttaagtgggggctgagagctccagcccgtctcccacctttagaaccgcaatatacataggggtggaggagtactaaattatgcgttccattccatctttgctgaagctaggggcctcctcctgcctgagttactttcccattccctcccttgtagagcggccttgactcatgcacccatcccatctgcccatccaaggtcagaagcctcccccatcaccacacacacacacacacacaaccccctcaccacccccacacacaaacacacacttgaaattgggccttagaattgggactttcaggaacagaggcagggttctgctctgcatctcaccccagtggacactggcagcctccaagcctatggcaaaaactggacccctgtatgcatgtgtgcttgtctctgcatggatgtagttgtgtgttcaagaactgcgtgtgagcacacatgtacttgacccttctgtgaacatgattgcctggcccactatatcaatgggtttgtgtgcatgtccctacacatacatgtgtatgtataggaccctcctgttgaataggtgcacagtccttgacacaaacccacatgtgtgggtttatctctcctcaatgtctgaggct

SEQ ID NO: 19249 - DNA, 848 bp, Artificial sequence
  DNA replication origin
cttacgcctgtaatcccagcacttttggaggccgaggcgggtggatcacgaggtcaggagtttgagaccagcctggccaatatggtgaaaccccgtctctactaaaaatacaaaaattagccgggcgtggtggtgcgcgcctctagtcccagctgctctggaggctgaggcaggagaatcgcttgaacctgggaagcggaagttgcaatgagccaagatcgtgccgctgcattctgggcgacagagcgagactccgtctcaaaaaacaactcaccgaggtctcctgtagcccatatgggccagatacctgtagaccttcctacatgctgccttgagtgccatggtgggagggagcccttggggcctccctgcaatacaggccaacttcctgtttgtgcctgtgggtgggactttatgagtcttcgagaagcccagccatgccccgtgggggtcagaacccgcaggcctgctcacctgggcagatacctactctagggagggggctgtgctggttctgcctgggcagccccacgctgaggtgtgtgcgtggtaggggtaggtgggagctgctctggtgaaacttgagccttctttgtctgcttcccaggggttgtccctgtatttggggattgggccaagagtggaccgggttgggctcccatcggagcagggagggtggcagagtcaagctcttagtttaagcttagtttaaggcagccaggtagccgaattctcggtcacgtgatgctcgcccccttccccaggtcaaaaaccaaatccagtaagctgtgaagtcagaggccagaggggcagcctcggccaccgtcgagtcactcttaggctgggca

SEQ ID NO: 19250 - DNA, 965 bp, Artificial sequence
  DNA replication origin
ctgcccccctagaaaaaggaggacgagcccctccccccagggaatgagggagtgggcagtagcccgatgcctcctcctcgccccaccccctacccctacacacacgctgagcccagctgccgcctgagctgggcaggctgccagaaagaggaggaggctctcggtgccccaggaggcagggatcagggcaaggccagaggagggggctctgctggggagaggggctcagtctgttcttgtgaggctgagggtctggggtgagtcagggtggctgggctgtgtttccctttccagggaaaaagaaagaaaaacaaccctgtccatggagctaaaaatagagctgagagccggccagggctgtggcctggaagggggggatgctccttcctggggcccgggcgagctccggcaggccttggccctgcgggggagggggtggttaggggagaaaggctgcctttgcccagggatgcaggcatcagctgacctgaccgggtcaccgagacccctaggggaaaggctgtgcggtagaatatttgtgaagcacggcgtgtaagaagttgtctgtgtgagtgactgtgaatagaggctgtcaatgcgtgaaagatggttaggagactaagtgcacttgagactgtgactgggtgcgaaggactgcggattgttgtggaagcctgtgcccaacaggcctgtgacaccgtgtctgtgtgtgaggtggactggaagattatggaaagaaggaacgcggacccacgtgacggctgagactgcggctgcatgtgggaaaggtcttgtgggtgttagggagactgtattgtgtgcgagaaggtgagactacttgaccctgaggaagtggaatattgtctgccgtgaggctggtgtaggtttgggctgtaggcttgcaccggttcgccccagtgattgttggggagccaggggccgctcctctccgataaatgacctct

SEQ ID NO: 19251 - DNA, 1188 bp, Artificial sequence
  DNA replication origin
ggccgccgccgcgccgtggccctttgtgctggaacaatgaccagctgccgctggccccggggccccggctggggttgagggtgaccaccgccgccgccgcgtcgagccgaaccgagcccccagacacgcagtcacagggcgtcggagggagggctcccgactgccgccgagcagcccctacgtgcgccccggcggattcgcgtgacgcgggtgcttgcgcgtgtccgcgccccggggcggagacgcccctcggaccctcccctgcgcggtgccgcccactcgcaccgggcgggggctggccagggccgggggcgccgcggaggcggaggcggggctgggccgggcagctccgagtggcggcgcgcgggccagggccggggccggggccggggccggagccggagccggggccgggcggcgcgcctgtggagcgctgggggcggcctggggctgagcatggagcagcgcggcggaggtgaggggggccgggtctgggaggcggcctggggagcccccaacttatgcgcggtggaatccagccggggggacggcgttccccagtcgcccccactttctggaaggggggctggactctggagaatgggtcaggggctcctggcttcccgccgcagaatgggaactcgtgatcgcagacttgaccccgcttgactggtccttggagtttgggtgggagggagactttccccaactcttcagatccgtctccggccctgaaccagctccagccctctgctctcctcagcccactaaaaggggggtgctcctgggccagagtgattgctcagggagtgctggggagaatgaggggttcccatctcccacagccacaaacgcatttctcaaaatggagcctccacttgcccctccttctctttcgggctccaagagcgggagccggcctggctgggcctggctttccagactcctggctctggctccctggatgtgtggctctcagggcccggctctgtggcactttggacttatgggccctcggctccgtggggttggggggccctggctcactgggtcccgctggctgtccccttgtcggcctgaccctcgggcctctccgagtctttgtctcttttgggtccctgtctttctctgagcctgtctccttccttcaattttcactttctccgtgctcgctgaagtggggaaatg

SEQ ID NO: 19252 - DNA, 919 bp, Artificial sequence
  DNA replication origin
gagaatgaggggttcccatctcccacagccacaaacgcatttctcaaaatggagcctccacttgcccctccttctctttcgggctccaagagcgggagccggcctggctgggcctggctttccagactcctggctctggctccctggatgtgtggctctcagggcccggctctgtggcactttggacttatgggccctcggctccgtggggttggggggccctggctcactgggtcccgctggctgtccccttgtcggcctgaccctcgggcctctccgagtctttgtctcttttgggtccctgtctttctctgagcctgtctccttccttcaattttcactttctccgtgctcgctgaagtggggaaatgcaacagaggtgccagcccccttggccccctaagaagtcccttccccactgttcactccacaccctggagtgggcccagagaggggaggggagggggttctctatctgctctgctgggggctggggtgtgtggggtggtctgagccccagccctacagaggggcctgtggtcactccctgctcctggcctacccctcccccagctccccgcagctcctgccccagcgtggacacctcttcctggttcgcagtgtcttttgacttgggtgggaaggagggcggtggatttaatggagggcatgcgagaaagaaggggaacagatcaggcaaaggagttagataatgtcccacctctccccacacgccgaagagagaaggaaacaggctccccccaccaatgggccctcaagccacccaggctcccaccactctcatacctgcgtgcccacgttcacaggctccactgcaccactcaccttcctagtcacacacaaacacaggagctcacacataaactcatgaacttactgacaagtctgtccaggcacc

SEQ ID NO: 19253 - DNA, 1861 bp, Artificial sequence
  DNA replication origin
ctgggctacatggcgaaaccccgtttccactaaaaatacaaaagaattagccgtgtgtggtggtgggcgcctgtaatcccagctactcagaaggctgagcgggagaatcacttgaacccaggaggcggaggttgccgtgagcccaactgaggttgcgccactgcactccagcctgggtgacagagtaagactctgtctcagccgggcgcggtggctcacgcctgtaatcccagcacttcaggaggcccaggagggtggatcacctgaggtcaggagttcaagaccagcctgaccaacatggagaaaccctgtctctactaaaaatacagaattagcctgacatgttggcacatgcctgtaatcccagctactagggagggtgaggcaggagaatcggctgaacccgggaggcggaggttgcggtgagccgagatcgtgccattgcactccagcctgggcaacaagagtgaaactccgtctcaaaaaaaaaaaaaaaaaaaaaaaaagactctgtctcaaaaaataaataaataaaagggaatttggggtattggggtgcagttgggtggggtctagatttgaggggctgggatctggaggattttggaatgagttgagatttgagtagtaacagaatgtagggatgtgggagaagttggggccttggatttggggatgggattctaggtttctccagggagcttgcattttggggtccggctgcactctcacacggtgtttctccctgtcactaggtatcagcatttctgggggcattgagtccaaggtgcagcccatggtgaagatagagaagatcttccctgggggggccgctttcctcagtggggccctgcaggtgggtgaagcatgccctggcccaccctctcagagcacagctgaaaccaggcaggaggtggggctggccatgctcagcttccagccagacatgtttagcccgggttgtgggaggaggcttggggtgagggggttcaggtgagcaggatgagcaggcccagggaaaactctgtcccctcatgctagcctgagcctgagccccaagggacaaagagcccttgtctgtgccccaccctgcccccaacaactgcaggcacaaaagtctcattgtccatcccctccacccagatgggggaggagtgtcctcatgggtggaggtgagaagatgctgccttcaggttgggggctgatgcagggtgacatgaggagggagggatgtgactctctcaccccaccctaggctggcttcgagcttgtggcagtggacggagagaatctagagcaggtgacccaccagcgtgcagtagacaccatccgtcgggcttatcgaaacaaggcccgggagcccatggagcttgtggtcagggtccccgggcccagcccacggccctcaccctctgactcatcagcccttactgatgggggccttcctgctgaccacttgcctgcccaccaaccccttgatgctgctccagttcctgcccactggctcccagaacctcccaccaatccccagactcctcccactgatgccaggctcctccagccaactcccagcccagccccctccccagccctccagactcctgattctaagcccgcaccctccccacgcatcccatgaccctccccctaacctcagattcacccactgactccagcatcccgttatccccaggacctctcctaccaacttcttcaggactctccagctcctgcccaccctgcctcctcccagtgccacactggtggctcacatctttccactttcttccctcctcagctgtcattaaggctctgccttagtgtccaaggacaaggtgctagtgggcagcctgtgtcacct

SEQ ID NO: 19254 - DNA, 1009 bp, Artificial sequence
  DNA replication origin
tactcctccagattcttttcctaggcccaggcttcctagtgtcctctgccgggcccagtcccacgtggactcacctaaggactgcttcatcttggacagtgtcactgtcttcagctcgccactggggttcttcatggctgcctccttggccgtcccctcagttccactctccgagggcccttgcttggcccccaccttggctgcctccccatccagaggtcgtggcagagggggtctggccttccgaggcttgtggtagcgcccattggtcatgctgggggcaggggtaggcaccggggatggggagcgtctacctggagacttgccttgaccccggctgctgcggctgcggctgcggctacggctgcggctacggctctgagcccggccccggatctggctctgcggagggtgctctcggctcaggggttctgtcagcagccagttaggccgcaggggccggggagccacggggggtagctggggagggggtgtgcaggcaattcggaggggggtgaaggcatctactggcacgtcttgtagaggggggatccctttatgggggtggcgaggggcagaggcacttggggagaccttgagggcccccagccgctccctcagctccccattatcttcctcttccgggaagccgttcaccggcagcaggtagaagcctccgcggctgtctggggaagagcgccaaggtcagctgcccactcctcccctctccaggacccaggccttgctttggtttgtgtggggcctgtgagagccaggcccgagtttgttcaggcaccactgcagtgcggcccacccaccggggaggcagacagacatgttctattagaatcgcttatttatttatttgagatggaatctcactctgttgcccaggcgtggtggcgcgattttggctcactgcaacctccacctcccaggttcaagcgagtctcctgcctcagcctcccggagtagctgggattacaggcgtgcaccaaaaagcccaggt

SEQ ID NO: 19255 - DNA, 1044 bp, Artificial sequence
  DNA replication origin
ctggtggacaagagctttccttcagggaaccacaatgtgcctggaagccacaactgcccctagtggggaaagaagtagaaggcccatcctcctttccctaatctccccagggctgtgcccctccctgggctctgggactctgactgaccaggcacgggggtgataaggtgacgcttgggtggcgtgtcctgccgggctggtctcaaagcaggaggccggactggttggagagatgaacaggtcagcggcaaggtaccccgccaggctccgggacggaggcagctcaaggggctcggcaatctctgcagccctctccaccacggggtcccatccccacccccagcagggctcaggacccagaagccccgccccccactgctgacctgccctgctcttgagggcctcaaaagcctccagctccacaagcatcaccatgctgtcgaagcggcccaggtctgtgggggccaccacactcctgggagagggcgagagacagcaggggtgggaggggcaggcaggatttcagttccggaggtgccaggatgcccttcagccctcgggaggttgggggtggtaccagggatccccttcctgcccccaagccctctctgcaacctcctcccacctgatgtcctgcagcagtagcagcttctccggcctgtcgaggatggccagcaggggcctcaccaggtcctctatgcctccctcgtgcacatactgcagatagaggcagcacaggtcagacagcagtgggggcttccagagctgagtgagggggacaccagggcatgcaggtgtttcttctacgcatgtagggacctatccagccctgcgtgccttgggaaaggttcactccacccccagctgccacagggtggtctgatcttggtgacagggtggaagcctgcagtaataacagacctgcaataaatggcaacagcatcgataacagctttgggacagacacttttctaagccttttacatactgtctctcagcaaccaccctgagaaatggcattaattattcccgttttacagatgc

SEQ ID NO: 19256 - DNA, 1040 bp, Artificial sequence
  DNA replication origin
aagaaagaaagaaagaaagaaagaaagaaaagaaagaaagaaagaaagaaaagaaagaaagaaaaagaaataggtattattacccccattttactcatgaggaaactgaggctctcaggggttgagtagggactcagctggtaagacgcggtgtgggatctcaactcagaactgctgaatgccgaagctagtggacttcactttgccttcctgtttgatcagcccactacttacctttctctatgtccaggcgagggtaagttttggccaggctcccgctgtccagtgtccaggcctctctgcgcccgtcccgcgctagcctcccctgccgccctcccttgaagaagaggttcatcagcgtcttggagcgctgcagggcacccttctccccaggggaccccgacttctccttcttccgctgctgcttctcctctgcagacacgagggagcaacgggggagctggaggggtgggcagaagggaaggacgaggggcaggggtgtggggagggacagagagaagggagaggagagggcagacaggatctgcagctacgccggggtgagagtgcggttcctcttccgactttctgacccttttccccaccgcacagctgtggctatgtaaggaatctcccttgaggcccagttagagaagggcacacatgcgtgcgtgtgtttgagcaactgtgtgtgtaaataggcctgggaactccaggatccaggggctggggttagggctggttcggggaacaggggctgagactaagggtgaatgtggggtccaggactaatttaaagtggagcccacagcagggtctgagcagcctggagcttgggttgggcaagggcttcgtcaaggcctggggcaaagggaggtttgagcccgggacaggatgtgagacaggttttggaccagaggctgtggagggagcagccgccacccatcccccacgtaccccacaaggtcagatagctctgggagcgcgtgatggggggccggggtcggctgagggccagcagcaaagccgtcttgggagac

SEQ ID NO: 19257 - DNA, 762 bp, Artificial sequence
  DNA replication origin
agactgacgcctgtctggcctcagagtggaccatggtgggctggccgaggagaatggcatcaaggtgggggaccaggtcctggcagccaacggtgtcaggtttgacgacatcagccacagccaggccgtggaggtgctgaagggccaaacgcacatcatgctgaccatcaaggtgggcagaacagtgggggtagggagaggtgaggctagagtaggggcttcccagaccaccctagttcttaataatgctctgcaatttatgacgttcccacagccactagaaggtagacaggcattgttctcatccctgttttgaagaagaagaaacaggtttagagaggcacagcaactcacgaacaggtcacttactcagctggtcagtggctgggcttggttccagtcctgctccccacagtgctagagtggtgcccccttcttatgaagggtggaggcctagggttgaaaggaacaaatgtcttgcccagaagggaggggtggtggctgcggtttggacaggacctgggtgatgggcatccccagggcatacagctaggagggctgggctggggccagaggttggatttcacgggaggtggctggattcattattcatgtgggtctcacacttgtctgaggatcaggtcttctcattccggctcctggaggatgccacctcactctcccctggtgcccagccctggcccctgctctacctttctgcttccctaagccttcacttggggtgaaggcttcactgggtgc

SEQ ID NO: 19258 - DNA, 692 bp, Artificial sequence
  DNA replication origin
cctgcgcccggggctttctctctgggcacctagaccgcttgctgcagggctgggggtctgctgaggcccgccaggggactgtaaaccaagggagcagcgcccgcggctccagcccctcctccctttggctggggagggggccagaactgatccccgaggtgggattggctctgggaagcagcttagggcctggtccaggtggcccaggctgggggcatcgcctcgaatgacacccaccgccctcaggttctgccaatccccgtgcccaccgggtgggcgcggccgggaagctcctgcccctccctgctggtcggcgtcacgcgtgacgtcccgcgtgatggctgggagggcccggcggcgacagcggaggcagagaggaaggcggttctgagagcttcagagagcgatggaaagcgtaagtgctcgctctccccggcgggcggggttctggaatgggggtcagagaaggaggcctgccttgaaactgtctgtcctggtgcagtcaatgtcctcggctctgtggaggtccaagtccacagggcacaagggaggttggggggaggaatgtcagggtggggctgtgtgtagtcacacattcaagtgtctgcagatgggcacagtgtgcgcctgtaaaggtgtttgaaggccggtgtatacaggacacctccactctgtctgtatgtctgggcagg

SEQ ID NO: 19259 - DNA, 1190 bp, Artificial sequence
  DNA replication origin
atctggcctccttcttcctccccacatccggcaggtgctgcgacccgcgggtgagccgggtgattcgaggtcggagccgaccagcggccgcagggagaggcgggctggcgcctccccggcgggcgtccctcgggtcgggattacaggttacggttgcgaggctggcagggccggagacactcggcctcgcggccgccaccaccgccaccgtggcactttgggccgggggcggggaggagagcattcctaggggcccgccagccaaacccgggtcgggcaggccccgccccggccggccccaagcggctcacagaagccttggcgcagtccagctcgcggggggatgggcgagggtggggggcagaaatagcaatctgcagccggcaagggggcggcacttagtcaggctccgcccacaagacccggctgccgtccccgcccgcctgcgcgggatcgactccgcatgcgcactggagcctcggaatacagccaggactctcccgtcggaatgcgcccctaagttgggccaagcccattcattcaggggctcccgagccacgtaggcgccatccctggccagaggggttctgaggaggtgggcaagggcagacactctctcccggtctcaaattcgaaatagggactagaagggaacttcacgcgaggcctcgcaactgtcgcgagaatcagaacaggaaatctaggaaccgagaacactaagagcccgcggattttaaacaggaaaaagaaagggcggagcaaactctggcggatagttgtgagtaatccctggtccttggaataagtgtcgacctgagacagaaggggaactgtcagagagctgccggagaccctgaaaaaggccagagacggggacttgtggggctgacgaatggaatcacccaaggagaggtctctgactctaacaaaacaccttggggacggagctccttggctgggatacagagcagacaagtccgggatcttttagtgaattgctgccggcttctaaggcctggagcagatattcaacaacaaactccacggacctagaaactctccacttatcctactattgtagacggtggcttacttttagtcttccctatgctctaagcttctggtagtaggaatcgtgcctaactcactactgtatcttgtgaacctagccccgcgcctggtggcacgtc

SEQ ID NO: 19260 - DNA, 1555 bp, Artificial sequence
  DNA replication origin
gcatcgggccgagcgcgggccgcctcctgcaggcggcagatctgggagtaggtgtgaccgtcggacccgcagagcggactctgcgaacgacaggcacacagaggttccggcacctctccgcggctcaggtcgccgcctgtgtccagccggcactcaagctgctcgccgcagtgcccgtagaagtgagcactggggtccaggtcgcagagctggccctcgaggttggcgcattcccagcagcagccgcacgcgtcgcgcaccctgcccgccaggcagccccgcggcgcggcgcactcttctggccggcagggagcgcagccctcgccctccgctagcagccgcatccagccgcgccgcaggtaatctgggcctggggatggccttgcgccggtcgggggcggcgtcagcaccaccagcagtagcaggagcacaggcagcgccaaggcagctgcgggccgcggcggcggcagcatggttagcgggaagccctgcgagcactcggggcatcagcgcgttcgggcaccctgccaggaagggaagccaggtcaggaggtcagaaacagggcctgtgccgaaagaccaacctcactgcttcttgtaccaaagcatgacactagcatcgccccctcccctgctaccaagtagcctcccccaacacacaggcctagtgaccctctagggattatccagttatggcagttagcaatcagttgggctgttcttgggagggctgggagtgaagagaggtgaggaaagggtgataaggctcaggcgcacgcacacccaccaccagcaccacttccgtgcaccacccgactccgatccctggcccctgagcatccttgcccaaagagaatgggtggctccagaagtaagaagctgctaatggggggtgagaactgggggggctgatgccgcctcgcttatggcctggggcacagagtgctcacctagtgtccggaactagacccttcgcagcagccgtgattcgagtccgaaagaaaaggttatggaaagaaagcagaggcgcagtcagccgggcccgccggccacctctgctccgtcctgaggacttctgagagagcccacgaacttggattcagaaagcagctcctccggccccctctctccgcccctcgacttcgcgcacccgccttcccactagttctaaggctgccaattttatgtagccgcatgggaccctcccgggtcatttcccccagcctggcccaaagtcacaatgcgagcagaggagccgtaaccagacaccgaggctgggagagaggaagggggtgaggaccggaggcggggagtgggggtaggagtttggctgggaagctcaaagtgttggctgaacggctaggccctgtcccatctgattttacagtccctggcgtcggcgagggcagctgcataagggggaggcggcaggagctctggtgccaagtcattttacgtcgatgtcggggcgctcctggagggcaggaccaaccaccttcgtctccccgcagcccagggctggttcccgggagcgaccgcaggcttgcccacccag

SEQ ID NO: 19261 - DNA, 1558 bp, Artificial sequence
  DNA replication origin
tgcctgtgctcctgctactgctggtggtgctgacgccgcccccgaccggcgcaaggccatccccaggcccagattacctgcggcgcggctggatgcggctgctagcggagggcgagggctgcgctccctgccggccagaagagtgcgccgcgccgcggggctgcctggcgggcagggtgcgcgacgcgtgcggctgctgctgggaatgcgccaacctcgagggccagctctgcgacctggaccccagtgctcacttctacgggcactgcggcgagcagcttgagtgccggctggacacaggcggcgacctgagccgcggagaggtgccggaacctctgtgtgcctgtcgttcgcagagtccgctctgcgggtccgacggtcacacctactcccagatctgccgcctgcaggaggcggcccgcgctcggcccgatgccaacctcactgtggcacacccggggccctgcgaatcgggtacgcatggcccggggcccccaccccagcacttaggtttcctagaggcactgctccccgacccctgacagcattggtctctggccagcagagcaaaaaagataaggctatagaggcctcgagtccagtataaaaccctgctctcgctactggttcataaaagctgccaccttaaggtgggggtggggggtggagtggagtgggagtcccgggcttcgtcagcaagctgcattcgctgaaccacgtgaaagctccagagctggctggcagggagagacaggtcctctgagggcgcaggcacataacctatggtttgctcagagacccccccgacttttcccagaccagtggagtccaggcagcaagacgggttcctgtgagatgcaatcacgtttcattcttagagcagtttgttcacccagtctccccacctctctgctttctcctgcttttagggattagtgaaggggagcgggaagttctttctctatccctggggactggggtccattcaggcctctagctttccttggtagctttagtaactttcacttcctgagcccgggctctgcgtctggctcggctggggcagccagaaaacaaacaccccgtgggggtcccagcaatttcctccactcctgcaggcttcctgcctgtcgcacaagtccagcttcaggttctctgccttgccgcaggactcccccagggggtactgaggagggaacggctgcttttcctcctttgggaactgggcctgtttagaaaaggggaagggggatctggaaggttttgattacaggcacgcaggaaaggctggggagggtgaaatgaggacaggggagcagttagggacagagtggctgccaagctacaatgtagatgtgtgtgcttgtttgtgcattgggtctgcatgaggttctatgtgcacatgtgcatgtatacctatctccacgtctgcgtggtacccttgtgtgtaccagcatccatatctgtgtgtacctgtgtgtgtcacggtgtgtttatggatgtgtatttacctcagcatatattgtgttctgccacaagcatgtccacaaaaatttgt

SEQ ID NO: 19262 - DNA, 1247 bp, Artificial sequence
  DNA replication origin
ccggcgagcggcctgtgtgccggcacccggattacccccgcagcgctgagtgccccggcaccgccgctgctgccgccgccgccgccaggaccggggccgcctgccaaggccatgttcacgttgtaggagccggtcagaggacccatgctgcaggcgccgccgccgcctgccgggcctccggggccgccgggacctccagtaccataggcccccgctcctccagcccccgtcgcggccgcggagcccccgccgccgtaagtgtaggcgcctccgaccaagcagccaaggccgtattctccgtcctggaggcgcgaggcgggtcccatgcagccaccctggtccgggctgttgaggatctggtcgatgccgaagctaatgggctctgcgtgacccgggtggaggtggtgcggacccaggtgctccatgctggccctggccccaccggggggcccgggcggcggcgctcgctgcgctcggctcggggggcagctagcaggggctgggaggcaacagcggctcctggctgcgcggagacttggaagcgaagtgcgcagaaaggctaaagtagaagggggaggggagggagagagggggcgccgtattcttcccctctctggcttctgcttccccgctccggctgctcgctcgctgttgactctgggacatcaatcaccaggcgaaaaagcccggtgcaagagagcttcgcggtttcgactgggtctctccattggctgtgcgcggagaggagcggggtgaatgacagcgcgagggaggggaggggagggggagaggaaggccagaagccgagacagatgcaggagccagagatagagggacggagaccaagactcggagtagttcatgaagagagagaagaggggaacaaggcgaggcttaaaaggaaaagggaaaacaggaagcgaccattcccagagacggacagacagacaaacccaaggagggtgaagtcaactgtcttcccggcctgttgggagccctcccctcactttgaactgggccaaaggagtccagcccacaaggcgtctgaggaagggatgtctctgcccaactggagaatctcctcaagggctcagctgcgaaacacctgtcactcaaccaggagatttactccaaatttcaagtccagctttttagaaagtagaagactgtctactccccaggtatggagcccaggccctgaggcaggacggtgagttcaggcttgcccttctttaaaacacaggcct

SEQ ID NO: 19263 - DNA, 1108 bp, Artificial sequence
  DNA replication origin
gcctccatccacagcagcacacaccaacacaacgtacaacgggggcaaactcacagatctatacacccaaacaggaccagacaagcacaggcacgggacaagcacacaggacacagagcaaaacaaggccacagccatacactcgctgaaaccgccttcatgcctgacacagtattagggccccgcggtaggccctaaaccgagtacctttcaccagaggcccaggattagtggactcccggctgggtttccagcagggcccttcaagactggcctggcctgggtggggaatgggatgggcaccaggccctgctgccccaggccagagaaaacttaggttgggggcactgggacccctctagggagggcccttcctgaggcctagacccaagcaactgttcttcctctggacaccagcctccacaccacttctgccgtggccccagagtctggtaagaagctgcagaagcagtttccctggctgtgctgctgcctggaacagaagcaggaagccaggggtgctttggaatctcctggcccagtatctagctctcagcagcttctcccaagtagttatgtaaaccccccttccactgttgggcccttgaaccgggggacccccaggaggccccatctctgccagcagcagccagtgcctcctgcctcctctctctaagatcggctggctaacctgggctcaatttgtggctgcttcccagcccggacggaaggatcgtggtctaggatccagggaaccctaaggggagcagaaagtgagaacgggggaagggatccacgccagagggagagttgagtgcccagagtggaaacgggagcagagggagccagggccagcagaggaaggcgggagcgggcagcagagaaggcggcagcggccaccacttagtacccaatgtcccgggagtagtcttcccgccaccgatcaccagcctaccggtgcattgttcgtgcccaagataacagggctgggcccggggtaggacacccagccgggagagaacgaaaatgaaaagctagctgtcctgggcggctaagccccgctgccatcctcccagatgaagcctgctctccggaaaaaaaaaaaaag

SEQ ID NO: 19264 - DNA, 717 bp, Artificial sequence
  DNA replication origin
gccagccgatcttagagagaggaggcaggaggcactggctgctgctggcagagatggggcctcctgggggtcccccggttcaagggcccaacagtggaaggggggtttacataactacttgggagaagctgctgagagctagatactgggccaggagattccaaagcacccctggcttcctgcttctgttccaggcagcagcacagccagggaaactgcttctgcagcttcttaccagactctggggccacggcagaagtggtgtggaggctggtgtccagaggaagaacagttgcttgggtctaggcctcaggaagggccctccctagaggggtcccagtgcccccaacctaagttttctctggcctggggcagcagggcctggtgcccatcccattccccacccaggccaggccagtcttgaagggccctgctggaaacccagccgggagtccactaatcctgggcctctggtgaaaggtactcggtttagggcctaccgcggggccctaatactgtgtcaggcatgaaggcggtttcagcgagtgtatggctgtggccttgttttgctctgtgtcctgtgtgcttgtcccgtgcctgtgcttgtctggtcctgtttgggtgtatagatctgtgagtttgcccccgttgtacgttgtgttggtgtgtgctgctgtggatggaggctcaggtcgggttccagagtcaggctcggcc

SEQ ID NO: 19265 - DNA, 1520 bp, Artificial sequence
  DNA replication origin
caccatgttcaccaggctggtctcgaactcctgtcctcaaatgatccgcctgcctcagcctcccaaagtgctgggattacaagcatgagccaccatgcctggccactactatattattatgtgtgatgattattagctttacaatttagtctaatccacaagttgcacaatattgagaccagattccaacagaactagagaaggaagagaacaaaggtattgaacttagagctatgaggctttggattgtcaggaaagttgaatatattttctgtcatgagtgacagtaacatgttaggtgggagcattttgtggaggaaaagcctgtaaatttaggaagaaaggcatatgtgaatattgggcagccaaaggggtgggtcccctcgagtgggtccccccacccttttttaacctagcatctgaacacttcctgatagggagactgtcctcaaacagggtaaatattggtggaacagttttagcttttaatatggaagtctaagggactatgctcttccctcccatctctgacaactagtgcctggacacatgtcctactcttagtgtcgttaaatgatactccatgagttttgaatcttgagggagtgaagtgaagatggaggaaaagttgggaaattactctcagtgatgttcatgccggagtctagcagcatgtggtgctagcagcagtgccttaacgaagcattcctgtgtttcctgaaactgatgttccttaattcctcagccttcctattgatcctgtaaactaccgaatatccctggaatcagtgcatttttcttctcgggttagctggactcagactccacacactgagggactgcagaaaatcaaagactcaagggaggagagtattccctgcagtccagggtggagaagcactctctaaaccttatacagaggagagggcttctggctccgtattggttggaggggacactgtttcctacaggcccattttatggactctgatcacaaagcagacccgtttgtcaggacaactggggtggttattgacttgccagaccagtcgcccagaaatccaaaggaatcagtcccctgaacccctaccctgcctccaaggaccataaagtcagagaagtatagaagtttcggctccctggggaggaggagccagggctgggttagctcctcgccccgccccataactcctggagattccaaagatgtgcagagggagttgcagggccgactgtgatgaagcttacagcactgccacagggaatttccaagtgacagggaccccagggtgcttctcctcaacggaaattaacagcacctgagctctcgtggccttgcccttgccccgatccttcagggaggctgcgagctgggcaagagaactccagggggatggcagggggagtgtgtgtttccccttccaggttctcgccttcgaagtccgcgccttggaatcgtgcgccccatcctccggtcgcagggcaaatcctgacccaaaggacccagcccttttcacgct

SEQ ID NO: 19266 - DNA, 1493 bp, Artificial sequence
  DNA replication origin
cctcgctccgcctttcccggcttggtggcctggcgagcggcgcggggtgaggcagagaggcgcagttccctattttacgaggtgtcgggccggtgtcagacgcagctccgataagtaatactccagtctgagggaccagaacgtggtaattaatcccaaagacttaagtgtattttagttcaggagaaaaaaaatcactaattcaatcgtccggaaaattgaagtttgatgcatgagtcccccctgaaagggacgagctggggccgcgcgcctaccctccgccccttcccgtcgccgcggggacccccccccccacctctccatccctctgagccgccaagtccggggaagtccactcaccctgccctggcttttccagtcacctgaacccggaggcacctgggcttggcttcccaccggcaacaactagcccctcttggagcgcagaaagtgatttgtggggacaatacatatgctccccaaacacatgcatctgagagggcaccacagaaagcccggggatatagagagggcagccagataagggggcaggttagtaaggtcaggggctacaaagcatgtggaagaagggacagagaatctgaatgggctggagtcacaggggtcagcgagtaggaggctgctgttgtaaagtgaagtacatgtggctttgaagtgggtgggaatggaggggagtagaactggttgtgctgggtagtggtggttaggctgtaggtgtgcaaaggggtgtgtgggaactggctgcatccctggactgtacatgtgcggagtggaggtccctggcagacactgacaggtcttggagagcctagaatctgactcccgggtgtgtccacaggccacatctcctagagaacaggctcctgggactggggcaaaggaaggtgggggttcctggggaccagcaccctggagggaggagcattcccaccttgagtgttcctggggccccacatctgcacttccaagtccaggactgccatctgcaaatcaccccgtcttctcctaacagctgccagttctgggagagatttggggctgtgggtgtgtgtgtggcaggctgcatggggactagcaagggcatgttcctgagtgtgtcatcaagtatgtgcaactgagaaactgagcatgtgcggctgattgatggaaacggagcgtgggactgggtgtgtgatgctgcgttcctgcaactgattgttgcaaactagtgtgtgtgcagctaggtgtgactaaatttgctcaatggagaggaaaagagtaaagctgtcactgagtgggtgtaaccagcaggtaaacgatgcccagggtgtgtgaggtgtgcagggagctggtgtgagcagatagctgggagaatgaatattgatgtggaattgaagctacaggcagacaaccagaatcctagctccaaacattttagccaagctggctactgaaatttacatttacaatgctgggggcagggaccacatggc

SEQ ID NO: 19267 - DNA, 1554 bp, Artificial sequence
  DNA replication origin
gcatttctcacatcaattttgcggagaaagagagcccagcggcccggaggcgggaccccactccggtgacagcggctactcgccagcccagcgacaacaaaagcccggagagaaacccgctctgtccaggaaagtgaaagcggcctcagcccccgccccagccggccttggggcgccgcagacccgagagagtccttgcaagatccatacctctgcccccagcggtgtgccggggtgtggaggcagaattggttaatgttgccagaaattcacaccagctcccagacgcttgggcttacagttccaggtgcccacattgaaattcagcctggccttgatgcctttagcctttggcccccgactccccaaggatgaggccctcggggctagaatcgaaacttgggaacccaaggctccaccccgcgtctgactgagtgatacctgcagcgctcccggggctcagccctgttttcggggagtgcagggagaatgcccttgggtctggggtgggatgcaggaaatgcagggcaagaccccctcccaccctttgttcaacacaaattaatgttgtactgtggtgtgcccccacatacacaggcattttctcccagcatttcacggctcgttttttaccccgacctggcgaagcccgcttctctcccgatttagcagctgcctcaggtttatgggcaagaggcgcctcctcctgctgcttccccctcgcccttcactcttaagcctgtcctgaaaatcccccccaaatctccaaggctagggcgaccggcacgaagagcggcaagaagcccagcctgccgctgcttctcggaaacgggcccaccactcagacacggtcgccgccggttctagtaaaatggcaaagactttatttattggagaaagaggccttgggtacagtctagggaggagaggggaagggaggagcagggaaggggcactcgcagcccactcacatccagccaccctcctctggccaagtcgggtaggagtggggtgttcgaagtggcaagagagacccagagctgtggaggaggtgaggtgagggcttgggtcggcctcctctctgtctctgtcacatgcaaaaaaattctaaaaagagtacaaaataattatagggctttgggttctgttttcgatagttggttggttggatttccccctgcattgtccctaagagccggactccaacagtcagtccgaggaaatgcgggagggagggaggaatcttaaaaacagcattagtgggcattaggaggcagaaatggcatcgaaaacagacttttctctcagagggtggggaggaaagatcgattttgaaacttgcaagtcaggacctgactgcccacctcttcccctcccacatgaggaaaaaaggcccgaggaaatagaagtcaactgcaataaggccgagggaggcgaggaaggagcgggccggtgcattcgccacatgcagagaaaaatcaaaacagccggagctgccactcccctagaccgcagggttagtgttccccgccctggtttctgtctcgccctcag

SEQ ID NO: 19268 - DNA, 1349 bp, Artificial sequence
  DNA replication origin
tgcccgcgggctgggtccccgcggcccgagccgccccggccgggaccccgaacaaggccgagatgacttccaaggaggacggcaaggcggcgccgggggaggagcggcggcgcagcccgctggaccacctgcctccgcctgccaactccaacaagccactgacgccgttcagcatcgaggacatcctcaacaagccgtctgtgcggagaagttactcgctgtgcggggcggcgcacctgctggccgccgcggacaagcacgcgcagggcggcttgcccctggcgggccgcgcgctgctctcgcagacctcgccgctgtgcgcgctggaggagctcgccagcaagacgtttaaggggctggaggtcagcgttctgcaggcagccgaaggtaggcgcagctgctgggttcccctgcacccagcgcctcgcgccctgtgccctgcgcgcttcgtcccctatgcctctgctcgcctctgccctctccggccgccagggccttccagcctgagcagctgcttatgggagtgaagatatgtgggacgggacccaatccttatttcccagggacctctgggtaggccagagctggggggtggcaggagaagggtggccaagctctttccgcagtctgcttgctttgccgggctcccttgcgttcccagtgtcctgggcgctcttagcccggctactcggcgtggggaatcgagagtcttttgccggggaccttatgggtagggtagagttgaagtgattgggaagggatggagaaccaacattcacaccgcaattagggtgtctctgtctggctttctcatacccttagagactttgggtctttcaaaccaactcttaggtagggggcagagaccaaaacaatttttcctagggacttctgggagaccaaagacaggagatggtttgccatagccaagacttgccctggtcctggaggctgaattaaatctgagaagggaacattggtagactgcaggccggacaggcctgggtgggttacggagttacgggggcgagagccagggtgggcttcctctctcccaacgcgagcctacactgtcctttcctcccaggccgcgacggtatgaccatctttgggcagcggcagacccctaagaagcggcgaaagtcgcgcacggccttcaccaaccaccagatctatgaattggaaaagcgctttctataccagaagtacctgtcccccgccgatcgcgaccaaatcgcgcagcagctgggcctcaccaacgcgcaagtcatcacctggttccagaatcggcgcgctaagctcaagcgggacctggaggagatgaaggccgacgtagagtccgccaagaa

SEQ ID NO: 19269 - DNA, 1000 bp, Artificial sequence
  DNA replication origin
cagcgagtaacttctccgcacagacggcttgttgaggatgtcctcgatgctgaacggcgtcagtggcttgttggagttggcaggcggaggcaggtggtccagcgggctgcgccgccgctcctcccccggcgccgccttgccgtcctccttggaagtcatctcggccttgttcggggtcccggccggggcggctcgggccgcggggacccagcccgcgggcagctcgggcgccggacggcgcgggcaggcagcggcgggtggaaaggaggccgcactgggcagggcgcgggccgggcgcggggccgattagcgcggcggctgaggaggggagaacagcgcggggccccgggaagagggcgctgacgcgggcgccgctgctgctggggcttccagcaatccggggccggagccggggcgcgctgcgcggggctccagtttcgccaaccccggtgctatttaaaggtgtcaggtggctcggcagtggctcctggccccgggtcctggcggccgcagttggaagagccgaggcgagggcgccgatcccggactgcgagggaggcggagagacggggcaattgactattgctaacaagttagccttgatcgcggtgtaatcaattatctgcagcggcacttctttctctttctctctcctttctccctttttcctctcttctttgcctctgttctctcctcctgttctcgctctccctccctccctctctcttctctcttctctgctccccccttctctctccttctctccctctccctcgccctctctttcactctctgtctgtccaatgcaggcggctgtaagttgggaagctcattaattagcgggccgggggtaggaggagccggctggaattagcctgcctaatgcgcctgtcagtccgggcgctgcgctgcgttcggcccgagctgtttgtaaattacattagctgctcctttattgcacccgaacctcgggcgactgaaaagccaccgcccccacccc

SEQ ID NO: 19270 - DNA, 1866 bp, Artificial sequence
  DNA replication origin
ccgcaggaggtcagagccggctgcgcagccttgggtgggcgacgcgggaagggggtggaggaccccaggggttgggggagggggctagtcggagagctcagccttctccacgcggagaggcggaggagggaattgttggcggctctggacgcctctccccggcctgattccgaagcggccgccctacctcctccggcaatcttgctcactttcctccggcagccgctccccaggctggctggggccaccaacggcctgatgatgggcgtctgaagagtagccaggccaggtgccggggctaacggggccggctccgtgcctccctgctgcgctccgcccgggccccggccggggccccgctgccggccccgcctagcccagcgcccggcttgagtgcatggccaggccgactccagctgttccggatgcggggcgggggcccggcgggagccaggccgcggctggggctttgctctcaggaactcgcagggaggccaggcttccagttaggctggggctaaagaccttagggcccgggatctgtgaatatcgggagaacatgttgtgtgcattgttacttgaaggtgtttgtgtttttgaatgtgtgtttgtgtgtgtttctccatgcgtatatttgtgtaaatgtgtgtgaacctgtgggtatataggtgtgtttgaactcagctatttctttcatttccctgaggcattccagcagggctgtgccctcaggccttcctgtcttgctaccccattctgtttatgtggggccactggcctccttactaattttccatttctgcccttggagaaaggaggggaggacctagagggggttggagtccagggagaagggctgttcccctcccacacacacacagccctggccctggctttgtttgtaaactcctgggtgggcggtgaggttgggcattgggcagcaccgcttggaccagaaaagggcccagagaggccaaagtgaggatttgtggcccaggccaagggttggaatgggaagattaggatttcttgccccctctcccctcatatctaaccccagagagggagtgagctaagctgggctccggggcgggaagcaggttctttctctggatgcctcagcgtagggggcctctgcacagcagagataggtttcatgatctcaccttcagttgtttgtttggaattgtggctggcagctctctggggtaaaaaggacagtgtagggagaaagggttcttgtttggtgccccagttctgtgaatgttgggaagaacccctaccctctaactcatctttgtcctgcattttcggggtggcagtaagcgagtggggggaagacaaatgctcagaggcaggattggtgagaatgggaatcacagttccctcagagctgcagacccactccagggcagacctgtctctactcttctgcgctgccctgggagccacgaggtgctgctgggcctagcaacagaggagtcagagcctagagaccagcagaggcggaccggtgggagagggcgttggggagctgaatctgggtggcttggaagctctggggccaagaggggtcagtcctctcacttcctgccctcaggatcccatttcagccttttcctgccataaccccaaccccctgacccagagcctcaggcaagtgaggctagcagggaggcagggaggcccctctagatccaggaacaaggacccttggatcccaatagagagaaagagagagagagagagagagagagttcctcccatacttccacacccttcctgtcctcttcagtctttgcatcgcatctggtactagcccacaggataggactttaaggacaagccaatcccctgctgttgccc

SEQ ID NO: 19271 - DNA, 2094 bp, Artificial sequence
  DNA replication origin
agcccaacccaacttggagaatacttctagtatttctttcataatcctgtggacagacagaaagtccccaggagctgagatgactgctggatgtgcaggagaaagagacccacttgcgtgaccacatttggccccaggcgaagcgtgcccgcaacatggctgtccatgggcaggccaagggcctcactctggcccccaccccaaagttgaagaccgtgggctggatgaggacgctcacctgttttcctgtggggaggctcagtgggcatgtcagagagaatgtgggtctcagaaaacccccacccttatcccattccttctcctccaattccttttcttctctccagtctgggggtgggggtgggggctgagcagataggaaaaagagggtagttaatgcttcccacttgacctttctttcccccaccccccacccccacccccagcgggcgggcaggctgaggagatgaatggggtagagggcacgattttcacattaatggcagcatatgttgtgtttattgacactgcagcgtcggtgcttgtggtggttgtggtaggggggtgcctaggaggccacaggcaggagggggcaagggaaagaggaggcagaggggaaggttgccggcgggcggggagggggagagggaagggagcctggggcctggggggagggaggcaggaacaatattgttgcaggagcacaccaggtgctcgctgtcagcccgaacaaaaaggaagagtcagcaactcttgaggggggtggtgaagaggcgggagccaccgcctgctccagcctcgcagctccagccttgcagcctctccctgttaacccctgctctgccatgcagctgaagaggggagcgacatctggggctctccccgaggccaggagctccccccactgagcccaggagctccccccactgagcccaggagctccccacagtcctggtctcctcagaaccatcacttgcctttagtcacctggaagatgcggccgtctctggagtgggcagtggcaggaattgcctttgccttccccaaagccgaaggaaaagaagcccctctctctggtccaccctttccataacagttgggcctatgtggtccttgaggagttggcaaaccagagtggcagggccaatgaccttgggcttctgaaggcagctgtgggtggagggatgtgaagaggggatgaaaatggaggatgggttctctgctggaggtggtctgtacagacccccacagctcctctctctctgacctggctacagactccttgcttcctggatgtcttcccagagtcctcttgcctggggcatggggaggaggaggagttggccacatggtctgttctgtagacatgtctctcagttgactaagaagactgggctcgctgagttagcctggaaagcgctggaggcccatcctaaaatattcaggtgtggggaggatagatggcaaatgagttgcccaccccagaaccccattctgggggtctgggagggcctcctgggttcctggccggggagcagagctgcaggtgatgtctacagctgtcaccgtacccttccctgcctcccttcctcttcctgcaaagccctgcatggaagcaaggtacttaggactgcttggatgagcttctccaattcgcttttcttgtagctcctctagggctgagaggttactatgtaggggaggatgggtgggagagtcctcccaggaggggtgactggtctcctttcaatccaaagagtcaagaggcttctacctccaaccctgaaggctggtcttctcgtctgtgatctgacattctggagccgtcaactcttgtgttggctattctacagtacatgtcttggtcacgctagacgctggacgagggtgctagttccccacccttgcacagcgggcggggcccatagaggggaagggtgtcctttccgtatacccgcctcccgccccaactctgtctggccacctgagtttaggcgcagaggcctccgtggatctccttaccccgggctggaggcgaggcaggcacgctggcctggaaccctcctcgacaccctcatcctgcagacagtcagg

SEQ ID NO: 19272 - DNA, 1452 bp, Artificial sequence
  DNA replication origin
ggggggaggaggaagagagaaaataaagaaggggagagaaggcgagcgggagcgggagggcagggacaggacaggacagtcttcgtaggggcgtttcttcacaagggggatcctttcctggagctgccagacgccgcagtcgccagccgccgggcctcaactctgtcattgagccgccagggggcggcgcgaccctgtgctctccccgcggatctcagggtctcctcgctggggcgcgagtgaccggtcgccgccgatgattggtccctgcccggcgccctctgccctctcccggaggcctcccgcgtggcagggtgggcgtacggcgactccccccaactcctgccccaaaggaaggaaccttctggctttcctggtgttggccctggcgccctgggaccctagagccccggggaagcgcccaaaggctaggtcaccggcccagggctggccactgtccccggaagacccccaaggccgcggccgacgcggcatggaggcgctgggagatctgggccttcgcagcccggctagggagcgtggacgagtctccgggacatcctgcgcgaagggtccttctgtgcgtgctgcgcgggcgctaacgaggccagccagagtcaccagggatgaaggctatagggcccggttttaactcattcggttcctggccattgactgtccttttttcagttctggggcctcatcccttcccaaactgagaaaataaaatacagcccaacaccctcaatggcaagtttagccaccctggagaggggagcctggtggtgacggctcagtgttctcgacctggcaggatagcagaattacttgagggagatttttaacataagcgtgtttacccgcacgcatgcattgtaagaagcttgtatgtagaggcagggcttcctggaagcatgcccggtgtcagagctcccccagataacgctgatacagagtcccacatgagcattacctgaagaaactgcctggaggtgcggcactgggaatgggaacatggggagaccaggagtggggcactgtcagctttggctccaagcagatcaataatagtacaagatataatgggctacctgccaagtgggtacactgaaaaatgtcacatattttttcatgttggatgtggtagctcggcctgggctatttgccctcatggatgtgtctgtgtgtcgctgcatgtgtatgttgctgggtacctgcaccactgggtaagcattgctttatgcatctttttatgtatcctctgtgtgcggatgtcactgggtatgcatcatcccgtgtatcactggtgttatcatcagcgtttactgagagcacctattgtgtgtgtgttgtcgtacatgcctgtcctgatgagagtgagtgcggatcctggggtgtgtttgtgttgtatcgagcacatctctgtgggctccattgtggggcacagccatt

SEQ ID NO: 19273 - DNA, 931 bp, Artificial sequence
  DNA replication origin
atacccggcgcctgccttccgtgtgcgcgcgtgcgtgtgcgcggcgggcgcgggcgcggccgcgggccggagcgggggtagggggtggttctggggcgcgccgccgagctgaatgatttccagcccctactcaataagaggagaatttagagcggtccctgagctgggctcccagaaacagccttacacgtttattttccttagctgaacaggaaagaggagaattatatgtggatttataggacaggcgcagctcaacccaaatgctcccgctccagggggcggggacgagggggagggaggtggcaggccgggcgccggccgctgggaccctcgctcgtgcctgcgttggtgggggcacacccccctcgccggtcgctttaattacatttgttctcgtccttcgtgagggcgagacttcggcgcggcccgcgtggggggcgggaggaggcgcaggccaggactgcctggaggggggcgcggggaatgggaacgtggggagcccgggagggggtgctgtcagcttttgctcagaagcggatcaatagtacgagatctaatgggctaactgccaagcgggtgcaccgaggcgctgccccgcgggggcgggaggcggtgggcgaaggacgagagaaaggaatgggggtgggagagggagtgaggacggggaggggggaagggcaggaagagtggaagaggtggggggaggaggaagagagaaaataaagaaggggagagaaggcgagcgggagcgggagggcagggacaggacaggacagtcttcgtaggggcgtttcttcacaagggggatcctttcctggagctgccagacgccgcagtcgccagccgccgggcctcaactctgtcattgagccgccagggggcggcgcgaccctgtgctctccccgcggatctcagggtctcctcgctg

SEQ ID NO: 19274 - DNA, 981 bp, Artificial sequence
  DNA replication origin
acttctccagtatatttccttcttttctcagtatactgtcctgtcaagttctcaacaactacactcttttattcccaaggcagcttttgaggagctgttcagaagcattaacctctttcagtcccagatcatgagggggaatgcgctgatatccaggtctgggaccgggagctgagcacatggcccgcctgcctcgcctgagcctggaggccccaggcgggattgtctgtcctcactcatccttgccgccaaggcctcctcgcctgtatttatatacactaaagcctctgctcgaataaaacatccatgtaaaatccaatttcctcagaatctcttttggagcctgggcctgagatggagtaggtaaccccggcggtaactgcctgaaccactcctgccggctgcaaaggtgaggcccatttttcaattatctatctgctgtgacagcagcggtccagccaccgagccaaggcagggggaggggagaggcagagctggggaggagggacaaagagggcaagggcacggtgggggagagggggagggagaaacctagggagaggaggcacagggagagacccttgcgcctggcacccagtaggtgctcaagaattatttggaaaatgagtgatcaaagagtgtatagggagggtgggggtgagatctcctcctcggagagggggagagctggagagacacagggtgggtggagacagagagagggcgggagaggtagggggaggggaggcgagcgtggatggagccaacaagaggctcctgtgtcaatccgtggaaacgggaggcagagtgatgcggtcacagctcctgccatcaatatcctctaatataaatgtcagtgatgctattttccgcgcagtcatttcgcacactgctgattacattaacgtataatggaggggcgccggctccactgctttctcccctaaccctccccccggtgatgtgtcaatagccgcctcc

SEQ ID NO: 19275 - DNA, 1404 bp, Artificial sequence
  DNA replication origin
cgcctgcgcacggagaagccgattctccttggcccctcagcctgcgcctgagaggtaagagagggcggggggaaggaagaggaggcgggatccgggcgctgcgttggctgcggcctggcaccaaaggggcggccccggcggagagcggacccagtggcctcggcgattatggacccggccgaggcggtgctgcaagagaaggcactcaagtttatggtgaggagacggtggaggccggggaacggtggaggcgctggcgttggcggcgtcgctggcctgggccgcccgcccactgcgggaccgggcagcgggaccctgggccgaggctggcggcggagcggctggagggatgggatgggagctccagaaaggaggctgggggttgcggagcggacccaggggtgggggcagcggctccgccatcttgtggatgagaggccaagtgacagcgggagcttaatcgaggagggggctccaggcggcgcgcggggccctggagggaaaggggcgtggggactgttactgaaaagcggaggaagctctctggagaaacgccgtgaggccgctggcggggccttcctggtgtcagggttaccggtaaggcccgggagaggaggtgcattcacgactggggaagggagcgcgggatagagtgaagacagatacggtgggtagaggggaacgggcagggctggatgcagatggatttaagggtggaggagggaacgctagggctggtgagaggcttatagttttgtagaatgaggagggaggatagcctttgccttgagggtggaatcccagcttggccaaactactgttgacaaactctggaagggaagaggcctcactaaagaagataaggactgggaatgaggacctagggctataatgacagtccctgggaggggaaaagggtgttgactgtaagctagaattacaaatgtcagggaggggtacataacgctactttgaaaggagaagctaaatactgtaataaggacaaggtgatgaaaagtaagagcagattgtcagggaaacatgggtacaggagattggggcaaaatgagtatctaatagggtaagcaaaacaaaatttaaaggtaaattgtgggacggtaaaatgtggaggccaggtgctttgtatcattttctgggaaaggaaaggccgtggagatgagagttgcaaagacccataagaagtgatgagatcagttgagaaatttaggagataaaaagggtggaggttggtagagggaagtaagtcagggataagtcaggatttgtggttacccgtcagttttaggttgaagcacagtgtgagcaaagattggattttgtgggtgtgcttaaaccccttggaacatatttctttaactttgtatcacgcttttctttttgctg

SEQ ID NO: 19276 - DNA, 1949 bp, Artificial sequence
  DNA replication origin
cattggcgggtgtatacccaggtctggtggcagatgtatgtgtgtgcgtgacacaaaaggatgtgtgcatggtcccatgaggtcagggttgtgcctgaacaagtgctgcgggtgcaccgtacaaggatataggcgcctggcgcgtgtgcaggccatgtgtgtgcacagctgcacgtcctggccgcaggcaggccagacgcccggtgagccccctgcggccgctgagcgcagggctttgttcctccgccgagaagggccgcgtggtttcacggctcctcggtctgggcgtcttgggccccgacgtgattggcggcccggcggcagcggctgggctccctcccggggcgggcggagcaggatcggctcccgttaccggcacggggtgggggtgggggggctccaggccatccatcttctgttattacagcgtaatggggctgctcgggcgcccgcccatttgtcatcggcctcgttcgctgataacgggcatttgtcatcactttcctctgcgccaatgtcatcagcgcggctgacagcgggagggggggcgtgcatgagcacaggcgcgcacacatgcacatgggcctgctggatacatgctcgcgcacacacacacatgcacgcggaacctgagagacacgccgatgctgggggacacatgtccctatgcagggatcaaggttccctggagaggacacacatgcagacacacactcacaacagcctcgtctgtcaagatattcccagctggagatcctcttccccagtggaagagctgtatgtagggggggcaggggagaggatattcctggttaatggcagcttgcatgcaggtggccctctgccagcttcgtgtgcacacgtgtgacatcagccaccaacatttactgcgctccccacaggctgtacaggcctgaatgtgactgtgtgttccattggcagcacagggacagccagagagtcacaatcaggccgggcgtggtggctcactcatccctgtaatcccagcattttgggaggccaaggcaggcagaccacaaggtcaggagtttgagaccagcgtggccaacatagtgaaaccccgtctctactaaaagtacaaaaaaaattagctgggcgtggtggtatgcgcttgtaatcccaggtacttgggaggctgaggcaggagaatcgcgtgaacctgggaggcggaggttgcagtgaaccgagatggcaccattgcactccagcccaggtgacagtaggagactcccatctcaaaaaaaaagagtcacaatcagggctcccaggactctcagatacaaggatgttggtggagtctgcatggctggctggggggtggtgatgaggtgggggcatgatggctgctggctggtgggtggtgggatgactgatccccacaatgccttcctcccaaccctccagagacagtgtggcatgggagtcactcttccactcctggccctattcaggctctgagcctaggctgatctgcagcaagagggacttaggaaagactccagaaagaacttcctgcctgaaaggggtgtgaggcagattaaggacagggtaacactggtagtccagggaagcttggaagggaaggaacctcccccacttgtctgtgtcctatgccctctaggctgggtcaggggccagcccacttggggcacggatatgtctttctgatccacattcacttcaggattgcagaggggactccattagcgcttattagagagagacacccacccccccctctctggttcctgattgtttggcacatattatgtgctcaataaattgctgtggaatgaataaatgattgaagacagagtgtatgggggaggtgggaggtcctcctagtccctcctagaatggccaccagcctctgatggccaagatctcatctcatgccctctccctaactccccttttcactcctgcag

SEQ ID NO: 19277 - DNA, 1449 bp, Artificial sequence
  DNA replication origin
cagggaggagcctcactcgccactctagcttcaggctctgccttcctgatcctaacaccctccaccctctgggaacaaacgggcctctgggatccgaaatgggagcggccgcactgaaacggggatggcgggatggggagtgctccgtggggcgtccttggggacgggtgcggggcctgccgggctgcggggcctggctgggggcggggcgggtattgggggccacgggcgcgcttcctggaagccgccagcagagggcgcgcgaggaccggcgaagaggtccggccgcgcggaaggcctgggtggggtgtggttgagggtgcggtgggtgcggggcaagaaacccgcggccgggcttctctccgatctcgggcgtgagagtggagtggggtggagtggggtggggcggaagggtccccactgcgctgctgcagcgcgagcccccgctcctctctgcaggaggcggcccgaaggggcctggcgtgcccttcgaagggggtagagcctccccgtcaccccgccgggagctgagacagcggagctgggactggtgactttggtgctgaatccggtgggaccccattccccacactcaaccctggtcagggctctgtgcctcagtttccccgtgggtgtgttctgtccttgatcctggatgttctaaactgggagatcaggtggggtgagaacaccgagtgggcgggaaccagcacctccccaggtccccaccccatccctctttccccgcccaccttgaaggcagagcctgagagaagaaagagatggggagaggagaaaggcgtgagagacggagggaggggctgcctggagcaccgtggggaagttgagaaggttcgcggaggagggccgggatgcgtggacacgaaagcgggcccagctcccccggggaagctcttccgagacttgctgaggccgtctgcgcctcctcccgggctgagctgggggctgagctctggactgcatcccagggaccatcgctccgcctgtagcccacctccagccgccgtgatttatggctgggccaggcccgtcgaccttggacggataactaatgacaggtcaataacgctacagaagaagtgaactggtgaggggaggagggacgaggcccattagccggcccatcccctgcctgccggcatctcccctctcatcctggtgcctttcactgcagtccccttgctgggggcttcccaaggacctcctgacaggtctgagaggtgatggttaacaccgctgcaatgggggtgggggttggggtagaggcgtgaccagaacacattggagagacccaaaatgggtcacaggaaggtgaaggagacaggtgggggtggtgggggttcctgggaacacacgccttttccattctcatattgggaagccagcattgattgaggggggagggagcagtccttgccgttggaaggc

SEQ ID NO: 19278 - DNA, 1490 bp, Artificial sequence
  DNA replication origin
cccaaggacgccccacggagcactccccatcccgccatccccgtttcagtgcggccgctcccatttcggatcccagaggcccgtttgttcccagagggtggagggtgttaggatcaggaaggcagagcctgaagctagagtggcgagtgaggctcctccctgcggagcccgaggggcatctgcagcccgaatttattcttcgcagggaggtagagaggggacatctccttgcagaccgcccctccgcttggtggtcctgaggctcccgtgggcacaaggtaagggagagccaaggaggccctcaggtgggtggaccctggttctcagagtctctgaggtgggaagctggcgctcaggactgttgccagcaggaaggggaagagcatggcctctgggttctcctctggggccacgcccgagggccctcggctccctccccgttaggcagctcgggaggaaggggaacaggccgggggatgatccccttacaaggtgctgtctggctgacaggtagggagggtagctcgaccagaggctatgctcaaactggccccaaagtgctccacagaatgctgggtccaaggtcaggatgatgagggaggattcctcagcggacgcctggagctgtggggaggcgacgtctcaggccaggcgaggcccccatcaggccctgaggtggagttggcatggggacaagtgaggcatgtgtgggctgtggggccggaccgggtgtgtgcagggacatgaggccaagggctgaggggaaagggtcaggtgtgtgcaggcccgctggggccatgggggacagggcagacacgtagggatgtctgtgagctacagagcccggacccctgcctccagcagggctgtagcttaggagtgctcaggcattggagccctcgacaccactaattcccaaatggaggtggagaggtcaggagaccccacctcagggcaagcgggcgactgctgattccaaaccccaggcttcagggccggggactgtgtccttcaacatcagcacaggaaccctccacagactgaaaagctcaggctccttgcttcagataagggggaaggagggaaagaggttaggacagaaagcccagttacatttgggatggatcgaaccagtcccagagaggagccaggaaaaccagctgggcttcccaggtcacacagatctgagctgaaacccagctctgttcttcatatggtgtgtgacttagaactagtaaatgaacctctctgggcctcactttcatcatctgcaaaatggggataatacaactatcagagggctgttgggaagcctacatgatataatccatgtgcagaatgggttaagggtggactggccaggctcaggagtcaataaatgacggtgaaactctgctgaaacaaaccagaaatagggtacagctaactcctcactggaggctcctttcataacctgaaaaatgtgccttggtcttctccaacctccatag

SEQ ID NO: 19279 - DNA, 989 bp, Artificial sequence
  DNA replication origin
gaggggagcgcaggggccgggaaggaggcacaaggaagagagtatgggaagaaggaggaatggagggtcagggctaggcggcgggagggcgccaggccgggaagagcacagggacgagggggtcaggcttgggccgacatcgcggggacaggggtggccatggcggcggcggccggggaggaggaggaggaggaggaggcggctcgggagtcggctgcccgcccggccgcggggcctgcgctctggcgcctgccggaggagctgctgctgctcatctgctcctacctggacatgcgggccctcggccgcctggcccaggtgtgccgctggctgcggcgcttcaccagctgcgatctgctctggcgccggatagcccgggcctcgctcaactccggcttcacgcggctcggcaccgacctgtaagcgtccgctcgcccgcccgctccccgccccgagccggccccgcgtcccgggaaagggcggggcgccgcggcctggtcggcccagggtcgtgtcgcaccccgagtttctaggcctacacctgacctccgcctacaccctttcccgagcactctcggggacccctttgcccctcctccccaaggcctccatctgaggcagcctcccgagagcatccctcagtaggcaccctcccgggtgggccgctcctcacaattagccatcttaggcactccctacagctttcgattgtgtgtttttgcagaggtttagctgccccggttccttcgccccagaggagccagtctggtacggtgctttggacgattccttgagtccaggtctaggactcaggttccttaagtggtctatcataaatttttgtggactttcatctttcatcctccctacccttttctaaaggttgttaagcttcagggctcggaccttaagagaagccctcggtcccagtgttcagccatagtttatgacttcatataggcagagcgacacgaaaaagggggcctgct

SEQ ID NO: 19280 - DNA, 903 bp, Artificial sequence
  DNA replication origin
tagggctgcagattcgttgggccctcacatgtggcccgtggaaaggaggcatcactcgaggaagaggagggcttctagaggggcaaggccacccaactaggggcttcttgagggcaggtgctccaaatggccgcttcctgagggcagcgggtcctcttgtggcctcaggcagggccctgaaaccggcctcacgtgtttgcagcgcgaactcctgtgcttccaccaagcgctctcggggatgcgggggtggtgtcagcgccccggccccagcccgcaccccgaagtggctccaaggctgcaggtgtgaggggcgtgcccagggctcggcccgcgccgccccatgtgacccggtccgacatggtgtcgcctcctcccggggcggcggcggtggcggctcgggctgggctccgcgtcgggccggccccgcggccgctcatgggcagccagggccgctcggggccccccgggaacggcgggcccggcgagggcgagggcggagaggcgaggaagctgcaggaagggagggtggcgagggggaagcgaaggaaggggaaggggaagggaaaagcgagagcggggcaaggcggaagaggaagcggggcggaagggaagcccgggccgcagacggcgaaggaggcagccgggccgggggctgacgcgggagcgagggcatgcccaagggaggaagcagagggaggcagaagcgtggaggaaggggcgagaggcatcgtcaagggagtcgaggggagcgcaggggccgggaaggaggcacaaggaagagagtatgggaagaaggaggaatggagggtcagggctaggcggcgggagggcgccaggccgggaagagcacagggacgagggggtcaggcttgggccgacatcgcggggacaggggtggccatg

SEQ ID NO: 19281 - DNA, 1014 bp, Artificial sequence
  DNA replication origin
ctcttccttgtgcctccttcccggcccctgcgctcccctcgactcccttgacgatgcctctcgccccttcctccacgcttctgcctccctctgcttcctcccttgggcatgccctcgctcccgcgtcagcccccggcccggctgcctccttcgccgtctgcggcccgggcttcccttccgccccgcttcctcttccgccttgccccgctctcgcttttcccttccccttccccttccttcgcttccccctcgccaccctcccttcctgcagcttcctcgcctctccgccctcgccctcgccgggcccgccgttcccggggggccccgagcggccctggctgcccatgagcggccgcggggccggcccgacgcggagcccagcccgagccgccaccgccgccgccccgggaggaggcgacaccatgtcggaccgggtcacatggggcggcgcgggccgagccctgggcacgcccctcacacctgcagccttggagccacttcggggtgcgggctggggccggggcgctgacaccacccccgcatccccgagagcgcttggtggaagcacaggagttcgcgctgcaaacacgtgaggccggtttcagggccctgcctgaggccacaagaggacccgctgccctcaggaagcggccatttggagcacctgccctcaagaagcccctagttgggtggccttgcccctctagaagccctcctcttcctcgagtgatgcctcctttccacgggccacatgtgagggcccaacgaatctgcagccctagaagttgacaggttccatagcttaggttctcacacaggcccggaagcacggtcctggcgtgagcttgggtgttagacgtatttggggatttgcagtcttctagatcctgagtccataacttcaaaaacagtcatgtatcaggaaatggcacagctagggcttcttatcagtcaccacccaagtgcaagtggattctccaaggactcagcatccattcttcataccacccattc

SEQ ID NO: 19282 - DNA, 1349 bp, Artificial sequence
  DNA replication origin
cccagccccgagccaccccgaggagggagctgaggcacagagaggtagcacccctcctgaggtcacacagcgagtgagtggccaggatagaaacgaaggtctcggagcccagcactgtcccccatgcatcctcgccggctgggggcatagggaacacccagccgccgaggaagggggcagccgcggccaggggatggatgttcgatgccaggggaagccgggtgactgcagcagagaccctctcagcgcccctcgggggaggcttgtggccgatttggcccaatgatcgggtgcccaggttccctgcactctcaacatttgctccgtaaatttgtctttataaatgtcaggggtcggggagggctgcctccctacttaaaagcgccctgctcctctaggaaggcccgggcaggggccctgcgctgggcagggagctcgcttccctgttccgggctggccgggagccccagggtgtctcccaacaggtgggtccagcttctccctggggctcgttcatcctgggctgggtctgcccgacttgcgtgggtgggggatggtggcctgggctggcatgttgggggaacccccagcacctgctggcggcttggggcagtgagggggacgcagggtgatggggccactcgggcccctgggcggagtagcattataatggtgtattgtgtatttttcaatttcctaaaggtaactgttcagtcctcacctaattttacacagcatgtgagggagcagagcctggtgacggatcagctcagccgccgcctcatccggacctaccaactctacagccgcaccagcgggaagcacgtgcaggtcctggccaacaagcgcatcaacgccatggcagaggacggcgaccccttcggtaaggcgcgctgaaggtagcttgtgggatgcgcggcgcctggaccaccagtcccaactgcactggccgggggcctgcagggtccccagctcagaagggaaggagttaaggcagaaaggtgtcttgagggtcagctggggaagagagggctagggaaggggcctcggggagtacttggccacaggtgcccccttccctgcccagcaaatgaatgaatctaggaatctccctttacacctccccccttcatacactcctccccagctgcaggtggaggcagggggttcagggggagggggcctaggtttaaggcaagcgcttgaaagaggatatgtcgccagggcccacaaaaggagagtgggaaagagaagggagagaaatcccctcaactctcccagttggaaaaggaggttgctgggaacccttaaatactttaatcggatgggtcaatttacacgtggaaact

SEQ ID NO: 19283 - DNA, 892 bp, Artificial sequence
  DNA replication origin
cgctccggctcccgagcagccagcggccaccggctccggcagcggcgcacagcgattcggtgcggcgcggcgagcacgacgttccacgggacccgcggagccgcgtcgtgatcgccgccggcctcccgcacccgcaccctctccgctcgcgccctgctcagcgcgtcctcccgcggcggcccgcgggacggcgtgacccgccgggctctcggtgccccggggccgcgcgccatgggcagcccccgctccgcgctgagctgcctgtgagtaccgcgccgccctgccccgccacccgccccccgcgcccctcgcctcacccgcgcctctctctcccgcccgcttttgtctcccacaggctgttgcacttgctggtcctctgcctccaagcccaggtgaggaggggtgcgcggaggcgggggccgggcgcgccggtgtgagacccgggtgggcagcgccggtcgggggcaccgggactgactctgcggccggcgcgggagggctgagggcaccttagaaacccagccccgagccaccccgaggagggagctgaggcacagagaggtagcacccctcctgaggtcacacagcgagtgagtggccaggatagaaacgaaggtctcggagcccagcactgtcccccatgcatcctcgccggctgggggcatagggaacacccagccgccgaggaagggggcagccgcggccaggggatggatgttcgatgccaggggaagccgggtgactgcagcagagaccctctcagcgcccctcgggggaggcttgtggccgatttggcccaatgatcgggtgcccaggttccctgcactctcaacatttgctccgtaaatttgtctttataaatgtcaggggtcggggagggctgcctccctac

SEQ ID NO: 19284 - DNA, 1426 bp, Artificial sequence
  DNA replication origin
ctaaacatgcttgagggcctactgtgtacaaggatgagggtaagaccacaagcaaacagacataacctttgcccacttgaagcagtgcagagagggaaacagacactcaatgaattgtgactcaggccttacacagaacacagggaaggcaagggctggcctgggctgtggccacttgtgtccacctgacttgtctccgcctgatggacccacctccccatgggctttagaggagacagtgcctgccaagcctgtggcagatacaagtgctcactaactggtggtgttcctggtgataatctgttgggaggaggtgaaggcaggtcttcctggggaagttgcaaataggctgaagtctacaggctcagccacttcccccatcattcattcattcattcattcaacgaactcttaattgcagaacagctctgcccagccttgtgccacgagctgtgatttctgagctcataagacatggtccttgtgggcaaggtctgtgtgggcaagagcccactgaacagactcctggaggaggatggcaagtgtgctctggaagtctacttctctgaggagggataagatcttggaacgcaccctctaactgttttcccatctctccattgctcagtgtttgcatttatggctgggagttggaaagatggggcacagggaaaggtgggacacagagcagggagggaggcagggcctggctgtgctgctggactagggctgccgctaattttggcctaatggcttcctgggaccacaccaaaccctccagccctacccccaggggaatggagggtcactggggaaggggaggttgtaagtgaagacagcagtctggtagggcatcacctgctcctcacaaggcacctgtcccagagcatctctgtccacccaggctgctcccacagaagcagcatgggggctcagggtttccagaaacctcaggggggaagccacaaggtggggggctaggaaaggcttagacaagtgcctaccttctcctatgccccaagcccagctgaccagcccctgcctagaatacagtaggtgtgtaaatacctgtgaaatgaaaaacgagtggggctttgagggggaaagggctgggtggcctggatggaagtcccttcccccagtaaaagctactgagagtttttttgcccctgctgcctgctgaggtacggggacagtgggtcctgccagggacctccggactctctcttccacacaggtggctcggggtgctcctcaagcttcaggctagtgtgtgtgtgtgtgtgtgtgtgtgtgtgtgtgtgtgtggtgaggggcacaggggaaggggtgatagtgataatgggatggggggagggggaggcatttctggctcccagggcctcctcgggagagtgaaggagactggagagaccgacaggacggg

SEQ ID NO: 19285 - DNA, 1049 bp, Artificial sequence
  DNA replication origin
ggagcggcctgcgggggcccggcgggacatttgcatctgtcagtcacggggcgtgccagggcagagccaggtgcttgctcccggggtgtccccatctgctcctctcccccagagaaacggacttttggggagatgagaatttcaacgaactaggtgagggtccgcttctcaggagggtctccaaatccaaatgtaaaggaatcctggtccagcacaggctccctggcagaggctgggacaggactgaaacttgacctcggacccttcagatcccaggacgcccatcttctctggggcagaggaagaagggtggctgaagaccattgagggtcaacccagggccctcagaatcttctgggggttccacagctggagctgaatgctggtctcagccaggggctctgcccctacccccattccagggaggggcaggtacccagagtggctctggctgtgaccccaggaccatgcaaacactgttggatgggcgggtcaccctcacccctgcctggggcctactccctgctctgcttatctcactgatgttcagagagtccatggtgggagaaagcccatttcttacaggaagtgcctgctctccatctctccattcaatcatttgttcatcgacatacgcaactaaacatgcttgagggcctactgtgtacaaggatgagggtaagaccacaagcaaacagacataacctttgcccacttgaagcagtgcagagagggaaacagacactcaatgaattgtgactcaggccttacacagaacacagggaaggcaagggctggcctgggctgtggccacttgtgtccacctgacttgtctccgcctgatggacccacctccccatgggctttagaggagacagtgcctgccaagcctgtggcagatacaagtgctcactaactggtggtgttcctggtgataatctgttgggaggaggtgaaggcaggtcttcctggggaagttgcaaataggctgaagtctacaggctcagccacttcccccatcattcattcattcattcattcaacgaact

SEQ ID NO: 19286 - DNA, 1024 bp, Artificial sequence
  DNA replication origin
gaacgacttgagttggagtggggaagtctggctgtggccctcactcctctttcccttcctcttcttggccccagcctccaaagtcctcggcacgtgcttggcaggaggagcgggagactggctgagtcctctctcctgggaggcctccctagctgacccatctaccccctgcgcggctccgccccaatatttaccccacccaccccccgcgatgccactgatcgctccttgcatttctcgccggttttccgggtaggtctcccggtgggcgcgggcctgcgccgagcacgctcctgcccgcagtgggggcccaatccacatcagcctctcggcccaagagtttctcggccggttggggcgccccgcggacacagctgggcaaggtttattcctctctcctcgccccagcctctcctcgagccctcttctttgcccttcagcgcacagtaggagcgctgccggctcactgtggcctcagacccctgggggatgaaggcatacgccggggtttgccgactgctggaggaagggcaggcttctatttgggggccgagggagacgactcccagacagtggccgaagtgcttaacgtagtctcggcgatttgcatttgaacggtcggcagtgagtccgcggcgctttgaacgcccggcgcaggaagcgcgcgtcggagcgagctgcggtctccggcgggtgtggattggaggggccgggggatgggctgggatcgaggggtgcgtttggaaataggctgaagtagtgtgtctgggtgcaggcgagggcgtgtctgcggagatgggccgtttgtgttggcgaggagtgtgtgtttgtgtttgcaggcgagggagtttgtgtctgtgcgtgtgtgtgtttgtgtttgcggagtgtgggggcggccaggaaaggtggccgggctgtcactcagcgatcaggttgacaggcgctccctcatctgggccagggagctctgattgcagattcgaggaaacaaaatagcaattgtaattaccgggctttgataaga

SEQ ID NO: 19287 - DNA, 1052 bp, Artificial sequence
  DNA replication origin
gtggccctgggcctgggggagggtggagaactgtgggatcctctaccctcatggccctgggctaggacctggggcctgggccccagttgccttgctggaaggggacctcccaacactcagcccattcccagtctctgcaggtgggagagggtcatcgcaggaggttatcagcatccaaacaaggggtctgggcctctgtcagcactcggctgatgggcaggggggcagataagcgagcttaggcagcctgaggaatgcgcgtccctagccccacgagggtctctggcccagagagggcctgtgagggcagggcgggaccaggcttcgctcctcctttgagccttgcaggctgtctctgagcagggctgggcccttagagaaacctgactccgggggccagatggaggggactggccagattgggtgacagggaaaccagaatccgggtggcctggcatatgggggcagaaaggggccccagggaatttgcctcctggactaagggattcttgtcccccacacaccgtggggtctgggggtctttggtgcctggaatcaggtagttctggcacttggctgcctttgtgccaggaagaactgacacacctggtttgaggatgagtgtatgtgaccagctctggggtcagcagttcagcagctgtgttggttgtggggggagggttgtcaatgcccacaaacaaacaaacaaacaaaacattgcctccccagacaacctggggccagacaggctgaggatagacagagaacagggcctgatgggggtcaggccaactcccactcccagcctctagtcaagggggaggggccccgggatatcgcgggctggtggttctggggcaggtgaggtcagctttgaagaccttgcgtccgcagtaccgacccgcacgctcttcagcgcatccctagtgaaggaggttctcccccagcccgtggtgaggaactaggggtccagtttccaacctccctcttcctcaagttgaggacaaagggagatgacgcccgtctgtgttgcggtgatctgggtcgcaggc

SEQ ID NO: 19288 - DNA, 1658 bp, Artificial sequence
  DNA replication origin
ttgggggcggggcaggattgagatggggccgggggtggggtctggatggaggttggctgagctgggcggggcatggctcaggcatggctgggatagatggggctgggcggggcgaggggaggggctgggtgggacgaggggagggtttgggcggggcaaggctggggctgggcggatctgagttggtccccgaaggcccggagctctgaccctcagacgccccctcttgaactggcttttcccactcctccctttctaaaacgaagatgcggctgggggccttcccctccaacgagggatcgagggccgcggggcgagcactgagtcggatccctggctctggggccaggccaggccttggcccgctgatagacctcgaagatggccatcatcttttctccttacctcagtgtccttggctcggggcccagggaactggcagcctggtctccggcatcggatgggaccggggggcggggagggggtgaatggggcagtgatttgaagaggggtcgcggaggctgggcctgaggcgcggctgtcctcaccgctcccgcagacagcgtggacgatgaatttgaattgtccaccgtgtgtcaccggcctgagggtctggagcagctgcaggagcaaaccaaattcacgcgcaaggagttgcaggtcctgtaccggggcttcaagaacgtgagtgcaaggcgaggccaaactcagcgagggtgggacaggaggacccaagccggtccacagcttcccagaaagcatggcttggatgcttgaggtgtgggcggaagggaggcaaggccctgagactgaacttctagctggaggttctggggcggggccagaacggaagtggcgcctgtagactgtcagtttcgttccatgttttttatttgtgcactgggaaagaagtcttccctcccatcacatgagccacgtggtgagtcctctggaggcttgaagattatccccctccctgggagtcttgggccatggagggtgggggcggtgaacggaaggggattttgtctctgccctcagcctggtgccctctccttccaggaatgtcccagcggaattgtcaatgaggagaacttcaagcagatttactcccagttctttcctcaaggaggtgaggggacaaggcccaaggggaagcagttgtccttctctaggctgagggagggagggattctggaggagctgggaatgccaaggtgatggggggtatggggagctccttagagggaggaagtcctctcctgtgtggaagccaacttctccacactcaccctgcagactccagcacctatgccacttttctcttcaatgcctttgacaccaaccatgatggctcggtcagttttgaggtgagctgggcgaggtgggccagggaagcctgtttcctggagttcagggccaggatctccaggccaaacccagagaaggagttgggtgaagagtacccgaggacacagctccctcctgcctccttcccaggactttgtggctggtttgtccgtgattcttcggggaactgtagatgacaggcttaattgggccttcaacctgtatgaccttaacaaggacggctgcatcaccaaggaggtgcagggcaactgaagggctgggggtctgtggcggtgatgggggtggcg

SEQ ID NO: 19289 - DNA, 728 bp, Artificial sequence
  DNA replication origin
cagcgtgtgtgggcgtggtcagttgggagcgggtgtgtgtcaccgctcccgcaaaactgtgggacccgagagtgtgggtgtgaccattgtgaccaggctgaggcctgagcctgtgtagctgtggcggcctgtgtagaccaggcggccgtgagggtctgtatgtggcttagctgggttagtgtcttcaactccgtgcggccgcccccttccccaccgtgttttggacccctgatgtgtgttgcctatgccccgacaggatggtgacaggtgtagaggatggcgcctgccctcctccagacgccagggtatttgggttttctgtgccagcctggtcccctgctgagtgatctccagttgagtgacctcgctttgtctctaggtctccatttcctcagttgggccttgcccacctcataggatcatactgcattttgcaaaccataaaggcccgctttgtagttatttgagcatgctgttgtgttggacttagatgggtcccacacgggggtggattcggaaaaggacaggcgtgagtcccgcaagcttgtgtgcatggggtccgtttcgtgtgtgtctgtgctggttgggtgtgcctttgcacgggctgggttgtgaggtttgctctgagtgtgaggggccaggtgtgtgtctgcagttggccgggtcttccgctttctcggtgacagttcgctcccttcagcattagccgccccagcctccctccgccc

SEQ ID NO: 19290 - DNA, 807 bp, Artificial sequence
  DNA replication origin
tgctccaggcctgcatgtgtgggggggcgtgccccaggcctgcgtgtgtgggggtggggcctgccccaggcctgtgcgtgtgtatgtgtgtgcatgtgcgcgcgagcgtgccccaggccggcgtgtgtgtgtgggggggcgtgccctacccctgcatgtgtgtggagggcgtgccccaggcccgcgcgcgtgtgtgtgtgtatggggaggcgtgccgcacgcctgcgtgtgggggaggggcgtgccccaggcctgcgtgcgtgtgtgtgtgtgtgtgtgtgtgtgtgtgggcgtgaccagcgtggcgagggcgggtgctggcaaggctggagcataagggggcgtggctactgtgtgcgtgtgcggctgaagccagcgtgtgtgggcgtggtcagttgggagcgggtgtgtgtcaccgctcccgcaaaactgtgggacccgagagtgtgggtgtgaccattgtgaccaggctgaggcctgagcctgtgtagctgtggcggcctgtgtagaccaggcggccgtgagggtctgtatgtggcttagctgggttagtgtcttcaactccgtgcggccgcccccttccccaccgtgttttggacccctgatgtgtgttgcctatgccccgacaggatggtgacaggtgtagaggatggcgcctgccctcctccagacgccagggtatttgggttttctgtgccagcctggtcccctgctgagtgatctccagttgagtgacctcgctttgtctctaggtctccatttcctcagttgggccttgcccacctcataggatcatactgcattttg

SEQ ID NO: 19291 - DNA, 918 bp, Artificial sequence
  DNA replication origin
aagctcagctcctccctctgccccttccctttggcacagagtagccacaggatgtctaggggaagcacttctcagggacagaggcgggtcactgctccctccctctggcccatatcttggccaaaagttcccaaggaggtgccagtccaaaggctgaggtggccctgcgaagaggaagaggcggcggctgtggttgggaggcttgtggggcagaggcggggtgatgggggagaggaaggagatcctgggagggagagtgggagggaggctgcaggcagtcctactcaggctggggagtctgagggggaggtggtgtgaggcggtgaaccggcgtatctgaacctgggccctgtaggggccatgccccaggcccaccatgaacctggaagggctggagatggttgctgtgctcgtggtcctcgctctgtttgtcaaggtcctggagcagtttggcctctttgagcctgtctccttggaaggtaatccaggtgtcctggcatgtctgagctgctggctggtggggcagctgccccacagcactagggagggtgtttgtctgtcttcatgactggggcagggatgagcaggtgagtgatggcacagggatctgggaggtgagtaggggtgcttgggggatacaacatctgggaggggtgaagaggaggcctcaaggagtagatatggagggaggagggaatctgggggaccaaggtgtcaggaggtgatgaggggtgcagtgtgggaggactggggtgtggagatgaggaggtgaggggattctgggcgataccaggaggggtctggagatagggaaggagtgtctagagtagaggagggaggttctagggatcctgagataacaacggatttctggggggtcctttttggagtcaggggcccaccacggtgcctgtgcat

SEQ ID NO: 19292 - DNA, 1425 bp, Artificial sequence
  DNA replication origin
ccgggctgcaaagggtggggggcgggggtagggggagccaatcccggcagcgccaaagaggggaggaggcggtgacagccgcggggagggggcgggaggagagaggcagctcggctcggctccgcgctcagctccgctctgcctccggctctgcgctcacctgctgcctagtgttccctctcctgctccaggacctccgggtagacctcagaccccgggcccattcccagactcagcctcagcccggacttccccagccccgacagcacagtaggccgccagggggcgccgtgtgagcgccctatcccggccacccggcgccccctcccacggcccgggcgggagcggggcgccgggggccatgcggggccagggccgcaaggagagtttgtccgattcccgagacctggacggctcctacgaccagctcacgggtgagtcagtgacgtgggggtcgcgggagggagggtggattccattcctccagacccttccgcctctccgaccccggcctggcccgcacccacactctgccccattcccaggcactcttatggccggtctgggcggcaggacactgggggttcaaagccttgggtcccgcaggggttggggaggaacagaagaggcaggtgtggagaggcagcaggtgtgggcgtatgtgacacagggctgagagggtgtctggagtgggaggtgttacgtgcgtgagcacctgtcattctgtgtgtgtgtgtgtgtgtgcgcgcgcacctcccacagctggttgccatgtgccctgggcttggtgacagctagggtgagtgtgattgtatgtggcagtgcaattgtatggtctcgtcagatgtttgagtttgcgtaggaccctggttgtactgatgaagttgttttgaccatgtgtctctatgtgcaacgatgtgttgtgagtgtgtaattctgtatgaagtggtgtgtaactaccagaatgtgtcagggctctactttagggtggcttgtctctttgtaagccttcatgaccataagccctctgggcaagaatttgttaaagtaggttgtgttgtgttttgtggttgtgagattagtgttcagtgctagttgtgtactttcatgtggtgatgtctgcagcggggctctgtgagtgtctatgacgtgtctcatccctgctgcctctctggcttcctggtacagataggggtctttagtacaccccactccttcaccaatttttccacaaatagcccaggtggacccaaggagggactttagtgttcagctgcccagtctggtttccaagagaccttatggctccagcacctggcccctgtagggaggctttagttagtgctgggtcagccctctctccccacaccaaatcatgtactgagattattcttacaactgaatccttcaacccccaacaaacct

SEQ ID NO: 19293 - DNA, 1188 bp, Artificial sequence
  DNA replication origin
tgcggccctggccccgcatggcccccggcgccccgctcccgcccgggccgtgggagggggcgccgggtggccgggatagggcgctcacacggcgccccctggcggcctactgtgctgtcggggctggggaagtccgggctgaggctgagtctgggaatgggcccggggtctgaggtctacccggaggtcctggagcaggagagggaacactaggcagcaggtgagcgcagagccggaggcagagcggagctgagcgcggagccgagccgagctgcctctctcctcccgccccctccccgcggctgtcaccgcctcctcccctctttggcgctgccgggattggctccccctacccccgccccccaccctttgcagcccgggggaggcacccggtgaaagggtgaactgcaaagtgcggggaaggagactagctccccagcaatctgcccctaaagcagaagtcacggggcttggcggggggggggggtgggggaggaggagagcgcgggacagaagagccccactgagaggaggaaaccccgcccccaattctcaggcaccccgtcccccttcgtcaacacagttctggctgaggcagagcctggggtatcatatctgagtccccgctccgtttgtctccatgtcagcctgtattttctctgttgttcctcctcccgtgtatgcgtctctcgtggtcccagacagtccccaccgtgcttaaagcaggttagggatgcaaaggaagagtcaacccagcctctaatattagcaggctcatcgtgggccaatggactactgtttcatcttctctcaagttccagaaggaccccaactctcacccactccaggaccccgtctctggaacctattcactctcagggtgcctccttcactgatctaatgaaccccataggccgactaggaagataaaaaaactagtgaaccaggtcagtttctcaagacatccttgctcttttgttcctcccctgcagcaacttttctgcccttctcttttgtcacctgtcctgtcctagattccttgttttccagcagatatggggagcaactgacaggtttggggatccaagtcaggatacagagtaggaaagaaatgcccttgttatgaaaccccttccttaagattagctcctttccaaaggcagggctagcacggaagctgggctgcct

SEQ ID NO: 19294 - DNA, 1667 bp, Artificial sequence
  DNA replication origin
gaacaaaatgaagtctcccatgtcttctactttctacacagacacagcaacaatctgatttctctagcttttccccacctttcccccttttctattccacaaaaccgccatcgtcatcatggcccgttcttaatgagctgttgggtacacctcccagacggggtggtggccgggcagaggggctcctcacttcccagaaggggcggccgggcagaggcgccccccacctcctggacggggcggcggccgggcggatgtgcccccccatctccctcccggacggggcggctggccgggcgggggctgaccccccacttccctcccggacggggcggctggccgggcgggggctgaccccccacctccctcccggatggggcggctggccgggcgggggctgccccccacctccctcccagacggggtggctgccgggcggaggtgctcctcacttcccagacggggcggccgggcggagacgctccccacctcccagtcggggtcgcggccgggcagaggtgctccccacatctcagacgatgggcggctgggcagagacgctcctcacttcctagacgggatggccgctgggaagaggcgctcctcacttcccagactgggcagctgggcagaggggctcctcacatcccagaggatgggcggccatgcggagacgctcctcacttcccagtcggggtggcggccgggcagaggctgcaatctcggcactttgggaggccaaggcaggcggctgggaggtggaggatgtagcgagccgagatcacaccactgcactccagcctgggcaacattgagcgctgagtgaacgagactccgtctgcaatcccggcacctcgggaggccgaggctggcggatcactcgcggttaggagctggagaccagcccggccaacacagcgaaaccccgtctccaccaaaaaaatacgaaaaccagtcaggcgtggcagcgcgcgcctgcaatcgcaggcactccgcaggctgaggcaggagaatcaggcagggaggttgcagtgagccgagatggcagcagtacagtccagcttcggctcggcatcagagggagactgtggaaagagagggagagggagaccgtggggagagggagaagggagaagggagagcttgttttcttttttgagactgagtctcgctctgttgcccaggccggagtgtagtggcacaatcgtggctcactgcaacctccacctcccgggttcaagccattctcctgcctcagcctcctgagtagctgggactacaggctccttgcaccacacctggctaattttttgtattttttatttcactgtgttagccaggatggcctccatctcctgacctcgtgatccgggcgcctcggactcagcctgccaaagtgctgggattacaggtgtgagccactgtgcccagctatttttgtattttcagtagagatggggtttcaccgtgttcgccaggctggtctcaaactcttgacctcaggtgatccacccgcctcagccctacaaaatgctgacgttacaggtgtgagccactgtgcctggcctatttacttatttatttttattttttatttatttatttttgtttttgagatggagttttgctcttgttgcccagggtggagtgcaatggcatgatctcag

SEQ ID NO: 19295 - DNA, 926 bp, Artificial sequence
  DNA replication origin
ggagcccctctgcccagctgcccagtctgggaagtgaggagcgcctcttcccagcggccatcccgtctaggaagtgaggagcgtctctgcccagccgcccatcgtctgagatgtggggagcacctctgcccggccgcgaccccgactgggaggtggggagcgtctccgcccggccgccccgtctgggaagtgaggagcacctccgcccggcagccaccccgtctgggagggaggtggggggcagcccccgcccggccagccgccccatccgggagggaggtggggggtcagcccccgcccggccagccgccccgtccgggagggaagtggggggtcagcccccgcccggccagccgccccgtccgggagggagatgggggggcacatccgcccggccgccgccccgtccaggaggtggggggcgcctctgcccggccgccccttctgggaagtgaggagcccctctgcccggccaccaccccgtctgggaggtgtacccaacagctcattaagaacgggccatgatgacgatggcggttttgtggaatagaaaagggggaaaggtggggaaaagctagagaaatcagattgttgctgtgtctgtgtagaaagtagaagacatgggagacttcattttgttctgtactgggaggggttcttctgccttgggatgctgttgatctgtgaccttgcccccagccctgtgctctctggggcatgtgctgtgtccactcagggttaaatggattaagggcggtgcaagatgtgctttgttaaacagatgcttgaaggcagcaggctcgttaagagtcatcaccactccctaatctcaagtacccagggacacaaacactgcggctgcagggtcctctgcctaggaaaaccagagacctttgttcacttgtttatctgctgaccttccctcc

SEQ ID NO: 19296 - DNA, 1762 bp, Artificial sequence
  DNA replication origin
gctggacctgggcaaagcctgggcgcgctcccgcgcagcggcgccatgaagcgctcggggactctgcggctgctctcggacctgagcgccttcggcggcgcggcgcggctccgggagctggtggccggggactcagcggtccgagtccgtggcagtccggacggccgccacttgctgctcctgcgaccccctggggcggtagccccacagctgctagtcgcgtcgcgagggcccggcgcggagctagagcgggcctggccggccggccagccctccccgctggacgccttcttcctgccgtggccagcgcggccggcgctggtgctggtgtgggagagtggcctggccgaggtgtggggcgcgggcgtggggcctggctggcggccgctgcagagcaccgagctgtgtccgggcgggggagcccgcgttgtggcagtggcggcgctccgaggccgcctggtgtggtgcgaggagcggcaggcccgggccgagggcccgtcagggtcgccagcagccgctttcagccactgtgtgtgcgtccggactctggagcccagcggggaagctagcaccagcctgggccgcacacacgtcctgctgcaccactgccctgccttcgggctgctggcctcctgcagacaactcttcctggtgcccactgccaccacctggcctggcgtggcccacgttctactcatctggagcccaggcaagggcaaagtgatggtggctgccccacggcttggtctctcctacagtaagagtctgaatcctggacgaggggacacatgggacttccggaccctgctccgaggccttcctgggttgctgtcccccagggagccactggctgtacacacctgggccccaactccccagggcctgctgttgcttgacttcgggggcactgtgagcctattgcagtcccacggtggtacgcgggctgtgggcaccctgcaggaggcacctgtaggcccgtgggggtctgcagccctaggcacatttcagggcactctggcctgtgtgctgggctccacattggaactgctggacatgggcagtgggcagctgctggagaggaaggtcctaagtacagacagggtacatctgctagaaccgccagcccccggcatggaggatgaggaagagctggagacccgagggaatcttcgtctgctttcagccttgggtctgttttgtgtgggctgggaagccccacagggtgttgagttgccttcagccaaggatctggtgtttgaggaggcctgcgggtactaccagcggcggagcctgcggggtgcccagctcactccagaagaactgagacacagcagcacattccgggcacctcaggctctggcctccatcctccagggccacctgcccccatctgcactgctgaccatgttgaggaccgagcttcgggattaccgaggcttagaacagctgaaggcccagctggtggctggggatgatgaggaggctggttggactgagctggcggagcaggaagtggcacgcctgctgaggactgagttgataggagaccagctagcccagctcaacaccgttttccaagcccttcctacagcagcctggggtgccaccctcagggccctgcagctccagctagatgggaatggcaagctgaggtcccaagcaccccctgatgtgtggaagaaagtgttagggggaataaccgctggaaaggaaccccccaatggaatactgcccccctttgaactcctgtgccagtgtctgt

SEQ ID NO: 19297 - DNA, 925 bp, Artificial sequence
  DNA replication origin
tatgagaagctagctgagggattatataaagatgagtagaatgcctggcttctattaaatgctcataaatgttaactattttcatgattggaagtggggactttagccaaaagatccagatccaaccactccctctataacctgcatcctctgagacctgtacctgtttaaaaacacacaactgtgtatatattaaactatgtatatatttaacacacacatcttaaaaatagctccagatgacagaacagtattgcatacacaggtccatacatgggaccctccaagtcccaggcacccttccctgatcactgtgtcctagaaatgatttcctgtgtcagtgacacagaggaactgtccaagcaagcctccagtcccaagcaagcctccaggccctgagtgttctgatgcctgaagggtagtcataggtcccgaggtggagtcgggggtggagtgctggggtcccataggatgtcctcatatgggcttagaactgggcccgacagccatccttgagccccagtctgctccagcagggctttgagcaagcccacagtgagagggggctctgctccaggctcagggaatggggttgggggccccacctcatctgggaggtatgtcctcagtagaagcaggagctcagctggagccagttctggtgggcacaggcggcaaaggagggggaggtgagcatcaagccggcggtgctgggcaaactcggccagcagcagtttgaagatttcacttcgaagcaggggactggaggggccgagggccaggccagcatccagagcccgatcccattgttccttttgcaccagctgcccgacagcttggagcacagctttaggccgcccactgctcaagagcagctctagctccagagcctcaggcctggtcccctcctcacctagcactgcca

SEQ ID NO: 19298 - DNA, 1420 bp, Artificial sequence
  DNA replication origin
acaggcacctgtcaccacacccggctaatttttttgtatttttagtagagacagggtttcaccatgttggccaggctggtctggaactcctgatctcaagtgatctgcccgccttggcctctcgaagtgccgggattacaggcatgagccaccgtgcccggcctagcatgaacttttgaggcccatggaggacaatcccatctgttgatcctcggtgagggctaaagtctgggggagacaggataaagatgaaccatcagagagcaccaccctttctggtcccactgaagactagttccacctcacccagcaggttggattggatttttctgatgggcttccatccaaagatagaaatgcccagaaataatcccctagggagaagggatagagaaatgagattgggtgggctggggtctggttcctgggactgtgaagcctagaatctgacactcctgtgggtgtgaacccaggcgctctgggagaccgggattctggaataggggtatgagtagagctgagctgggggaaaagagggaaattcccaggggtggaggaagagtcaagtccccctctacacctagaggatgaacttaaggaaggagtgaaggtcatatgtgttgttcctgaggaaaaggccgctgtagaaaatggcctcatacagctccccattgcttatgaagcagcagatgttccagtctatggggaaataaggcaggagggaggggcttagggaactcaaggctgggtcagaatggggagaagagtagagtcaggagaggaaaatggggtaagggacaagtggagggcgggaagttaggagaggatgatggaggtgaaggagtcaaggatgggagagaggaaaatggaagagggatcggggcagatgagagaggaggcagagtatgggcaggattggatttggggagtactgggtaatgaaagggaatggttctcagaggaatggggcaaggatagcccaggcggggaacaagactcacaaggtatggaggggttacaggttaggatcttcctgaggagaccagaggtggctcttggcctgagggatcagtttttagagaggaggggtgggctctgggtaggggaaggctaatgtatagcaggagcccagtcatgaccagcaggaagcaagcaggcaggtggtgctgggaaatgggctgagggaacacacagcccctgcagaacctgcacaggtagcagccagacagctgaggctggacaggaagagcagcagagcaaaggccggccgcagtacctcacgtctataattccagcattttgaaaggtgaggcaggaggatctcttgagcccaggaattcaagacagcctgggcaacatagtgagacctcatctctacaaaaaataaataaataaatacattgttttaataagcagggca

SEQ ID NO: 19299 - DNA, 2554 bp, Artificial sequence
  DNA replication origin
tcagaagtgactctggacttttgaccccccccctcaggtcaccatagagttgtgattggctggtttgggctgcccccccttccctgctgcccattgcctcttacctatcctgtgacatcccccccatgctgtttctgaggaccctgtttgcagggaggtattgattgcggcccatcttgccccccaccttcaacttttcctgcctgttgccagggaaggttggccctcctgaggcaccggaggtactcctaagaggtgccagataattggacccttgggtctggcatctccgccctagtgggagggcaggctaggaaatagagtgatttgtggagaggtaagctgggggagcaatacttgacccaaaactgagaacttgagagaggacccaggctcagatccctgcctccccaaaacatatcagctcttgccagggatagcctaggtctgagtttttttcctggggggcaggtggggggggcggagggcgtctacctcactgccaggaggaaagagagaagccatgcgactggagaggtagtctacagagggcctcacggcacactgtctgtctccatccccgggactctgggtcctggaattggccctcctgccccagactggagtcagctttctcctggaagtcagtgtccctgaatgtagcccgctttggctacatacttcacagctggacacccaccactcccccacaaatccccaagggaagctgccagtgcggaagcttccttgaaaatcatgtgacccaggccaagctgggctgggcacacacttcaggtgcctgctgaggctgatgtctaaggggcatgggtcccagaaggaggaataagagaacctaacaatcctagaatatccgagtatgggaaccactggctcctgctgcagagggttggggagaggagagggaagagcttgccaagctggaatcctgtctggccccgtcgtccctctttctaccagcttggtgtacatgtttatgttgtggattttctcctttataattgacccatgctgggtacccctttcagatccatcatgttcttagcccaccccagggccctgaccctccatcaacacacatgagcagagcagttaaactaaggatctgaacaagctagagggatgagtcttaaattgtgattcttagttcctacaaatagtgggtaagcgggtatgtatgtatggaggggttgtcaggctggaggtggatgggaggttggccctgaagttggggcagggtgcctgggtccagtgggaggagagagaaaatctcttcttcttagtctctgggagcagcatgggaacaggaagagggcccaagcccaggggtttgtgggtgggtgggaagacaacttcagtcaatgccccagaaggcatgttccttttgtgtctggtggtctgactgagggagagagggcaaaagatagggaagagtggggagtctttttccagatcatgaagaagtcttatagattgatgccaaagagggtggatggaggttagacttcaaggagaaccacatggggagggcttcagagtagactggaggtggggaatagtagcagttgaggttagagaggggacctggcttgcagcttgcttggatgggggagcacatgcttgaacacaaggaaggcatggcagcatgtagcagtccaggcccaaagatttcccccaccttgagcagccctggggtgagggctgaggcgccctggcaggccgcctgccgcctgcctgcctgcctgtctgagtctctcctttgtgttctgctgtctccgggctcctcctcctcccccagcccggcagagacagcacatgccccacacatgtgactgagggaagccagagcgcacacagacccacacacatgcacacgcagaagcaccacaagatacacacatacacatgcccaacacccatattgctcctggggtgaggaccagcttctggggctggaatggctgggagcagggagagcctctgactaaggggcatcaccctgagcaagaggctgagggggccagggcctgtctggggcagcatgtggctcagaagggttaaggcagggaggagtagggggaggggaggaggcagcagtggtggcggctgggagccaggagaggaggatggcagagcgccaggccaacgggaggccgggcacagacaaaggaaggggggcaggcacactggaggcctgggtcagggagccccaggggcccgggcagggggcagtgctggtacctcatcctgtgggctggggctggctgctgtcctttgagtccccacctccaggaggagtactttccctcatcatctttgtcattatttgctgctccctccacctcaccaccaattctaaggccttctaactcagacttgctctttttagctggacctgttctgcccctgtgcaactgggtaaatctggtcagagcagagaaaggagcagacttgctagagaataactagaaggcctgttttgaatggtttgccagtcgatacatcttggcatttaggggcccctccaccccacagc

SEQ ID NO: 19300 - DNA, 1285 bp, Artificial sequence
  DNA replication origin
ccctcgccgcccgcccgccgcgcggcgcacgcacgtcgtcgcttgctgcgcgctctcccgggtcactttgacacggctctcccctcccactagcaggacaattagcatattaataaagcccggccctgcccggcttgggctggggagccggcgccggcgcgagggagcgcgagcgcgagggcggagaggggggcgctcggcgacggcggcgggagcgcacagacacgcacacgcacacgcgcacacacgcacacacggacacacactccgcggactcacacccgcgcgcacacacgcagaggccgctcgccttcctgcctggcttccttcctgtctgctccgcgcctgacaggcccctcgccgcagccaggggccgcccgcaccgggccgaggccgggccgggccggcggcgagcgcagcgggggccgcgggcggcggcggcggctcatgcccggcctgtccccgcgaggggcgggcaccgtgactcggctgggcccccagaggcgggcgatgtgaagatgtcagtgggctgtgcctgtcctggtgagtggggcgtgcggccactcggccccttcctgcccagccgtccctgcggacccctcaccccgtgtttggcgagaacttgtgtggggggcgtcgatggcatgggggaagccgggggctggaagggctacgcggggcctcaggctggcgggtagcgttttccccaactgtgtaaatgcgcagcagcccagaaacacggggaggagacgctgggggtggcttatgtgtatgtttttttgggggtaggctaattggggagaggtttggggggggctgaaattctcagaattccaggttgttagccaatcagaagtgactctggacttttgaccccccccctcaggtcaccatagagttgtgattggctggtttgggctgcccccccttccctgctgcccattgcctcttacctatcctgtgacatcccccccatgctgtttctgaggaccctgtttgcagggaggtattgattgcggcccatcttgccccccaccttcaacttttcctgcctgttgccagggaaggttggccctcctgaggcaccggaggtactcctaagaggtgccagataattggacccttgggtctggcatctccgccctagtgggagggcaggctaggaaatagagtgatttgtggagaggtaagctgggggagcaatacttgacccaaaactgagaacttgagagaggacccaggctcagatccctgcctccccaaaacatatcagctcttgccaggg

SEQ ID NO: 19301 - DNA, 1165 bp, Artificial sequence
  DNA replication origin
acatggtggggagggtctccattcctaggcaggccttcttttcaatccctggactctgcaccgttccatcatttcatgctccctcagcaaaaacctaaggtggagagaagaggtctcataaacactttaagcctccgcatttgtaaccctcccccagccagtcaagccagctgtgcagactctgagccagagtgagggaaccaaacagccttctcaaccaacacccctctaagtaacaaagaggagaaccccctacccagtcagggccagacgccctagggaggagacactagtccaagtctccatcgtctatccctggagcccatactgaaacttaagaaagaaaagctagcagctggggaccccaggagggagggggtcaactctctactccaggcggctcccctcccttccctcctcctggctaataggtatttcctgtttatgaggcagctaaagctgagcttttgggaagggatggagatggagcccctcccctcctagggctgggttggggagtccttgaagtgtgactgaaggttgggaggctcctcccaggggaaggagtgttccttacattgaccatccacatcatctcccatccaaccccccacggcccacagcctctgcctctctgggttagggggcactggaggggcctgtttcctgttctcatctccgaagccctcaaaggacagcagcttccaggcaggggggtcggaggcggtggggttgggcggttggtacggaggtgaaggcaccaaggctggagaaaggggggaagggaagagagtgtcttgactgatgcgtcagtctgcaagaaggaaggatggcctcctatcgcccctccgtaatccaatctggtggtcattccgcagccccctccccccagcaaaacacagatcccaagcccttaggcggaggagggcggggaccccacttaattaacccttttagttctagtcccaactggtttcgcaggcaaaggaggagtggttaatttagggaaggggtgagttgaggggttgctacaagaattaagagaatgcttctttacccatccagcctagggtagggacgcgaaacaaggggcctccagaagaaggctggcgtctcagcagggagcacggacagggggtctgcagtcccttttccctcccggagc

SEQ ID NO: 19302 - DNA, 1003 bp, Artificial sequence
  DNA replication origin
cgccacaggaaagagaggaagcgcctgagagtcgatgccgggtggccgcgggagccgggccggagcaagtgggccctaggccgtttgctgggggtaggcgggcagaggcagcgtctctacggccattcctgggggacgccggagggggagagcggggtgtcggaaacataacccgcggctgggggtcaggggttcggacttggggtcgaaggctgagacctccatgtaaggatgcccagtgaggctccccgagcccggcgccgcagttcccttttcggagccacgtggggttgggggagcaattttcccgggagaacttgtctgcctcccctccccctctaggcggcccgggcatccacgtgggtcgggctcctggtggaggggggcgcaggcagcgggtccacgtgggggcggggaaggaacgtccacgtggctcccgtcccaggctgtcgggcatctagtatcggccttggagcctggctgacgcgaactgggtgtgtctccacgggtcccgccatctcctgccggggctggaggcccgggccgggaaggaaggtaagggctgctagagtcaactttgttcagagccttggaggttttttttttccctgctgcttgggtccgcaacgtctctccactgcggatggtgaaggactctccagatgttgcgggagtttgttccctgcggatggctgagtgtgatggggagggtagagggctgaggctgaagggttgtggaggagtgagtttgtggcgcttccgtctgaccggcttggggtgggttgtgagtcacgggcattggcgttttggttgccttgcagtcttgccttattagtgattcaaggggtatggggagtgtcaacatacacctgggacaaggttaagaaagggaaagggaatcctctcctcactttttcctccagcatctcttttgggaaggcatgctcctgtaatctgacacgcagaaactggggtggtccgtacttaaggctcttcggatttt

SEQ ID NO: 19303 - DNA, 818 bp, Artificial sequence
  DNA replication origin
tcatcttgtatatgacctatttcatcctctttgcccacttcttctgccagacctacatcaggcccaaggtcaaagccaagaccaagagccagtgaaggtttggagagaacaatgaagctccaggctctctcttctccagggcaccaagaggctgggcttagttttgggagaatgattaggttgccttacctgcatggtttccccagaggatgtgtgccccaaggtggctggaatttttgacagacaagaagggtgaccttgggatgggggtgtggtctgttactttaatgtttctgtttttaatgtgaaggccaagcaggccctgggatgggagtggggcggaggagggtcctaagagctgattatttaatttctatccagaaatctttcttcttcttgctctgtttttttaaattaaagatttcaacaaaattttgagagttgggggatttggggggaaagagggctgctgtgatggcaggaggctgctaccaaggggatgatctgcaggtgggacgcctgagggtgtgtggaagggtgagaggcacacacacagacactgaaagaatcctaggcctggtaggcacttaacaaatgtctgttacagaccagaattttattgctgttagagacccaagcccctcataggaacagtgagaaacaggtgcagaaaggcggagtaactttatctaaagtcataggctccctgaatagcagagctgacacctacaaggaagcgttggagaccagatctaccagctagcctccctgagaccacgaggtggcgccgcagcaccggctgtggccgatgccagcca

SEQ ID NO: 19304 - DNA, 769 bp, Artificial sequence
  DNA replication origin
gggcaggacacggccccggaggacacggcggccggagccagcccgggggggcccccgcccaggccctgcagggccccaggccctggcacggtgcccggggcagccgcggcggagggcaccatggaggcggcgatggagctgggtggcgagaagacgggctgcgaagccagaggccccacgttgaccgagttgaaggcgaatggaaaggtcttggcggcgagcggcggggcaagagccttgggcggccagttgccgtacgagtagccggggtacacctcctcgtagggcggcaccagccccccgagcggcgccgcgaagctgcctttgcatagctcggcctgctggctgcgctcgcgcttccgccatttggcgcgccggttcttgaaccacacctgcgggcacgggagaaaggcggtcagggcccggggccgggtcccagcggctgaagggcgggccaccccgacggggcttccagccggggccctgcggtcaataaacgagatgaggtggctagagacggggtgggagggaaggagcgcacggagtccggggtcggagaacagaaggcgcgggcggctggaccgagtcatcggcgccagggtctggcgggacagtaggatggggttgaggaggggtggtgaggggaaggagagacggtgtcagggccgaagaagcgcgcggtccgagtagtagggagcagtgggagcagaggctggaggttggcgggcaagagaccgcgtggggctgcggccgggagccagggtccggg

SEQ ID NO: 19305 - DNA, 1217 bp, Artificial sequence
  DNA replication origin
tcgcgcttccgccatttggcgcgccggttcttgaaccacacctgcgggcacgggagaaaggcggtcagggcccggggccgggtcccagcggctgaagggcgggccaccccgacggggcttccagccggggccctgcggtcaataaacgagatgaggtggctagagacggggtgggagggaaggagcgcacggagtccggggtcggagaacagaaggcgcgggcggctggaccgagtcatcggcgccagggtctggcgggacagtaggatggggttgaggaggggtggtgaggggaaggagagacggtgtcagggccgaagaagcgcgcggtccgagtagtagggagcagtgggagcagaggctggaggttggcgggcaagagaccgcgtggggctgcggccgggagccagggtccggggtccggggtccgagggagggggcaggtggggtggaaccgctggcctccgggtcgcaggctgagcgcggagggcccgcgcgggtgcgagtcgcgggtctggagagcatacccgcacgcgggcctcggtgaggttggtccacacggcgatctcctcgcgcgtgctcatgtcggggtagcggttcctctggaaggtcgcctctagctcctgtagctgctggctggtgaagtgcgtgcgctgccgccgctgcttctttttcagcgaaccgtcctctggggagccgccgggcagcgaagccgaggccttttctgagtctgggggccagggtgggggcaggtcacagagcgcccaagccagcgcatattctccggctcggggacctcctaagccactcgctggctcccaccggggctgcccagccggggtcccacccgcactggggatgaagctgttatgtcctgcacccccggaagggggcgcgcttaccgctgtgctcctggcccttgcagccgtgctctgggagctgggggtgcggagtgccagcgtctgacagcgacagggcagggctccgggcctctgcctcgctgagcaggccgaactccatggagggagggctctggaggcgagagaagacacagaccagggtaatgggggtaaaatctccggcttagctaggtcccagcagcgtttcctcgtaaattccctggcgcctttctcaaccccagccgtaaagctggggctgcgtggggctccttaggatagaatcgggaaatagcatcctaaggacgcagaggtgcatgc

SEQ ID NO: 19306 - DNA, 1907 bp, Artificial sequence
  DNA replication origin
gcaggacgcactgtgagtgtttgaccattctaaggacaggggctcatggggccgaggagctattgctggaccttggaatccctaaaacgagacctggggcagctgaactccggtgccttgggaacaggtcgagaatgggagggcggactgcagacctggggccaggacttgggaaaagggaaactcagggtaagaaccaggggatagggaagggggagactcagaggatccggaacgaagccggagacttgaaaccaggataggggcttcgcgaggcagggagtagggagtctggaaaccattaccagaaagcgccctggaatcccagggcacggggcaggcggccagggagcgaaaggggttacagaggccctggccagcgggggagctggcggggcggcccccagtgtgggggcagttgacggcgcccgatgcccctcggcctaggctcagactcctggggctgggagccggggtgcgcctggtcgcacacgcttctcttcccagctgctccgcagttggaataggagctgtgttgtgagagcccggccgcgactgagtcagatggccgctgtgcggatcagagtgaccaggcggcgggtatagtggatctggcttggggtgtctgggcccagaagggtcctgacttgaggccgcctcagaatcggacagaatgtccgcggtgcatggggctcggagcggacagaatgtccgggtagcgaagtgggtctctccggagcgggagttgtgtctggcagtggcggacagaatgtccctggctgggtggcatgtccgtctacccagcagcgcctgcccagctgctgcgtgtgcgatggggtcggctgcggtgggtcacctcaaatcccagctcacactttgcaaacttgtttcagctccttcgggctgcgaagctgtgagcagggagcgagagtaaaggctacaacctggccttggggtgaggtgggctgggacacatgcccccttcaattcagaatagatcagagcatcactctgtacttccagaatccaaatttgaggacagaaggccaatgaggagcctgctagtgggaatcaagaccaggaaaggaaggaataggtgacaaaaggcaatgggaaaacaggaaggagctgggtacaagcccctggcagcctcagttgccccctaattccaatacaattaaccagacaccccccagactccttgctggagtatcaggcgaccaatggctccttccctacagtgggcaggagcccaggccagaagagaaaactacagccccattagcaaagcaaatcctgtggtcctgtttccctttttcttcctcagccctaccagtcccaacaccaccctggtggctgagcggaggtgggaaggaggctcatggaatccagactctggagtccaacagggggctatctggccctctcagtctggttgggaaggatatcttggccctacctaacagccgggtttactttccctgcagctgggatacagccctgactctgctgggcccatacagtgaccatccaccctgaccccaattctaaccacagctcaattatgctgaagaggacagaacagggagaacgagtccatataagtgagcaagatagcccagctggggactgagttttcacaaggacaagtgcaaggcattgtatttagcaatgagtaatctaaacagtggtttcaacctttcttacccttcacctgtgagtgacatacaatacgtattccccatactcccatgtccattcctcagttctaaagtttgcttattactggctaggattctcaacttttgtttttcatttgccctattttgatcaatataaagacacaccacaattatccccatcacattctgatacacttttcaggggcttgtgctcccattgctgtg

SEQ ID NO: 19307 - DNA, 853 bp, Artificial sequence
  DNA replication origin
gctgccagccgatcccttttacccgtggctaccgggaccactctactctcgcccacttggctctgcctaagcgtcctagccggagcgcggtctctgccacgtggggaggggcgcggccgagttgctgaagagcgcttctgattggccagagggcggggttcttggcgtctcgccggccagacccctccctcaaaggcggggcctggagatccacagctggaaagggcggagccccagcagggcagctggaaaggggcggggcctgacgcgcgcggctcgccgcggcgggctgggggcgccctggtctgccataaagtgaatgggcgccggctgggggtggcagtacgcggtgaggctcactccctccgagagtccaggagcgcccgagcggagaggcggcccgggagcaggggggcggcccccactccggccgggtgcccggcccctggcccctgcctgccctctagatcgccgccgcagccgccgctactgggagtctgcctgttgcaggacgcactgtgagtgtttgaccattctaaggacaggggctcatggggccgaggagctattgctggaccttggaatccctaaaacgagacctggggcagctgaactccggtgccttgggaacaggtcgagaatgggagggcggactgcagacctggggccaggacttgggaaaagggaaactcagggtaagaaccaggggatagggaagggggagactcagaggatccggaacgaagccggagacttgaaaccaggataggggcttcgcgaggcagggagtagggagtctggaaaccattaccagaaagcgccctggaatcccagggcacggggcaggcggcca

SEQ ID NO: 19308 - DNA, 1714 bp, Artificial sequence
  DNA replication origin
ctctgccttccttagagccagtgatggctccttctccctgcccctgaagccagtcatctcccagcccatccatgacagcagtgagtatcctgattgcctggggtgccaggcctggtggcagaggtggcatgaggggtgacctcaagctgtgcagtcaaacagacccaggtttcagaacctggccctgccacatatgagctgagtgatcctgagcaagtcatttcccccccgaagcttctgtctttagtaaatgtgtatattgggtgtttcctgcagctccaggggttgctgagataaggaatacaaagcccccagcttcttaaatgtggccttggctattgcatcatctcaactaatccatatcccactccatagaatctccgggggcatcaaacctgaagatttctcgaatggacaagacagcaggctctgtgcggggtggagatgaagtttatctgctttgtgacaaggtgcagaaaggtgagactggagcccactttgggcaccaaggacatcgagtataagactggggccagggaagctctagggtaaatggccccagagattccaccgggagctgtggccaagcttccgttttccttgtagatgacattgaggttcggttctatgaggatgatgagaatggatggcaggcctttggggacttctctcccacagatgtgcataaacaggtacccagggctagggcccgggcccgggctgggggctaaattaggctaaggactcactgacaccctgtgtctccctgcaccccccagtatgccattgtgttccggacacccccctatcacaagatgaagattgagcggcctgtaacagtgtttctgcaactgaaacgcaagcgaggaggggacgtgtctgattccaaacagttcacctattaccctctggtggaaggtggagctgggctgaggacctcagggtgctggcggggggccaggctgggctagaagaaggtcccaagagctagatgtggggatgcatgagccaagtcagaagtgcgagggtcccaggaggtgcttcctaggagccggccctgagggctcttctgggaagggcccctgaggcatgacacaataactgggctcaatctcattttcctctgcccccagacaaggaagaggtgcagcggaagcggaggaaggccttgcccaccttctcccagcccttcgggggtggctcccacatgggtggaggctctgggggtgcagccgggggctacggaggagctggaggaggtgagggggtactgatggagggaggggtaaaggtaagagaagctgtggaggaaaaaaatctgggggaggccgggcgtggtggctcacgcctgtaatccagccctttgggaggccaaggcaggcagattacctgagatcaggagttcaagaccagcttggccaacagcgtgaaacctcgtctctactaaaaatacaaacattagctgggcatggtggcaggcgcctgtaatcccagctactcgggaggctgaggcaggagaatcgcttgaaccctgggagacaagaggttgcagtaagctgagatcacaccactgcactccaggctgggcaataagagcgaaactccgtctcaaaaaaaaaaaaaaaaaatctgggagagtcatggctggtgcccgcttcccacagccctgcctgtatccacaggtggcagcctcggtttcttcccctcctccctg

SEQ ID NO: 19309 - DNA, 3641 bp, Artificial sequence
  DNA replication origin
tgcagcgctgcttcgggtcaagctgaaggcaggcagtgaggagctggatgcagtggaggcagcactggcccaggccgggagcacagaggatggactccctccttctcactccagtccctccctgcagcccaaaccctccagccagccccgggctcagcgtcacagctcagagcctcggccaggggcaggcagtgggcggcggaagccctgagatgaggtttagggtggggagtgcctgctgggcacctgaaggatgacatggccctgcctgagcccgggccggcctcgggccacccacgagggcctcccggcctagggcccgaccgcgccggacgcggtgtccggggcagggcagggctggggcctgggcctcaggagcctaggctaggggcacctccgagagcccctttttgtgataatgttttgcactttttcgtacagggtgggcgggggcgggaggggctagcgcccctgaacttttgatgctttttttttgtgtgggagaggcctgatgccgtttctgctttctgctgagaccacccccaccctgacaccatcagtccccctctgtcctggggcctggcttggacagagaccaggatttggggctgagctggtttcccctccttcctccccaagggcttactctttctcttgctggaggtggaggaagggcgtccatgccaaggccccatacctgggccgggggcagcacggcctggctttcccccgcttcagtgggccttgccctttgtacagcctccacccccattaaaactgctctggacttgctggctgggcctcctccttctcttctcaccatgcctggcatgtgggcagggtgggtagctggttccagggacaagagtcacatcaggggctgccataagttgggaaggaggggtcctccccttcccatgagaatcctttatttgtcccaactgaggggtgggtgtggggtgttaaataagatttgaaataggtggggacgctgtacagggggtccgggaagggggctgggggcaggcagcaggtcagtgcacctgaggctgggggtgcccgtggcagagccctcctggtggctcagggggtgggcccagcttctctgcctcctgctccactgactggctcccgtacgcactgtcttccttcacctctgctgggggtaaatggggacaggaatgggatagtcaaagcctcaggcctccggccctccaggtccagatccaccttccagggaggcccctttacctgtgctgggcagcttgtctcgggtttctggacccctcagcagcctcactccctcctctaggcccatgtcagacagggcctccagtagacctgccaggtccccgccagccagctgagaagacagaggaatgaggtctgagtcatggttagggcatgtgctcgggagccctggggccaaggaggcacctggactcagatcgggaaaggaggctggggagggggcagggcacaggccaacccacctcgtagctgcgcaggaggctgccactgggtgaggttgtctgtcggtacgtgtctaccaggctgcgcagccccagacgctctgccagctctgcccagctgccctgggcttctggcccgtctagcagctgctccaggttctgcagagctgtatcaccaagtgacagtcccggcccttagggggacacacatacagacatgtcatttacctccagagttgggtggggacatggacacctgaacactgcctttctcccaaggtaagcgacagacaggaccatgaggggtgatggacggggctgagggtagagaaagggaggcctccttcagaggtcctgaaggagaagagacctctgtgaggagtcagaggagtcgggctggggatgcctgatgcttctcacctgctgggctgggcggggtcaggggtggctccatggtgttctgagcagcatttagcagcaaggtcttcacctggggagacagccgcagttctgactacctcccacctcgtccttaagcctgtgtctttaagtccagatactctggaccccgtcactcagagcacttctagtcccgggctggcctcaccttggtgctgcaagtgaggtcaagaggcgtgtggccccggaagctgcttcgggtgtccttctcaggcccttcagagtccgagtcgctatcagaggtagggggtgaaggcagtgggcacaggggctcctcgttttcagcatggatgtcagcacctgggagagggaggccgtcatggggcggtatggtgggggcctacattaaggactgcaaagtcgggggactgggaggcacctctctcccttccccccaccctgttcaagtgcccctgagggtgagactgaccagccttcagaaggaggcgggtgagggtcgggtaccccagtccagctgccaggtgcaggggtgtgtttcccgcaaaggtgcgagcgttcacgttggcccggagctgggggtgcgagcagcgagagttgacaccacagcatggtccccttggccagccccccccttcaccatctttggcccctccaccacccttggccccactccttccacaatcctcagtcccaccttggtgaccagatgggtgaccaaccccagctcctccatctctgtggctagatgcaaggctgttcgtcccccctgccgctctgtggcctccacttcagccccactgtccaccagcagatccaggcactcagggcttcgggctcggactgccaggtgtactggatacagtcctaaggatgcaggatgctcaacctgcagctgtgacccttaaggcagcccctggaccagccctgaccattcaatctcgacacctcatagtccattctgggcactggccagataccctccctggtccccgcctgcccccttagtcaggtgagatggggagctcaccctcaaagtcaggcatatgcaacagctggggcacagcaggagctccactctgaagcagtgcacgcagcagctcaggagcaccagcgcctgcccgcagcgccagatgcatggctgagtctccatgccgatccagcagagctgggtctgcacctacccgcagcagaaagctcaccacactcgtctgccccgtgatcaccgccaggtgcaggggcgtctggggatgaaagcagggtgagccaggcccgagacccacttgccttccaacccctcccacctccccagtaggcgcccccgcacctggtgcaggtggttggtgaggttgacaacgccgaggtcctgggcgtggtggatgacatagactatctgctcaatgacactggtctgcccgtggatgatggctaggtgcagtggtctgggggttggggagcgagagtctggcccagccactcagagcatccttcgctttcaaggccccaccgccctcatagtctccctcgctggggcccatggaacccagcacgtggcccagggcatcgctgtgcctgcacttaacgtttcgcagcaccttttgaggtaggtaagtgctatgactgtaccccttgcacggtcgaccaaactgaagtttggagagaccaagcagcttgaacagagcttgtgaacaccgaggccggacttgaagcctggcgtgtccgaaaactgcagagcccgcctccgtgccggtc

SEQ ID NO: 19310 - DNA, 1104 bp, Artificial sequence
  DNA replication origin
tttgtttgtccaaaggaaggggcatcttttttttttttttttttgagatggagtctcgctctgttgcccaggtgggagtgccgtggcacgatctcagctcactgcaagctctgcctcccgggttcacgccgttctcctgccccagcctcctgagtagctgggactacaggcacctgccaccacgcctggctaattttttatatttttagtagagacggggtttcaccgtgttagccaggatggtctcgatctcctgacctcgtgatccgcccgccttggcctcccaaagtgctgggattacaggcgtgagccaccgcgcccggctggaaggggtatctttttaaaaatctgcagaggcactgtatagggcagagtgaccatgaccatgcctccccctggccgctaggaggagcaggtgcggacccacgaggccaagctgaaggccatggcaagtgagctgcgggagcaccgggccgcccagctgggcaagaagggccggggcaaggaggctgaagagcagcggcagaaggaggcctacctggagtttgaggtgagcctccctgtctgcccctctgtccacacacgcaggcccatactagggtgaagggcatgaactctaacagtggaaccggccggaggtccttgggcaggttgcttaacctaagcctcagtttcctcctctgtgcaacaaggataacatttgacatccactggggtctcgaggtgaggcatgtctcaagcgtgccatttccccagctctagtaaaggctcaagacacattaggttatagatgatggtcccaggagagcccagagggggcaccagcccgcatgggaccatctcacagtcctgggtgggcacctgccatcttctgccctgctggcggccctccctggtccagatggtggggtgggcagaaggcagagaagaggctctcacagcccctgcccctctgcctcagaaatcccgctacagcacctatgcagcgctgcttcgggtcaagctgaaggcaggcagtgaggagctggatgcagtggaggcagcactggcccaggccgggagcacagaggatggactccctccttctcactccagtccctccct

SEQ ID NO: 19311 - DNA, 1373 bp, Artificial sequence
  DNA replication origin
cagcttggcctcgtgggtccgcacctgctcctcctagcggccagggggaggcatggtcatggtcactctgccctatacagtgcctctgcagatttttaaaaagataccccttccagccgggcgcggtggctcacgcctgtaatcccagcactttgggaggccaaggcgggcggatcacgaggtcaggagatcgagaccatcctggctaacacggtgaaaccccgtctctactaaaaatataaaaaattagccaggcgtggtggcaggtgcctgtagtcccagctactcaggaggctggggcaggagaacggcgtgaacccgggaggcagagcttgcagtgagctgagatcgtgccacggcactcccacctgggcaacagagcgagactccatctcaaaaaaaaaaaaaaaaaagatgccccttcctttggacaaacaaagcactatgtttgggttcccagccggcaagcgggacccagtgggggctggatttcagtccctgctcacccctgtggccagcatcctggtgcaggggacatctccacgatcacacgcagcagccttgagtgcagtgggcctgagcctaacaccctccatcccactggcactaggtggacagagcttgggctacctgggagaggcgggtggcagcgctgggcaggagagggcggctgaacttcttttgggagctaacagcagctgggaaggggggcgcagagaacatagcggctactacattgatgcgagtgatccaggactgcatctgctccaggctcctggggagaaagcacagccctttgggacctgggcccagggtttctgtcccaggatgccagtcctggctcaagtgtggcctgagaaggaatgaaaaaatccagggacagggaggggagcaggatgggaggtgggggaaggggtccgggatgggcaggaggagggcactcacggggcctggaagaggaagacccgccagtcagctgtgcgcaggtagaagacgtggggcctcttgctgtagtcactggcacgagtggccagggcatggtggatgctgatggcattcttgagctccgtctctgaaagggccttcccaggcttgtactcctcctgcaggggtgtccatcttgtcctggccccaaatgcagcctggcccagcccctcctattcccacccatcaccccacacccaccagccaactcagtcccagccccagccccctggcctgaccccgcaccttctgcaggtagaggatcatgcccttgaggatcccgtggaagctcttccagccccgcttgccccgaggtgctgcggggagagaagacaggtcagggggccctggaacaggcccactcccatccatcccctagacgcccgccc

SEQ ID NO: 19312 - DNA, 1411 bp, Artificial sequence
  DNA replication origin
acaggtcctagggagcccagatgtcacagaacaaaacaagtaaccatgctgtctgttcttggaaggctccaatagaaacatagatactcggccaggcgaggtggctcacgcctgtaatcccagcactttgggaggccaaggcgggcagatcacgaggtcaggagatcaagaccatcctggctaaaacggtgaaaccgtctccactaaaaacacaaaaaattagccgggcgtggtggcacgcacctgtagtctcagctactcaggaggctgaggcaggagaatgctgtgaacccgagaggtggagcttgcagtgagccgagatcccgccactgcactccagcctgggtgacagagagagactccgtctcaaaaaaaaaaaaaaaaagaaaaaagaaacacagagactcataagtaagtcttggaagagtctagtcttctagtctgagggaagaaatccagtttgggccttggggtccccagtctgagggtagaggccttatcttcacagttcatagatcattcaaatttgccgttatccactgagactccctcactgtccagttagctgggagttcccagtcattggagatctcaggggaggtgcagctcaggattagggtgcagggggagatcagggaaggcttttggagggttgagactggggccatgaagttggggcaacatttgggaagaggaaaggggaagctggaatttgggaggcaaaggtgtggtggctgaaatgagtatggggtgggggaccaagggaggcaggcctagctgggacggagaaaaacactgttgggggagatgcagtgtaggctccatatgggaagtaacagggaactaccacaggttcttgagcaagggagtgacaagatagaatccgaaattttgtatctgactgagcctgtagaccaggatgtatggggttggggtgggggcggcactaggaaactacttcttccatctgctaccatttagcccacaaaccgtgagcaaagcctggggctggatgtggttgagccagcggaggcaggcccggggctgtcctggtggagaagggtgtgagggctgcaggtgtgcagcaatggagaggatagtgctggccctacttgctgggaggaagggacagtggtggctctaggctggggagctctgagggaggtgccctgctctgaggaggcacagctacacattgtggaggcctgatctgagacgggagacatggcaggaccctcaggttgagccccccaagccacaaacactgggggagcttttccagggcgagcagaggccagaactgaagcgggggccgcggctccatggccagccccctctgaggtgatcacacctgcagagacgaggaggagctgagacgctctctgtctgagttggccgaccccaaccccaa

SEQ ID NO: 19313 - DNA, 808 bp, Artificial sequence
  DNA replication origin
cgttccctccagggctgtgcttctccagcccaggatctgagcaggacagccccttaacaacaataaagataataatagcaacaaccatttactgtgcgtcagccttgtgctgggatgccctgtgctaactgcctgtgcccacatgttactacgtttgttcctctccatggatacttgcccgaagtcatgcagctcaggtggtggagccgggtctgggtctccattctggagcctgtatttttggtcattatatcttgctgccctttccccttagttctggctcatctctcaagttagaggggaaggctctaagctctgacactgcggtactgacccacaaccccctaatttgttccccccaccccccaggccttgtacagctccatcaagaatgagaagctgcagtgggccatgtgagtcccggggctgcgtggtggggctaggatggggcatggggaaggggctgcctggggaggctgagagagctggggtaggccctgggtgggggtaggggaggggagtgagaggccatgagaggcagtgaggctgcctcacttccttctttggagatgtctgcctggatttggggttctgtatcttgtctctagctgggttgttatgacaagtgggttggggtgggaggagaggtgctgaaacatcaaagggaggtcccctggcaacctgagtgggaaagcagaagcctctggaagcagggccttgaccagcagcacaagaggccctcacaggtcctagggagcccagatgtcacagaacaaaacaagtaaccatgctgtctgttcttggaagg

SEQ ID NO: 19314 - DNA, 1192 bp, Artificial sequence
  DNA replication origin
gtgttgatttgccttggttgtgctgggggcggtggagtgggggttggaggctgtggggtacacccatccccagatagggtgtgaacagtgtgtgcccagttgggatgcctggtttgccttgtggctgggcatggctgtgggcagtgagagagtcagagactgtggtttgttgggaggagtgaaggggaggctgtgtcccatcacagggaaggtgcctacgtcaccactgcacccagctcacatgcaggcagcatcacacgccacacacttagcccaacatgcacatgctggggacacacccactcacggacaggctgacggaagtaccccacagttggaggtgctggcgtggacccatattccagaccactctggagaagaggggaccccatgccactcctggagcctattctctcttctgaccaccccaggacccccaaatgtccccaggccaactgcacagaggggaagtggctggttcacatcgcacagagtttgggctatgcagggattggaagctaaaaccactgctttttagaggagtgttcactctccagtgacaaagtgtgcacgtgggcagggcgttggaccaccctggcatttggcttggtggggctgtcagggttagggggaggcctcagcttgtcttggtgttgggagccatgatagtgtattctctattagggaaggaaagtgctgagagggcgagtcccctatcctggggtcgcagtttccccatatgctatgtgtgggctcatcctgtggaaacaggccagagcgcgtggttgggggaaggggaatttcttgggctgcttttcccgttccctccagggctgtgcttctccagcccaggatctgagcaggacagccccttaacaacaataaagataataatagcaacaaccatttactgtgcgtcagccttgtgctgggatgccctgtgctaactgcctgtgcccacatgttactacgtttgttcctctccatggatacttgcccgaagtcatgcagctcaggtggtggagccgggtctgggtctccattctggagcctgtatttttggtcattatatcttgctgccctttccccttagttctggctcatctctcaagttagaggggaaggctctaagctctgacactgcggtactgacccacaaccccctaatttgttccccccaccccccaggcct

SEQ ID NO: 19315 - DNA, 1180 bp, Artificial sequence
  DNA replication origin
gccgctcgcgctggctgtcgggggagcggtccgcgggccgtccgggcggcccgggggccgagggcggacgggggcatggccgggggccgcggcgcgccggccgggccagcatgatcggcgtcaacagcatccacagcagcgccgggcggctgcgctcgcgctcgctgtgctccgtgcgctacgggcgcacccaccgcggcgcggagaccctgtgctacggctggccgcagcgctcgcgcagcctcaagcccgtgctctacaccgacctggtggtcagccgcctgcagagccgcaagaagaaaaaggcggtgagggcgttggggccgcggcccacgccaggttgcggggcgaccgagggggcggcttgtgggaggcaccgagggcggtgccaaccgagggcggagcctggtagggacagaggtcatgggcagccagaggcgggcacgggctgggggggcagggagggcacagaccctggggccaaggtgggcctcaaaaaccgaagaggcttttctagattgaatatgacttgcggcccaccgatggggttcagggccctcgaatgaggtgtgatggtgggccgaagggggtcctgagacagggcaggggatgaactagaaggcgggaggcaaggattgcaggttggatcttggtggccacttccgctttctggccagagagttgcggagtgagggttaagggtctgagccatgctgggtttcgtctgggtgtgtgctggaaggtctatgtgttgatttgccttggttgtgctgggggcggtggagtgggggttggaggctgtggggtacacccatccccagatagggtgtgaacagtgtgtgcccagttgggatgcctggtttgccttgtggctgggcatggctgtgggcagtgagagagtcagagactgtggtttgttgggaggagtgaaggggaggctgtgtcccatcacagggaaggtgcctacgtcaccactgcacccagctcacatgcaggcagcatcacacgccacacacttagcccaacatgcacatgctggggacacacccactcacggacaggctgacggaagtaccccacagttggaggtgctggcgtggacccatattccagaccactctggagaagaggggaccccatgccactcctggagcctattctctcttctgaccaccccagg

SEQ ID NO: 19316 - DNA, 1339 bp, Artificial sequence
  DNA replication origin
ttgccgacccccggctcctgccacggaagcccgggctctcgtgactcagcctggggaccgccccctccccaggccccacgcgcaggctctcccggaacatgcgcacatgcgtgcggtcgcgactgcgcacggcgggggaggggacccggctctggaaaacgcgagcaggcggccccggcccctgcgtttgccttcagttcccctcctccagtgtgcgctggggtggaaggcgggagttgcgggggtccctgcacgggacagggattggatgggggtacactccacactgctcccccgccgcgtggacagccaaaaagaccttcccggtgctgctgcgctgcaggaacccggagggagaggggcctgagagggactaagcttttccaaggtctggcagcgagttagcgcaaagctggagctagaaactgctttctggctccctgtgagcaggtcccgttcccaggcgccagctccatggcccgcaaccgagggctcagatacgtaggggctggtgccggtaggagaagggagtggctcatccagtgggttcactcctctccctgatctggtggtagtttatctagagaggcctggactcacttgaagaaacccccaggctaggacaaaggtgtctctgctccactacatacatgtaacagcacaggattgtcctagggcgtttctgtgagcttggggtgctgggcttctgagtttggggtatatctgagagggaacgtccatggtgagctggggtgttgcttgagttgagttgcatctgtgtgcccgggcgtcgtgaatcaagggtttgtatggcttggtgtgtttgtgctttagggcttacgattcagagtgtgtgtttgagttggggtgtaggctggatgtttatgtgtggtggggtttacatcttcgaattggccgtgtctgaggtatgccatatgcctctgagtagggggtgtatctttgtgagctaaagattctaagttttgaagtgtccatctgaatgggtagtgtctgcgagttggggtgaccgtgaactggtgcgtctggtttgttggggtgtatgtcagaatcgaggtgtgttacgtgacttcagatctatatatgggtggggtatctgcgggtgagctggatgaggccagggctgttccttccctgcctccgtcctccctcgaggcccctcttggctcagtggaaaagggctgcagggaagcggtccgacctctcccctcccaccaccccaacccagaccagccagaagggagttccagaccctgccgggtccgcccagcgtcacagccccaggcctagcggtgctctcagcctccctggagctgccacc

SEQ ID NO: 19317 - DNA, 1104 bp, Artificial sequence
  DNA replication origin
cacaagccgtcctgacatcacccttcccaagatggctgggcatggccaagggccagagctgcctggtaaagggaccttgggtaggggtgatgggtggagggtcagggtgcataccctcatcccctttctctcctccccttcccaccccagctgctgtactctcaaagcctcctgtcaccccagagacagaggctggaaactcctggttgctaggcaaccctctcttgccccttctccagggtgtttctgaaggagctggccttaatgggtgagacccaggaacgagagcgcgtgctggcccacttctcccagcgatacttccagtgcaatcctgaagccctgtcctcagagggtgaggagttccgagagcaggggtgtccttagctggccacagtggcaaaatgggctgggccctgtgtgtgtgtacaggagcatgagtgtgtgtacagcagggaatggatgtacatgcgtgtaggcatgtgaacttgcatgtgtgcagacagcgctgtcatggctgcatgtatgtggaactatacatgtgggcaggcatattgctagggttgagtgtgttgtgaagaggcaggagtttgcatgcctgtgcaggccagtgcttggctggagaggggattctgtttggctgcactggtctacaggactgtgctgcggttcactttctcgtggtccaggcttagaggcaagggaacgttggggcaactagtacgttggggcaactagccctcagtacttgagggagccagggacgggtccttgctgacggatctgctggaagaggagctctttgtggggagggtttactagcggggttcaggaggtaggaagttgccggccaaagggggtggggatgaaatgggaggttggggaagatggctgtgggaagggtccctgggaggcagccaaggctgaaagtcagctctcccctagacggcgcccacacgctgacctgtgcgctcatgctgctcaacacggatctccacggccatgtgagtggaggcgggcgggcaggagccggaaaacaaacccctggccagacatgcaggacctgggaggccaagggccctccaaactcacaggcctccgttccct

SEQ ID NO: 19318 - DNA, 926 bp, Artificial sequence
  DNA replication origin
gcttccagccgtaacttccggttggagccaggcccaagggctggggtgggcctgggaggagaaaccccacccagatcccagctccgactcaagccccctggagcaggtagcccattcagtggcctcacactggccttctccacaaagcggaagatgaccacagagctctgggccccgggtgggggctgcccagtgggtgaagagggtgcccagggtgagggagcaacacggggtgagggggggccacgcagaggtgtacagggtgctgtcacacgtcccagttcccggcctcgaggacctggacctgccactcgccgtagcaaggagcctgtgctgccatacatgctggctggggggctctggggcaccgggccttcggggagccagcggcgtgggcatcgtggtggggagatggcacagtcgccttccgagcagaagcgcatggcaccctgggccatgctggggccgggggtcaggctgggggggcagggatggcgaggccaggcggggagtaagggggctgcatgctcttcagacaggcctgtaagagaggaaggggagcatggggtgaactgccaaggagttagatggataggacagcagagatagggaagggaaagttggctagggcctctgagtatcagggacctagcacaccctggtaatatgggatcattgatcccacgcctggggactacttccatagaggcctgacgagaaaagacttatacacccagtgggcccctggctcctttccttctgcctgaggccctgagcatcaccctgggaggagagaggaagcaacttcaaagttgagtgagcccggagttcttatggcactttggagctacttctagaataggggaagttggtaccccaccctctggaaaaggggtgtcagccagctgtcaccatcatacagccct

SEQ ID NO: 19319 - DNA, 1005 bp, Artificial sequence
  DNA replication origin
gaaccaggggttccatgcgccctcctccttgtctggggcgggtcttaggttggcgggagagcccagcggggacctagcgacaaggggggctggcagcctccggggctctgggccctgggagagggcggggggtgggggggattagcgttgcctgagcggcgcgtagggggtagggggagggactgagaggcgggcgggcctggagcaaacgggagccgcgctgccttcacagctcagctgggcccagcctctcctctgtctctcctcggtctcagctctgggcgagcagcggtgagtactgaggtggcattgagttggggctgcaccgggtatgcgctgggaccccgttgagcttccggaacctgcctggcagggttgctactcctgacctctgcccctcccctgcattgccaccagaggcccctttacctggttatggtctctcctgggcgggatctgtcttacccctggggagagagggagaggagaggaatatgggtgcagattcccctcaagagaccccagtaggtgggggggaggggacggtgtgtgtccctgcttgagtgtgtacatctgtatgtgtacatctgtatgtgtatgtgactgtgagcagtaggtctctgtgagtgtctgatacacctggacctctgtgtgcactggagaatgacagcttgtgtatatatttgggtacctctttgtgtgttcctgtttgatgatggtgtgtgtgtaaaacaagcatgtgccttttcattacacacatacttgttatgactgtgagagtgcatgagggtgtgtctttgagcagtgtgtgtgtgtgtgtgtctgtgtgtgtgccagagggtgttgcctatgaatgtgtttaactgtgtactgacatatttgtccttatgtatgtgtgtgcgtgtgtgtgtgtgtgtgtgtgtgtgtgtgtttgtgtgtgtgtaggtgcctgtctgtacctgtatgaagaaaagaatgtccctggccgggtgcggtggctcacgc

SEQ ID NO: 19320 - DNA, 749 bp, Artificial sequence
  DNA replication origin
ctggcgggttcaagacggtgttccctagatctcctttccatagttgatggtctcctggatttagggggcgggtccagtctacacccataccgtgtgcttggcgcggccgcgtgctcgtgggggcgggagcgcgtgtggcatgtaacaggtcatgtggcagcctcctagggacacgcgtggggtctggagcgggacacgcgtgtgcagccgggccttacgtgtggctcaaggggcggtgggcgagagagacgtggacacaagtggggtggggcacgtgagggtctggggaatagaaccaggggttccatgcgccctcctccttgtctggggcgggtcttaggttggcgggagagcccagcggggacctagcgacaaggggggctggcagcctccggggctctgggccctgggagagggcggggggtgggggggattagcgttgcctgagcggcgcgtagggggtagggggagggactgagaggcgggcgggcctggagcaaacgggagccgcgctgccttcacagctcagctgggcccagcctctcctctgtctctcctcggtctcagctctgggcgagcagcggtgagtactgaggtggcattgagttggggctgcaccgggtatgcgctgggaccccgttgagcttccggaacctgcctggcagggttgctactcctgacctctgcccctcccctgcattgccaccagaggcccctttacctggttatggtctctcctgggcgggatc

SEQ ID NO: 19321 - DNA, 1604 bp, Artificial sequence
  DNA replication origin
accaggtcctcgtctgacagccattcgtgacacggcgccagtgccagctcctgcagcccctcggcatcccgcagcagccgggccaatgcggcccgcgggatctgcggacccacctgcgggcggggaggcaccccaactctcagcccgtcccgcactcctcagccgcctatgcacccctgacctgagttcttttctggcagcctcctgctctcccaggagagaccccactttccctctgagtcgctaccgagtatttgccctttggtgcgtggatcccttccgggcagccccggcggcccaagggggtccagaagggcatactgcggggctgggggctgggctagaggcggggcggtacccaggcaggggcggggcttcagcccccggctcacctgcgcggcatcgaagcgacgcagcccggccaggtgaagctgcaccagcgaccggaaggcccggctaacgcgctgcagccggagcagctggcgcagcgggacccggttcaggacgtgtgggagcagcacgtcttcccagggcaggtccaggaacctgcgagtaaaggggcgttggcactggcgtcccggggccactattacctgcgagtccgcctccgttatgttcctgcgccccagctcccaagagcggcccccagacccagccccggctcggctcccctccctcaggttcctcttccctctcggcccctccggtgctcggtacctgacggctccgggctcttgctcccctccggacggctccatcggtggctccatcggctgtctattgcgcgtgcgcagtaagattttctcgctttggccttggagtggccgcaccaaacccgcctccttggcctgtagagacagacctatttaatcgagtgccgtctcaccgaggatccgatctgaaagcttttcgggtggaccccgaaacggaggcggaacagaccggtggtgtaacattaggcctcgccttctcggctacagggcttgaggcctgaagctggagaatgcggtgggcatcagagactggcttctgtcgtcctcttgagccagtagccgcctctgagcgaagtggtggtgggaggagcaggcaaggccaaacgcggagggggcggagccaggactcttaggttaccggcctctcctctgccctctggtcgcgtttagcgactttgaaaaacggggagaaactatccaggctcttactgtctgccacgtagcaggtgttcaataagtaattgttgaaataatgaatgaattggcgaggctataatgtttccctcatcaagtaaacctgctcaaacctcccattcctgattaattatgaagagctatccagcctcttccacttcgtaacagtttgggccgcgtttccgccgggggagagagatgtagggggcgcgaagaaagactatatttccaactgggtccctttcatttcctccaaaggtccagagtcctaagaagaatgagagctcagctcagcccgccagtggtagtgcttctcggctggccttgggtttagttgtagggtctggggctgggtccgccctgggacaatgacgccccagacctctggactcagcttcagggctgcctctcaccgcg

SEQ ID NO: 19322 - DNA, 1156 bp, Artificial sequence
  DNA replication origin
tcggtagcgactcagagggaaagtggggtctctcctgggagagcaggaggctgccagaaaagaactcaggtcaggggtgcataggcggctgaggagtgcgggacgggctgagagttggggtgcctccccgcccgcaggtgggtccgcagatcccgcgggccgcattggcccggctgctgcgggatgccgaggggctgcaggagctggcactggcgccgtgtcacgaatggctgtcagacgaggacctggtgccggtgctggcgcggaatccgcagctgcggagtgtggcgttgggcggctgcgggcaactgagtcgccgggcgcttggggctttggccgagggctgcccacgcctgcagcgcctgtcgctcgcgcactgtgactgggtggacgggctggcgctgcgcggcctcgctgatcgctgcccggccctggaggagctggatctcaccgcctgccgccagctcaaggacgaggccatcgtgtacctggcgcagaggcgcggcgctggtctccgcagcctctctctggccgtcaacgccaacgtgggggacgccgcggttcaagagttggctcggaactgcccagaactccaccaccttgacctcaccggctgcctccgcgtcggaagcgacggtgtcaggtgcctgggcctgatagggcgggaggagggcagtcacttagcctctgctggtatggggcgggctgtagttgttaaaaggccggactgagggttctgaatcttcctgcaaaccacagcacccccattctgaacagaaagggcctctaggattgcctaggccagagagcccatagtttaaaaacttttttcaaccaatgtttacacattgggagatttcacatagaaagtcgacttctggcttttcttcaacaagggggagatcttgcaatcctaggcggagctgagggccaggttccccccttaaatgagacaggaagtctccagctcactggaagccaatccaggcgcctcccttgtgtagggacggaaaaagtatgcccctgccccgagctggagggagaccgggattttgccggagccagtccgaggctgagtgagcccgggcctccaccttaccccaccaaaggtgtggtggcctcatgtccctagcctcaccctgctcctccctcagga

SEQ ID NO: 19323 - DNA, 804 bp, Artificial sequence
  DNA replication origin
gagccgcttgcggaagcgcggcgtggacatcgacgtggagccgccgctgcaccaggccctggtgctgctgcaggatatggcgggcttcgcaccttttgtcaacctgcaggtctgacccgcctgccaatcggagcacagctggactgtgtggctggggcctgacactgagctgtagggaaactgaactgtgaggacctctggtgagaggccagtgccctgccccaccctggagcttcaaataaagagctttttaccccctcttgcctggtgctgccctgttgaagataggggattcgaggttggggaggaaaggtcagacaggcatagtatcccagtcctgaggcagaaatgaccagaatgcactcacaccttccttgggccacctttactgtgcccatggaggcagctccgagagtaggttaacactatggagcaaaggagtagagaagggggacaggagttagggggcccctgtgtaggggtatagggctcctgcatccctctgggatctgagcctagaaggctcgggcagagtccggcgagtgcctcaatggaagcggtactttctggctggcttgaggttgatgtatgtggccttcatctcctcggcctcagggttccgcacatctttgaatcgctcccctttggtgctcactacctggttgtcgatgtatcggatcagcttcttgggggcctgtcaggcaatcagcagtgagtggcagaagccaggagccagtcccacccattccgcatccccagcaacccttaactctctcacctccttgggagccatgggccggtgaa

SEQ ID NO: 19324 - DNA, 1420 bp, Artificial sequence
  DNA replication origin
gagagggccagatctgtgggctcctcaggccttggggaggaggatggaaagtgctgtgcagatagtcctaagctgcaggaagggcagggactgggcgagaagagagaatccatgaaaggcttccccttctatctgggccccagagccagaaaagcccctttgtgcagagggtgggtggcctgttctgggtgggggaagggctgtgcttggtcctgaggctgagccttgaggggctggacaatggggccccttgtgattggacttgggggccaaggggctccctcagtgatgggattcctgagccaggaggcatgtgaccccaagaccttgtcagaaggtctgggactgctgctggggaatggggtaggggggtggggagaggtaggggggtggggagaggtgggggggcgcctcctctagaggctgtctccagacacagtgccctgtcctgtctcaggctgaaggaggtgagatgggcggaggagggggcatggttctacttgggggaacagagagggcagcatcaacagatggttccatagcaggccaggagggaggagccactgcccccaggcccagtgggtgggggcaggcagaagaaggcctggccatcctgtctgtgtcccttcagaagagagagcatggagctggagaggatcgtcagtgcagccctccttgcctttgtccagacacacctcccggaggccgacctcaggtagagacgggtcccccggaaggctcatgtcagtgctggagctggagctgccgggcagtactatgggtactggctgatggaaagacagcaggagggctgactaggatttgctgagaggccttacctctcatcctgtccctgtcacctttgttgggcagatgggaaaccatagctctgagggagggggttatactctctggccttaaagataaaggtctagctcatagaccccatgaagctgagggctggagtctcaggataggtgggggtgctggaggcatccagtgtcctacccagggcttgtcctgttcccttcctgcagtggcttggatgaggtcatcttctcctatgtgcttggggtcctggaggacctgggcccctcgggcccatcagaggagaacttcgatatggaggctttcactgagatgatggaggcctatgtgcctggcttcgcccacatccccaggtaggttctggctagggccaggaggaggaaggggctggctgattatggggtgggcagagtcatcctctcactgccctcatcttttcaggggcacaataggggacatgatgcagaagctctcagggcagctgagcgatgccaggaacaaaggtgagtctggggctctgggcacctgagtgattcataatcccgctcccccaactgcctgctccccagagccttggcaaacctgatgctct

SEQ ID NO: 19325 - DNA, 1745 bp, Artificial sequence
  DNA replication origin
ccgcttctacggccccgccgcgccacccgaggccgcgccgccctggtgggcctgccctccggcctacgccacgaccctgcgccggccctgcgccgccgccggcatctcgggactgtcgctgcaggcgcccgcggcggtggccgagagctgggcgccgtggccggagggcgggagcctgcaaaccgagctgcgctggggccgcgtggagcgcgcgcggggcccccctctgcagctaccggacttcgtgcgccgggagctgcggcgcgcgtacggcacctacccccgcgccgacgtgcgcgtcacccagcgccgcggccagttcctgctgcaggcgacgccgcgcgtgctcgagcccgaccaccgcgtggagtggcgcgtgcggcgccggcccgacagcggcgacagcagcccagcccgggaagccgcggagcgcggccgccccaggaagagcaagggcctgagctgaagccgccgcaaggcctaggggcgggcccgcgtgcacgcgcttggctctttcctgtgtgtgccgccgccgacaggcagaagtgagccctcacctgtgcgcgggaggcggacgcgctgctcacctgtctttttggcttctcccatgactgccggccagtttcctgcacttgtttctctcgctttattgctggacggtgggagaagggcaagtgcaagacggaatcgagggcacctctgggtgttctgtacctcttttcttcttgcaccttgggaagtggaggacgtgggatggaagaagggcctggacctccctccttcctcctccccaccttctcctaaggagcttgccctgcagtaagccccaactttcccttcctcttttccctctatcagagtcgtcgcccacccccctttcccaccgctcccctacccccgccttcctgccaagccgagggcgacggtgatccccagcttagtaagaaaagtaaataggccgggcgcggtagctcacgcctggaatcccagcactgtgggaggccgaggcgggcggatcgcttgagcccaggagaccaggttggagaccagcctaggcaacatggcgaaaccctgtctctacaaaaaaaaaaaaaaaaaaaaatagccgggtgtgctgatacactactgtagtcccacctactcgggaggcggagatgggaggatcacctgagcccgagagggcggggctgcaaggagccgcgaacgcaccactgcactccagcctgggtgactgaaaccctgtctcaaaaacaaaaacaaacaaaaaaaaaaacaataaataaatgagcgaagtcaagtatacactgcgagatcattgttatgttttggggtggtgtttctccatctgtttatctgtttaatgggagtcttaccgcccaccctggggtacaggaaggtagggtggaggggcgtgaagttgaactggccctctggagaaagcatgtgtctgatcgctgggcccagctgccctcttcaccatctccctccaagtgtgcaggccagcaccttctaactctccttggtcctttggcccaccaccctccgagatgctgagggcataagctctatttttgaagtgtggaaggcttcactaggagagggatgtctgagacctgagtttagggctggctctgacattttctacctgtgtaacttaaggctttctgactctcagtttcttcatcagtaaaagaggcgtaaaagtaacccagcctaattggaagttaagatgaatgtctcggccc

SEQ ID NO: 19326 - DNA, 1719 bp, Artificial sequence
  DNA replication origin
taacttctctgagcctctggttccttatctactaaaagagcatgacatcactatgcacttcacatagctattaagaatttaaagtaggccgggcgcagtagctcatccttgtaatcccaaaactttgggaggccaaggtgggcggatcacggggttgggagttcaagaccagtctggccaatatggtgaaacgccatttctactaaaaaatacaaaaattagccaggtgtggtggggcacgcctgtagtcccacctacttgggaggctgaggcagaagaatcgcttgaagctgggaggcagaggttgcagtaagccaagatcgtgccaccgcactccagcctgggcgacagagcaagattctgtctcaaaaaaaaaaaaaaaaaaaaggaagaaaagaatttaaagcagccgggcgcgatggctcacgcctgtaaaatcagcactttgggaagccaaggagggtggatcacctgaggtcaggagttcgggaccagcctggccaacatagtgaaaaccccgtctctactaaaactacaaaaattagcaggaggtggtggtgcacctgtaatcccagctcctcgggaggctgaggtgggagaatcgcttgaacctggaagacggtggctgcagtgtgccgagatcatgccgctgcactccagcctagacaacagagcaagaccccatctcaaaaaaaaaaaaaaaaaaattaaagcgcttatgtaacattctagagtgggaggacttcgagacagtctgcgagaagctcctgcacaggtgggcaataagaccaacattgtgagcctgagtcttgagacagactgggggttgaattttgcccttactatagccagctgtgtgagttgggatgagttatttaacctacataagctccagtcactgaatacactggacaccaactgtgaggcaagcagctttttgctatggaaagcaggggtaatatcagtaccccccttcctcggatcgacataacttgcagttagatgctcccagacaactcgattcagtgtctggtgtgcaggagtttcactcaaatgtgaggataacccaatccacctgcaggcgctgggaggctggggtgtagtgactgggagctaaccggattagacagccatcagtaatactgtaggaagggcatccttgtagggtggggccactacgaccagtacggctcacccaggtgtagacagacgctggtagctcctggccagctcaaggtgtttccttttgcctggtaaccaggaggagtggctgaggcagggcatggagcggagcaacgcagctacaaagtgcggagaggagccccgctctggatcccgccggctccccaaggctgaaggagacaagtgagtggggagtcactgggaagagcatcccggcggagggcttgaaaaggctccttattgtctgctgggagcctgaggctctgcccgaccttgggacaagaggctaggcggggagctgaatgttcgatttgggatgaattcccccaaagccatgaaccggcgtcccggggaaccggcccacagggacaggaggcggttaagtagaaagtctgtctacatatcccttcctccgccgcaggtctggatccgcaggagcccccagtaagaacagcagccgcctggggggccgaccatgtatgtgtacagctggccgccgcccaaacagggcgtctggccgccgccgccgcagctgct

SEQ ID NO: 19327 - DNA, 1078 bp, Artificial sequence
  DNA replication origin
ctggggcctgggcaaggggaacttcagcctgccaagtctgacacggcatctcccaacaactctcctttccccggcaggtcaggcgccgggctctcctcaagggctgtggtgctggcccgggtgcaggccctgggctggcatgggccgctgctggcgctgtcgttcctggcgttctgggtgccctgggccccagctggcctgcagttcttgctgtgcctgtgcctctatgatggcttcctgacgctcgtggacctgcaccaccatgccttgctggccgacctggccctctcagcccacgaccgcacccacctcaacttctactgctccctcttcagcgcggccggctccctctctgtctttgcatcctatgccttttggaacaaggaggatttctcctccttccgcgctttctgcgtgacactggctgtcagctctgggctgggctttctgggggccacacagctgctgaggcggcgggttgaggcggcccgaaaggacccagggtgctcaggcctggttgtggatagcgggtgagtggccagccccggctcttcaggtcctcaccagcaaccttctaagtctgatttcggtgctgggtccccggctgatgggggctgccctgggatgtgttgggggataactctggccagccccaggcagttctccactcccttctgccccatagcctgtgtggagaggagctgcttgtaggcagtgaggaggcggacagcatcaccttgggccggtatctccggcagctggcacgccatcggaacttcctgtggttcgtgagcatggacctggtgcaggtatggggagcagctcccggcccctctacagctgggctggacttcactcaaggggacagactcctcaagagctgggaacttggccacgcatggtggctcatgcctgtagtcccagcactttgggaggctgaggtgggtggatcacttgaggacaggggttcgagaccagcctggctaacatggcgaaaccccataaaaatacaaaaattagctgggcgtggtgtaattccagcatatctgtaattccaactacttgggaggctgaggca

SEQ ID NO: 19328 - DNA, 1543 bp, Artificial sequence
  DNA replication origin
cactagggggagaccaagagccttgggacactcccaacacagggaggggaggcggggcctattgtcaagtcacaccttccctgcctgtgactggcacagacattagccaatgggtgcttggatagggtgcgccggcgccccgccccccttagcgccccgccgccccgaggcaccctctggcagactcggcggcggcgacagcctgggcggacagtgcgccgtgcgcaggcgcggagctagacctcgctgcagcccccatcgcctcggggagtctcacccaccgagtccgcccgctggcccgtcagtgctctccccgtcgtttgccctctccagttcccccagtgcctgccctacgcaccccgatggcggagctgcggcctagcggcgcccccggccccaccgcgcccccggcccctggcccgactgcccccccggccttcgcttcgctctttcccccgggactgcacgccatctacggagagtgccgccgcctttaccctgaccagccgaacccgctccaggttaccgctatcgtcaagtactggtatgctctgggccgcggggagacggacaggcgcgggctggaaagggttaaagcgccgagggcgaagtaatttgtgggaggtgggaggaggggtagagaatggttaaagcactcagaaggagggcttcttgctgcgagggaaggagttaaggctcaagttgggaatggggacaaaggggttaacggagcccgtgggtactgaggggttaaccgggattaggagaatagagtgaggactgggggtgtgtgtaggagcagaggggggaacggcaggagcgagggaactgtaaacgtggtgaaaagagggggcgcctgtagggggtcattagtgggcgaggggaagccaagcgggggcggccgaagtgggatgggagaggcgaggcggggcctggggagcatttgagagggctttggaggagcgaagccgaagaagctcagagggcacgagactgcatagaatggggggttcggggggcccagggctctcctgtggtgggtaggagggccaaagatgagggcctggtgcttgtggagagaggaggaggtctccttttgataccttcccgattagctcagacgtcgtatcagggcaaagcttttgcttttgaagtttgacggagcagctcttcctgataaactttttgcttactctgcactgttctctttctccgtgcagagcttcctcctagctctgcagttgcttcgctttagggcattaggtagagagaaccatggtttggcttaggattgaaggggccgacagcttcccacctccagttggaaataaatggtggagactctgggaccccagcagggaggaattgtgcagtgggacattaagaggagcttctcggccatggcctgcagtttctccggggagctgagagtaaccctcaagtagctttagggtaggaatggtcttttctaatttcccattcctgtttgcagcctgtttcttccttcagcatttgggcagaacagatgttctggggactctgg

SEQ ID NO: 19329 - DNA, 900 bp, Artificial sequence
  DNA replication origin
ccctaacaggggcggctggctggcagtcagagggagaaagtgctgactgcctggcagggggaggagggctggtgtgggtgttggctccactgctgagaatccggctgggggcagggtcagagggtttcccagggctccttggaaagggcctgagaaacccctcggtgatcaagggtgggtgcttggggtgtggggcctccgccagccttcccaggagctctcctgtgagccggccccgtggtggaccacactaatgagcccataacacaggcctttgattgagtagctcccagcacagcaactttattgaaacatgccgaggccagcagctcgttcccaccgcgccccggttccctgggcaacagcccatgggaggggaccatgtgctggggagccagcgggtgctgggcctcaggctcgctgaggggctgccagggaggtgagggggttgtggcactgggagtgggaaccccggcagctagggggtcaggggcttggggaattggggttgggtccgaagggcattcaggggactgaggggcaatgtgacatctgcgaagtcctgtgggggccaaggttcttgagctgctgaaaattggagatgctgactaccctctcctcagggcagaaagacgttccaggacgggagggcagagctccgaggataggttcagagctgaggatgtcaaacataactgggtagattctgcagtttggggaggccccagtcccgactgtcccaggaaaacgtgcttgaacattacacacacacacacacacacacacacacacacacacacacacacacacgctacctgaggacacttgggaatgatgacctgtgaactctcaggggcttgtccttacctccagcctcctcagcagctccgcccaggagac

SEQ ID NO: 19330 - DNA, 1228 bp, Artificial sequence
  DNA replication origin
cgcagccgctgtcgcctcagagctttatcctcagatcaaaaaagaaaaaacaggaagaaaaaaatcccaaccccaacactctcatcacagccaccttcagccatcttgcgcgtattattatttcaggaataatctgtttaataaaaatacctgcgtatccagcccctcccccgcgtcctggggtccccgcccccttttaataataatctcgataataaaaacgatcggcgggccgggcagtccgtggcggccctttcctgcctcgacttgctcgggcccggctctccccccgcgaaggggcgccccggggtgggggtgcgtccccgtcacccgcgcggggaggaaagggcgccctcgccgccgccgcgaggaaggcggcggcggagatgccgcggcccgcgggaccagccggaggggcactcgggggtcccggggcccccgccacggcccggcctgggagtccgcagccggccgtatacaatgggttcggagcagagcggggcaggcagggtggggaaacgggagggccaggggctgcagcgagccgagctcccgggctggggcggaaggagacggggggtggtgtccctacatcaaggccggtcccgctactcgggaagggggcggagagctgcggcgctggggggcgaggagaaagcggcaggcggcgcctttaatcggcacccgccggttcggcccacccggcactggcgaaagaaacgggcgcggtgggggggaaggggcggggcgtgctttccggaagtacagttacagggccgggcgcccggctcctccccctttccctgtcgcgttggggctgttccggaggctgctcctgctattggcccacaagctgaggctccacctccctaaggcggggcagacccgagagtctcacgtgactctcacaaacttcggtacattaaacattgggatgggagggggttttccgcgcttgttaaaaaagcgatgatgccacggcgtagtgggaccacctcttcctgggcctgaagtgaagacccgtggctctttttacccagagggaaaggagcgtttgtcggtctgctcagcagtccggtggaactgagcagggaaatgcaaaggttcagtgtggggagatttcccgatgtccttaatacttttaacttcatccctggcactttaaactacctagcaagataggcatttattcctctattaataaggaaaccatggcttaaagaactgc

SEQ ID NO: 19331 - DNA, 1147 bp, Artificial sequence
  DNA replication origin
aggcctgccccggccccctgcccgcggccgccatggcggagaattggaagaactgcttcgaggaggagctcatctgccctatctgcctgcacgttttcgtggagccagtgcagctgccgtgcaaacacaacttctgccggggctgcatcggcgaggcgtgggccaaggacagcggcctcgtacgctgcccagagtgcaaccaggcctacaaccagaagccgggcctggagaagaacctgaagctcaccaacatcgtggagaagttcaatgccctgcacgtggagaagccgccggcggcgctgcactgcgtgttctgccgccgcggccccccgctgcccgcgcagaaggtctgcctgcgctgcgaggcgccctgctgccagtcccacgtgcagacgcacctgcagcagccctccaccgcccgcgggcacctcctggtggaggcggacgacgtgcgggcctggagctgcccgcagcacaacgcctaccgcctctaccactgcgaggccgagcaggtggccgtgtgccagtactgctgctactacagcggcgcgcatcagggacactcggtgtgcgacgtggagatccgaaggaatgaaatccgggcaagtaccctacgcgcgcgcgcgcacacacacacacacagacacacagtcccttcctctctcccgccccgggaccacccatcccgacaggctgactcttgtgacatcaggccagtggcccctggccaaactcttctctgaaagtttggggacagggtcctgggaagaagggccccgggtcgctacttggtacattctcgcacctgtgcgcacagggtccgtcttctgagtgctttatgggattggggtgtgggaccgtcaggggtagagtctgggtgttgcttttctgtggtgcgcagctccctcccccagtcttgttgctgtaggccctacgggaagtcaccgaggcagtgaccccggtcctgcctctccagctgctgtttatgtaatgagtgtcccggtgccgctgctgtggctgacatgatccatgatgctggcataccaatgaggaagtaaacaaaagcagccatgttagttttcagcgctattggaaacacactggggggggagtggggggagtttccagagggagagcagaactccgg

SEQ ID NO: 19332 - DNA, 1046 bp, Artificial sequence
  DNA replication origin
aagtaaacaaaagcagccatgttagttttcagcgctattggaaacacactggggggggagtggggggagtttccagagggagagcagaactccggccgtctctctggacagggcctgggcagccagcgaggccccgacagcggctccgctatttggattcctcccgagagccggctctccctgtgtgagaatcgctgccctgtgtgcctgtgtgtcgcacgggccgcatgaacaagccttcaagtatctgtcttcatcatcctggccctttcgcctagcacagccctctcgccgccctcccacatttggggaggggaagtggaagacggaaaaagaatcctgtgggtttaaggttgagccgccttgaaatctggtttcaggcagctggctcccctgggctgccggctgggtgattacggaaccgcgtcccctcccattgtatacaccctgcggccgcggccaatgtcaaaccgcctcccccctcaggcctctgggcctggttttggagctggactgaggcaatacttccgtccccttcagtggagggggctcctcctaggtccctccccagtcctctggctttcagggttgagtcataccaaaatgaaggggttggcctgacaccgaggagtcctctctgaagccccaccttggggcctggggcctgggtgtgatatctgggggctaggctgcactctggtgggactgggagtgtctctgggtggggatccctggaggttagtggaggccagtgcggaggctggctatgaggaagctctgttcagggcatgattggagatggggctgtttcctgtgtggggggaccagtcagaatgagtcactgtttagcaattaaaaaacatacacatacaaccaacaaaaggcaggagggccaccacaggctggggcgggggcagcaaatacgatttgctgtataattagtttccaatcggatggactagccctgggtttgtgtgccaggataggcctctggtttcttaaaggaagtgtgtcctccaccccctgtgtcctccatccccgttcag

SEQ ID NO: 19333 - DNA, 748 bp, Artificial sequence
  DNA replication origin
ctgtgtcctccatccccgttcagggcaggcacagcccacactttccccagtattgggaagctgctgctattaataaagatggaagggctgggggaggaggccgggaaaagtgcagaggcaggagaaaggagggctgtccagttctgtcctgggattggcagtggaaaatgagaggaggggaaaggagatgtggctgaaaggaacaggggaggggcagcaacctgggcgatgggcggatgcctgcccgcacccacagtgctgctgtagctggtctgagttctagggatgtctttaattggggtgggggagaaaacgtcattatacctgacttggtgtaggaggatagctttaggtgtctgtgtttttgaatgtctttgagactgtgtgcttcgccctccaatgcacctgtctcctgtctctacagttcagggcacaggcaggggtgggtgggtggcatgtgcatgcagagtattccctggggtgccccccagcaggcccctcatttccagactcgtggattggatggaagcaggcactgaactttgtcggcaactccgcagggtgtgtgtgtgcgtgtgtgcgtgtgtgtgcgtgcgcgtgcatgcgcgtgctttcttgtgcctggtgtgggcaggctcagaagtagtgggttgcatcagggccagatgtgcaattctgtgcgttcagcagctgtgccctgcagtggcagcctgagcctcatccttctccaggttccccctccccaggc

SEQ ID NO: 19334 - DNA, 1193 bp, Artificial sequence
  DNA replication origin
cccgccgcctgcgtggcgttagctcgtcacgtagtgtttggtggacggctgcccatacaccctgtagaaatcctggtggccgggctgctgggaggcgtcaagccagtctctgaccgccaggctgggaagggactgggggacggagggtgtgggcgggagcgggtgtgagtactcctgcgagggcactgtccagggaaagtggccggagcgggggtagggctggtggccgccatggttggccacggaagaacagtaacagttgtccacagaacagacgagaatcttgcggccgccatactgggggagcatgggctgctgggcggcggagccattgggatactgcgatggggggaacacggggcttgagtgcactggttgggcgccgcccggcagggccaccaagtgctgcgtggagctgcagggccccaggggctgcccagactggccctcaccgctggctgtgcccgccgccccgtactggccgcccacagggcccgacgacgtctctaggaaactggcctctgggaaggccgttgagtgcttgcgcttttccgccccagagctgctcacgccgcaagggtacagggggacactctgcaggaagggcaccggcgtgctgaaggggcctgtggagagttggggcaaaagtcgccaaagctcccaccccaagcaacccaggcctcctctccctgggttggacctggggaccattgacacctagaggcccaagaatgttacatctcaggtgatgcttgctcctctaccattaggaggtacagaatagttatatccccactttaagctgaagaaatggaggctggggaggtcatgttgcttacccactgtcccacagctacaagtggcaaagcctggatatgaggacaggtctcccagactgggccacactgcctcttggagggaaggctgtggcgctgaacccctccccaaaggtccctgtctcccttcggcggaacaccccaccctcaccttctagcattttccgcagctgcttctccttcttggccacttcgttcaggaagagcttggagttcaggtggccgatcttagtgggggaaaggctgctgctcgtgcaggtctgggtcctgggggcagtggacggggcatctgctgtgaggaggcatcaccggtgagcccgccctacctccccgccatgggcctggcccccctgccct

SEQ ID NO: 19335 - DNA, 1076 bp, Artificial sequence
  DNA replication origin
tttgtaggagcagctgtcacccagctcccaaaagggtcggggcagaggaggcccagaaagagctggggctgccccagggaacaggcttattcagaagtcatcggaggggccttctctgccctgaactggtggccccttggagggctggctgcagccacaggtgccccagtgcccagccctcccctcctgccttcccccaaaggccatcacgcctcccctttccgggaagggttggggatctgaccacgtctccctaccccacagactggggccgacagctcctgtggcccagatgtgctgagcccgcagcgaggccaccgcgagggagtgggtgggggtggtttcctctgctgcctgccggccccagctctttcatgttgccgccctccccatcccagcccggagccaagcagctgggccgctcctgccccctccctcggcctcgctcccagctgtctttggggtggggcagggcagctggggaacagctgcaaggcaggagcctggggggtgatgggtgccccctgcaactgccggaaacggtctttgggccaagaagggagtctgaagggtgggggtggagagggcgaggcctaggggatgatcggctccaccccttctcccagcgcatctggccaggagaccccagctcaaagccccctccagcttcaaagggcaccctggggtgggaggcaggagacgagggtggatgccctgacccactgagtccgcaccccagggcccctctctccaagctgtgacctcacctcagggttcttaacaggccttgctaacactctcccactcagatcctgtcattgtcaccatggccttcctaagacaccctcatcttctcccatccgagggtgggggagaaccaattcgattcgcaacttcaggacccaggacccatctagccgcctgggggattccctaccccacctctgcagcctgtaaattctgggggaggaggccctggagggaggatcagaggcatgtccttccccaacctcccactctggcctactaagaaatgggagcagggctgaccctatgaaagtgtgggaggtgaagga

SEQ ID NO: 19336 - DNA, 1284 bp, Artificial sequence
  DNA replication origin
cagtgagccgagatcgtgccactgcactctgacctgggcaacagagcaagactccgtctcaaaaaaaaaaaaaggccaggcacggtggctcatgcctgtaatcccagcactttgggaggccgaggcaggcggatcacgaggtcaggaaattgagaccatcctggctaacatggtgaaaccccgtctctaataaaaatacaaaaaaattagccgggcgtggtggcggggcgggcacctgtagtcccagctacctgggaggctgaggcaggagaattgcttgaacctgggaggcggaggttgcagggagccgagatcgcaccactgcactccagcctgggcaacaagaatgaaactccatctcaaaaaaaaaaaaaaaaagtcaccatgagttggcgataagtacagtccaggaaggcaaagcaggtgggggcacaggggataccagaaggggagggggtgtggaagtgtttacagggaggactgggcagtctggctgaggaggtggcattgagcagaaacctcagaatttgggggggcaagatctgggggatacttggagctagaatgcttctggcagagagaaccagtgcaaaggcctcaggcagaaaatgttgtttcaggaagagtcagggggcgagggcagctggaaagtgttgggggtgggagagagtagcaagtgatgaggtcagacaaggcagtgaggggacagggcagggcacaggctatgggaggggttttgcttctgctcgagagatatttgctggatgaagggtttcacagggagagggttagagggtacccggctgtcctcttagggaggtaggacttgaagcacgccctaaaggaacagaaagctcaaaagagggggcagacatcccagggaggaggtcgctgtgcacacaggtgggaaaatgaaattgtagggattgtgcttgggggagtagtgaggagagacttgggcacaaaggctgtgtggagtccatggctgataagtccattaaaaaggtttggggtcagatcagcagggccttgaataacaggataaatggtttggctggagggacccacagcagcagggcctctgaaggcatcttagcagggtactgcattttaataatggcgctaacccctcaaaggaggatcaggcaggggagtccagcccaagctgggaggcagtgggagggccaagggagagacaggtggggttcagggtgcaccctcaacccagtctaaggagtgggaaggcaggtggctgggtgtccaggtcctgctgctcagccaagg

SEQ ID NO: 19337 - DNA, 1411 bp, Artificial sequence
  DNA replication origin
gagatgtggggattggaggtagacagggcgagcgccattgtcccaaggccccttacctggtcccgggacaaatgccaccagttacagcccgccttgaaaactggcccgggtgagaggaggacctgggctggggaactgcccccacgcccgccccacgcccctccttttcgaccaatcccaggccgggaggctcccgccagccacgtgggcaggctttctccactccctggtccaggcgagccggcggcggcctctgcagctcccgtagcccgcccactgcgtgggcgggcgccttagcgcacttgcgcactctggggaaagcggagctgcaccccgccccgtattgctgctcagctcctcagctgtgcgtgcgagggacgtcgggggcggcgccgcagcagttgcccctggtaacgggggaggcagcaggaggaggaggaggaggagggactcggcgggaggatggtgagtgtgggggcctgggcccccttggagccggccggttatccccctcccgtccccaggcccagggcggagcactgcgcttaaagccaaggagggaatgggacgtcgctcagcctgctatctgggttgtggactgatttcgggggtcggcggggagacccgagggtgggccctggagggaggcctgggcctggagaggaaggcggggcttgcagcgggtccgaggcttggggaaggggctggcagagtgcgcggctggccgggtgcggagcccgggctccatcattactctggggacaggggtgagggcggatcccaggaactgcggagagcagctttcgctagcaggcttagacttcccgggcaatcggtctcgcggctttgcagtaaagtggggttcgtctggagcccggccagaagcggagagaaggccggccccattggctctgaggtcgccctggcggtagcaggggagatggtagcctagctctcctccttctcgcgctgtgcgggcccctggggggtagggaagtaagtcccacgacacaaaggggtgccgcttggaagggatgcctggtggattttacgccgtcttggtgtctgcgtggcgggtgcgcttcctcagtcccgaattatttagttatttgctgagagttttgcaggatctgattgttggtgatgaccgatttttcattcaatacataatccatgttgatgaagacatattagctgctccgtctctagaatttccttcgaaaccttttgcagtctcctcttgcgtgtgaccataccaggaccaaaagatcttaatcctagcttgagttctccaaactgaaaagaacgagaagttaaaaatggagatcgaacttcaatccggggcaaggcttttctctgtcagtcccaattaaagctttcccaaattctaaattatggttgtgacagatct

SEQ ID NO: 19338 - DNA, 1468 bp, Artificial sequence
  DNA replication origin
ccctgtctccttctggacagcaggcagatcagggagcgcgctggcagcatggtcaattaaaccaagtaaggaatgaacagcagataccatttctgtgggaaaagcccacacgccactggcaccatgaagatgaggctgcaagaaaggagaaaccaaagcatcaggggacatctccccacaggcccgtccatcccccatccccaagggaaaggagcaatgcccaggcacctggcctgccttcccagctggcaccatatcctctccctccaaccctcctcctgttcccgcagtgcgaggatactcattctggcagggggataaaaccagtaccctcctgacccccatcactcattcccacccttactgcattgttcaagcagaggaagaagacaatgaagtaaacagggactgtgagcagcaggcctaaggagcacaggcactgctggcatcgagcgaaaggagcgacgaggagggagaggagaaacttggagggggaggagcaacatggagggggaagagcgacatggaggggaggagcatcatggagggagaggagggacatggagggggaggagcgacatggagggacaggagcaacttggaggaacagcatggagggtggggagcgacttggagagggaagaatgacttggaggttgaggagcaacttggatggggaggagcgacttgaagggggaggagtgacttggagggaaggaactacttggagtaggaagaactacttggacagggaggagcaacatggagagggagaaggacatggaggggaggagcaacatggagagggaggaaggacacagaggggaggagggatgaggagggagaggagcaacttggagggggaggattgacttgtatcgggaggagtgaccaggatggggaggggcactttggagtgggggaggggcactatggagggggaggagtgagtctgtggattctgagacctgcttctttattggttgaacacctgggctgtcagagcacagtgaaaggcagtttctccagcttcactgtgcatataacttcaggagcttattaaaatgccaggtgccaactgagggggtctggggaaggacttcagagtctttacttctaacaagttatcagaggatgccaacgatgctggcatggaccagggtttgggaggcaaggtcttacaggacgcgggactctgacagacctgggttggtatcccagttttaccacttactagctgtgccatcttggacaagttacctcagagacacagagggaggacaacctactttttagggctactgcagaccactttgcagtgcctactttgcagggttactgtgaggattcaatgagatatgtatgtaaagcacccagcccatggtaactactcaattagcagaagttggtatagcataatgttagactgttgatcaaatctcagctccagcagttaccagctatatac

SEQ ID NO: 19339 - DNA, 1034 bp, Artificial sequence
  DNA replication origin
ctgcttccgccactctctgcgggttgggacgaattttacacttcttcgcagcattcaagatggtccggcttcctcctactttttattggctgcatcgcttcgtcttcaggggaaggcgggacttatatttgatcgacagctacattgatcaatggacaaagggcaaaggccaatgaagcgctggaactggagagtctctcgcgtgtctgggagggtgttttgcgcggggcggggtggagcagagccggaagcgggaggggagcgtcaaacaggaaaagaagggaagaaggaagaagagggtagaggaggagagggaggaggaggagggaggtggcggcgccgtggcggaggagcaggagcaggagggggatggagaggagaaggctcctgggtggcatggcgctcctgctcctccaggcgctgcccagccccttgtcagccagggctgaacccccgcaggtaagggggagggggcgtctgggccatgttgggtcctgggggtcgtcgaggcctggctggaggggtctgaaggagtgttgttgccaagagttgaggggtcccgagaggggcgtctatgcctggcgtggacaggatctaaaggggcgtcggtatttagctgagggacacctgtgacagttttggtgtcaaggaggtggcagaggcatgatgccaagcgagtgaggggcgtttgagacggcaggttggttaggtgggctggggtgactgtggctggatagcggtgccaagctgaggatgtgggccttattcgtgtccctctgtggagcaggtgtcccaggcagtaatgcagtatgtacgtctgtgtgtgtaggggtacacaggctattgagttggcctgtgagggaggggatcctgaggatatttctttaaggatggactggggaaagttccgagggcatcttagtacgtttaaaaaaaattactatgttcctgggagagacttggccccattttaaaatctgtaagccatggcgcacttggttggagggaggactctcagaaggcaggtgggatga

SEQ ID NO: 19340 - DNA, 1101 bp, Artificial sequence
  DNA replication origin
aggtcaggagttcgaggccagcctgaccaacatggagaaaccctgtctctactaaaaacacaaaaattagctgggtgtggtggtgcatgcctgtaatcccagctactttggaggctgaggcgggagaatcgcttgaacctggaaagcagaggttgcagtgagccaagattgcgccactgcactccagcctgggcaacaagagagaaactccatctcaaaaaaaaaaaaaaaaaaagaaatagagagagagagagggagggaggatggatggaaggaaggaaggaaggaaggaaggaaggaaggaaggagggaaggaaggaaggagggaaggaaggaaggaaaagaagggagggagggagggatggaaaggcaggcaggcagggaaagaaagaaagaaagaaagagagaaagagggagggaggaaggaagggagggaggaagggaggaagttaggtaggtaggtatgtacgcaggtgctaaagaagcagagatccagccagaacccagccactgtgagctttggaatggcccagtggcttcagggaactgcacccctagcacatgctcctctgtgctgaaggagtgtccccttgttcctgtactttcaagaccttgctctacggaggggcagggagaggacaaaccccctatgcctacaggagcctggccaccaatattcagtgtgagccctgggtctgtgcacctgagctcctgagggtgggtatgggggcttgggtgtacgtactgaaataaaatggcagcgctgagtaattgtgggcttctcggtaagcgatcaggttgatttcatgttgccgctgctgggcctgaaggcggtgcttggctcggcggtggtggcaaacacagcagcagctcaggatgatgatgatggtccacaccagccagaaccctggggggtgggcaaggcaagacagagaggcacacagtgagtaccagccagaggggcagcttgcggaacagggaggtccctggacggtgcccacgtggttgaagctggcatggctgggcctcacccagttaatttacattgaagccatgtgatcaatttccataaatgcttgtgccagagtgaaagacacatgg

SEQ ID NO: 19341 - DNA, 916 bp, Artificial sequence
  DNA replication origin
cttaccttgccattggtccgcggagcggcacacggtcacgcccccattccagccccctggctgggagggcgggcacccgcttgtgattggctggtcggcctgcctctcgcgggagcagccggcgctcctctccctccctctttccctcccgcgagcctcggggttcctcagctggctgaggtggagtcagtgtcagtcagggaggcgaactgctgagcactggccgcggacgctccgttgcagtctcgcccaggggccggtacctgcgctcgcgccgccgggttgaaaggatgaagccgcagctggagcagccaccctatgattggctgtggcgcttgtgaacccaaagtaaagatggcgggcgggcaggcagccgccgcactgcccacttggaagatggcggcgcgccgcagcctcagcgctcgcggccgggggatcctgcaggcggctgcggggcggctgctgccgctgctcctgctgagctgctgctgcggtgcgggcggctgcgcagcggtgggcgagaatgaggagacggtgatcatcgggctgcgactggaggacacgaacgacgtgtcgttcatggaagggggggcgctgcgggtgagcgaacggacccgggtcaagctgcgggtgtacgggcagaacatcaataacgagacgtggtcccgcatcgccttcaccgagcacgagcggcggcgccacagcccgggggagcgcgggctggggggccccgcgccgccagagccggacagcggcccccagcgatgcggcatccgcacctcagacatcatcatcttgccccacatcattctcaaccgccgcacctcgggcatcatcgagatcgagatcaaaccgctacgcaagatggagaagagcaagtcctattacctgtgcacgtcgctctccacgcccgccc

SEQ ID NO: 19342 - DNA, 1514 bp, Artificial sequence
  DNA replication origin
ggtgggcgagaatgaggagacggtgatcatcgggctgcgactggaggacacgaacgacgtgtcgttcatggaagggggggcgctgcgggtgagcgaacggacccgggtcaagctgcgggtgtacgggcagaacatcaataacgagacgtggtcccgcatcgccttcaccgagcacgagcggcggcgccacagcccgggggagcgcgggctggggggccccgcgccgccagagccggacagcggcccccagcgatgcggcatccgcacctcagacatcatcatcttgccccacatcattctcaaccgccgcacctcgggcatcatcgagatcgagatcaaaccgctacgcaagatggagaagagcaagtcctattacctgtgcacgtcgctctccacgcccgccctgggcgccggcggctcggggtccacgggtggcgccgtcgggggcaagggtggctcgggggtggccgggctcccgccgcccccgtgggccgagaccacctggatttaccacgacggcgaggacaccaagatgatcgtaggcgaagagaagaagttcctgctgcccttctggctgcaggtgatcttcatttcgctgctgctgtgcctgtcgggcatgttcagcggcctcaacctggggctcatggccctggacccgatggagctgcgcatcgtgcagaactgcggcacggagaaggagaagaattacgccaagcgcatcgagccggtgcgcaggcagggcaactacctgctgtgctcactgctgctgggcaacgtgctggtcaacaccacgctcaccatcctgctcgacgacatcgccggctcgggcctcgtggccgtggtagtctccaccatcggtatcgtcatcttcggagagatcgtgccccaggccatctgctcccggcatggcctggctgtgggggccaacaccatcttcctcaccaagtttttcatgatgatgaccttccccgcttcctacccggtcagcaagctgctggactgcgtcctgggccaggagataggcaccgtctataaccgggaaaaactgctggagatgctccgggtcaccgatccctacaacgacctcgttaaggaggagctgaacatcatccaaggggcgctggagctccgcaccaagacggtggaggacgtgatgaccccactccgggactgcttcatgatcaccggcgaagccatcctggacttcaacaccatgtctgagatcatggagagcggctacacccgcattccagtgtttgaaggggagcgctccaatatcgtggacctgctgtttgtcaaagacttggccttcgtggatcccgatgactgtacccccctgaaaaccatcaccaaattttataaccaccccttgcactttgttttcaatgacaccaagttggacgctatgctggaagaatttaagaaaggtgggaaattttggtctctttcattggcttgctctttctctctccatcctcctccctacttgagtcctctaccctcagaccaacccc

SEQ ID NO: 19343 - DNA, 1320 bp, Artificial sequence
  DNA replication origin
gggcggccgggcagaggcgcccctcacctcccagacggggcggctggccgggcggagagctgacccccccacctccctcccggacggggcggctggccgggcggggggctgacccccccacctccctcccggacggggcggctggccgggtggggggctgacccccccatctccctcccggacggggtggctggccaggctgaggggctcctcacttcccagtaggggcggccgggcagaggcacccctcacctcccggacggggcggctggccgggcggggggctgaccccccacctccctcccggacggcacggctggccaggtggggggctgacccccccacctccctcccggatggcacggctggccggtcgggggggctgaccccccacctccctcccagatggggcggctggccgggcggggggttgacccccccctacctccctcccggacggggtggctgccgggcggagatgctcctcacttcccagatggggtggctgccgggcggagaggctcctcacttctcagacggggcagctgccgggcggaggggctcctcacttctcagacggggtggttgccaggcagagggtctcctcacttctcagacggggcggccgggcagagacgctcctcacctcccagacggggtctcggccgggcagaggcgctcctcacatcccagatggggcggcggggcagaggcgctccccacatctcagacgatgggcggccgggcagagacgctcctcacttcctagatgtgatggcggctgggaagaggcgctcctcacttcctagatgggatggcggccgggcggagacgctcctcactttccagactgggcagccaggcagaggggctcctcacatcccagacgatgggcggccaggcagagacactcctcacttcccagacggggtggtggccgggcagaggctgcaatctcggcactttgggaggccaaggcaggcggctgggaggtgtaggttgtagtgagccgagatcacgccactgcactccagcctgggcaccattgagcactgagtgaaggagactccgtctgcaatcccggcacctcgggaggccgaggttggcgggatcactcgcggttaggggctggagaccggcccggccaacacagcgaaaccccgtctccaccaaaaccagtcaggcgtggcggcgcgtgcctgcaatggcaggcactcggcaggctgaggcaggagaatcaggcagggaggttgcagtgagccgagatggcagcagtacagtccagcttcggctccgcatgagagggagaccgtggggaga

SEQ ID NO: 19344 - DNA, 929 bp, Artificial sequence
  DNA replication origin
ggggtgtcagccccccgcccggccagccgccccgtccgggagggaggtgggggggggtcagcccccccgcccggccagccgccctgtccgggaggtgaggggcgcctctgcccggccgcccctactgggaagtgaggagcccctctgcccggccagccgccccgtccgggagggaggtgggggtgtcagccccccgcccggccagccgccccgtccgggaggtgaggggcgcctctgcccggccgcccctactgggaagtgaggagcccctctgcccggccagccgccctgtccgggagggaggtgggggtgtcagccccccgcccggccagccgccccgtccgggagggaggtggggggggtcagcccccccgcccggccagccgccctgtccgggaggtgaggggcgcctctgcccggccgcccctactgggaagtgaggagcccctctgcccggccaccaccctgtctgggaggtgtgcccaacagctcattgagaacgggccaggatgacaatggcggctttgtggaatagaaaggcaggaaaggtggggaaaagattgagaaatcggatggttaccgtgtctgtgtagaaagaagtagacatgggagacttttcattttgttctgcactaagaaaaattcctctgccttgggatcctgttgatctgtgaccttacccccaaccctgtgctctctgaaacatgcgctgtgtccactcagggttaaatggattaagggcggtgcaagatgtgctttgttaaacagatgcttgaaggcagcatgctcgttaagagtcatcacaaatccctaatctcaagtaatcagggacacaaacactgcggaaggccgcagggtcctctgcctaggaaaaccagagacctttgttcacttgtttatctgctgaccttccctccactattgtccca

SEQ ID NO: 19345 - DNA, 932 bp, Artificial sequence
  DNA replication origin
ttatcgcaggagtgcaaagcgataggtcccaaaaggaggaagctatagtcctgctttgctctgatgataccacaaacatttggttcagtcttgggtgatgtattctaaagaaatcacagtcaaatctaccatttgcgtgagagggataaagaccctcaaaaccagggcagaggaggaacaatggaaggaacgggagacactgatgtggaatgagaagaccttgggcagaggtgatagaagtaaagtatctgaaaagtcaaaggtccaggagagattagacgtttgttctctgtggctccaaggcatcgaatttcggccctgagagtggaagtttagacacattttctcactggtgagagctgctcggaccaaggaattcagtcctctggaaatagctagctgcttttgcggagtcttcctgctgagttgctggtggtggggtgaacatttattgagtgcttactgtgtgccaggatcctgctgagggcctcacctatattgtgtgatttcatcccgtcaacaccctttgatgtggggactgttgttccctatcctggtgctacaaatgtgggcaccaggtataggaggtcaggtacctcgcccgaggttacagtttgtaagtggtggtactgggactggaactcgttctgacaaacttcaaagctggtgtttttagccatcaaggggattcgagggtgccatgggggtgtggacgcatgaggggccttgaggtccattagaccaaaacattctgtgactgggaaaaaggatgccctctcctcccaaggaaaagcttcttctgaatgagacacagtggagaggttagcccagggccaggctgaggggcgcaggcagaatgccaagggatggagaccctcagaagggcaaagccggtgttccatcgtttgaagatctccagacccgcgggacag

SEQ ID NO: 19346 - DNA, 1416 bp, Artificial sequence
  DNA replication origin
cttctcgatgaacacggcgaagcggtcgttgaggccctgcagctgctccttctcgttggtgcggatgatcttgtactcgttggtgcgcgccgccgcctggctcaggtccagcccgtcggacgccggcggccggcgataggccaggccgaggccgagcgacgaggccgaggagcaggcggccgaggaggccacattgctgcgggacagcgactgcgagcggaagccgcccgcgccgccggccccagagaggcgggcggacaggcgagagccatccccgaacaccttgcggtaggaggaggaggagcacaggtagtgctccgagccgaagctcatggtgccgggatcggggccggacgtgcggcttcaacgcgagctacagaagaaaggagaggtgcggcaggcagggcgcggcggggcggtgcgcccggcttttaaggcgccggggctggggcggcgcgctgggggcggagctcctgctcagagtctggccgggagagggaaggggggcatccaggagtgggggcggggaggcgcagtgactaccgcagctgcgcgcgcgacgacctggggcgccgggacagggccatctgcatcggagtcgcccctttccgcagcgcttctccccaagaatcgactgcttcggaagtgactcgagcggaggggtgcctaaacgactgaggtttcccatccggaaaccacacagctctgtcgcatcccttgaccctatcccctcttctttaaccgactgggaggttaggggtttctgggaggtgtcccctacacccaccctcatcctgaggtgaggcgcacagaaagccttcccgagggcgaggtcgtgtttttccagttacagtgaggacctgcagagcgagcccttgtccccttcctcagggtccccaaggagaaaggtgggagatgctacgtcagaaagcatctctccagctgcccctctgcagctcctggggaggctccgggcggaaagatgttcagcaagtgcctctcccagaagagaggggagatcagtaaagaaagtgaccccgagctgcggagagtggggagaagcggcggtacagaggggaaaagaggccagacttggagaagcaggaggcgctgggaattgctggggctcatcgttagggcactaaagcatggcacaggccaggaccacaagctgctggaaagggggctgcagacttttgtgtttagagcattatattttaaaatatttcgaaaggagcatttttaaaccaggagatttcacctgtaaagaaattggatttctggcttcttctgaaaatgggaagagctgggatgcccacagtggcagaggtgagttgcccttgccatttgtataagaagtgtgctctcctgttcactacagtccctgccattctccactgaattacgccccccttc

SEQ ID NO: 19347 - DNA, 1834 bp, Artificial sequence
  DNA replication origin
cagagaaaatggagaagcccaattcagctggcagctctgagtaagttatcctttttttgtagaaatactgggctagccctccagaagaccacctagctcgtacttggaggcttctagaagaaaaaaatgaagtctcaattagccaaatgtgattaattcaggccatccaggggttagggtacataatgaaaagttcaagttatggattttgaggcagaaatggaagtacttatttgaatgataatgcaataccaaactaacctaaacagtccaagcaggcttttttcctttatcaaaggaagttattgtaacaaacagcaaatacctgcacatcaataagaattctttagcttctgattaaaatgttacttttgagatttcattcctttcttggttctattttaccaatgttccaagccctattaatctcaccaaatgtaaactttaatcctagctagaattattgcaagtttctgaattatagtcattctattcaaaggagcttttattgtaccttgaaaccgaaccacactattccaattcttttctacaccttccatttaccctgtcccctgcctctgtgccatttgcggtcataatcccagaatttcttatatagtaaaactgaagacacagtggcctttgttgggaagaaatagccaatcaataccatcacaggagcttagaggacagggaaatatggaaaaaatacatacactagaacaaagaaaaaccatctctgtgacttatcacatgcacttacaatgaaaaaaatactaacaaaacaggaattttcaagtgggacctcacagctgctgagcaaattaagtgttttttgtttagtgctaagccatccatgaaagccaaaactgatgttgtctatgaggtgacctttgattgcaggtagccaagactgatgtgttggtgttgcaggaaaaaaaaaatcaaagcagttaattgcctagagattcataactgggacacgagacaggagagacataatttctgagatgggaagaactcgagatcagcaccgtggacagcgccccgacctttcacgttttgccaaccggcgaacgctttcttaaggaggaaatgtcagctggtggacaagggaatcgtgtgtgtgtgtgtgtgtgtgtgtgtgtgtgctggtggacaagggaatcgtgtgtgtgtgtgtgttggggaggtgggtagagcagggtggttactactagctcaagcatcgctcagcttgttggctcccaatctctactttttggagcgcgaaagtcaagaaaatgggataggactcttcccagttcaggatcgcattcttccttcagccctgaagcagaccatactccataaataacttctagggcgcacagaaagcttttcaaagtcaaccaaacaagccagatagccgagacagcaccgcccacgtaacctgccccgttgggctcagtcttactttgggtggggcactgttctccgggtcgccggtgtgtgtaggcccgcttgctgacagacaggcagagttgggttttcgaacctcaaataaatttaagggcttctttgtttgaagggctggggcagggacataaatgaggggcgttccctaaaattaacattaaagactccagggttttttgttaaccagcgcctccagccgcggctcttctctcctctcttttgccctccccttaagtcctggggcccagttttaccagaggaagagggtacgcgcggaagagggcagggcacccctccccacgcccagccccggcccttacctggtagccagctacctcggcactgtgccgctcctccagctccaggatctgcctct

SEQ ID NO: 19348 - DNA, 1723 bp, Artificial sequence
  DNA replication origin
cccacgcttcagggttaggccccagccgcacagagaagcacttgggcagatcaggactggggctgagggcaagcccagatgcctatggggccaggcaggtcgtgacagagcacacggggtggggagccactgagcatgtgcataggctgggggcaccccagcctgttccaggagtacacgcgggcctggtggggctggattttctggatttccaacttgaaaatctgatttttatgtgaaaaattccgatttttattttaatcttatttacttttttgttttgagacaggtcttactccgttacccaagccagagtgcagtggcacaattacatttcactgcagccttgacctcccaggctcaagcaatcctctcacttcagcttcctgtgtagctgggactacaggcatgtgccaccaagcctggctaatttttttcttttcttttcttttttggagacagggtctcactatattccctaggctggtcttgaactcctgggctctagcaatcttcttgccttggcctcccaaagtgctgggattacagacatgaggcacatcgtacccggcccattctggtttttagaagatgccaacaaattctaaagttgaatctagaattcagtctctgaaggccaaatgaaacatgtataggccaggcagcctgtggcctctggggccctctcagcttatgatgtggtggcttaaaggtcaggtggaatgacagctgccaaggccctgaggccggggacgatgggatgagtgcccacaggagaggaggcacaggttagggaggagagggaagtagagttcagtcgggatgcttagagcatgacattcaccaaggtcatctgggtggtgacagaggcctcccaggagagaggcccctgctagagtgggaagccaggggtgtctggacttgccagggcagagtgtgcacgtttctccagtccttgcagagcaggctggccccagcccctcgccctgacagcacctggtctgccagctgtgagggcaggctgcctgggtggtcctccccacacggcactgactgggttggagaaggcccgagaggcttggatgggtgagcatggaggggcagaggatgtgggagtagggctggggaggaccctcactctggctgacccgtcagtggtctctccaaactgcctttccatcacatcccaacagggcctcctctctctcacccatgcacccccttccaggacaccctggtcctcagctcccactccccagcagggaagcaccagatgggggcatttgctagggaaatgtacccaaatggcctagccacccactggcctcaccactgccgaggcccggaagagggaaagcatgcaaattcctccagcttccaagctcagaaatcaggatggggatgcaggtccactctggggacctcaggataggggtcaggcccactcaccagaagcctctggacagagggagccaaagcacgttctccggatggccctgggctgagggcagatgcgtggctctgccttcagcctcagttgggaagatgccccccacacctcggagctccacctgagcagaggccccattttgagaggtagggggatagggccctcccagagggaccttgatctgccagggagacccagcgtgaagccatgcggcccctcacctgggagatgcagcggaggtaacgcacggccacctctcgggccaacagccag

SEQ ID NO: 19349 - DNA, 943 bp, Artificial sequence
  DNA replication origin
ttgggaagatgccccccacacctcggagctccacctgagcagaggccccattttgagaggtagggggatagggccctcccagagggaccttgatctgccagggagacccagcgtgaagccatgcggcccctcacctgggagatgcagcggaggtaacgcacggccacctctcgggccaacagccagtcgccatcgtagatctcagggcagggcacccgggccagcaggcgggcgagctcgggggcaggaaggccgggtgccaggctgccgttgcccagtgcgctcacgggcacggcagtgcagaaggcacagaggaagcatttgccgtcgagtagcgtgacggccacccagacgacaggcgcgatgagggcgcgctgggccatggagcagaacatgtagcgcaacacagcggggtccttggcccggcggcccagcggccgcttccactcttcggccagcatggacacgttgttgttcatgaccaggccaagcagaaagagcaccaggggtggcgccagcaggatgcccgcgctgtaggctgcattgtagcccggcaggcaggggcagttgaagtcgaaggccgagtacatctgggcactggccagggccatgatgccacagatgccattcatgaaggactcctggttggactgcaggaactggaagatcatccggaacttgtccatcatgcccgctgtggggcccggcctcctcttcccaactcactgctgcctccaagagggcccctgctgcccaccctgcccactgggtgcccacctcatgactcgggctctcctggctgggaccaacagagctcagagcagaggctgaggtcactgtcgctttgaggaatctttagtcaggtgctggctgagaggatgcagattgaccaatcctgtgggttcagccagggctgtgcccctccctcctgggcttctctctc

SEQ ID NO: 19350 - DNA, 1043 bp, Artificial sequence
  DNA replication origin
gttgaagtcgaaggccgagtacatctgggcactggccagggccatgatgccacagatgccattcatgaaggactcctggttggactgcaggaactggaagatcatccggaacttgtccatcatgcccgctgtggggcccggcctcctcttcccaactcactgctgcctccaagagggcccctgctgcccaccctgcccactgggtgcccacctcatgactcgggctctcctggctgggaccaacagagctcagagcagaggctgaggtcactgtcgctttgaggaatctttagtcaggtgctggctgagaggatgcagattgaccaatcctgtgggttcagccagggctgtgcccctccctcctgggcttctctctctctgcagccgcctccacctccggcgctagcacctgctagagaccagctttctgtgggtgtgggagggagggagggaggggcgggagagaaggctcagacacagactgggaagacactgtctccagcagggctggagtttggagagtccagggctgctgcaggggcctgaggtcctggaccttgtcttctgggctcctaggaagctcatcgccctccttttgcccttcccactgggggtctcctccatgctgtatcagaatcctagagggctcctccatcagttccccgatgacggtgtggtgctgcggtggtggtggctgcagtgagggtgctgctggtggtcgtggggatactagccacagaggggatggcagtggtggtgcaggggatggtgctaatgtggacgtggcgtagaatgaaacatcctggatttgctggcagaggacttgaatttgataagttgcctgggcaggggctgtggcctgtgagtgtgctgcaggggtccttgtgtcagcctgcctgtgtctctgtgggtgtgcctgtgtgtttgtgggctgtggatggcaaaccctttcctggctccacctccgacctctacttccccaatcaaaaaataaaggggtctgcatgctgacagcaagggggtgaaaaaattaaatgggtggg

SEQ ID NO: 19351 - DNA, 1474 bp, Artificial sequence
  DNA replication origin
ggccctgggccggggccggggacgcccggggctccccgcttgctccccgggacgctagggttccggctgggggtgggcggcgcggcggctccggcgcgctcccccggggccatagagtcagggtcgctggcgtgggcgttcggcggctccgaggcaggctcggttaccgccccgcggagacggccgcggcggcgatgtgcgtggctccctcccgcccgcgggtctgcgtggagcggggctcggcggagcgcggggcgttctgggcgctccgacgcagctggtgtcccccgaccgccgcggtcccgcccgcgccgggtccctcctgcgaccgccgcccccgccccccgccccggcagtctccaggattccctcgctccggttgttatggtgacagctgcgccggtgaatgagcgtcttagtgacacgcgcgcgcccgctaggccagatgtggccccggggcgcgccgcgttcccgtagccgcaagctctcggcggcgcgggtcggggtaagacatcaggcgagtatggtggcacccggggctggccttattcccagcacggaaacatggaacttgcacttgaaaacaaggggagcagggccgcgagaacgccgagctccccggatgcgggggcgggcgagccagcactaatgttcggtttccctagctccaggtaccgggcctggcgcagagtggagagcccagggaaacatgtaaatgagcgagcggatgcttggataaagtaattgagattagaaccccggcacttgaccctccgttctcagccaggctaggggcactagggcaagggttcagagcaggaaccccgggcagtctcactgatgcacagatgccactgagggcctttgaatgcccgcggaccagactcacaagcctggagctctggccaagctgagggaacagatctccgggacagatcatcagaagaccaccagctctgaactgagtggttctgttagctataacaaggtgggggagaggagcctctgcagcctatggcagtcaaagaaggcttcctggaggaagggggtttcagcaagggccctgctcatgtggctagtgccttcctgtagctcaacactgcaccaagaagccttcaggaagggaaacagaagtcattcttctccttcctggacccggggcatctctcctggtctatcagggatggaagatgttccaaggttccccccagggaatcagacttcctgctcctctaagtcatctctagctccctgctctggcttcagcaactcagatccagagtccagtgaagacatgggtgggcagggggacatctcatgtatccttttctgtaataaaggttcttcccccaagtctccatttggcagctcctcattatctaggcacaattcgtgtcctgacattccctgactgccccaactaaaggaccccctccactgtcagtcactttccacaatattccattttattttc

SEQ ID NO: 19352 - DNA, 1186 bp, Artificial sequence
  DNA replication origin
ccctgactctatggccccgggggagcgcgccggagccgccgcgccgcccacccccagccggaaccctagcgtcccggggagcaagcggggagccccgggcgtccccggccccggcccagggccctgcttgtggcccccgctcccgccacggggcatgggaggcaggtagcccagcctgcgccaggacacccgtggcgggcggaacccgccaaggaccgcgaagtccagagaaaggaagctgaggagctgcccgcccgcccccggctgcagccccagcagggccctcccccggtggcgcgcacccgcgcgcgcacactcgcacaccgcacctcagcgcctgcccggcctcgcccccacccgcgagcgccgaacctcctggggccggatgccatgggtaacaacttctccagtatcccctcgctgccccgaggaaacccgagccgcgcgccgcggggccacccccagaacctcaaaggtaggctccccggccgagcgctgctggaggactggggcgcaggtggagggccagggaggtgtggttggggagggcgggcagacgccacctgttgtgcgtgtctggaggccggagatgcacctctggccgtggagtgggctgggggtggagggcagccggcgatgatggtgatggaggatggcgtcccgcggggtctgcgcagttctgtctgctggcactgggaacgtcactggagtcccctcaggccatggtcttaggcgagcctgaagagatgggaaaggatgtttgccaggtcgataggggagtggggagtgaggagggaagcttgggtcgtccgtgtctccagggaggcacctcgatgggtctcctttccatcggccctagggctggagagaccaggctgggagcactagttgcatttccaatgggagggttttaaaaattcaggacaggattacagcagcctggaagaaagggtcagagctgctggttcctggggtcctttgcagccgttgggtttttgcatccattgaattagtttgatttctggttttcccaaagaccagatatccagtcagagccctagaaaagagggtctgggagccttgaaacagagggacatttactaggaatgtctttgctcttcacctccccagatccactcagcaccctcagggtggccctaggcccagtctccccattcggagcctg

SEQ ID NO: 19353 - DNA, 1325 bp, Artificial sequence
  DNA replication origin
tgctcgctttctggagctcgctgctatttcaggaagcctccagtctcctcctccttatgtaaataaacatgacagatcccatcggctgtaccagcgcgggaggtggggaggctggagtgggtgggagcggggaggcggcggccggaggggtgtgcgtgctgcgtgcgcgtgtggccggctggccgcgggcgggcggcgtgcgcgtgtgccggagggggcgcgtgggggcgcgtgggggcgcgggaggggcctcggccctgccatgccggtctccgcccgcgggggaggagacgggggaggaggaggggagcagccggccggggcgactcggtgaccagccggccggcccagcagaggtggctgcactgcccgtcgccggagatggggggacagatcacccggagcactctccacggtaaggccccgcggatgcctgcgggcccgcccaccccagcccgagaccgcctggggaggccgggcggaggggcgctggggctgagggcttggtcatgcccctacttctcactccatggaggggtctggggctgtgtgggggcaccttttggtggtgggcactggggtgggggcagcaagggagctgggtagagcaggaagaggggtgccttccctgacagtggcgccctcccactgatggtgggaggtcaggcagctgaggctccccacaaagtctccttgtcctcttacctccttgtcctcttacctccttgtcctcttaccaaggtgctgactagtccccaagtgggatgcgaggtcctgggtttccctacccacctctcccgggacggaggcagccacagttagttagacagctgaggggacctgcttgtcggctctgggatgtgggccttggagatggtgctgtgttctatgctggagccccgcaaagacatgtgggcacccacatgtgtgctgagtgtgcatgtgtgtctgtgctcgtgagtaggcactgaaggtgcccgtgggtgtgcacctgtgccggcttgtgcctaagcacacgggtgtgcaagtgacagcaccccacagcgcctgacctcgcttctccaagtgtgtgctctgtgggggaggccagagaacttctgagccctgcaggtcacgtccacagtcagacagacccacagcctggagctggaggggttaaagagagggggccactggctggctccccatttgcagagctcctgcttgctccaaaccctgtcctcttgttcccctagctctagtactgtggtcttgggagcgccatggccgatgtggcagcagacccggagaagccttcctagggacttgtgtgtcttccctgggcc

SEQ ID NO: 19354 - DNA, 981 bp, Artificial sequence
  DNA replication origin
gtgaccttgacgaagatggtctcggccacgcgcacgggccggctggtgaagacgagcgcgcgctcgtcgcgcccgtgctccacgcgcgccaccgtctgctcgtcgaggatgcggacgtgcgcgccggcgcgcagggcgtggaaacgcaggtcgccgtcgagctgcgccggcagcgcgcggctgtgctgcgagttgagtgagttctgcgggatggggcagccggcggccggcgcggcctcgtcgccgtccgcgcccggcacgttgaggtcgcataggctcaccgagaggcgcgcgtcgtccgcctcgcgccgcagcgacggccgccgcagggcggtgaaggagcgcggccgcagacagtccgggagcaccagctcgctatctgcgcgggagacacggggcagtgtcacgcagggctctcgggaggcggccccggcgcgccccgctgtccggtccctacgcgcgcaccgttacaatcccggatggctaatggcgcacacgatgcttgtgacataaattagcgaacacagtcaagaaacgactcttgcaggacatctgtttaagcagaggaataggtggggggaagcaccgaaactgaaaccatgtggatgcttccaaatgctcacaggtgcttgctatatgcatatgtgtacttcctcattttctacagtaaacttgtattcctcataatttaaaattttcaaaaatttaactcctgggctccttccgtcttatccctagcagctagaacagcgccaagcattctgttgacaaacagtaaccgtctgtcgagtgcactgacgaaggcctaacatcctggaaagccagggagcaaccaccccccagcaaacacacagacaccctctttgcgtacattgtctcatctaaccttaacaatcaccttttgaggctaccattgccatgtcaggacacaggctgagaagtagatctatccaagatacccttttgaaagtggcttaacag

SEQ ID NO: 19355 - DNA, 1018 bp, Artificial sequence
  DNA replication origin
ggctgccccatcccgcagaactcactcaactcgcagcacagccgcgcgctgccggcgcagctcgacggcgacctgcgtttccacgccctgcgcgccggcgcgcacgtccgcatcctcgacgagcagacggtggcgcgcgtggagcacgggcgcgacgagcgcgcgctcgtcttcaccagccggcccgtgcgcgtggccgagaccatcttcgtcaaggtcacgcgctcgggtggcgcgcggcccggcgcgctgtcgttcggcgtcaccacgtgcgaccccggcacgctgcggccggccgacctgcctttcagccctgaggccctggtggaccgcaaggaattctgggccgtgtgccgcgtgcccgggcccctgcacagcggcgacatcctgggcctggtggtcaacgccgacggcgagctgcacctcagccacaatggcgcggccgccggcatgcagctgtgcgtggacgcctcgcagccgctttggatgctcttcggcctgcacgggaccatcacgcagatccgcatcctcggtgagtgcccgcagctgcgcctgggcgtatgcctttcctggaggcggggacgatccgggtaggagacaaagggcgagctccccttcctccaggctcatgatggtgttgctaaggaatcacagacacctaaggtgagttctgggcgggacttggtcatcttgtcagtggcccttatatgtcacctgggagactcacctggggggtgaggcgagggaaagcgcggattattgagtttgatgcccagaatcagatcaacccatagtctcacagatacataaacagtccagaagcacacaacccactgaccactcaaaaatgagaggaaaaggccaggtgcggtggctcacgcctgtaatctcagcattttgggaggccgaggcgggcgaatcatgaggtcaggagatcaagaccatcctggctaacacggtgaaaccccgtctctactaaaaatacaaacaattagcggggcatggtggtgggcgcctg

SEQ ID NO: 19356 - DNA, 1059 bp, Artificial sequence
  DNA replication origin
gattattgagtttgatgcccagaatcagatcaacccatagtctcacagatacataaacagtccagaagcacacaacccactgaccactcaaaaatgagaggaaaaggccaggtgcggtggctcacgcctgtaatctcagcattttgggaggccgaggcgggcgaatcatgaggtcaggagatcaagaccatcctggctaacacggtgaaaccccgtctctactaaaaatacaaacaattagcggggcatggtggtgggcgcctgtagtcccagctactcgggaggctgaggcaggagaatggctgagcccaggaggcggagcttgcagtgagccaagatcgtgccactgcactccagcctgggcgacagagtgagactccgtctcaaaaaaaaaaaaaaaaaaaggtttcccccagcagttaactttttgagtctcggttaccatttctccaaaatggaaataaaggtcctcacctttaaggaagtttgtgagtccaaatgagaaaaaaaggttggaatgtcagtagtcaggtggtgcagggtggtgtctggttgggggactcgggggaatccctgagcaggcagccttgggggaagtggggctgcagagttctgggcctgccttttctcgggggcacagggtttgaaaggactggggggatgtgcattgagttaagaaaagaagggaggaagattctttattggaagacttctcagagcctttaatatgcactttgattaaggagacggtgatggtggttttggtgtagagtttttccatactaatttgaccggaaatcttttcacaaagtgtctcctggtacctttgtaccccagagtgagcaggtattcatgctttccaagtgccggtctttgaaccagctctgtgagactgagctggtttcgttagatttacctggaggacctattaaagtgcagattcttggaccccccctccagagattttaattcggtagaccttggacaggttctggacatctgaattgtttttctttagtaagtatgcttacccaagtttggagacccctgggcctcaca

SEQ ID NO: 19357 - DNA, 1181 bp, Artificial sequence
  DNA replication origin
ggaggccgaggctggcggatcactcgcggttaggagctggagaccagcccggccaacacagcgaaaccccgtctccaccaaaaaaacacgaaaaccagtcaggcatggcggcgcgcgcctgcaatcgcaggcactcggcaggctgaggcaggagaatcaggcagggaggttgcagtgagcagagatggcagcagtacagtccagcttcggctcggcatccgagggagaccgtggaaagagagggagagggagaccgtggggagagggagagggaaggggagggggagggggagagctttttttttttttttttttttttttttagcaaattcttccagatcctgagagagcccatctctaccaaaaaaaaaaaaaaaaattaaccaggtgtggtggtgtgtgcctgtagtcccagctactggggaggctgaagtgggaggatcacttgagcccaggagatggaggctgcagtgagctctgattactccactgcactctagcctgggtcccaaagcaagaccctatctcagagtaatgatgatgatgatgatgatgatgatgatgatgatgatgatgatagtaatagtaatgtgagaattttgatagctcagacaagtcttccgtgagtcctgagtattattagaaagcctcatcagagtagtcccctggcgatatataccctgagactcccatgatagatacgtactcaggccagctgctgtccagctggtgtaaacggccatccgcaccccctggggactgagtggggaccaacccttggccaagttactcttctgatttaggcgggttttgcccactgtgtgttccttaaccttaggggttccaactgccaaagccaccagagcccccttctgttgaggtggagtactacaccattgccgaattccagtcgtgcatttccgatggcatcagctttcggggtggacagaaggcagaggtaagccttgggccatgaggccgagggttttaactcattgtggtggaaaacctactgcatttcccattttaggccttgctagtaagattcctgaggggcaggcaggcaggaaaggtacagaaatgagccccacaaagatgagcatctgcctggcgctggccagtgccatggcctaaactagatcccagctctcacgctccaccctgagctcacagggcttgtc

SEQ ID NO: 19358 - DNA, 1087 bp, Artificial sequence
  DNA replication origin
ctcctcactgcccagtaggggcggccgggcagaggcgcccctcacctcccggacggggcggctggccgggcagggggctgacccccccacctccctcccggacggggcggctggccgggcagaggggctcctcacctcccagtaggggcggctgggcagaggcgcccctcacctcccggacagggcggctggcctggcgggggctgacccccacctccctcccggacggggtggctgctgggcggagacgctcctcacttcccagacggggcagctgccggtcggaggggctcctcacttctcagacggggcggctgccgggcggaggggctcctcacttctcagacggggcggttgccaggcggagagtctcctcacttcccagacggggcggctgggcagagaggctcctcacctcccagacggggtcgcggccggggagaggcgctcctcacatcccagacggggcggcagggcagaggcactccccacatctcagacgatgggcggctgggcagagacgctcctcacttcctagatgggatggcggccgggaagaggcgctcctcacttcctagatgggatggcggccgggcagagacgctcctcactttccagactgagcagccaggcagaggggctcctcacatcccagacgatgggcggccaggcagagacgctcctcacttcccagacggggtggcggccgggcagaggctgcactctccgcactttgggaggccaaggcaggcggctgggaggtggaggttgtagggagccgagatcacgccgctgcactccagcctgggcaccattgagcactgagtgaacgagactccgtctgcaatcccggcacctcgggaggccgaggctggcggatcactcgcggttaggagctggagaccagcccggccaacacagcgaaaccccgtctccaccaaaaaaacacgaaaaccagtcaggcatggcggcgcgcgcctgcaatcgcaggcactcggcaggctgaggcaggagaatcaggcagggaggttgcagtgagcagagatggcagcagtacagtccagcttcggctcggcatccgagggag

SEQ ID NO: 19359 - DNA, 941 bp, Artificial sequence
  DNA replication origin
tgtgaggagcgcctctccccggccgcgaccccgtctgggaggtgaggagcctctctgcccagccgccccgtctgggaagtgaggagactctccgcctggcaaccgccccgtctgagaagtgaggagcccctccgcccggcagccgccccgtctgagaagtgaggagcccctccgaccggcagctgccccgtctgggaagtgaggagcgtctccgcccagcagccaccccgtccgggagggaggtgggggtcagcccccgccaggccagccgccctgtccgggaggtgaggggcgcctctgcccagccgcccctactgggaggtgaggagcccctctgcccggccagccgccccgtccgggagggaggtgggggggtcagccccctgcccggccagccgccccgtccgggaggtgaggggcgcctctgcccggccgcccctactgggcagtgaggagcccctctgcccggccaccaccccgtctgggaggtgtacccaacagctcattgagaacgggccatgatgacaatggcggttttgtggaatagaaaggggggaaaggtggggaaaagattgagaaatcggatggttgccgcgtctgtgtagaaagaagtagacatgggagacttttcattttgttctgtactaagaaaaattcttctgccttgggatcctgttgatctgtgaccttacccccaaccctgtgctctctgaaacatgtgctgtgtccactcagggttaaatggattgaggtcggtgcaagatgtgctttgttaaacagatgcttgaaggcagcatgctcgttaagagtcatcaccactccctaatctcaagtacccagggacacaaacactgcggaaggcctcggggtcctctgcctagaaaaaccagagacctttgttcacttgtttgtctgctgaccttccctccactattgtccta

SEQ ID NO: 19360 - DNA, 3358 bp, Artificial sequence
  DNA replication origin
gcaggggttgggggcagaggctggagcctcctgcttgcctttcctttgcctctggcctcagccctcatgggccgcccacccgctggctcgccgccctccccgatgcccctgccggcccgagagggaggccggagagaccccgtcggccccaggcctccccgcaggctccctcatgccgggctgtgactaactcatcgcagcacaaggcttctttctgagcttccttggcctccgcctccgctctgcctctctctttcctcctcctcctgcccgtcccctccccggccccctggctccccatgtcccccggaccccgcggtgcagcgggccggtctggggccttgctatatggcctgtccttggcgccctgtgagctgcgagccccggctgcgggctgcccctgggagcggcgctggcgacagagcagccacccccgaggaggccgatggacagggggcgccctggccgcggggccatggctggccgctggctcaccgcgtgctttctgccctcgccaggtgccgacgccaccgccgagcccatgatcctggaacagtacgtggtggtgtccaactataagaagcaggagaactcggagctgagcctccaggccggggaggtggtggatgtcatcgagaagaacgagagcggtgagtgccctggccaatggccgtccactggggttccggtctggcccccgggccgagctggtttttgttcctccctcctcccccaccgctgcagctatacgttatttccatctggcagagagagggccgaggcggctgaagtttccccctgttggtttgggctgcaggccagcagtttgcctggtggtggaagaatgtctccttgctcggggtaattaaccagcctgtgttaattgcacgtttcaggcacagcgcgggaataaatggccagccctgctggggtccccgtgccctcggaggcccgtggggcagggtgctctcagctcagggatgcccagcaacaaccacgttctgagccagggtccagggtccaggcaggacagcccagccagctggtggggaaggcaggccctgctgtcaccatggggtccagggtccccgggtcgctggcaagtttgtggaagggccaggcctgcgggcgttggttggggtctggttggggatctgactgccccctgccgagctggaggccccaggacctggaaagcaagcgcagtgagggggatgcagccaggcctgggccaggcaaggtccggcactgacaggggccgtactgacagctgcccggggcagctggttctcagggtgccacggagggggcaaaggtaccttggtgtccctggcagcaggagtcatggcaggtgaagagaggagagcccaagcctgtcagtccaggcttgttcggcccccaacagggccagggctgggactcgagcccaggacatccatcagcccacagcctcccagggcttgcatgggtttctggggtgttttgtttcagtttcggtttgctgcagggaaggcccctgtgctcagagcctctctgagtggtgtttggtggatacttccagaggggaggagcctgttctcctctcctagtcccactctatgccttgccagtgtttaaacccggaaaggaaaggcaaagcataggacagcagtgcctgctccgtagagacaggaatcgagacacagggaggttgcggggaagggagtctcctgagatccaaagcagaaccctgtgcctcctggtggccaggagctgtggagatgctaaggaaatcccagtgggcctcctgggggaggtgggtgcaggctcctgccaccagtggctccagagaacagggctgtgatatgcgtatagggtctgacttgtggccctcctgctctgaggtcttcgaagtgcctgctcccctctcaggtcagactgtgtctgcccttgtgcctggagtcatcaccaaggtggtcagcagtgacagtcctccctggcagagccatgtccctgctgtgaggcctcaacctttcgtcccaggtgcccacactgggctcctccctgggcagctttgtcctcagcctttgtcatgctcatggtgccacgtccctgcccgcaaagtaagctagcaatgtcatgggggtctggctctggaaacccccagtacctgaagacccaaagcaatggatctctaatggtgacatgggagacctcaggcgagggagatgtttgttgtagagcttgcatcaggaaaggtggttggttcttctcagaacttctggctagggaagttctgagcaaaccaatggttctcccaccacgcctgcctgtcacaccatagccgtttaacccttgagcagcaggaggtagtgagcccccatgtctttgggggctgccagccactggccaggatggctgaagatgagagcacacaagaggaagtcatcctgctggaagactccaggattcccagggcatgtgcgccctctcccctcctatcccatctacaggaccctgggacactggagtcctaggattgggggaaggagccttgacaaagggggagatgcctgctctcctgaggagctgctgatggctgttagaggtggcccaggcaccccagctccccacggccacccgtggccagagcaggccagtctggcacgcagactgtgtgagggagctgctgttcttagaagccgcattctacctgccactgcctgctggggggcttcatgtcccttaacttctctgggcttcagttattccttccataaaatggagatgaccttgtggctggttggaagcaggggctggagcaaatgacctccctgagctctctctcaggtctgaactccaaggctgggaaacttggtgggactcaaggtgtcgggtagaaagagtttccctgaacatggcttttctacttctgggagtttcgtatctttaccgttggtagagacagctgctcagctgcagatatttgcacaggacctgcagtgctgtgcctacctattcaaacccgtctgttgctatctactaggaggcctggagtatacatccagcctaaccagagaaatgaagtgggtggaggggagaaaggaagagggccaagctgcagatctctgggatggtcgcttcccagttcagggaagctggaggcctgacggtgggggagaggaggcgtcttgtgcaacctgaaggagtggtgagtgaggcttttgaactcaggaacaaagacccaattgtgaagcctttgaccttgggacacagtgggtgtgttgaggcatttccatttgcgttgttgggcaatggccccagccagcaccatccccacctccctgggccttgccttgcccacagggtgccaggactc

SEQ ID NO: 19361 - DNA, 1113 bp, Artificial sequence
  DNA replication origin
cagggggaaacttcagccgcctcggccctctctctgccagatggaaataacgtatagctgcagcggtgggggaggagggaggaacaaaaaccagctcggcccgggggccagaccggaaccccagtggacggccattggccagggcactcaccgctctcgttcttctcgatgacatccaccacctccccggcctggaggctcagctccgagttctcctgcttcttatagttggacaccaccacgtactgttccaggatcatgggctcggcggtggcgtcggcacctggcgagggcagaaagcacgcggtgagccagcggccagccatggccccgcggccagggcgccccctgtccatcggcctcctcgggggtggctgctctgtcgccagcgccgctcccaggggcagcccgcagccggggctcgcagctcacagggcgccaaggacaggccatatagcaaggccccagaccggcccgctgcaccgcggggtccgggggacatggggagccagggggccggggaggggacgggcaggaggaggaggaaagagagaggcagagcggaggcggaggccaaggaagctcagaaagaagccttgtgctgcgatgagttagtcacagcccggcatgagggagcctgcggggaggcctggggccgacggggtctctccggcctccctctcgggccggcaggggcatcggggagggcggcgagccagcgggtgggcggcccatgagggctgaggccagaggcaaaggaaaggcaagcaggaggctccagcctctgcccccaacccctgcaaacccgagagaaaaggcagccctgctccctcgggcgggagagggagaggagagagcgggagagagcttctccacggcccaggcccaggcgaggagtcaagagggtttgaggccgccaatcactggggtttactcgcaacccttaaatagaaacacatgagacccgtcgaatgaggagccgggggtggaggcaggggagggggaggaggcctagactgtttacttgaaacccaagaagaaagtccccgcgccagcggctggcgagcccagcccgccccccgccaacttttcctcaagttcgctccgttcctg

SEQ ID NO: 19362 - DNA, 1323 bp, Artificial sequence
  DNA replication origin
gctggcatgcctaagtacagaggcggggcaggccctactgcccggctgttggttgcatttctgcctgaaatacaatcccggctttagcagggctgctcgggactgtgcacgtgcgaatgtatgtggcacactcagctgtgcagggtcccttctgcttctccaaagggctgagatgggcctgcagggcccacacctcatgggagaaaactgccggggggcagtgggtttctttccctggaaggaggcctccctttgggatttcctagagttctgtggccattgccgtctgccctaggttggagggagcctccccctacagaaggacccaaagatctaagtagtgcttcttgcacctgggtgcacacaagcaccatagggacacaggggggatgtccaaaaactactcatgcctgagtcccagaccaaagaaacctgtctctctggagcccagcatcagtacttttaaaaagctccctgggtgattctgtgcttccaagttgaggattactgtgctagaagaaccagactgatggaaacaaatcagaggcagttattctgcaatggaaagacagatgggcttgggcctgaacaaaatcatactgaatgaatgtgatgctcttcatagcagctgtgggagctagagtcgtctcttgcctgctgtagaggggcctctggttagtcttttgtgaaatggaagataagggggatgttgtgggcatgaaatggggcggttaatgtgcctggcacatcacatttgccaagtcaaactcaggcgtgtggggaatgtggctataggctgaggcaccaagggggctgtgtggaacttggagaccctcagcaatttttgtagccaggctagtgacatgaagccccctagccttcaaggagattggcagacatatagtttatgccagtcgcagtggcctatgcctataatcccagcactttgagagactgaggcgggaggatcacttgagcccaggagttcaagaccagcctgggcaacaaagtgagacctcagctctacaaaacataaaaaaattagccgggtatggtggtgtgtgcctttggtcccagctacatgggaggctgaggtgggaggattgcttgaatccaggaggtcaaggctgcagtaagccatgattgcaccactgcattccagcctgggcaacaaagaccctgtctcaaaaaaaacaaaagtatactaggaattccctttgggctgggggtggtctgagaaggcttcctgtaggaggtgactagtccatttctggctagtggatccttttcactcctagctaaaagcacatcataggccgggcg

SEQ ID NO: 19363 - DNA, 1205 bp, Artificial sequence
  DNA replication origin
gctacctcgctgtccctagtgggtgtgggggtgggtgcatggggagtgcgtgggtggctcgtgaaggggctaggcccccgcacggtgagcagccgggtccttcacccccgggctgcggcggccgctgctgcgcagtgctaagacttctccggtccctctcgcggtgcagcggtgatggaagggttaatagagacgcggggctttcctgcgagaaggtgaaattgagaaccgggactgaaaaggggtcatccttgagtgacttgagtttttagcgcctgcaccacagaccttcttccctgccccaactctgagcgtgtccttgctgcggaggtgggggctccgcgttttggcagctgagacgcacttgggagggggccgacccgacccccccaaccccctccccgccccccgcattggcctgacaggtgccagggcccgcccagagtttggaagggggtggaggcagggagagaggcgggccagccctcggagctgtgggctgagggtagagcaggattgtctctggaagtgggaggctgggctccccaaatggcaaacgcctggatgtgggcgggctgtagttaactgggggagagtggtccctaggagttagggctgtgtgtgtgctgaagtgggggcggggacagactgctgcagcgatccgtgctgacacgtggattggccatattgacagggtggctgtaccttggggtacatctggcccttggggatgtaggaggtaacacgtggctcctgtgaatggctcctgtgcccaagtgccttggcctgtggataggttgaggggagtgcccctgtgtggtggatggatgtagagtggggtagatgtaattgtatgatatgtatgtttctgtgtgtacaagtgcttgctcacgtgcctattgggacagggaaagttgtgtcctggtttatgtgttgggggcgtgtgtggctgtggggttctgtgcacatgtgtgagtcatgatagctgtgtgctgtgagggtatgtttacttgtttgggtgcataggctgggggtgtgtgtgtggttgagatatatctggttatgggttggagtctgtgtttgtgtgtatttgtgtaccagtttgggacatgtctagctgtgggatgaggtgtgtgtgcacttgcctatcacctgggtctggggtgtctcaggcaggcacacccactggtgcagaaggccatttc

SEQ ID NO: 19364 - DNA, 675 bp, Artificial sequence
  DNA replication origin
cgcccctgcagctgcagccccgcgctcgcgcccggccctaaccatgtctatctgttgttgcttctttttcagggactatggcagttccaagaggaaatcaggtaagggagcctccgggcgttttcccttcagccttccttcccgcttcgtgcacgcgcccctccgatcctgcagaggacttcttgggggcggggaggggggggttgtccttgcacgccagcctacgggtcctgccgggccaggggtactcgcttcacttgcccctcctcagtccatggcccctgagacccttggtcctagaaccctcgttcgccttccaccgactcgctcgggctcccgctacctcgctgtccctagtgggtgtgggggtgggtgcatggggagtgcgtgggtggctcgtgaaggggctaggcccccgcacggtgagcagccgggtccttcacccccgggctgcggcggccgctgctgcgcagtgctaagacttctccggtccctctcgcggtgcagcggtgatggaagggttaatagagacgcggggctttcctgcgagaaggtgaaattgagaaccgggactgaaaaggggtcatccttgagtgacttgagtttttagcgcctgcaccacagaccttcttccctgccccaactctgagcgtgtccttgctgcggaggtggggg

SEQ ID NO: 19365 - DNA, 1147 bp, Artificial sequence
  DNA replication origin
aggattgaaggagacatggaataccaagggggttctcaaacaagatggggaaggaaggggagagagtcagaaatgcagatttcctggaccttgcccccagcattctgattaagtgggttctaagttttgggaaaggtcgatgcctaggagagggggagctccccactcctggctgtgcaggcaaatcaccttggagattaataaacactccaatgttggagggcacccctagacctcctggattggaatcttggggagcctccatgaggatgactctgctcctttccctgggagcctgctgcctcttcctccaagagaacccccttccaccgcatccccccaaacccccaaccccgcctttccagtggcagactagcgggctagtttgcttcgaccaaagatgggcagcaactggcattttctttggcccctggggaaaatggaaggcatttccttcggactccggagagagccccagccagcccctccactgttccctgagcactgaacagaactttcagcctttaggggcatgtgaggctcaggttaagggagccagctcacctttcccagtcccctgaggattggtgaatggaggggggtgggaggagtggggagataaggaaggcaggagcaagggcaggatttgggaaatctgcccatctttgagtctggactctttgctggagggcagggcaggtaaacggaggctgggagggtgcagtgcctaaggtcacagcagttactttctctgacagcatttgaacccacttcctcagaagctccacttccgttcctaccgttcctggcctcccagttaaccttgcagtatcctctgtcccccccactacccgctcctcaccccgactccccagctgtagcctttgagaaggaccttatccatggcctctgccattctcggggcgtgcagtgagaggaagcagccacagtggcccccagcgagtctcgggtctaggacaggggcagactttaatcaaaggatcacacaaatctgtgattacctggcgggtggttttgaggaagacacgttgaggaggtgacatttcagtagtgacttacgggctgagtaggctgggttcacctcccaattctttgcatcgctagggcaagccatgcaaagaattgg

SEQ ID NO: 19366 - DNA, 1286 bp, Artificial sequence
  DNA replication origin
ggacacacccccgcccctcctctgctccgccagttcccgccggacccaccgggcggcggagagagcgagcgggcgagcgcagcgcggcggccgcgcgggagtgaaggggcgcgcggcaggccggcggggagtcccccggggcgcacggagcccgcgcgccctccgggaccctcccccgtccctgggccggacctgtgggcgccgggagtccgggcagcgttcggcgcgccgggccggggtggcgggcggccccgggaccccggcagctggagaaggagccggagcccggccgggatgagaaggtgacgccgccgggggcgccactcgctttgtgggggaagatgctcgcctactgcgtgcaggatgccaccgtggtggacgtggagaagcggaggaacccctccaagcactacgtgagtacagcccccgccgaccctgctgggggtggcccgaggtcccgggagggccccggatggccccttgcccctcccagctgtgaggtcgcgaagctaagcgcccactgggcagccagcagccgtggagtttcttcgcagggctgtgatctccagggaagcctcttctgtccttcctccttcgcacccccgcccccccggtttctttttttggcattggaattggcaagtggctgcccttgtctgttacaacggtgaagtcatctgtccgcctttgatggatggtggggggagctttcgtcaacccctcacagagcagccccgtcgggaaagcgcatctcctcggccctccccaggggccctgggcgctcacgctcacacagcccgagatgctttcagagctcgccctggagaaggaagcctcgcgccctgcctcccacgccagctctgtctctgccttcctaggcctggggctgggggcagaaggaagccgccgcccccttgcccaacctccaccctccgcgctaagctttgatttccctcataaagccattgtgtccgtcggtgtgaggagaattgtggcttttccttttatccctcctctggacgtgacccttaaccgggttcatttcctcttaagtgatgctccatctccagacacgaggaggcgaatgtttgctgtggtctccgaggaaccgcccctcccccttcctcccccaaactttaatgagaaggggttaaggttgactggggcagctccagagcctatgtgacagttcccctttcatctcagccggtcctgtcttcccatccctcacaccttaggaagtaaacacggtgtccttgacccctctgagcgtctgtgctcctgta

SEQ ID NO: 19367 - DNA, 1054 bp, Artificial sequence
  DNA replication origin
gcgcgcgggctccgtgcgccccgggggactccccgccggcctgccgcgcgccccttcactcccgcgcggccgccgcgctgcgctcgcccgctcgctctctccgccgcccggtgggtccggcgggaactggcggagcagaggaggggcgggggtgtgtcccgtcggcgaggggacggggcgggggccccggagcctgctgtcagcgtcctggggaggggccggcggctccccttcgccgctctccggctcgggctccggggggatcggcgctggcggaggctgtgggcgcaggaggcggaggcagggcctggcaggcagggaagggaagggagggaggggagagaggggaagcgcgcggggaggggctccgggccgggggaggggctcggggcgacggggagggggctgcagcccggccccagtggcaggggcgggccgacgagcccccacccgagcccagcgcgcagccagcggcctggcgcagcaccgggctagttcgctaggcacaaaaactcagggtggcttcggggggagagggagcggggaaagtgagccccgcgcgcccccatcctggctttccgcctcggagcggatttgtgcctttttgtccccacttttatgtccccctacaacttccacccccagatctctttaatgagaagtagtttattacccggctgttactgcccaggcccccgaggaggagatgggaatggggaaaaggccagctttaaatccttcaagccagagcctctttggacgaaccacctgaccctctgcaggtcataaagggtgaattctccccggaaaagtgatcgattcgttgcctgagtcgtccatcgatctgggcttgtgtaactaccctgtgcatcatttaccaatgacaacgttacagactctgcataacaccactgccttaagcccagggctcccctggggaccctccccaagctggcgacagggaaaggagcatacaatggtgggaaaacccacccggttggaggccagctcaccgtgagccccaggctctggcattctcacccctccctctagt

SEQ ID NO: 19368 - DNA, 965 bp, Artificial sequence
  DNA replication origin
cgcggtgggcgcctcgcctccggcccaccctccgggagcggcacctgcccgcaagctcgctcccacccggcctgatccgacgggtccgagcggtcaggactcccgcggcggcggcttaggcccgtgtcacggcgagtctccaggggcggcggccactctgggagagagaagcggccggcggcctcggaggcgggcagtcgagaagccgagccctcccgcctcgggccgcgagcctagggtctcctccgccgccgtccgctcccgcggcgcaaggcccgcgcgtcccctcgggtctggggcgccgccgccgccgcctgtctccctccccagcccacacagcctcggcctggagcgcgcgccgacgccgactccgtagcgcgcccgcgcgctttcccggctgcgcgcccgcccggtcacgcgccctgctcaccgcgcgctcgcgtgggggcgtcccctctggccccgcgcacgcgcgctacgtccctcagactggctgcccccgagggttcgcgtgagcggagcacggggctcggggtgcggggggctggtgtgatggacgcatttgttcttcggtccctgacgattgtttctcatttgccctccaagccccaaatcctgtcagtccacggccttgatggagcggcccccgtgggacgaccctgttgattgtgctagcggatgttgtctccattctggatctgggaaaaactgtggagtgaaagccggacctgttagggttgggacctgaaagcggactttttcgctctcagacgggccccaggtacagtgagaggggagtttgtgtggtggttgtgagcttgagctttggagagagagatctgtgaccttgggcaggtgacctctccgagcctcggtttcctcgccgtaaaatgaagatcctaatagtccctaccagaaggttgtgaatgagacaatagatggaagccctttgcgcggcccctgca

SEQ ID NO: 19369 - DNA, 1146 bp, Artificial sequence
  DNA replication origin
caggccgaggctgtgtgggctggggagggagacaggcggcggcggcggcgccccagacccgaggggacgcgcgggccttgcgccgcgggagcggacggcggcggaggagaccctaggctcgcggcccgaggcgggagggctcggcttctcgactgcccgcctccgaggccgccggccgcttctctctcccagagtggccgccgcccctggagactcgccgtgacacgggcctaagccgccgccgcgggagtcctgaccgctcggacccgtcggatcaggccgggtgggagcgagcttgcgggcaggtgccgctcccggagggtgggccggaggcgaggcgcccaccgcgcggctcgcgggccgggctcggcggaggggccgctcgcgcagcacccccaccgcgggccggagcccgggtcgccgccccgccttctcccgggaccgcccggccggagctgcgggggccgagggacgccgcgcccgccgccgccagccgggctcgcgcgggagagcagggaagagaaactttgccttttattgtttttagtccttaagtgcaaggaactctgtgttgggaggaaaaatgtccttcttcaatttccgtaagatcttcaagttggggagcgagaagaagaagaagcagtacgaacacgtgaagagggacctgaaccccgaagacttttgggagattataggagaactgggcgacggagcctttgggaaagtgtacaaggtaagagggggaaaacgggaagttgtactgcgaaggtaaaacagccactggcctggagtggcgggaggacttctgctcccctggtccttatcctgtccttcttttgactgttacggttcgatgcaactttacttggctgatcatccaaggagtagctaagaagtcgggtttacggtggaacaaaatggggcctggatggagtttaaagagcgattggaaaaggagacagggttataaagtctactctttcaaacttcaaaggaaatgagagtgttctttaatttataggaggggtctggttgtgcccttcaagtattttagaatgagaaactcattgcactttgcagtggatttgtctactgactgcattcgcgtgcatgcttgtactccaacagttctgtttttagggtcca

SEQ ID NO: 19370 - DNA, 1229 bp, Artificial sequence
  DNA replication origin
gcaaagggtcatcaaaatctttgaaacatttctattttcatgtcctttctgcccccaatttctaagataaaagaacacacatgctggctgtgagatccatttgagtcaatgaattatagaaatttaaatgtagacctaaagttccgtaggtctcccaggccttcttcagataactttttcagcaaaggaaactctctgaccaaacctgagaaagtctcagaaggacttctggggtcttctatacttggaagacaaaaagtgaaaataacagagaaaagagcttgatctcaacacagtggcatcctgggccattcttttataattagtttgatttttttaaataaactttaaaaaacaactttgcataggacagcctgctttgtggttgttagcagagtaggaaaattgcttatttacacagatgaagagtatgtggccatattttagatttaaaaatacagataaacgtagaaaataaaaggaatgaagtcgacgtgaatgaaaggctagcacacaaaaagaacatactctcaagtaaggagtgcgtgctaggtgtatgctagaaaggagaggagatgaaggagattctatttttatttaaatattaaaggtatgcttgaagatggtggaaaaggcaagtgaaggacactggtttggtgagaaacctcgagacattagagtgtccaggactagcaggggatgctgtatagagtggaggtgggggctgggaggaacactctagaatgtaggggaaaaaatgccacctatatctgcgcagtgcttgatgcttttcaaaggctactataaatgcaaataaatccaaagctagtggataggagttagaaggaaaggattcagggacctaactttggggaaaatcaccaaaggtagcaaggacgggatccgggctgtcgccaggtggagggggagggggatgtgatcagaagacccggatcactagcgggaatcctgagctagaaggaagagatgaagggtgcaggggacgttgctgggtaagagacggagggtcagggtcgcagaataaggagtgggaaagacaactggggacggggtcaaggaacaaggggatggggagcggacaggggaggtcacacggggagggaggctgagggaaggcactgggggcagaggggaagaggtcgaagctgcggggaaagccgccctaaggaaccggagggagaggagggaggaggggacttggggcagga

SEQ ID NO: 19371 - DNA, 1170 bp, Artificial sequence
  DNA replication origin
gaagaaagagatacaaatgactatgggtaatggggagaagtgaagtggccacagcagcatggatgtcagagagagatgtgagtgatggagcccaggcgtgaggaagatggatgatatgaaagagatcgtatgataaggaaaggaaggaggtgttgaccacgggaagacggaatttataaagctagactggagatggaggaaaagcaatgatgaggggatgtgaatggtgcagaggaagcaagagagtaactagaatggggtggggagggggtggagcacgatggtgctgaaagatgatggggcttgggctggcttcatgggagtgaaaactggtcagttgcacagggccccttgctcagaaaggccccattcttggttgaatgctctgctgttctgtcttaaaattatttgtaatttttgaagagactttgtgttttcactttgcatcaggccttgcaaatcatgtagctggtcctggctggaacagaccgtgggatgggtgatgggggaagggctctgatggggccatgaaggatttgggtagggccatagtggatggggactgtgaatggcaagtaatgacagggacccgaggctcttgaggttatacgtgagggggctaaggggcaggcagggagtcactgaagggttgcagaaataacccctcattggagaggctgaaaatggggtgtactgtaatatgggggagtggtggggtgatacgagatgttaacacaggagtcaatgaacacacggggcagaggtgatgggcagaagagccttaatgaagctgtgtgacagcaggtgatcacatgttaggaaatcagggtgtgacaggtggacaagggccattgattgggatgacagcaggcatctgtgaagctttcttcccggtttcccctgtgagataagacatctccaatatttctgtgtgagcctctcttatggtatcactccatgactaaaaatctagggctgggtgcatgtcacgtgtggatttcagaattcattaattttctaccgcacttagcatagcgccgatgccacagtggggatagtggggtgtccacacaaatgaaggagaaacaggaggtaaagaggccagagccaacggagaaaggcgcgggagtgagtgagggtgcaggggaataagatgttgatggggggaaa

SEQ ID NO: 19372 - DNA, 1219 bp, Artificial sequence
  DNA replication origin
attgcaaagaccacaatgtagtaattccacaaaggaggaaaaaccatattaaggaaatacggtgttgctgctgttctgttcttctcccttgttgatgctaaacataagcacacacaaaaatttgtcactgcactgttcttggttccatccctgtaaatggtattaacgtcaacacttgatcaacagcctaatgatttgttagcagtccaagttttacctgtttacctggcacttagcacaggaatggaaaaataccaaagaaggaaaagttttaaagaaacttttaggaacaaaagagatttgttcctattgtcattaaaagcaaaggaaaaataatctcttagctttggccaataaacagttgatatttccactgttataacatataatggtatctgtttcagaaggatgaaatcaacgtgaactgatcagaaaggaactgtggcatttctttattcttcacctattcactgattgtttgctatgtgccaggcactgtcctgtcctaagttctgggaatatcaattagtggggagaaggaaaagggaaaaggaaaagagaactgcaatataagatgaggccagaggggaaatagagaattgtgaaagcagaatcgagaaagttggctgaggtcaagtaagaagaaaagtagaagaaaggaagaaacgagaggagtaacagaaagagggaaatggaaataactaatccataatagtggagcagcttctgaggccggcacctgggcagggttcctcacagaaatatgcaaatatatcctgaatagggcagagccaaggaaatgaggggctggtgcctctgggaggctggggcttccctatggggaatgaagaatgaaataaacaaagatgactggtgggagaaaagaggagaaaacactcaaaagcaataatgggacaataaagaactagaaggaacaagaaaggaaatgggaagaaagagatacaaatgactatgggtaatggggagaagtgaagtggccacagcagcatggatgtcagagagagatgtgagtgatggagcccaggcgtgaggaagatggatgatatgaaagagatcgtatgataaggaaaggaaggaggtgttgaccacgggaagacggaatttataaagctagactggagatggaggaaaagcaatgatgaggggatgtgaatggtgcagaggaagcaagagagtaactagaatggggtggggaggg

SEQ ID NO: 19373 - DNA, 1276 bp, Artificial sequence
  DNA replication origin
aggagaaggaaagaaccgaagaccaggagaagagaggaaactattgcaaaaccttaggcaagagatgttgagggtcagatataaggcagtgactctaggaatgaacaggagaggagtggtaaaaaaaaaaaaaaaggctttttaaaataggacgagacaagttatgggtgtggggatccaaaagagggagtcaagcttgcaagtcaagtgtctagtctaggtgactaagaagatgttggggtgatggttttaggttttgctgcatatgggtttcaaggtgaacacataacacgtatgaagcaatgaggaagtcaggtgtgaagctcaagaggggatgtggtgaagttgtagatccaggagtcaacaccaggaaatggtagtagaaggacagaaatgggcctgatctccgggctcattcagacaaggagaaagggaaaacagaatgagagccaagcacggagaattggggaaaatgatggaggctggggctcagaatttaagatgtggataaaagaggacaagcttgactgaggctggccagggaggacccagaagatcctagtaccatgtagatcaaaggagaccttttcagatgggacaagtttacacatgcgggaagaagaggttgttgagtgaggctgtcaggcgtgttggggtaggcctttgactgagtcgcctaaaagcagatgtcaaattgcaaaaagtccaggagtgaggaagaggatactgtgggttcaggtgagaactactgggagaagtttgggcactagagaaggctaatggggactcggaagcagggggttggaggcagggggctgggggtgggggcaggggcagctcagggctgagggcaaggattttcaggcaaagggtgaaggagggagaggctgcaggtggaagaagactgtaattgatgggagcaaggccaagaaaacgaactggtgcaggaggcatgtgaaaatgtcacacttgcgggagtctttccttttttgtttgttttcaaacaaaagcttttaagctacatctcctcaagcccatcccaaggatccaactctgcccgggttccatctggtagggccttcttcagacaggagagacagaaggaggcccctctcagagcgtctgcctcttttgcacccgactgctcctgctcagaggccgcgggaagctgcggggactggatggtgcacctccccagtgcgcataggacttgggagaccacactcctccgggctgtgtgagcctcgggtccgcccagatctcttatactgtggca

SEQ ID NO: 19374 - DNA, 1786 bp, Artificial sequence
  DNA replication origin
aatccagcctccaacgtgctcccggcgaagagttgggagccgcttctggacgcgtttgggggtttactcttcgggcctgttatgaggggcgggagatggcgcgcggggagggtacaggggtctcgggggagaaggaggaggagttgtgtgctcaacgccaactgttcgcgttctagagccgagagggagccaggtgcctccgcgcggggaggctgcgcacggaagccaagcgcgggatgcaccctggactctgctcgccgctccctggcccggccggctcccggccaaaccccgccacccaaggcctgcgcccccgcgcgggggcgtggggaatgcgtgcgtgcgcgtgcgtgcgcgcaggcaggcgggcgtgaggcgaggggttcgcagggggccggcgggcagaccgggcgctgccgcgtgggggcacctggctgagccgggccgggagcgcggctgggtgtgagggggcgcgcggttccgtgcgtgcgcgtttgcacgagcatgtgtgcacgttagtgtgagcgatggcaagtggggcgggggcgggaggtgtgcgctcggcttttggtcgcgtgcggatcacgcacgggctgtgtttgcatttccaggagcctgcgagtggtcaaagaggcaatgctgagaactaggcaggccgctctcggcagccccctcctcttggcgccccgagcacccacggcccccactacaagcggttagaacctgataaagcctcctaggggatgagggaaaagaggcggaaggccccggtgggatcggggacttgccagatcttctcggttgagggattctccttgccccgacctcccggccagaggtggggcgagagagtagtcgagatgtctgttcttccagggaggatccagacctcattttgctgcctaggattttgaggtcgtgccctcactctccccagtccgtttctgaacggactcaattgtttcaaagtgtcggccgccagttaagagggtactcaggcgggagccgcgtgggcttatctggtccccaatccgctactgcaggagtgtagcctgcgcgcttggtgcagctgagatccttcgtgaccgtaggaagaaggagacttcaggtgggctgaagggaaatgagctaaacccacagacgacctcgagctgcggtttacaggccccaggacatgtggtgtagctcgccgcctccgagaagcccctgggattctaggggttgaaaagtctgagactagaggagctagaggaggagctattaagaaaggaggaggcaggagggaggaggcttagggagagagagacagcctccagccctgctcctccccttcgggagtagatagagttcctcctctctagaagatggttaaagtggagcgagagggaggggaatgcgcggagaggaaagaaaggtgagaggaaggaatgaaggagaaaatagagggaaaaggggagagaggaaagacaagatgaaggagaaaaggggcgagagaatggtgcaaaaggaagagggagatagaagaggaggcgaaagggcgccaggtaagagccaagagggatggaggaggcagaagaggcgactgagaatctaagctggccaaggaagaagacatccagcgattcccgagagcccccgccctcttgaacttgcctttccacccggtgccaaaatggcaattagcagcgggggaggctgggccaaagaaccaagccagcgacaacgtccggcccagaatggtgcgggtcctggcatctgtgggtttccaaagacagggagtagcggg

SEQ ID NO: 19375 - DNA, 1021 bp, Artificial sequence
  DNA replication origin
gctgggatgccccggccccgccgctcgcctgccggtgatgtccctccggcttccacctgcatctcaccgcctctgccgccgccctgctggggcagcagctctggtccggcccggcgccccagcacggcggctctccgcgccgacgccagctcctccggccactggctggccactgcccgcggcgagagtggagacaacgccggtggccgcgaagccggggccgccgggcgtccgggaccgcctgtcgcgtcccaagtgatctcggcgccggccaggacccacgtcgacaagagtaggagccccgtccggacaagcggcgcccccggcctgcctgcggggcgctccgtgcgcgccgcctccatcccgctgcggctaccgcggctcgggctgccgagtgtgtggcgcccgccgaggtgcgggtccggcgcggggggtgtgcgcgcgccggcgagcgagcgagcgtgtgtgtgtagggggagtggggagggggcggccgggaaggaggtggctccggctggcgcgcctcgccggtcctctccactcttccctcctagctcccgctcgcccgttctcttgtccagagggtgattccaaacccgaggaaaattaataattgccccttcggtgctttctttcttaaaatcagattccccccaatcctccccactgagctcctccagaaatttggtaaaaaggagtaatcaaaggtaataagaaaatcttcttaaaatatgaaaatcaagccggatccaggaggggccggcaatagaccccaatcccgagtctctccgaaatccagcctccaacgtgctcccggcgaagagttgggagccgcttctggacgcgtttgggggtttactcttcgggcctgttatgaggggcgggagatggcgcgcggggagggtacaggggtctcgggggagaaggaggaggagttgtgtgctcaacgccaactgttcgcgttctagagccgagagggagccaggtgcctccgcgcggggaggctgcgcacggaagccaa

SEQ ID NO: 19376 - DNA, 945 bp, Artificial sequence
  DNA replication origin
tggccggcgccgagatcacttgggacgcgacaggcggtcccggacgcccggcggccccggcttcgcggccaccggcgttgtctccactctcgccgcgggcagtggccagccagtggccggaggagctggcgtcggcgcggagagccgccgtgctggggcgccgggccggaccagagctgctgccccagcagggcggcggcagaggcggtgagatgcaggtggaagccggagggacatcaccggcaggcgagcggcggggccggggcatcccagctcctgccaagcttggcggcgcgaggaggagtcgccgggcgcagcccccaatcacccaggaacgcggggacgcctgggccactgctccggccgatggttccagaggaagccgtccccttgctaagggttcccgggaggaggtgaaggcgccgcgggctggggggtcggcggctgaagacctccggctgcccagcacctccttcgcgctgaccggggactcggcccacaaccaagccatggtgcactggtcgggacacaacagcagcgtgagtacccacccggcggcgggtccgcctgtttcctgacaccgaaggggaatgggggggtgggtgggagcgagggacagatagttgctcgggggtcgaggcgggggacgcctcgacttttcgagataacaggtttgtccgattccccccacgcccccaacaggttaacggagtttgttgttagacgctgtgtgtgtttgtttactggagaccctaggcttcggccgccgggaggggagtggaggaaggggcttcttaaagatgagtgggggagggatctgtgctcactttctccaatacttggcttggagggtcagttttcctgtttgcggggtgcttgaattcttggatgagaaaaagggctgacttggggcgggagccgctgaacagaccgattcctgcggct

SEQ ID NO: 19377 - DNA, 815 bp, Artificial sequence
  DNA replication origin
ggaaggaagcaaggaaggaaggagggaaggaaggaaggagggaaggaaggaaggaagcaaggaaggaaggagggaaggaaggaaggagggaaggaaggaaggagggaaggaaggaaggagggaaggaaggaaggagggaaggaaggaaggagggatgaaggaaggaggaaaggaagggaagggaagggaaggggcaaggaaaggaaggagggaaggagggagggagggaaaaagggagggaggacaggagggagggaaggaaggagggagggaggagtacagagtggcagaaatatagtaacaaattctgattaccttctaactcttttaaaaataaaaataaatcatataaaacatattcccccaaatgcacatttctggcatgcatctacggttggcctccaacagtagatttctcctgcagaaagcacatgcagttttacttaaactctgaacgataccacaatgccaacagccaggtcaaaacagaatcgccttccatttatacaacatttttcagtttctctaatattcatcttctatttgattaacctataatcctgggaggtgctccgggcaaggatgagtattctcaggtcacagagggagttacagcccagagaggttaaggagtttttcctggtatcaaggccagagggtaacagagccgagtaccccaactcacagacaggtgcttgttctgctgcacctctgcctcaccactagtagattatttggctctgttctcaatctatgctaattatatttttatatatttttgtttaagctgattttatttttcctggatggagaag

SEQ ID NO: 19378 - DNA, 1014 bp, Artificial sequence
  DNA replication origin
gcagctgggttttgtctcacagcagaggcaagtaattgtaactcttctctattattgtacaccttgaaggcgaggttatttaagtcctgttgtggggtttgagggctggaatctaatttttggagctttatttaaagtcgggagtggattgggtaataaaatgcatatttagagtgagacggccttctgacccttcagggtctagggctataacgcatctcagggttgctgccaaatgagccatgaactgggctgtgttttcatatttgataaaaaaaaaaaaaaaaaaaaaaagaatgcccaaatgctaactgatttgggagaggtcgaataaagaaaaaggagcattaaacttgactatgtctttagctccagccacctctttaagaggaaattgttgggcaggtgggggagggctagtcatggaacaaaactgtaagctggactgggtgtgatgaggggaggtgattgaaggattatagggttggggagcagaggctgaggaagaattggagcctgattcagcctggtggggagtgacttgaggaggagcagtctggggaggagtggagaggtcagatgggtcggtagaaaaggaagattgaaaagactcagtgacgcttggggttgggactgaggggacaggcaggagggaaagaaggaagatttgagacgagttgcattgggaacagagactagggagggactgatgtgtaaaagaatgcctggatgtcagacacctcagaccgtttgcccattttatgacaagaattatctagatctgataggatggaaaaatcaaaagtgccattttctggctatttggaaccatcgttgagtttgtactggggtcaagtggcattgcagaagaaaataaggcatttaggttttaggtcaggtgtgagttgaagaggtttaaaatttttgagagcacaggctaagggagaagagggaggaatggagggtggaaggttgcccatagtgaaggaggcaagcccaaagaaaagagagggt

SEQ ID NO: 19379 - DNA, 1121 bp, Artificial sequence
  DNA replication origin
cctgcccggcgccgcctccgcccgcccccaccgcggcgcaacttggatggagttggggtcctgagcgccggccccccacagccgccagcgcagagctcgtgccgccaccttcgttctgggacccctctctccgctgctcttcgctcccgcgatgggaaaagttggcgccggcggcggctcccaagcccggctgagcgcgctcctcgccggcgcggggctcttgatcctctgcgccccgggcgtctgcggcggcggctcctgctgcccctcgccgcaccccagctccgctccacgctcggcctcgacccctaggggcttttcccaccaggggcggccaggcagggctcctgccacgcccctgcccctcgtagtgcgtcccctgttctcagtggcccccggggaccgagcgctatccctggagcgggctcggggcactggggcatccatggcggttgctgcacgctccggccggaggagacggagcggagcggatcaggagaaggcagaacggggagagggcgcgagtcggagcccccggggagtgctaagagatggagggcagcaggagcctgggactcgggagcgggacccggacaaagccacccgcttccggatggaggagctgagactgaccagcaccacgtttgcgctgacgggagactcagcacacaaccaagccatggtccactggtctggccacaacagcagcgtgagtagaatgggactgagggtaaaggggtggaaagatggaaagggttaaagtcggctgtgtgatctgatggagaattggggggaaatagggtttctggacatgggagatgctgcaaactggtctctgcccacttcccccaagagttaacatcacctactaggagaccaacctccccatctctcccaccaacaccatcagagtcctctccaaatgccacagcttcaaactgaggagtcaaatccctatttcctgttgccttggtcgcattggtgtgtggaactgaagaccaggtaaacagaggggttaaagttctcctaatacagagatgaaagggttaaatttccaggcaagctgacatcccctcaagtgactttccctttacttgccagacctatgtactggctcaaag

SEQ ID NO: 19380 - DNA, 874 bp, Artificial sequence
  DNA replication origin
agagcagcggagagaggggtcccagaacgaaggtggcggcacgagctctgcgctggcggctgtggggggccggcgctcaggaccccaactccatccaagttgcgccgcggtgggggcgggcggaggcggcgccgggcaggtggcggccgcttgcccgggctgggcttgtgccgagcgcgggtccggacggagcgagccgccgccgcgcgggggtggagctgagctgaagtcactggcggagcgggcgcgggcgctggcgggcgacgcgggagggagggcaggcgctgccgggactccgggcgccgcgtcccgcggccgagctgcgctgcgcaccgggtctccgggcgctggaggcgccgccggcgacctcccctcggcctcgcaggcgctgccgccgcctctccccgccgcccactctgcgcccccgcggccgcgggtcccggcgctgagtccgcgcaccctgcccgcgggggcggtcgaccccgggctcccggagcagtcgatgtgtcgggagcttcctattcctgctttattgtttctatgagtctatgttgctgtttccttttttctccgtctttctggtcttttctagttgaggagatagggatgggtgggcttctgctccttccctctcttatgcttcctgagttggcatcttgaccttacccgcagcagagcctgtgtgtcccagcctggggggagatcccggaaaggcagcagcagagagtgatgtaattaaatgatctcgtgtgtgagtgtgtgtgtgtgtgtgtgtgtgtgtgtgttagtttgggggattttttttcccatcaattttaacgcttagatttctctcctaacctcctaaagcattcactgaatttgaacccaatct

SEQ ID NO: 19381 - DNA, 1151 bp, Artificial sequence
  DNA replication origin
acagccgcccgcgcagagccccgcgccgccacctcgggtcccggacccttcgccgccgccctcgctcccgggatgggaaaatttggcgccggtgagcgcgttcctcggcggcgcggcgcggcgctctgggtcctccgtgtcagggcgtctgcggaagcggctccggtggctcctctgctcctcgtggcacgcggcccagacccccagagtactgtccgtgccggcactgcgagaccgggctcctgctgctcctctctcctcctggggtgccaccagcgcccaacgatgggagaggtgagcaggagcctgcgggagcgcaaagtccctgaagactgggggcgacggcagcatggaactccgcggcaagatgaagatccctggcttccggatggaggagctgcggctcactagcagcctgtccgcggagacgaggaaccccacccacaaagatggttcctgggtgcgaccaggcagcgttgcgagtagcagagtggtgatggggtggggtcggggagcgaagcggggagggagtgtgaaagtgggcttggagggtcaagggcagaaggtgatttgaggcttctgacttgaagtgtgcaaaataaaggctatgcttgccttcgccaggaagtatttcatctccaagatgggcctcagtcctcctggaactcccatcttcatctctaagctccaaacctggaaaaaaacagctttcaagtaagaatgtaaatccctggtttctgtcaatatggcttgtgaagctgaagaccaggcagagtagggtgttaaataagtgcatagtatgcggtggtgaaagggttaacgttgtagggcaggctgacattgccctcaaggattcccacttcacttgctgtaagcttactctgggggctcctgtctgtgatgacaaatgtctaggttaatttaaaggggacaaaatctcagtggacaatcactgccttctagtgtggtccctgtctctggcactgaggagatggaagttacatggagagcaggcaccatctttctgagagagaaagtgattaaagctggggctttacagcttgtgaattgattgttctccaatgtgatttagtcctggaaacatcaatatccaagggactacaactccctgttcactcttcattgcctga

SEQ ID NO: 19382 - DNA, 811 bp, Artificial sequence
  DNA replication origin
tgccacgaggagcagaggagccaccggagccgcttccgcagacgccctgacacggaggacccagagcgccgcgccgcgccgccgaggaacgcgctcaccggcgccaaattttcccatcccgggagcgagggcggcggcgaagggtccgggacccgaggtggcggcgcggggctctgcgcgggcggctgtgggtgctggagctcaggaccctaactttagcgaagtcgggccgcggcggggcgggtggaggcggcgtgggcaggggctgccgcaggtgcggagtgaggcgccgccacacgggcgggggcaggagtctcaggaactcggcagccgccagcagagcccggtgcgggaccgggagctgccggggcctcagctccgctctccccacagctctccgtggctgcaggttgaggtcgaactgcaagcgccacggaccctgcctgctgtttactgcgttttcactggagactccagcaaatgtcctggagaggagagggattcctgctctgtccattttagtctctacattggcaccttggtgtaaacccacagcagaggctgcgtgtcctggctgagaaacacagaagggcagcggggacggaggtggggccgtgtgcagatgaagtatgtttatgaagtacatgattgtgagcgtcagcgtatgtgtgtttagggtttttcccatcagtctccagctttgctcccttttcttgaccttctgtagcactcactctgcccaaagccagtcttgcgtaatcccatttgaaagagcactttgttactagccatattctaaatgttttgtgag

SEQ ID NO: 19383 - DNA, 1327 bp, Artificial sequence
  DNA replication origin
aggagcccgggtcgaccgcccccgcgggcagggtgcgcggactaggcagggagacccgcggctgcgggggcgcagagtggtcagcggggataggcggaggcagcgcctgcgaggcctaggggggggtcgccggcggcgcctccagcgcccggagacctggcatcggccgccctccttcccgcgtgcccgccagcgcccgtgcctgctcagccagtgacttcagttcggctccacccccgcgcggctgcggctcgctccttccagactcgcgctcggcacaaacccagccccagcgagcggccgccagctgcccggcgccacctccacccgcccccaccgcggcccaacttggagggaattggggtcctgagcgcctgccccccacagccgccagcgcagagccacgcgctgccaccttcggtctgggacccctctctgctgttctccgcccccgcggtgggaaaagtgggcgccggcggctgcttcccagccctgctgaaccgaaagttctgggtttcagcgggagatgggggcgcgccaccgcgaccaggtgcaggagaggaggccacttcgcacagaatcagcaactgtccaatggtctggcccgcacagcaggagttgtgaggttcccacgtggctgggtacaaggggaacgttccaaagcccgttggttggtctgttggaatgtgggggcgggtggggcttctggactgggaagtgctgcgcaccttccctcatctgctgagcgatctggcttcactgcttcatgctacacacccgacagctgaatagttttctccaaatctcttatttcccgactccttggccaccatgtgtgaagctgaagatcagaccaaaaggggaaggggttaaaatataatatctggggttcgaccattaaaaagtttaaatttacaggtaatctgcaatacatgcccttagtgtattccttgtggagttttttgtttttatttatttatttatttatttatttatttatttatttagttagttagttagttagttagtttagaacttgtctgtgtatttccggacggggcactccagcactccagcatcttctaaaagacccagtgtagggaggggtgtgtgtgtgtgtgtgtgtgtgtgtgcactgtgagcagtcctaggtaggtcagatatcccagtacaactacaccctccatccatgcccccatcacgcccctattgcaagaagaaaaataaaactcttagcctttcctttacggagggagggaagaaattactacattacaggaggctggcactggagtttgaggctgggattctgctgggaacaaagcag

SEQ ID NO: 19384 - DNA, 1089 bp, Artificial sequence
  DNA replication origin
cggcaagctttgggatcccagagtgcgccgggttagagaaccggagcggaggcgccagcgattccatgggggtcgtggcaactgcggtggtggtggcgcatcgggtctgtccgcagccggcagcggtgcagagcggtggggagagcggagcctgggcccccagcagctcccggccccgcgctgggtgctgctggcggtcgcgccaggtagctgagactccagcgcccgcctgcgcggcggcgactggctcagcacccgcggccacccctgcctgcgcagcctacgcctgccccgccgcggcccgacttggctggagttggggtcctgagctccagccccgacagctgccaaagcagagcccctcgctgccacctcgggtccgggaccccctctctgccgctatggctcccgggatggcaaaagttggcgccggcggtggctccccaggtgctcctcagctgcgcagcgctctgggtcctccgcatccgggcgtctgcggcggcggcttctgctgctcctctgtaccaaagccccgagccccgggggctttgtcacttgggacatcgagatgaggttctttccacttcttggcctcttcctgtgcgccccctataccaagcgggccagggcgaagacatgaaccggatccttgagagtgcctggagctcaagagagaaaccccggcaaagctacccatttgcagctggggagctgaagccaatcagcgtcacatttgctccgacaggcgactctctgcacatctaagccttggtccactattctggtcacaaaagcagcaggaatagaagagaggtgatggggttggaggcaagtgaatgaaaggagaaaagagttaaagcccactgggtgatcctaacgtgaatgtggattgatggggcttttggactgggaggtaccgcacaggagcctttgcccatttttcccactgaagcgatgtttccttctgcaatatctacctccatcccaccgaatcttttccaaaccccaatcctaaaaaaatttcgaagtgagcaatatgacttgtctccctgctcacattgggtatatgttgttgaagaccaggtagag

SEQ ID NO: 19385 - DNA, 1184 bp, Artificial sequence
  DNA replication origin
gaattgcaactcagaagtatgttgctacttggctgcctctactctattattgtgcaccttgaaggtgaggttaattaagtcctgtagtggggtttgagggctggaatttaatttttggagctttatttaatgtctggagcagagtgggtaataaaataaaatgtatattgagaataagttggccttttgacctttcagggtctagggctgtaaaacgtctcagggttgctgctaagcaggccatgaactgggctggacttttcatgtttgatgaaaaagagcctaaatgctaactgattttgggagaggtcagataaagaaaaaggagcattaaccttgactatgccactagctccagccacctttttaagaggaaattgctgggcaggtgggggagggctagctgtggaatgagactgtaagctggacagggtgtgaggaggggaggtgataaaaggattatagggtggggggagcagaggctgaggaagaattgggacctggcttggcctggcgaggagcagcctggggagaagggggaaagtcagatgggtctgtagaaaaggaagattagaaagactcagcaacgcttggggttgggactgggaggacagatgggagggaaagaaggaggatttgggaagagtcacattgggaacagagactagggagggaacaatgtgtaaaagaatgcctggatgtcaggcacctcagaccatttgcctattttacgataagaattatctagatcttgtaggatggaaaaatcaaaagtgctgttttctgactatttggaaccactatcgaggttgtaatggggtcaaacggcatcatagaagaaaataaggcatttatgtttaggtcaggtgtgagttgaagaggttttaagttcttgagaacacaggctaagggagaagaaggaggaatggaggatggaaggctgcccatagtgaaggaggcaagcccagagaaaagagagtagagacacagagagaaggggtggggggttcttgacccccaaaaaacggagaaggggtagagacatggagagaaggggtcagggggttcttgcctcccagaaaagcggagaaagggtagagacatggagagaaggggttggggggttcttgccctccagaaaagcagagaagtggtagagacacagagataaggggtcagggggt

SEQ ID NO: 19386 - DNA, 1610 bp, Artificial sequence
  DNA replication origin
cttgatttttcccaccagctttcagatgtgggctggaaccagtattttatttacaatctctctgtttttggcttcataaatttggggaaatgcaacagatgtgtgctgctttcccaggaagcacatctttagttttttcatgctttaactacacagtctaattcggcttgcctaaatgcttattcaataacgactttgagttcttgcaggtagcagaacctagctgatacaggtatattaggccttacaccaaggtcaaagcaggaggaggtgccattcacctttaaaaaaatgtggtcactttcatttagtgccaggtgttgttctaagcaccagggaaataacaatgaacaagagagccaccatccctgcttttgaggagtgcacattctgaaacattcatttctgcagaaaatatataatgagaacttatgacatgttagatattgttcatcattaaacaaaacagaaacaatctgcactgatggttttgttgtgtgcgtgggtggtggcaggagagggggaagaatacagtacacataagtacattaaaagaatcctgttaaaaggtggtaagtgctatggaaaaaatgaagtagggtaaggcggattaggaatattggaatgatttacaaatttaaataggatggtcagggtaggtgatacttgaacgaagacttgaaggaaaatgaggaagggagcctcaatatttgggggatgagcaagtccaaaagccctgggacatgagtgtaccctgctttttcaaggagagccaggaggccatttcagctgaagaagagtgaggaaggtgagaacaggaggaaatgtggctgggggtagatcaaatggagcttttatgctgcgtgaaacgagaaattaatggaaagtgctgagcaaagaagtgacctggtgtcacgcttcaaaggactggtctggcggctttgttcaggctggactgtgcaggtgcgggatggtgaggggatatttggggggctgctgtaaccacacgggtggggtggtacaaccctctgatgcacatcagagggtaggaggtggaggtggtgtgacacggccagattaggggtctattttggaggcagggccaacaagattttgctggcagattagatgtggggtgtgaaagagaagaggcagggaggattcctaaattttgcctcttaagaatagagtagccattgattgagatggcaaagaagactggtggagaacgtttttgctttgcttcggtgcattgggagttccaggagttccgtttggacgttaagtttgaaggggctatttactatccaagcggagcggagagctggattttgaagctctctgggaacatacttttggggacatttctaaagcttgagaccctgttccaaagcctcgaagaccctgtcgaggttcttccggagccggccacgtccctctcttctcagccctcctaaattaagccggaaaatccctgggacagtagcccctttattcggcaaagccctttttcctctttgaggaatgacgacaaaaacgaacaaaaatgaagacactcagcagcactgcgtcctttccccgctcgctgcagggagaggcaatgcggactg

SEQ ID NO: 19387 - DNA, 1049 bp, Artificial sequence
  DNA replication origin
ttaatttgtcttcctttggtggtggtgggggtgtccagatttgcgactagcaaaatatagtgaggactatattctgataggtgcccttaggatactttttttgctattcataaaaaggctaaccttgatgcatgcaaagcttttcatttttttgctttttaaatgcaagaaaatatccagccactcccaatatctctctcaaatactgcagatatttttaaataccaaataaaatgtcaggctgagcattttctaaacaattttcttcctcaaactaggcagccttccccacgattcgttaagagtatttaaaaataataaggcatggttggattttttgagcaaatgggagatggtggtagactaaaatttctacagccttagtccagtggagagagaaaacgataaatgcatcacagtttgtgtcaagacaagattcattttccacacttcatatgtgggaagaggaaactacattttaattagcacatttttagggaggaggggggggatgaagatgaggcggatggcgtgaggtatttgagggggacgagtctgcagatgaggaaaggaaatgaagtggattgtcgccagtgccttggaaacgaagggggataagggtggggaacgaagtttgttgtgtgtgttagggtggggttggcccaagggaccatgaatcattagaatggcgctcggaggggtgtgcttgcaagtgtactggtgcaggagggacgtggaagtcgtgggtggcagagaaaagtgtgcaccgctgggaggtctatttcaagaataggttgggatgagaaacatgtctgggcgaggggggtgggaggcccggtgtcacctgtggatggatccacagccctgcaattgcgtgttgcaaagtttgcccggccccgcattcattttgaaggttcttggcgatgcctcgacttttcgcctcaaagaagtgagctctcataaggttcagaggccgggagccaaagcgggagtgaagactctcgaggggtccaaatgaagcagaagcgagagcccctgtcctcccccta

SEQ ID NO: 19388 - DNA, 1031 bp, Artificial sequence
  DNA replication origin
ggctctgcggcgcttaagaggcggccgcagcggcggatccggcggctgctgcagcccgggcggctgccgagaaggagggaggggaaacacaaagccggctacgcgctgcgaggtaatcttgcggggagaggacgcgccgtcgtcccgcctctcttccgggccgggacgcgggcacccgcgcgggggctagcactggggacgctactgggggtcgcgcgggggtagggagcggcggctggcggggccaaggggacttctcattggctgtccctgcggcctcaggtgaacccttttccggggcgggagtggggaccacggccaggccagaggggagcgtacctgcgggggagggtccgggggtggcggtgcacggcctgcggcgccgccgggtgggcccgacgcttcgcgcgtctgctggttttccctaggaaggcggggagtaccaaaatcagttactggctgaagcttaggtgaccccggggaccttaagccctgaaggtgcgctccaggggagtgagaggttcctgcgcttagaaaaggtggaggaaagggagcgaatgttggttttagttgtttttctcctcatttaaaaaaaattttttttgttacaagttgaaagtgttcagtcacctttctcctataatccgcttccccaccccccaacacagacacacacaaacacaccgcccctacaaacgtatacatgttaggttgagcttcctgctaggggtgacaagcgaagttggcagcaggtctggtgtgctggtgtttggggcacgtccagcctctttggaggtaggctattatagcttaggcaagaccacagacaggtagcataatctgggcctcttttaaaatggcaagaacggcttcaggtgaacttttttgttgcagagatttaattgcaagtaggtgccggttgaaaatgggagcgcaaggaaaaccactaatttccttggcacatgtgctgttgcaattaacctggtagagtgttaaggaatttaacttagccaagaggctttgagggagga

SEQ ID NO: 19389 - DNA, 1148 bp, Artificial sequence
  DNA replication origin
tgggtctggattggaagaaaaagagcttaccatgggccagagtgtgctaagtcagatacaatacacaagcatcttatcacacatttcaatgatgtggaaacttaggccaagagaggttaagggacttgtccaagctcacacagtctgtatgcagcagagctgggatttgaaccctttcctatggcaccctagagcagccttcaatcatcccctgacacctccagtacttcccagggctggaaagcatccatgattgcggacagcagtggcagtgaaacaatgtcagctggggtaggggttttcagaggcaaaaggtggaattcagctggggaggggggtggttcctgagctgccacttctgcctctcaaattaaagggagccaggtgtggaggcatcctggtgtgagctttgcacagctgaaccaaggctgggcagaggagtgtggagagggatgctgacatctcctcccacttctggaaaataactttgcatttgaagggagaaaggcatgagtaaatctgtaactcggatttggacggcctgggatttcatttgactgtgtgaaggcacacacaggtgcctcgcaagtgtgtgcgtgattacgtatgtatgtgtgtctgtgagtaggagtgtttgtgttgggggtggggggatcttctggttacacactggttcccttcttcccatttggattggggagcttttatttatttatttttaagtcatagcagccaccatgtatggggacctaactatgtgccaggcattgtgctggacactttctgaggcattatttttctgtgaaaaaagtagtttgtttttatgcaggtgcacccagagacatcaggtatttttttccattccggttaaaagacagtgttctactctgtggtaagccttggggagaggcagggaagcctgcggggacgggcaggggcggtccctgcctcgctcgctagtctccaccttttattttgaccggtccgatggcgacaggctcgcactaggacccaggcgccagagtgcctccgtctgtcctgtaggttcattcaatctcccatacacacagactcacagcgagaccgacacacactcccatacactcacacacacaactgcaggcagcgaggctcgggaagtcaggccg

SEQ ID NO: 19390 - DNA, 1161 bp, Artificial sequence
  DNA replication origin
tccgttgccgtggggtgccaccgccgcccccccccccccaaagaaggaggccggcggggccaagcaacgccagcagctcgccccggacacgccgtcctgagcccgggaaacttggccgtggggacgcggctagaaggaaactttgggatctttgagaaacaatagttggggaagaaggtgtgggctgttctgtgctttttctttattttccgggagacggctcttgagtgagcgcacagggcaagcaaggcaaacgccttcctggtcgatttctactccccccacccgcccacccccagattcacgtggatagtagtgcgtgggtgggggtgtgctgggaaccccaccctggcctggcttcttttttgtatttatttgtttcatttttgcccctaccagccaggtcacccagctttccccaggcagtcgactcagcgccctaacgggggcacgcgtgtgcagcgtatccagcaccgtcctcagaataatagctgtgaaaaggaggaagggaactaggcagacagaccgacagatagggggaaaccgggatgtttaatgtgtccgaacaagtaggaagatcaatgaggcgcgagtgtgtgtgtgtacgtgtgcgcgtgtgtgtgtgagagagagagaaagaaagaagaaaggtcccgattgcaacgtgtcagatcttgcaaccttccccccacccaacacaacaaccctcagacacaaaaacaccattgctgactgataccccaggtcttcagggttaaaggaaccgtgtgttggcagcgcaattgtgcagacgctgtaaggccaaaacgaggatttgtgttgtgaggtcggtggtgcgttcttttctttctcttctcgcctgttttcccggagtgcctgggttgcgagaaaggcgcatcgcaggctgtgcagccgaatcgcttcgcaattattcatgctggtcggagggggatggggcgcgggaagctatgtgtgcatttgtctggagggtagtttctgaaaagccagagctggtggggagctgggtgaagacgtggttttgtttggtgtgtttgcttttgttgcaggggggaggggcgcgatttcttcagctacccccatccccggctaccagttctctggagtctgtcccgtggcgttggctctgactaggggtacacc

SEQ ID NO: 19391 - DNA, 1191 bp, Artificial sequence
  DNA replication origin
ggaggggcgtatgagggaaggggagcgcgcgtgaggggaggggcgtgcacatgtgaggggaggagtgtgtgaggggaggggagcatgtgaggggaggggagctcgcctgtgagggaggggtgcgcgcgtgtgagggaggggtgcgcgcgtgtgaggggaggggcgtgtgaggggaggggagcgcgcgcgtgaggggaggggcgcgcgggtgtgaggggaggggcgcgcgcgtgtgtgtgaggggaggggtgagcgcatgtgaggggaggggtgcgagcatgtgaggggaggggcgtacgcgtgtggggaggggcgtgtgaggggagggccatgcgtgtgtgtgagggcaggggtgcgcacgttaggggaggggcgtgtgaggagaggggcacgcgcgtgtgtggggagggtcgcgcgtgtgcggggagggtcgcgcgtgtgtgaggggtgcgcgcgtgggagggatggtgcgcgggggggaggggcgtgtgcgggaagggcgtgcgcgtgtgggaggggcgtgcgcgtgtgggaggggcgggtgcggggaggggcgcgcgtgcgtggggaggtgtgtgtgctgagatcgtgagtggaggcgtgtgtgagaggtcgcgcaggtgctgggggaggtgcgagggtgcgcacggagggtggggctgtgggtgtgcggcgagcgggaaggagacgggtggagggaagttggagagagggcggtctggggctggagagagggtgaccgtggagaagcttggagggccccggagcgggagagggtgctgggagataagaggaaggaggaacacggatgctggggggggtcaggggaagggacgaggccgggagaacactgagcgggggaaaaccggtggagaggggcctttgaatacctgcggggtgatgagatggggtccctttagcggtggcagcccaaggggctgtagagatggcgcagaaagaccaggaactcggagactgtggtgtcgagagagaaaatgtctttctaagacttgttcgaagtacacaaaaatattgggcttaaagagactctttagaacagagagagttgaaagtaaaggggaatttttgaggcaagcgaagtcaatgaggtgaatggtaactggtcacaaaatttttgttctaaagcatctgaaatctcaagttcttgggagagaaggattttggaaaggg

SEQ ID NO: 19392 - DNA, 884 bp, Artificial sequence
  DNA replication origin
gagacttcaccgtctctgtcttttcctccttccagtgcccggcgttcctcccttccccctcgccgccgaccgagttcttccttttcagaccgggtcgccttgctgtcgtcgcggtgattttcctgctactgctactgctgctgctgccaccgccactaccactgggctcatttgccccgaccccttcccgccgccccgcccccagccccacacaaggtaacaacccccctgagggagagagtaaggcctggccgggcccgggtccctcccgaggtgaagcggaggcccaaggctgaggagcccgcctcgccggagacgcccaggcgctggccctggatcccggagccacggccgtctctcagccagagctgagcctcggcggcccggccggcgctggcctccgtgcggcggcggcaaacacggcccgcaggggaccgggtcgggtggggctgggcgccgcgcggctccctgtggagcctgcctgttggagcgcggcggggctccggcggtggtcttggagctggcgtgtggatttccacgtccgaatgatcgagttgtggcgggctttgaggtgctgcgtggcggggaggagagcagcctgggtcgctgtaactcttagggggcctttgcaggctcccagcctttggttggacgggaattttacgaaggagaagggtcctcggaaacgtggtacatttgcttataaaccatcaaaaaaggttaattggtatcttattttcaggaaaatgactgagctggatttggcgaaaggcacattcgttagaatgcctaaatgggagagtacctgtgctgttctttttgctgaagataatgcaccgataaatatttaagcgactgggcgaaagatttttgttttggagagg

SEQ ID NO: 19393 - DNA, 1040 bp, Artificial sequence
  DNA replication origin
gacaactgacataagggaatgaggttttcagaaggaagcagagatcaaattttgaaatcagatgcaatcaaatcagacaccaggacagccagcattgcctctgggtcacagatgcatccacccaaaggcgctgtcctcgccttgccagtggggtcttggtgaagacgtgatgcgggggccttctttctttttgtggttatctgtgccagccttccctgcaggctgctcttcctctagcacgttctgtttctgttaccggctctttccacccccggcatctccgcctagagccacacacatacgcggagcacccacgtgggccaggctttgttttggggctggcggcaccaacgtgagtaagacttatactcagccccagctgcccccagcccagagggaaggggaaggcctgtagtccgtggggaagagcgcccagtaggggtgtggcagggtggggcgtgggctggagaaggcctcccgaggagaggagagctgaggccaactccgaggaatgaattgtaagccaggctgcgaagcaggaggggagattccaggcagaggaaactgcttggggtaaagaaaacaaaaaacgcaacccccccagcatggtgcgtactggaggtatgtgggagactaaggcccttctggtatttattagcagattaagcagggtcaggcaacagagggccttgtgctgttttgagtcatttgggtcttagtctttggccgggcagtccccaacgagggatcttactcagtgacaagatccggatagcatttgggaacatcgctgaggcggctctgtgcgggatcggtgctttatttgagagtggtggtggggtccggagtctgggggatggatgggaggatttcatgggtaatctagacatgagctgatatggacttgccagaacttggcagtgacagcagctatggggaggccataggaatgggagcacattgaggaagtgagatgctgggaggggtgagatggggagagagaactggagagggacaccaaagatttttttgtttccgga

SEQ ID NO: 19394 - DNA, 1528 bp, Artificial sequence
  DNA replication origin
gcccgagcggcggcgcaactccgcgttcccgccccgctcgctcgatagccagcccggccgctcgccgccctagaagccggggattccgccggccgcgcagcgttttatgtgaatgagtgccgtccgtgacgcggctgcccatataaggccaaatatgggtgtttccccgcccctcgggccgtggccacgccctgcagggggcggggcagcgggggcgagggacgcgcggggcgggtgccggcgttagagcgagaggaagtggaaggcgcctcttcgttctctcttccgcgcttcgctgagggactcactcgcgcatcacccgcggctgccggtcgagtgtcccaggcgctccggggccgcggtgaccctcgcggtgcggaccgaggaggaagcgccgtggggggcggggcggcgccgcacgatccggccttcagcttcacggacgtgggctgagaacccgcccgcgccgcgctgagcagggccgagggagccggccagggccccagaggagtccggaacggattcccgtcgctaccgaggtctgcgcgtgtaaggagaggacgtcggagatttgcctcgaggggtggggtatagatgactggagaggtcaggcgcgggttggtcatcgctgaggctgggtgatgggtggccggattcgttatactgttttctccacttttctgtatgtttgatatttttcataataaagtttgtaaaagtaaaaacgggggttgggggtcggcggtgagaatagccatttaatcttcctaaatggattctgccctcaaaggattgacgctcttttctctgtcactctccaataatgattagaataataagttgtattttgaggagctgttttctggtcccggggagacccttggtgaactcagcagtaccatcagcatgtatcccacgatggagctcagttcagccaactgttgtccaggtggcttctggatttgggggattatctatggatcaagtttaatctcaggctgtctgcccccaccggtccccaggggcttcaggcctcccacccctattcctggggaagcagacacaattcacccattcagcaagcatttattgagggtcagccgtgtgccagggctttgctagctgcggggacacatggatggaaacaggtttctgcccccaagctcactgccaaccattttattgttagcctggctgggactgcttgatggaaaacagtctgcccgcactagacaagggcttgttgacaactgacataagggaatgaggttttcagaaggaagcagagatcaaattttgaaatcagatgcaatcaaatcagacaccaggacagccagcattgcctctgggtcacagatgcatccacccaaaggcgctgtcctcgccttgccagtggggtcttggtgaagacgtgatgcgggggccttctttctttttgtggttatctgtgccagccttccctgcaggctgctcttcctctagcacgttctgtttctgttaccggctctttccacccccggcatctccg

SEQ ID NO: 19395 - DNA, 1060 bp, Artificial sequence
  DNA replication origin
tgcccgacgaggcggcgcgcgcgcggctcctgcaggagggcggcggcggcgtcgcggccgtggtggtgctggaccagggcagccgccactggcagaagctgcgagaggagagcgccgcgcgtgtcgtcctcacctcgctactcgcttgcctacccgccggcccgcgggtctacttcctcaaaggtgagcgctcggggtccctgccacgctcgcccctccggcgcccccgggtcccctccctgcgccggggcgccctcctacaccctgggaccgggagagtcaccacctgcaggagtctgcaccctgtggcttgttgtgcgcttgggagggcactgcaaatgtcagcactcagagctccccctcttccccacccgcgttcctcgaaagcgcccggcagcgggtctgcccggtggtctgggtggagttggttatgctgcgggggctgctgctgtttagcagtttgggggccgtcggctcgtgccgggcacgagccccctttccagacgcgagcttcgccgctgtcgctggggtcagggctcggggccttcctgatagactgatctggcgggatcagcaggtcgcgatccactctcccttggtgtggcgccgtggtgccccccttcctcccgcctagccagctgtggtcttcaccgacccccttgcctttttgacctggcgagtcccttccctttccatttcattttattgctttttattgtttccctccggcctcttctcccctcctaggtcttttctctagctcagtttggagctcacatcctttccacccttttcacctcctccttcctccgccccaggattatccctgggacccatcctgagctgagcctacagccagccagccacgaaatagaggtgcgcgggggcagggtggtatggagattctgcggcctttgatttgacacctcccggagctaccgccacaggcctgcccatttcacctgccgggaagataactttggcttctggtggtgggtgggtgattgactctcaaaatccaaagcattggttttttctgggttacttcctatgactgctc

SEQ ID NO: 19396 - DNA, 1838 bp, Artificial sequence
  DNA replication origin
aggggcggggaggaggcagtcctggcggcgccgcctcctcccgctgctccagctcgtcccggccggccacgcgggggcgggggccagggggcgtctcccgaccggcgggagctgctctgcggccgggggctgctcagcgccaagctggacccaggaactctgcccgccgaccctgggcgcaggaagcggggagggagcgcggcgtacgccacccgccacagtgcaccctcagggtccgtagcccagcgttccacggcgcagcataccgcgtgaggaaggcgacacacgcagcccgcggtcggccgccgcgctctcgctccacccgggagccctgagtcctccggctgtccctggggacggtgcgcgcggcctctcgcagctcctgccaagccgggcggaccgagcgcgcccgggacgtccgcgcgcatcgcccgtgcaaagtgtgccgggcctggcatctgctcgcggctggagcccggccagcgccactggctcttgaggcacccgaccctgaggggaagaaagcctggactcgccccgaggtcagacttgtattgtaacccaggtctcagatgaccatccccggggctctccaaattgtcagttccagctgctgatttcaggtgtccccggaagcagccggtggggccaccgtgggtttctggtttctttttctcttcacttaaaagaccccgccacgaccccacgagcgcaaagacaaaaccatgcgtacattttattcttgttatttattggccaaatctccgtggaaatgtaaaggatgaaaagagagttcgccgacaacgtacggtcaccgtcacgccctctgaagccctgttaattaccctggcgcccgcgtgcgcccgtccacctgcactcaccggttcacagctgtggacgcggacatcctgcggcctttcaaggctgagagccaccaagcaaggttcggcttaatgccctggcgcgtgggtgcgaatatgcgaggcacctgacacagaaatgtctacggagcagagaaagaccagagaaagcggccgcccagtagaccttaccggctgtccggcatacaggagttctaagtcctgaggccagcgtccccgggaagtagagaaaagcgtgccttgcgtgcctgggaaaccagagcccaggatgccgcatggcctggagaggagtttgctcagggtctccactcaactcattttcctcccgcaaccacgcggaggaaaattctgaagatggattccctgagacctagcaactacttgaattccccaaaagacgctttcatgtctccccagactgagtttctagcctcaggaaactacgcctccgcctccgttgatttctgccatcattctctctttctctctccttccttccctctcccttttttatcttcctctctccctcctctaatataaaatgacactatcaattcctcgtattcataaagatcagtttgccacagttcgcaaaattgagcctcaccaaaacaaacaaaaacaaaacaaacaaaacaaaaacatgaaacaggtaggctggtccgaaggtaggtagttagctcaatagattgttccgttcgttacacatagaactccttgttctactctttcccccttctccttaatgcagctgacaagaaaaaaaaaaaacacctggtaaagaggtgttgattgtttttcccatttcacaaatgtggaggcattagggtgatctgtcgggaggatccacggctagtaagaggctgtaagaaccaagtccattctctgaatcgttatcatcttcagtttctatcactaaattcctaaccgtggtttccttaaatctccatcttccac

SEQ ID NO: 19397 - DNA, 1216 bp, Artificial sequence
  DNA replication origin
gtggcgggtggcgtacgccgcgctccctccccgcttcctgcgcccagggtcggcgggcagagttcctgggtccagcttggcgctgagcagcccccggccgcagagcagctcccgccggtcgggagacgccccctggcccccgcccccgcgtggccggccgggacgagctggagcagcgggaggaggcggcgccgccaggactgcctcctccccgcccctcgcgtctcctccccgcgccaccgggaaggacaaggggactgggcacggggaccccggccagtgagcgcccgtggcccgggaccgcccctcccttgagctctctcgccgcgatcccgggcgggtctcgccccgcatggtgctggcagcagccatgagccaggacgcggaccccagcggtccggagcagccggacagagttgcctgcagtgtgcctggtgcccgggcgtccccggcaccctccggcccgcgagggatgcagcagccgccgccgccgccccagccaccgcccccgccccaagccggcctaccccagatcatccaaaagtaagaagggagaagggaacagggaccacgggtgcgcctggggacacgccccgagagccccctttgtggcttcatttcccgtccctgctgaacttcgctcgccccccttgggtttgaagttttctcgtaccccctctgggcagagtcggtgtccttctggctgtttgttaggctggaaagaggggagccaagttctttagggaaaattattttgtttttccttatctcctttctcttctcttcaggaatggtactagatattttgaactaaaatagctcagattggggggaaatggcccagcgactgtatttcatctttctggtcccaagaggacgctggaatggagagtcgtgcgtgagtgtgtgcgcgcgcgtgagggtgtgtaagtaaaatgccaaaaattaaaccacccttcatggtgcccctgaaaccaaccagtggaaagggaggtgacagtttgtaaacaacatgttttactttgccctgaaagtgtagacacttttcaagaaggccttttcgaagagtttagctacgcaaccgttttccattaatgttaccatcttgtgactcgggtgacctgtgcgacttgggtcgtgaattctcaggtcggccttcccaatgcttgagaaggttgggggtggttaataagccccgagaggctctttcagcccg

SEQ ID NO: 19398 - DNA, 1123 bp, Artificial sequence
  DNA replication origin
gcccggccgcccctactgggaagtgaggagcccctctgcccggccagccaccccgtccgggagggaggtgggggggtcagcccccccgcccggccagccgccccgtctgggagggaggtggggggggtcagccccccgcccggccagccaccccatccgggagggaggtggggggggtcagccgccccgtccgggagggaggtgggggggtcaccccccgcccggccagccgccccgtccgggaggtgaggggcgcctctgcccggccgcccctactgggaagtgaggagcccctctgcccggccagccgccccgtccgggagggaggtgggggggtcaccccccgcccggccagccgccccgtccgggaggtgaggggcgcctctgcccggccgcccctactgggaagtgaggagcccctctgcccggccaccaccccgtctgggaggtgtacccaacagctcattgagaacgggccatgatgacaatggcggttttgtggaatagaaagaggggaaaggcggggaaaagattgagaaatcggatggttgccgtgtctgtgtagaaagaggtagacatgggagacttttcattttgttctgtactaagaaaaattcttctgccttgtgatcctgttgatctgtgaccttacccccaaccctgtgccctctgaaacatgtgctgtgtccactcagggttaaatggattaagggcagtgcaagatgtgctttgttaaacagatgcttgaaggcagcatgctcgttaagagtcatcaccactccctaatctcaagtacccagggacacaaacactgcggaaggccgcagggtcctctgcctaggaaaaccagagacctttgttcacttgtttatctgctgaccttccctccactattgtcctatgaccctgccaaatacccctctgcgagaaacacccaagaatgatcaattaaaacaaaaaacaaaaaacaaaaaaaaaaacaaagttactgcagagtagagctaaaagacaacctcacaacggttagatacacaggcccatcttcatcacatttgcatgtgccattctagatattttcttagaataccacaaactaaacctgtggttacgatccaagcagatt

SEQ ID NO: 19399 - DNA, 1176 bp, Artificial sequence
  DNA replication origin
ccgggcagaggggctcctcacttcccagtaggggcggccgggcagaggcgcccctcacctcccggacggggcggctggccgggcggggggtgacccccccacctccctcccggacggggcggctgaccccccccacctccctcccggatggggtggctggccgggcggggggctgaccccccccacctccctcccagacggggcggctggccgggcgggggggctgacccccccacctccctcccggacggggtggctggccgggcagaggggctcctcacttcccagtaggggcggccgggcagaggtgcccctcacctcccggacggggcggctagccgggtggggggctgacccccccacctccctcccggacagggcggctggcctggcgggggctgacccccacctccctcccggacggggtggctgccgggcagagacgctcctcacttcccagacggggtggctgccgggcggaggggctcctcacttctcagacggggcggctgcggggcggaggggctcctcacttctcagacggggcggctgccgggcggaggggctcctcacttctcagacggggcggttgccagacggagggtctcctcgcttctcagacggggcggacgggcagagacgctcctcacctcccagacggggtcacggccgggtagaggcgctcctcacatcccagacggggtggcggggcaaaggcgctccccacatctcagacgatgggcggccgggcagagacgctcctcacttcctagatgggatggcagccgagaagaggcgctcctcacttcctagatgggatggcggcggggcagagacgctcctcactttccagactgggcagccaggcagaggggctcctcacgtcccagacgatgggtggaggttgtagccagccgagatcacgccactgcgctccagcctgggcaccattgagcactgagtgaaccagactccgtctgcaatccctgcacctcggtaggccgaggctggcggatcactcgcggttaggagctggagaccagcccggccaacacagcgaaaccccgtctccaccaaaaaaatacgaaaaccagtcaggcgtggcggcgcgcgcctgcaatcgcaggcactcggcaggctgaggcaggagaatcaggcagggaggttgcagtgagc

SEQ ID NO: 19400 - DNA, 1511 bp, Artificial sequence
  DNA replication origin
gacttcatttctttcctcctctttatggtcctgtggccaggattgggtctcaggtatggacgtggccacccatcaccacggagcagcacgcacactggcttctcaaccacagaaactttctccagagagctcaggatattttaatgagcatgacctctttacagtactacaacagccttgtgatcacatccattttacaaacaagaaaagtgaggcagaagaaagcagggtctgacctggttctcagaagccaggcctttgcttccagagtctgggttccaaccttcataccttcaacaggtactcactggacacctgctctgtgccaagccctcctctagggactgggaacacagcagtgaacacaacagacaaaacttcctgccttgtgaagtttacacctggagctgggggtgacaatagacactaagtaaaataaagacattaagtgataggtttgaaggtggtaaatgccaccaaaaacaggaaagcagggagggagaggagggggttgaggtgttgaggtggtctgcagcggtgcgagggagaggaatgggttggggtattgagatggtctgcagtgacgagagggaggggagcaggttggggtgttgagatggtctgcagtggcggggagggagaagagtgggttggggtgttgagatggtatgcagtggtggggagggagaggaatgggttggggtgttgagatggtctgcagtagtgtcgggggaggtgagggggttgggtggggtgttgagatggtttgcagtggtgggagggagaagagcaggttggggtgttgaaatcatgtgcagtggccagggacagtagagaatgtggccatgagtaaagacgaaggaggtgaggagcaagccaggaagacttgtggctcctcggcagcagcaacacctgtaaaggcgctgagggcaggaggtgcctggtgcactggaagaacagcaagccctgctgccttcattcccaagttcagttgccacctgttatctgactccaggggcagccctgtggggtctgggcttttcttgagttcatcatacagagtttgaggacagtgcaaaatactctctgttctgcagtcattccaacacacactgttggactgcctggctccaaacctaaagacacaatctgtgaggggccccagtaagtccctactgaccccactccagggttgtaagaggcagaaccaacttgagggacagaactgtggggaaattcttggggctttctgagattctttttccatcaggggctctttggctgacacatagtgtcaccttaaatgagcaatgttatacaaaccgatgagagcagggtggtaaaacagtagaagaaatgaggttcccagggcagagtctcaggagtgtgagtagaagtgcaggaagcagctccacctctcagccttgggggagagagggttggcaggctggtggtatccacatgaagcccaggctttccttgagcccctgccaactcttgctctctgccca

SEQ ID NO: 19401 - DNA, 1112 bp, Artificial sequence
  DNA replication origin
ttcagaggattcccagggagggcagggggcggggagggcgcgaatcttcctcacaggatttcagtccagccggaaacacgccttccaatcccggcccccgaattcaacctccgccagagggggaggagggctgagggggaccttcaagggcgagcgcctcgcgcgcccctctcagtggggagatggctccgggagggggcgggcccgcgccgacacgctccaggctgggctcagaaagagggaaccaggccggatgcccgcagtccggggcgttggggagggcgcggctggacctgcggggctacaagaaggcagccggacccccgcaccgcaggcccggacctgacaggaccgcgacccccacgcctccgcccccgccccctcccatcttgcggctgcctccgaggagggatgggggagagggcgcagtcttcccgagcgtgtgagccgcgcctactggtactgacccctcgggcccccgccgctgctcgcccaggttcctggtcagccggccccgaccccgctcttctgtctctgccgccgcctcggagagtctctggcccttctcgctctgtttgtttttgttttcttctacccagtaacacgggggcgagagggcggcgcttattggccgaggccgggtggtcggctggccaatcgtggcggcggagccggagctgaggaggaaaagggagaggagtgaaacgtggaaagttggggaggggcgcgggagggcgcatgcgcatgtggctcctgggactggctggagcgggagttgagcgggaagtcggggtgggggtatgttgggaggcgtggcgggatgggagcgttgggaaaagggcagtgctgggggatggggacgaggatgaagcttcctcgacccagctcacccattctcctcacagggcgttctgcaaactcggctgaagcaaaggttttgagcttcctgatggtccctgcctccatttctagaaactgcttaggcgaacactccaagtgatcagcctgtccgattcctcctccctctggccgctgctttctctgtggcttccagtttctggagatcccatgctaagaagtttctctcagcgaatcccctcaaacctttgaga

SEQ ID NO: 19402 - DNA, 1122 bp, Artificial sequence
  DNA replication origin
acgcggaaaggggggaaaaatcagaatgggaaggcaggtggcaggggaaaaagattgaggtcctgccctggtggtaggggctcatcttttccttttataggtgaaggtggaaaatgattttctgaagttcccgaattctcctccctccaaaggccaaggagtgaaagtacttaataggaacttgcggaggcgtggtcaagagctccgttttgccggagttaggagctccgccccgaggtccccgcccattccccgctggggtcctcccggccgggctgcctctggctgggttagggcggcctgtagagcggcctcaccccacagggagcctcacgggggcgggccgccgccaggccagcccggaaaaaaaccgccttccaacggaagcggccctgagccccgctcgccatttcagcgctctgtcccacagggaccgtccggcccgggtccggcccactggttggggtccacggactcacctcactttgcaactaaggtcaaaaataagcattccctggggcacgggcggccaggctattaacacccttccgccatgacccaattcggaagtgccaaatgcaacttccgggcaggagagggaatttcggagccctaaactgttgtccatctccgtaagtgaccagacgtctcagtaaaataagggccaggaaactggacgtgtaatccggagtatgaattaacttgtctaacatgggatgtgtggtcacccacggtacctctttgggcttacttacagatgcatcccttcccagacggctcagctgttgccccgggtaacggtgagactggcgaaggaaaaaaatctacgtcaccctggaaacaggaagccaggaatctccttttgccattatcagttatggccgccttagcttcaacagtaacttccgatcggggagttgtcactctaccctgctggaggcttactctgtagcccggctagccagaggcgcccagtgggcgggagacggcgtagaggaactgaggaaaggacaagggcggagagagagaagctggcggcactgcccgtctctgattgggcagcttctcttgccccggttccgcccatttttcttgcctagcgagtgacgggcccacggcaga

SEQ ID NO: 19403 - DNA, 1322 bp, Artificial sequence
  DNA replication origin
ttcttaggaggaggaggaagaggaggaaggagggcgagcgaggaggatggcggagtcggggctcctgacggtaactcggggccgatgaggcggagggtgtctgttggtcggttcttcctgcctgccttcctgtccgtcgggcagtcgggctggctgtcggtagggggaggccccgtgcgccctgacaggcgcgagccggcagcgccggggcgaggcccgaggggccggggccctgggaggcgccgccgccgccgctttcctggttgctgtctccgggagtgcggggcccttggagccggctcgcgtgggagcctgcagcccggcgcggagaggaaggcggtcgggtgtgacagcggccggggccgggcctgcggcggcggcggcgggcggcccggacagcgcctgggcgacggcgagccggcgcgagggcgcgggccgggggcccccggcggacagtctctctcctctcggctccctgggcccccgggcccagtccgcagggcgccccgagtcgtgtaaatcgttggcgagggcccgggcgcagcggcggtcatacagggtggggtctcttctcgccccctccctggagtccaccttgctctcccgttctcctctccctaaaaacccttgagtgaagagtgctggatcggctctgggtgtgttgcctagcgaagcgagttgtagcccttcgagaccgcctcgtagaacatgcccgatggcaacctctccccgtgatagcacagcttttagggagagaggaaaagtagtctcactcttccccgacttccccaggctcataacacaagaggctttggggcaagacgatttttcccccagcacctcaatatccattgtttttgtaccatccccctccccccatgcctaggtggaagagtaatgactccaaagcattaacttgcctttctctttatttcttttctttctttttcttttcttccttcctttctttaagcaggcagtttgtgttattgtggaattatggatttacaaacaggtggaataaataccgattcgggagctagaaagaagatgctttgtgtgtgtgtttaagcccttacagttggcagtttgatttttcttgtctgttgctttgtatcgtaatgggggtgatgagaataaaagaggaagcactgttttgcaacctacccaaagaaatattttcgaagtctctggggatgctgaagcaaaattaggttgcagatgtggactgtatagtatttgcctccagcgtgataactaccagcagtgtctaggcttacacctgtgccatttcgtatacttttcttagataccgagtgcgt

SEQ ID NO: 19404 - DNA, 1835 bp, Artificial sequence
  DNA replication origin
acactgtgcggagctccgggacggcggcggcggcggggtgaggagtgtgggggccgcatgaaggcacccccgtcctcaggcgggccggggcaggtgaacgatcagctctccaggagccgcgacggaggcaggggttctcctgggcgtccgcctggtgggcgccgagcgctgctggatgggccggggtccgacgacagcgcgagttggggcaggagcgcaaggcggggaagaaggcgctggagtggccgggcggcggcacgccggctgctgggcttctgcaccgagctggagctgctgctgctccgctgcgctcacggtggactcgttttatagccccaggatcaagcaagcgttgctgagcagccggcgtcagcccccacgtgggaagccgaccctcccccgcccctcgcaccacccctccgccagtctagcgcccgcgcctagcgctggacctcggggagcgttgccctcaggcgggacgagccctttggagaggcgggtaccttgagctagagacttaaagagggagcccgggggtggggggtaggggaggagcggcccctgctgggagttggccatgcagctccgggccgacggagcagaacgcaacgggcacccgtgagtgcccccaagaagctggatcttgggagaaaagggaagaaaaaaatggaagggaatccccgcccaaatcgagggaagtaacctccggtgtgagttacgtctggagcagcccagctccgggccagagccgacgcggtccgcaggtgctcctggaggctggggagaaaggggtcctggagagggaggaaggcgcggcttcggatggaacccctggggcggaatggacagcacccacggggaagtggtacaagccggagttcagacctccgcttagggaagaagcggctacgtgtcctcccagccgcgatgctgtctgcgggaaacgcaagacccggggtctggaccgcgcccccttagaccgaggtggggaggggtccaggagccgagcgccagggcaaagcgaggacgcactgacacctgctggccgctcgtggtcacggctgagaagcgacccgctgacgccaggcgcctcctcccgtctcttaggtcttctgccaacagagccttctcctatctccgaacaaattggtttctaagctcaggaaaggagaacccagagtttgaattgcaccctgccgtgttgcagaaatcttcctaaagcagatactcgtgtgtctacccctggcgggagtgggggtttgtctaataaagtcacatcaggaagggctcagcaggcaccgccggccagaacgggcatcccactctggacccgcacagcccacccttcctgcagatccgagagaggccaggatcctgcctccttggttgcacagctctggcttgctgggaatcattatgtttttgttgaggaccgaaagctagactccactcccgccccgcatcccacccccattcagatgtacacacagcatccttcaataaggggaagagggagtagaatattttccatgttctctctgataagaatagcggtgggggcgggggggagtgggtgtgcggcgaatggcaagtttttccgtgcgtgctagctgtcctaggatagattttaacggtcactagagcactagcttgcaccctgctagctgcacttttcagatgagagcaagcagtttaatggtaaaacccaagagggtaggaaatttcagcaggagagagattagacttaaaggaatgtcgtcttatttaaggaaccactaaaccaaaatgccttgtgcagtcacctaagttggaattccaaggatggaacaggctgc

SEQ ID NO: 19405 - DNA, 947 bp, Artificial sequence
  DNA replication origin
cccccggcccgcgccgcggcaggctgtcgcccggcttcacctggctcgctcgggccttgcctttgccccggggaccgcgctcgggtctgcggggccctggaggccgctcggcgtggtcggaagacgagctctcctccaggtccagcgcgtcggtgtcgcgcggcccggccggcgcgggctcgccaggggcgccgttgagctgggtgggcagcggttcggcctctgcgccccccgggcccgcgctgcgctcggggcccagaccgttgggcctgcgctcggtgccccccggcggcgcggcgacggcgtccggaccccggcggctgggtggcacgcgggtgcgacgcttggcgatctggtagatgcgcacgtagaccaggatcatgatgaggcagggagcgaagaaggagccgatgcacgacgagatgacgtaccacttctggtcgttgatctcgcagcgcggctcggccggctgcgggccgccgccgccgcccttcttctcgatggagatgagcggcgggaaggagatgacggccgagatgacccacacggtgatgatgatggccttgatgcggcgcggcgtgcgcttcaggttgtactcgatggcctgtgtgatggaccagtagcggtccaggctgatggcgcacaggtgcacgatggacgacgtgcagaagagcacgtcgagcgccaggtagatctcgcaccaagccttgccgaagtaccagtagcccatgacctcgttggccagcgagaaagggatgacgagcgtggccaccaggatgtcggccgaggccagagacaccaggaagaggttttggggcgccttgagcgcgcggctcgtgaacacggcgatgatgacgagcacgttgccgaacacggtgagcagcatgagcaggccggccaggcacaccagcgtcagcgtcacctgcagggagtaaggggtggcccgg

SEQ ID NO: 19406 - DNA, 1414 bp, Artificial sequence
  DNA replication origin
accagaagtggtacgtcatctcgtcgtgcatcggctccttcttcgctccctgcctcatcatgatcctggtctacgtgcgcatctaccagatcgccaagcgtcgcacccgcgtgccacccagccgccggggtccggacgccgtcgccgcgccgccggggggcaccgagcgcaggcccaacggtctgggccccgagcgcagcgcgggcccggggggcgcagaggccgaaccgctgcccacccagctcaacggcgcccctggcgagcccgcgccggccgggccgcgcgacaccgacgcgctggacctggaggagagctcgtcttccgaccacgccgagcggcctccagggccccgcagacccgagcgcggtccccggggcaaaggcaaggcccgagcgagccaggtgaagccgggcgacagcctgccgcggcgcgggccgggggcgacggggatcgggacgccggctgcagggccgggggaggagcgcgtcggggctgccaaggcgtcgcgctggcgcgggcggcagaaccgcgagaagcgcttcacgttcgtgctggccgtggtcatcggagtgttcgtggtgtgctggttccccttcttcttcacctacacgctcacggccgtcgggtgctccgtgccacgcacgctcttcaaattcttcttctggttcggctactgcaacagctcgttgaacccggtcatctacaccatcttcaaccacgatttccgccgcgccttcaagaagatcctctgtcggggggacaggaagcggatcgtgtgaggtttccgctggcgcccgcgtagactcacgctgactgcaggcagcggggggcatcgaggggtgcttagccccagggcactcagaaacccgggcgctgcctgctctgcgtttcctcgtctggggtggctctgcagcctcctgcgggcgggcgtctgctgctcctacaagggaagcttcttgctgccaggcccacacatccccagttgttggtttggccactcttgacctggagccatcttcctagtgggccacccctaatcactattgcttcctaaaggtattttcaccctcttcgcctggtacagccctcacagctcttcagagcaagcactggactacaagggcatggctcacaaaaggttaatggatgggggttacctagccctggctaattccccttccattcccaactctctctctctttttaaagaaaaatgctaagggcagccctgcctgccctccccatcccccgctgtaaatatacactatttttgatagcacacatggggcccccatatctcttggccttggttttgatgttgaaatcctggccttgggagagatgccttccaggcagacacagctgtctggttcaggccaagcccctttgcaatgcaagccctttctggtgttat

SEQ ID NO: 19407 - DNA, 1312 bp, Artificial sequence
  DNA replication origin
cacagagtgccaattggtgtatttacaatcccttagctagacataaaggttacccaagtccctaccagagtagctagatacagagtgtcaattggtgcattcacaaaccctgagctagacacggggggctgattggtgtgtttacaaaccttgagctagatacagagtgcccattggtgtatttacaatcccttagctagacataaaggttctccaagtccccaccagagtagctagatacagagtgtccattggtgcattcacaaaccctgagctagacacagggtgctgattggtgtgtttccaaaccttgagccaaatactgagtgccgattggtgtatttataatcccttagctagacataaaggttctccaagtccccaccagactcaggaggccagctggcttcacccagtcgatcccgcaccgtggccacaggtggagctggctgccagtcccacaccgtgtgcccacactcctcagcctttgtgtgtctggaattggtgggttcttggtctcactgacttcaagaatgaagctgcacaccctggcggtgagtgttacagttcttaaaggcagcgtgtccggagtttgttccttctgatgttcggatgtgtttggagtttcttccttctggtgggttcgtgatctcactggctcaggagtgaagctgtggaccttcgcggtgagtgttacagcccttaaggtggggcgtctggagttgtttgttcctcccggtgggttcgtggtcttgttggcttcaggagtgaagctgcagaccttcgtggtgagtgttacagctcataaaggcagtgtagacccaaagagtgagcagtagcaagatttattgcaaagagcgaaagaacaaagcttccacagcatggaagggaaccccagcaggttgccactgctggctggggcagcctgcttttatttccttatctggccccacccacatcctgctgattggtccattttacagagagctgagtggtctgttttaacagggtgctgattggtgtgtttacaatccctgagctagacacaaaggttctccacgtccccactagattagctagatacagagtgtggacacaaaggttctccaagtacccactagagtagctagatacagagtgtccattggtgcattcacaaaccctgagctagacacagggtgctgattggcgtgtttacaaaccttgagctagatacaccgtgccgattggtgtatttacaatcccttagctagacataaaggttctccaagtccccagcagtcaggagcccagctggcttcacccagtggat

SEQ ID NO: 19408 - DNA, 1412 bp, Artificial sequence
  DNA replication origin
caagcccaggaaacagataaaaaaccccaccagcccgaggggcttttcctacctcggaatcggaggagctgttttgattcgtttctgattcattgactagagacgatttgacatcagctaaatccctctctgccgaggagttttcggagctcttctcctcctgttcgccctcgtctttgaaggaaatcagttcgtcgttggcgcctaggtcatcccctccaccgccgttcagctgcggcatttttttttcacccaccagcagcaattttggaagaaaaatgaaggaggaagaaaagccaaaaaaaatcacccccaaaaagttttgcccccccaaaaaatattgcaagaaaaagacgagtccaaggtgaacttttttctgcttgggggtctttttctcctggggaggggaaaagagggaggaggggaggggaaggggggggagatcttctgcacgcgtgagtttgggtttcttttttctctcgttcccaaggatccgatcaatgtgcaaaaaaataataaataaaaaaggggggtaaaaaaaaaaaaaacaccaacaacaacaagaagtcagatataaagagcaaagggggggggaagccgaagatacaggaggtgctcgtgccgctcggatttgagtgagttgaagttagactgagagcttttcagttcaaaggcggcgctgattgacagatagaaaaagggggatcgaaatccggaggaacggagtagtctgggagcggagattattgacagggcgagaggaacacactgccttaatgagatgccggagggcggggccggcccagtgacgtgtgcataaataaacagccggggtgggcggggcgggggcggctaacaatgatcctttcgggcgccgggagagggaggagggaaagaaggaggaagagaggggcggggaagccggggggagacggagggaggagtgtgcagggggagcggcctgcgcggagtgtgtgcgagcccgggattctgggcgagggtgcagggacttgctccgggagggggcggtttcagaaagacaatgcggggtgggagaggaggagaagggggtggcgaccaagtcaggaatccgagccgaggaaggcggaaggaaagcccacttggggggcggggatggggagaggcccaaaacagtgcactttagaaatattagaaataagtcttaagggagggggaaaaggaagggtagtatttgagaaagtggtggctgggggagggggtgggggggtgcttggtggttaattcagcagtgaaatcagccacccttagacgggatgcgacaaaagtggtcaaaaggaaagatcaaccctccactttcagagagcttggggaagtgaaggggctggtcaaagttcctggtcatctacaatgaaagaaactattaacccatg

SEQ ID NO: 19409 - DNA, 721 bp, Artificial sequence
  DNA replication origin
ccccttaaagagccctccatcttgcctcttggccgctaacatggcggggcggcgaggggacagcggcggccgcgcggagcgggagagagtgaggagaaactttttagaaagtgccccgaggggccgggcgccccgaccgggccggcgcagggccaggccgagccgggcgcggggccggggcgcgcggggcggccggcccggggggcggctccgggcggctgcggggcgcgcggggcgtactcaccttcttccaaactttcccgggatttgtctcggaaactttcggagcgaggcggaggccgtctttccgccttcccagaggggtggaggtggggagggcgaggggcaaacgccacgcagaagggggagaagggggagaaaaagaatcggcgaggtcgaggggggggtagaaaaaaacagggttacaagtttttgcaatggtggcaccgtacgcacacgccgcccgccgggccccgccgccgcccccagccccgatttctcccctttcagcaacatttgccaagcccaggaaacagataaaaaaccccaccagcccgaggggcttttcctacctcggaatcggaggagctgttttgattcgtttctgattcattgactagagacgatttgacatcagctaaatccctctctgccgaggagttttcggagctcttctcctcctgttcgccctcgtctttgaaggaaatcagttcgtcgttgg

SEQ ID NO: 19410 - DNA, 1146 bp, Artificial sequence
  DNA replication origin
gattttctgacctcgtgatacgcccgcctcggccttccaaagtgctgagattacagacgtaagccaccgcgcctggccttgaatttctttacaaagcaaattatcttagcgtctaaatggcttactttacctccaacattttgggaacatgggtattaaaaaaagactagggcagccacattagaaattgtgtcactgctggttaaaaatattcagggattcaggattttcccgtaagttaatcaattataattattcccttacacttgccaggggtcagtctttttttttcaaaccaaggaagcatcctcacctggagagatttgagcgacaaatactgaagtctcaggcccacgggaaagcaagcaaacagaaagagaagatggcgttcttgcctggtatccgaccactaagcatgtactccattcacgcaaggatttggtggttcctaaaagtaaatactgtgtctctgatatgaataaaactacaatttcttctcagatattttacacctcagtgtgattgagtttagttgcttccctgagccagggtgaagaaagacgtgtgtgtgtgtgtgtgtgtgtgtgtgtgtgtgtgtgtgttgtggggtcagggtgaactaggtgcgtgtgtgtgtatgaatccgtgtgtgtggtgggtttcatgaactagaatctgtgtgtttgtgtgtgggtgtgttgggtcggggtgaacttgaatccgtgtgtgtgtgtgttgtggggtcagggtaaactggaatgcgtgtgtgtgtgtgttgtggggtcagggtgaactggaatgcctgtgtatgtcttttgtggggtcagggtgaactggaatgcctgtgtatgtcttttgtggggtcagggtgaacgggaatccgtgtgtgtgtgtgtttggtcagggtgaactggataactggaatccgtgtgtgtgtgtgtgtgttttgtggggtcagggtgaactggaatccgtgtgtccgtgtgtgtgtgtgtgtgtgtgtgtgtgtgtgcgtatgctgtggggttggggtgaactagaatccgtggaagtgctcagtctctcccgtgtttgactgactcccggccgcatacccagtccctgacacacgggggcgcacaacaaatatttcccgaaagatccagg

SEQ ID NO: 19411 - DNA, 1237 bp, Artificial sequence
  DNA replication origin
ccccaccccgctcccactccccaagccaacccccggggcctcgcgtcaggctcctgcagccaatccgggcaaaggcacgcccccgtctggtctgcacccccacctccaactccccgcacccccctcccgttggcaattgagcggctcctgagagtcccgagctgatcgcgtagctagtgcctcccgtgcgcccgcgggttcctgcggacgcaccccttcctgcgcccgctggttcctggtccctgttcccccgcgcccccttccgcgcctggctccccccggggccccgtcccctccctcagcccccactcgctcccgcacccactcctgcgccccgtttgcctcccgcacccgctcctgcgccccgtttgcctcccgcacccgctcctgcgccccgtttgcctccagcactcggctccctcctgcgcccccgctccccccgcatcccctcgacctgcagttccggggttctctgcggaacagagcgctagctcccttgagcggggaggggaccttggtgttcaggaagcgccagagcgcctgggacagcttgtccgccaggcttggaggagtttgccctgcgagcttggttgtgatgtggggcagcctagcagggtgtgtgtaaaacccttcccccgtcaagacgggacccagccagcatgcgtcgtgacagcttgggggattggaggtgggtgttagtggttagaagaaacttcccagcagagcgggttgctggagccaagcgcgcatctgtcaagaatgctctctgggcgctgttcttgcaaggatcctctgttgaacctcgagtgcagtagatgtggaaaggaagcgaaggtttgtgcatctaacagctaacgctgagggccctttggaatcgtacacactcctcagtcctagctaatgaacgtgtgagcatgatgcaaaaatgtatgctcatgatatgaaaggagaggcttagggagacagaaacgttgagatacagagtaaacgataccaccgcgagggggaaaaaacgcgtttaattacattttagacttttcaatgataacacctgtattttgtgttttattactcatgtgattttataatttgagctgggtcaatacaaacaaaaaggtactgtcagtttatgctgacgtaatgaactgcgatttcagattccttggtctgcgtgcttgttttctcctttgcccaagttcccagattctcaaaactctgagattagttttgaagggat

SEQ ID NO: 19412 - DNA, 954 bp, Artificial sequence
  DNA replication origin
atttttgcatcatgctcacacgttcattagctaggactgaggagtgtgtacgattccaaagggccctcagcgttagctgttagatgcacaaaccttcgcttcctttccacatctactgcactcgaggttcaacagaggatccttgcaagaacagcgcccagagagcattcttgacagatgcgcgcttggctccagcaacccgctctgctgggaagtttcttctaaccactaacacccacctccaatcccccaagctgtcacgacgcatgctggctgggtcccgtcttgacgggggaagggttttacacacaccctgctaggctgccccacatcacaaccaagctcgcagggcaaactcctccaagcctggcggacaagctgtcccaggcgctctggcgcttcctgaacaccaaggtcccctccccgctcaagggagctagcgctctgttccgcagagaaccccggaactgcaggtcgaggggatgcggggggagcgggggcgcaggagggagccgagtgctggaggcaaacggggcgcaggagcgggtgcgggaggcaaacggggcgcaggagcgggtgcgggaggcaaacggggcgcaggagtgggtgcgggagcgagtgggggctgagggaggggacggggccccggggggagccaggcgcggaagggggcgcgggggaacagggaccaggaaccagcgggcgcaggaaggggtgcgtccgcaggaacccgcgggcgcacgggaggcactagctacgcgatcagctcgggactctcaggagccgctcaattgccaacgggaggggggtgcggggagttggaggtgggggtgcagaccagacgggggcgtgcctttgcccggattggctgcaggagcctgacgcgaggccccgggggttggcttggggagtgggagcggggtggggtgggtgctgggtgccggagctgcgggc

SEQ ID NO: 19413 - DNA, 1091 bp, Artificial sequence
  DNA replication origin
cgggggtccgggccgggccagacagcccgaggcgcgcggccggtctccgtgggtcgcgtggcgccggcgggcagccctgcgcgcgcagcagagcagtccctggaaggccttgcggaagtcggggctgcggcagtagatgatggggttgaaggccgagttggcgtagcccagccagttgaagaagacgaagaggcggtcgggcaccagctcgcggtggaaggccttcaccacgttggccaggaagaagggcagccagcagagcgtgaagacgcccatgatgatgcccagcgtcttgagcgccttctgctcgcgcagggccacgaggcgcgagggccgccgcttacccgcacgcccgttggccagcggggcggtggcggcggcggcggcggggcgcgggggtccgggcggcggcgcgggcgcggggacgggcgagggcgagggcgagggcggccgcgctgggccgccgaggaaacggcgctcgcagctgtcgatcttcttcacctgcttctgggcctcgcggaacacccgcaggtacacgaaggccatgatgcacaggggcacgtagaaggagactacggacgaggcgatggcgtaggcccggttggtgacgaagtcgcagcacttggggtcgttgtagcagcggcgcgcctcgtcgctctccgcccgccaccagtgcatgaggatgggcaggaaggacaccagggccgagatggcccacacggtgcacacgaggccccgcgcccgcgcgcgcgtcagcaggctctggtagcggaagggcgaggtgatggcgaggtagcggtccagggcaatgacacacagggtctcgatgctggccgtcacgcacagcacgtccactgaggtccacagctcgcagaagaaggagccgtactcccagcggccccacaccacgatggtggccccgaacggcaccaccagcagccccatgaccaggtcggcgctggccagggacatgatgaagaggttggtgagcgtctgcagccgcggcgtcttggcgatggccacgatcaccagcacattgcccgccacgatgagcagcacgatgagcgccatcagcagacccatgcccgctg

SEQ ID NO: 19414 - DNA, 917 bp, Artificial sequence
  DNA replication origin
agaggggagaggagagaggggaggggaaatgaaattggagggtggggataagacactgaggaggccacaggattgctgaacagtgaaccaaccatgatggaagacaataagggatccccagaagggacatttggaaaagccaacatcctctctgcaactgcacctggtaggtgtctagcagcagaagagaggtacactcagatgctttgtaaatgtcaatgtgcagtgacagcacagaggaaacaaagctagaggggcagagcccaggagcggccaggtcacggaagtggggcagatgaaggaacacaagcaggccgggtgcagtggctcatgcctgtaatcccagcactttgggagaccgaggtgggccgatcacctgaggtcaggagttcaagaccagcctggccaacatggtgaaaccccatctctactaaaaatacaaaaattagccgggtgtgctggcgggcgcctatagttccagctacttgggaggctgaggcaggagaactgtttgaacctgaatggcagatgagcatgggggctgctgtggagagaggtgaaggagattcagcagggaggccaggaggaatcacacagtacagggcacctggtctcaaggtttgcaactgccaggaaagtgatgacaagagagacgccaaaagagggtttcagtctgggggagtgacaccaatgacccacgttattggtcaacctactaactcagcactgcctcggctggttccagctctgtctttcccggctccttcccgttcactagtcccccatgcaaactaaactagtctctccccataccatatctttgagcagacagctcctgctcacctaatactccctcctcccctcaatctctactcatggagattctaagtcaatgtgccagcagtcagctccacagc

SEQ ID NO: 19415 - DNA, 2967 bp, Artificial sequence
  DNA replication origin
  misc_feature (1749)..(1749): n is a, c, g, or t
gtaattgtatcacaaagcgaattttttcccccagataagctctaacagtgtggtttttacgtactgggcctagaggctctcccagctggtgatacccaaacaaaacaacacccactttgaatccccagcagcttttccagtagctcagagaactaaaaatactccttctgccctaagtgcaggaagtagcgcatggttccactcttataacgcaactactctgaggtcagaaaaggaatggaaatttttaaaaatgcaaacaatctcaggcaaacgaagtaaaaataacacgcggggacattgattctcccttagtagcattacagtcctggagactggcagcaaacagccaccaccgccacaccctggctggccctgctccccctgcaggccggcggtacctcaagcttggccagctcctcgcccttgtggaggatgcggaaggagtagaggtggtcggggctggggtctgggaccacctcgcagcccaccaggctgaggggttgctgggccaccttgctccggttccggtcctggtagaagtgcaggtgattgtccctgacagagcaccagcgagacttccactggctgttcaccagcacgttcaggtaacctgcaggaggaagtgcagatgcaggaggggacagggctgcaggaggggacgcagatgcaggagggggcggggcttcgggagggcacacagatgcaggagggggcggggctgcgggaggggaagcggatgcggatgcaagaggggactgggctccaggaggggacgcagatgcaggaggggaccgggctgcaggaggggacgcagatgcaggaggggactgggctgcaggaggggactgggctgcaggaggggacgcagatgaaggagggggcggggctgcgggagggcatgcagataaaggagggggcggggctgcgggaggagacgtggatgtgggagggcacgcggatgcaggaggggatgcggacgcaggaggggacggagctgcaggaggggtcgcggatgcaggaggggactgggctgcaggagggagcggggctgcaggagagagcggggctgcaggaggggacggcgctgcagaaggagatgcagatgcaggaggggacgcagatgcaggaggggacgcaggtgcaggaggggacgcagatgcaggaggggacggggctgcaggaggagatgcaggagggggtgcaggtacaggaggggttggggctgcaggaggggacacagatgcaggagggggcgcagatgcaggaggcgacggggctgcagaaggagatgcagatgcaggaggggatgcagatgcaggaggagatgcagatgcaggaggggatgcaggtgcaggaggggacggggctgcaggagggagcggggctggaggggacggggctacaggaggagatgcagatgcaggagggggtgcacgtacaggactggtcggggctgcaggaggggacgcagatgcaggaggcgtcggggctgcaggaggggaggcagatccaggaggggacgcgggtgcaggaggggacgcgggtgcaggagggggcgcaggggcaggaggggacgcgggtgcaggaggggacacaggtgcaggaggggacggggctgcaggaggagatgcagatgcagggggggtgcaggtacaggaggggtcggggctgcaggaggggacgcagatgcaggaggggacgcagatgcaggaggggacacagatgcagaagggggcgcagatgcangaagcgacggggctgcagaaggagatgcagatgcaggaagggatgcagatgcctggagggatgcaggtgcaggaggggacggggctgcaggacgggatggggctgcaggagggagcggggctgcaggaggggatggggctacaggaggagatgcagatgcaggagggggtgcacgtacaggactggtcggggctgcaggaggggacgcagatgcaggaggcgtcggggctgcaggaggggacgcagatccaggaggggacgcgggggcaggaggggacgcgggggcaggaggggatgcgggggcaggagggcatgggtgtctaggtgtgtcctatgctggcactgcctctaggcttccttagagtcccccagattctcagcttcagaacccatcagacaccttccctgtcctaagggattggaagctgccctgagctttggctggctgaaccaggcaatagcgtgaaaatgcacagctaccttcctgcctggcccagtggggatcatgcatatcgccaagccacattaacacaaagtggaagaattagagaccaggactgagatgacacacacacccgtcacaatcctctggaccacagagaactttggatcatgagaggtgggatctcagatcattaagcacccccagtcctgggaaggagagcagctgtattctctctcagccctcccctagccgcaggaagcatacttcactgctgagtagacatccagcaatcacccagccacatctcttaaacagtgactcacagggactgagctcccaggccaaacatcatgccccctgaggccactgcctggcaccctggctggagaagccggagaatgcaaagacacacctcctagcccacccccaccaccctgccagcctcaaaacacaagaaaactcaactgggactcaggaagggaacccagagatgggacaataatggccttcaggcccctggaaggatgacccccaatgtgggacccgcttggggatcaagataccaggcccaccccaagatatttcccaagaaaggcttgtcgctcctcctaacctcagtttccctgagtatgagctaaggctgtagagatgacctctaagagcctacctgcacccataccctctgcaccagtacagggttctcattgtccccttcatagtctcggttgttcccatttcagagtcattgctcctgtccacaagcaccattccag

SEQ ID NO: 19416 - DNA, 1243 bp, Artificial sequence
  DNA replication origin
cctgttgcaggagagagggtgagcccggcaccccactccaccctcagtcccgccgcacaggaaagatgcctggggccgaggaagccccgaagaaggtgggaaccgtgctgagctgctgggggcaaagggtcgggctgttgagtcctttctcccgggcgcccgccgggctaggggcttcctgctcccggcaaagcgcttgggcagtggagtgggcgcgcagaccctccccgggctaggtggggcctccccaaacgtcctgccgttcgggtcatcgtttctctccaagcccttctttgctcccccacaccaagaaaggagggatgcgagggtcgggggccgaatggagtgcccggcaggtggagctcctggaggcgtccggacccgagggcttagctcagtgcgcagctgggcgagctttgggtttggcgggggccaggatctccgccaaaccccggtgggcgggccgtcccgggtgcgccggacgcccagcttagcacccacactcggagcctcggagctggtctacaagtctcgattgcggttcttttgaaaagggagtacagggagttgccccttaagaggaaccctgcgggcgctcccccctcccccatcctcctgcagaccccttccctttggaaaagcctcttgccttctcttttgctggaccggtctccgccaaacctgcgggaggaaatgctgcttctatatttgttttcccctgggagagagtaataaaaagagaacgctcagattcccaggaatctcactcccggagggctctgatccctgaaactgacataaagggacctgttgggaccggcttccctaaagtagtcttgtctttcactttcccattgctttttctcatctgggtagcctggttactggtgaaggcaaaagatccaagtcccagacagagcttcatatattcaggaagggtctttgccgacagcagggagccggcgtgggggacagggttaaaggagttggccacctttgatttctttctgtgaaccctccctggagcttctctcgcatttctaacccggtggttttcttcttctcaaattctactgggatcacgtcagttttgtgcttgaatgactgaatgcgcgcttatgctgtctcagacacttgaggaagccacagtcctgctccttgtaacatggccgtttgcactccctcccctactggggcccctccgcccttcgggagggaccctctctgggaattcaggccttga

SEQ ID NO: 19417 - DNA, 1112 bp, Artificial sequence
  DNA replication origin
tgtcgccccctcttaggcccaggtccgggctgggtgggggcagtgggctctgcttatcccgagtcctggcaagacgagtcctagccctgccctccgcgtcgctgggcgaaagggagtgggtgtgcgccgcgcgaggaacccgcgccctcacctttgtaccgctccatcggggccacggagtgcgctcctcgcggctcggcttctgcgctgctctcccggcgctcggctcagcgcccaggccgccgcgctggcccctccccgtgaggtcacgctcgcggccggacctcctggcggggccgccgcgcccagggtcctcggacctggcccccgccagggctcgcccccagcgcccctgtcccagcgcccctgtcccagcgccggagaactccggcccgccgaggctgacagtcggctcttgagtcggtgcgcgcccgcggccccgctcgccgcccccggccgccttggcactcccttcacgtcttgactccgggggcgtcgagagggaacgagactgggacgttcccaaactctgggggaggctccgggaggccgggcttgggtgggcctccaagattgttcccacacccctgcccgctgcaaacccaatgcctggaggaggagaccgaggtccaagctaggaggttgagactggcttagagctcctcgcgcttggctcccgagccagcgcgcttttgccctaggccttcctggaggggcgaggagggcagcggggcgggcaaccaaacctgctccgggttctttggggattgctcccactctcttggaacctctctgggcagccgctgccaatcgcgcacacttcagggtgtgtgaaaacatctgcttgctgctttctacctgaatttccagggccaacgccacaagtcagggagtgccgtttccggggcgcccagtaaacctgaccgccttggaggggtggcgccggttccataaggaagctcggccatggctctgaatctccaccctgcactgcctccatccagaagtgccacacttccatcctttgccttttgccaccggtccttccaggcccttaatgcgacctagtcttctccgtgctccccccagagatctatgtgttcttttaaact

SEQ ID NO: 19418 - DNA, 1270 bp, Artificial sequence
  DNA replication origin
cggggtcgtggccgggcagaggggctcctcacttcccagtaggggcggcagggcagaggctcccctcacctcccggacggggcggctggccgggcggggggctgacccccccacctccctcccggacggggtggctggccgggcagaggggctcctcacttcccagtaggggcggccgggcagaggcacccctcacctcccggacggggcggctggccgggcggggggctgaccccccacctccctcccggacggggtggctggccgggcggggggctgacccccacacctccctcccggacagggcggctggccgggcagaggggctcctcacttcccagtaggggcggctgggcagaggcgcccctcacctcccggatggggcggctggccgggcggggggctgacccccccatctccctcccggacggggtggctgccgggtggagacgctcctcacttcccagacggggtggctgccgggcggaggggctcctcacttctcagacggggcggctgctgggcagagaggctcctcacttctcagacagggcggttgccaggcggagaggctcctcgcttctcagacagggcggttgccaggcagagggtctcctcacttctcagacggggcggccgggcagagacgctcctcacatcccggacggggcgacagggcagaggcgctccccacatctcagacgatgggcagccgggcagagacgctcctcacttcctagatgggatggcggcagggaagaggcgctcctcacttcctagatgggatggcggctgggcagagacgctcctcactttccagactgggcagccaggcagaggggctcctcacatcccagacgatgggcggccaggcagagacgctcctcacttcccagacggggtggccgccgggcagaggctgcaatctccacactttgggaggccaaggcaggctgctgggaggtggatgttgtagcgagccgagatcacgccactgcactccagcctgggcaccattgagcactgagtgaaggagactccatctgcaatcccggcacctcgggaggcggaggctggcggatcactcgcggttaggagctggagaccagcctggccaaccagatttcttaatgtaatgcctgatgatgatacatggtcagtggtaaatacatttcagtgcccctctgcttttcttgccacctgtaggtggcagtcttatcaaataatttcaagagacctatgacaaatgtgtttaatattgtgctgtaca

SEQ ID NO: 19419 - DNA, 922 bp, Artificial sequence
  DNA replication origin
ccaccccgtctgggaagtgaggagcgtctccacccggcagccaccccgtccgggagggagatgggggggtcagccccccgcccggccagccgccccatccgggaggtgaggggcgcctctgcccagccgcccctactgggaagtgaggagcccctctgcccggccagccgccctgtccgggagggaggtgtgggggtcagccccccgcccggccagccaccccgtccgggagggaggtggggggtcagccccccgcccggccagccgccccgtccgggaggtgaggggtgcctctgcccggccgcccctactgggaagtgaggagcccctctgcccggccagccaccccgtccgggagggaggtgggggggtcagccccccgcccggccagccgccccgtccgggaggtgaggggagcctctgccctgccgcccctactgggaagtgaggagcccctctgcccggccacgaccccgtctgggaggtttacccaacagctcattgagaacgggccatgatgacaatggcagttttgtggaatagaaaggggggaaaggtggggaaaagattgagaaatcggatggttgccgtgtctgtgtagaaagaggtagacatgggagacttttcattttgttctgtactaagaaaaattcttctgccttgggatcctgttgatctgtgaccttacccccaaccctgtgctctctgaaacatgtgctgtgtccactcagggttaaatggattaagggcggtgcaagatgtgctttgttaaacagacacttgaaggcagcatgctcgttaagagtcatcaccactccctaatctcaagtacccagggacacaaacactgcggaaggctgcagggtcctctgcctaggaaaaccagagacctttgttcacttgtttatctgctgaccttccc

SEQ ID NO: 19420 - DNA, 1102 bp, Artificial sequence
  DNA replication origin
acagtcagtatgtgactgagctgtgatctctctcgtcaaagggactacagcgcaccctttgaattaccttcacactcactgacggttttaagagtttggccactttccccacgtctgaaagcgactctaccttagatgtgagaaagatgcggctgactttggctggcagatggagaagaatggaaaagcagcagacagtgttcatgcatggctgacactagaaagaattcttctggatttcacagtcattgaaatgaaaagatgtgatccagaacaggatcttccttttaactggtgtctgcagtgttctctcctctgcttcttcactcatttcaagaagtctctaaggggcagcctgatgtggaaaagatgttaagggaagaagagggcatcctaattctaggtttgataaggacatttttgatactggtaaaaccctgaaattatggaaattatgatttgttctgtatgccaacgagaatcgtggttttccttttgctcttttccttgcgaaggagccaactccttctggatctttgtttttattttttcctccttaagtcactgctgaggtatttttaaaccaagccaacacgtatattttattcaccgaaggaagaacaaagcatctgctaatagaagcagtgaaaaaagcacagcagtcagaggcctcgtgtctaaagctcagttcattactcctaacctgccattggccaatatttcaacctttctgagttgctctttctcatctgcaaaatggggttaatggaggatttcatctgcaagtggggataagagacatgaaaagaactgacgcgaaataaacacgagttgaatcctaacaataatattttgactatgtagttacaacaaacttttctttcttctttttttttttttctgtgagaagtgcctttggtggattttgaattctttttcatactgcctgttctttggtgggactccagcaacattgctgtaactcgaggatatatggctgcaatgtgtgtttggcttcctttctcaagggggtcaaataaaaaggcaactgtttagagaaggcaccaaagtacaaaacaaaaatctcagaatatgccagcca

SEQ ID NO: 19421 - DNA, 1490 bp, Artificial sequence
  DNA replication origin
aacttggaagagaaaagtttttcccgagtagcttctgggcactctccgcccggcggaccgctgaccatggctggcctgccccgcgcccagcgcgcgcccggtgcccagtccgccgccgcacttctcctcggaaagcgcctgagtttcagccgggcggagcgggtggctggagccgggggtggcccgggagcccgggtcgttgctcaggccaggatgccccggggcggagggccgacgtgcgcggtgggcagcgcaggctctggagcaaacccttgaagcccgcgggctgagcctgcgccactcttccttgcgggcccgggaggaggagagaggagctggaattccagggggcgggaaaatggactcccggatggtcgagaggtggacccgctcccagagcagggcgcccccgaaggctggtcaagcatccctgacccgggcgcgcgccctcgcccggagcaggggcggccggggtccccgcccgccgcactcaggctccctcccctctgccccgcagacttgctcctgtcggccgaagtgagcggcggagaccgcctggattgcgtgaaagccagtgatcagtgcctgaaggagcagagctgcagcaccaagtaccgcacgctaaggcagtgcgtggcgggcaaggagaccaacttcagcctggcatccggcctggaggccaaggatgagtgccgcagcgccatggaggccctgaagcagaagtcgctctacaactgccgctgcaagcggggtatgaagaaggagaagaactgcctgcgcatttactggagcatgtaccagagcctgcagggtacgcgtggaacctccccaccccaccccgtgtccctccccgaaggcaggcgggcctttcgtccctgggccagctgatctcatcctccactcacttctccccagctgcagagtgaggacctttccttggcccccagggacaacggcagctggtgtttgctgggctgaccagcattgttgggcctgttgttggaaaacccatgaggaggacgggggctggggggagggccacccccgggaccccgctgacctctctgaaacctggtcggagcatgggaggaggatcccactaaagggccccaaggaacccacaacttctttccaaggagagccagcctggggctttcgctggcctctcaataataataggaaggcttgccctgcatctggtctggactccccctgtcttgttccctttaacctgctctgatgtaagatgaagtattgtaaaaggtccaggagaatccagtgtatcttcaccctccccacctaacgtgatcaaaggcagatgtgtgaaaatccatttgtcatcttagattagctgagtcttgaaccagctggtgtggttcaaccttggttatcacagaagtagctcagggagagaaagatccactggtcacaaccatccagtccaatgggagtgttttggtcctcataagccagagggggctcatgtttgt

SEQ ID NO: 19422 - DNA, 1766 bp, Artificial sequence
  DNA replication origin
tcggaaatcgtcctggcccaactcggcccttcgagctctcgaagattaccgcatctatttttttttcttttttttcttttcctagcgcagataaagtgagcccggaaagggaaggagggggcggggacaccattgccctgaaagaataaataagtaaataaacaaactggctcctcgccgcagctggacgcggtcggttgagtccaggttggtggcatttggagtttttttcgttctgtttgggaacccattgccgcttcccgtccctcttccccactccttcttcccccctcctccggccacccctttctttttgctggcgtctcccaactttagggcccggggggcgctcgtggcgccgggctgcacctgccggggcacgccgggactgcgggccggcgcgctcgccctgggctggggtgcggaagcgcccgagtcctgggcaccgggcgagagtgtgagaggagcggacgcccaggagggagccgaggacgcgcggcgggtagggggtaggggcgcaggaaccgggtttcagccccagtcgggacatcggttccccctggcttggcggcctctggagggagacgagtcccggggagaaggagggcggcgactggggctagggattggcgatcggagtggggagggccggcggctgagcgagctcgctggctgacgcgaggagggggaggccaacttcccgggagaaggggctctttcggcgccagggctggctagggagctgccgccgccgccaccgagggctcggactccaggcagctgcaggctccgctcgcgacgctcggaaagtaccgtttatttatttatttgcttgcgttcagcgtctcgggttgaacccaacagacacccccttggactttaggaaccctcttcagacctctccagccctcacctccatccccgtgtcagcggcccctggaaaacacgcacatgcaccccgacctgggtgggggtgggtcctcaccccggtgttggaaattccccaaaggcgggaacgggggaggggagagggttctgtggggggagtctccggcgctctccgctctcatctcaaagcgcgccctcccttccaggttgggtcggacctgaacccctaaaagcggaaccgcctcccgccctcgccatcccggagctgagtcgccggcggcggtggctgctgccagacccggagtttcctctttcactggatggagctgaactttgggcggccagagcagcacagctgtccggggatcgctgcacgctgagctccctcggcaagacccagcggcggctcgggatttttttgggggggcggggaccagccccgcgccggcaccatgttcctggcgaccctgtacttcgcgctgccgctcttgggtaagtcgaggcccgccgcgggctttcttaccctctgagtctttcctagggtcgcttgcagcagcccaccccgccctccgcaccaaaattggggcgcgggtgtggtggatgtggaaggaagaagtgtctttttggggaatgggatcgcgaatccccgggttagggaggcggtggcggcgcggcgctgcctgaagcttttcgggcttggttttgatttcctgtggtttttaatgacccaacttggcgggggactaagaagccctccagcccagggccctgcacccccagagagtctctgggagctcgcggagccgcggcgggcaggtggagttggggagcattggggccgggagagcaaacttggaagagaaaagtttttcccgagt

SEQ ID NO: 19423 - DNA, 914 bp, Artificial sequence
  DNA replication origin
tttcatattggatgaaagagcctaaacgctcactgatttgggagaggtctgataaagaaaaaggagcattaaccttgactatgcctttagcttcagccacctttttaagagtaaattgctgggcaggtgggggagggctagtcgcagaacaaaactgtaagccggacccggtgtgaggaggggaggtgataaaggattatagggtggaggagcggaggctgaagaagaattgggacctaccttggcctggcgaggagcagcctggggaggaggggagaggtcagatgggtctgtagaaaaggaagattagaaagactcagcgatgcttggggttgggactgaggggacaggtgggagggaaagaaggaagatttgggatgagttgcattgggaacagagactagagagggactgatgtgtaaaagaatgcctggacgtcaggcacctcagaccatttgcccattttatgacaagaattatttagatcttgtaggatggaaaaattgaaagtgccatattctggctatttggaactactgtcgagtttgcattgggatcaagtggcattgcagaagaaaataagttgcttagattttaggtcaggtgagagttgaagaggttttaagttcttaagaacacaggctaagggagaagaaggaggaatggagggtagaaggtggcccatagtgaaggaaggaagcccagagaaaagagagagtagagacatggagggaaggggttcgggggttcttaccctccagaaaagcgggaaaggggtcggggcatagagatacaaggttggggcacagaaataagggatcggggcacagagatataaggggttggggcacggaaataagggatcagcatgcagagatataaggggttggggtacgtgcccctcccctagaaaa

SEQ ID NO: 19424 - DNA, 1123 bp, Artificial sequence
  DNA replication origin
ccctggggggagtggtgacttgggacaccgcggggcagaaacgcctcctgaaagaacgcccgctcctcccaggtctctatgggttgggcccatggggacgccagactggcgggtggggggggaggaggctcctcggggccccagccgattggctgacggaaaagcccgtttcagcagggcccgcctgggccccgcctccgcgccgctctgtgcttaggtggccgcgaggccgcctcgacccaggggagcaggaaggaagcccgggagcgccctgcacctgtgcctgcctctgcgcacctccccaagagccagggccaacgaggggtcccctcaccctcaaatctacctcctcagagaggctggtcctcccgggcctgccgcgatccctcggggtggtctcggtgagtcagggagggtccttgaaataggggtccggggcccggccctccgacctgacggggacagcgagtcactcagtgagtttgaacagctacctgctcctctgggcctcagtttcctccctgtgaagtgagggacggggctaaaggctggtatccctgagctgaggctccggagttcagtccatcgccaccagctcaggcacggagaagacagtcgacctacgcacaggagccagggaaaccgtgtgacccaaagttaacggggagaaacccaggtatggggacgtgctcgggacatttgcaaacgttccattcccaaatgtatccccgggaggcggccgcggcaggagatagacccagagcatacagatgcaccagtggattttattagtgtgaacgcagcagcctcgtcgccccgggagcttagcagggcgtgagggtgagcagcgtgtcttcccgcactgtgtcttcgctacagaagttgtacctggggagaaaaggaagctttgtaagagtttgggtcaccttagcaaaagccaggtgttttgttttgttttggtttggtttggtttggtttggtttttcttaaggggttaagcccaggtcacagttgatgagtgattcaggaggcacgagggggcactagggctggagctgcaaccagcgcctacagcgcttgctgcctggaggctctaggacaaggtctgctatggttctggagt

SEQ ID NO: 19425 - DNA, 1139 bp, Artificial sequence
  DNA replication origin
ggcagtcctggtgccaacttctttttctcttttttcttttttttttgagacggagtttcgctctgtcgcccaggctggagtgcagtggcgcgattctcggctccctccaagctccgcctcccgggtccacgccattctcctgcctcagcctcccgagtagctgggactacaggcgcccgccaccactcccggctaagtttttttgtatttttagtagagacggggtttcaccgcgttagctaggatggtctcgatctcttgacttcgtgatccgcatgcctcggcctcccaaagtgctgggattacaggcgtgagccaccgcgcccggccaccgacttctgtttctaacctgcgtggccacgtcaagctatcattgaacttaagacttgaatgcgagtgggcttcgattatccctccaaagcagggtcgtggcgaggatcaaaggagcgaccttaggaggggccttacaggacagggtgcaaggcgagtgctcggtaaaccgcggtgatgacgagggtgataaagacggcggcggccagggacacccaccccttgggtggtggcaccaagtgggagacagccaaaccctctggttctctgtcagtttcagcagcatccgcagtgagcccacaccccaggcaaagaactcaatcaatggaacgtagattcgccaaacatttatcaaataccagctctgtacccacccctgtgccaggcattggcaggagaggaaatcagaagacatgctgccctcaggcagtgcttggtgttagggaggctgcccctgaaaaagcactgtgatgctgcctactaggtacaaaaagcaaggtaggtcccaggccagggaatttcagaaggaaggagcaagacaagaaggctccacagagatggtggttacaggaccaggcttgaaggaagatgtcctaccaagaccgcagcctgggaggccagctaggaggaggcggcatctgccaatacccagaattgataaggaccatctgagggtagtgactggaaccaaggtataagggagggggtgtggctggttggccatgggtgagagccctactccctggtcaaggacagtctgtctcaccatgcttcccagactgacagctatgggtgtgatgacttgggaa

SEQ ID NO: 19426 - DNA, 787 bp, Artificial sequence
  DNA replication origin
aagaagtttaactgggaataaagctagaacttgaggggacacaaagataaatgagatatgaaccctgtcctgaaagggaggagctctaatagggaagcaatactgatggcgttgaattcattccaggaagagggtgcacccttggaggtggactctaggaggcttaagcaatgtttgccccaggggaaaggtagctggttaaatgaaggggctcgaatgcaagacacctgggctctcttaagtggagagcaggaaagtgttggaaggtgtgagttggtgaggttgaggggaggtggtggtggcagtggcaatgctgtgcttccacaggcagtcctgtgtttttgggactcgagtacagggggctgaaaagcagaaaagcctgagaaggctgggggcagggaagtgagagtgaggcttgaggcttgaggcttggccctgatagggcttcttgcaactcgggaagaccaggaagctgggcaagaaggaaggccctaggaggagagagatgaggagagagcctggcgtgagccttggggaatgtccacatttggggcaggaggaggctgcaggtcagcaaaggagatgaagaggggttgtatggccggaggagcagtcgcacccaccccggtctctgccgtcaggagcctggccttaattcatggccaggatggaaggagaggccaagagtgggctggcggggttgagaagacaagggggaagagtcacaaggcagaagaaagcccccacagggacccaaggagaccatgtctcctacagcaggacttgg

SEQ ID NO: 19427 - DNA, 1507 bp, Artificial sequence
  DNA replication origin
ttaaaccagctaatcactggcacggaaccagacaccattgaggcttcaaacttccaactggaccgcaagacacgcttcatcatccatggcttcttagacaaggcggaggacagctggccatcggacatgtgcaaggtagggccctaccacttggccactccctggtgagaccagcacccaacacacagattcaaacactgtacccccagtttcccttagactgggaaaagaaatacttcagagagagatgggtcctttttaaaaccaccgaggaaagcccagttccaaagggcatccattaccaagctctctctacctaccaatttctagccaacaatctcctatgaggctgaagacacccagagttcagtcaaaaagtctcgaggtggagactgcagcaaactgctgggcatttatccctgaggacttatgtaaaacccctttgtgatgttaaaaacacttaaattttaccctctaaagcaccgctatccaatagaatgttctgcagtgatgaaggtgttctatatatgcactgtccaaatcagaagccactggccacataagttattcagcacttgaaatgtggctggtgcaaacgaggagctgaatttgacatgttattgagtagtagtagtctgctcacacctgatttagtaagtggtctttttaacctggttgtgttcctaacgatgtgtgagacctcagacacgtcactcacccattccagggttcagtttccatatctgttaagcgggtactagcatgtccagtccatagcactgcagtgagggtgacgttatggcaggtataagaacatcaaagctctggcatgggctaggtgtttgacagacgtgaatgcctatctctggggtgtgcacctgggggctgtttataaattgatttctctcccttgtttgtcttccccagaaaatgtttgaagtggagaaggtgaactgcatctgtgtggactggaggcacgggtcccgggcaatgtacacccaagccgtgcaaaacattcgggttgttggggcggagacagctttcttaatacaagcactgtcggtaaaaccctgcctgggccctgtcctgtgggtaggggtcagagaggggcagggaggtaccacgtggcatggagaggcagcctggggacccgtgggcatgggtaggggccggcagctagtagcccagattgcaatcaagaagggcaattcccaagatgaagctctgcaaccttcctctttgcctgctgtcctgaagacaccttgccctatcactgtctagctgtggggcctgaggcaaactaagccttggtttccccttttgaaatagaccttccttgcaggctgttctgcaagggtcagagagcaggctgggctgccccgcagctcccagtgcagaagatgagttttcatccttcgccagcccacgagggaaggccctggacctttctgcaggatctatcgggagggggcggggggagccagagatagggcccactctacccgtg

SEQ ID NO: 19428 - DNA, 833 bp, Artificial sequence
  DNA replication origin
cgctcacctgggcggggctggcgctatccggtgcccacttggcctctgcccggccgcccaggatccctgccttccaccaggcctttgtgcgctcacccggtggagcacaaaggccccaccaccgccagcctgcccctcccccacccttcccgcggtcccacctggaaggtgggcgcttcccccagcgcccggcacagcccggaccccggtgtaaagtcgggcatctgcgcagtaaacatctggcctcggagctgtcctccgcgccttggctgccccagccaggggaaggatatgcggagggctctaagtcaaagcgggcgtttttgcgggtgtagacactgcggcgcctgggtctgcaggtctggccggggaagcgggtgggcgggaacagggggcggggccggcagtgggcgggaggaggcgaggcctgggggccctggcgcctccaatacaggagcttcctgggcctggcagcccctccctccctgtctcctgttaggaggggcagattttcaggtggccgggacaggtgaaggcagagaggagtggctgtccacctggggaaggtgagtcatccttctttctaatcactcttggagggacacccagacttcctctcattgaattgaaacccaccaagatgtccgccctatgaaccagcatgtgctggctgctccctttacagaaaatgacgctgaagctgcgctacttccaggacacgcttgtttgctgcacctcccggccttccctacctctacttttctgaaaattgaactgcaaatgaaggctggtggagccgaccaccatttatacctctcttttatcaccccatt

SEQ ID NO: 19429 - DNA, 876 bp, Artificial sequence
  DNA replication origin
gagagaccccagtaatcccgagagcctgcagggtggaggtcggtggtgtggaggcagttgactcagattctgcaggtttgtctgcagggagagagggaggctctgagactgagagccacagggtcatttggggagcaagaaggaggatctgacaaccaagaagaaagagggcccgtgggctgggaaggagtgggttctgggcaaacagtattccaccagtaaggggacaaggggacaggggaggcctggcagcaaggtcactgtggggtgggggttgaggcatgggagagggaagggaggggactgggtggtgttcgggaaggtgaccacagtcagagacaagcgttgtgaagcctgcttggaactggagaaggggtcagcccctttgttccaggcggcaaaagggcagaaggggaggggcacaacgaggtggacccaggtctgctggaagagcaaaggttgcagagggacaggctcagcgcctggtggcccaggaggccacgtgaggatgtgtctgtgggcaccgaggcaggtgaaggagcagagagtgcagagcgcacaggggctcctgagttaggaggaggagccgtaggggctcgggggcaaaatttaggactcagaaagcccaggatgttggtgcgtttcaaatttgccaacaggaaaggagtgagcagcccatctcagaaggggagggaggaggtggagggaacggccccagaaggtcaagtggccatgtgggtggttgtttgtgaattcctcagctcagccagagagactccagggaacttgctggcacctttctttcaaaggtagctcctcccagcagggaatatgccgtgaataaattccaggagaaaaagctgtttgatgtatagg

SEQ ID NO: 19430 - DNA, 1434 bp, Artificial sequence
  DNA replication origin
caaggaggccggcggcagcgacgggccccgaggtgagcgcaggctgcgggtcctgcggccgcggctggcggggcagggagggaggaggcgcgcttggcccaacgctccgcaccccctcgcgcgccgtggaaaagtggggacgcccgcgctgcatccagttctggcgggcggggccggggtcagcagcagcggggccgggggccggggtccggtggaccggagacggcccgcgggtcacatgttctgcgccccgccagggtgcggactccgcggcggggactgcagcccccgctgaggcgcctggttggtccctgcctcgggtggcgcctcctgcggggctggtcgcgcgtgcgggtgaggaccgccccgcgtgtgcagcccccgcgcgatgggctgcggaggccggcgctggctgggtaaagggcccgccgccgggtggccgggtggccccagcgggtaattttcgtgactcagcgaggcaggagtgggagcctgggggaaatcggagatttggacctgttccctcgccccatcccaccccggccggacgctcgagccaggagtgggggctgcagctgcggccgaagggcttctcacccacctccccgcccatccccagggactcactgggctggggaagggtgaagcggcgggggttcgatggtcccttccttgcggggggcagggggaggcacccagtgcggaggacagacgctcgcattttgcagatgtgctagggccgctttctttggggagcgtgattagggctccgaagggtgggggagccggagaggacggggaagggggttgcgggaagaggacgagcaggtttcggagcccagggctgtaaatcaaggcttctcccacggagggcccggctggccaggattccagtcttcctgtgggtcccaagtggggaaagttgggcgcatggaggcgccgcgcgtccctgacctgcagggcctcggcgagagcggccgccggggagaggagcgcggcccaggcatctttcccgggagcgacaggcaagccgcctgcgaggatgatattaaaatgccgggacgcaagggagattcagccacgaaacgagcgcttggctctgcggggccccaaaagctggagaaactgagtccagtggcagcacagccaccatctgcgctgggttccctgtcttgctgtcgggcctgcggcccccaccctctgctgcactccaagccgcacctgcccccaccccagcccattgttcctgcggatcagggaggtgcctccccacgcggcactgcagtggtgggggagtgcagggtggcgggtgggggatcctgacagggctcactccagggagaggcagcggagagcccaggccgtccccaaacacacacccagtccccgcctgtactcttcctcagctggtgaacgcaggcaatggactggcag

SEQ ID NO: 19431 - DNA, 1719 bp, Artificial sequence
  DNA replication origin
ccagggaggaaggtgggaacccttccttgatgtggcgtgctgagccttgaaccccagccttgctgctgatggccagaggatgcctgaacaggtgcctcagcctttgaatgcttccttttcctctcctgcaaaaccgcaagggccaccatgagaactaggtgagaccacaacagcccctcgctggcgggctggatggtgtgctcagcagggcgcgttgtaattagtgtgatgagcatgaaggccgtgagggcaaatcccaggcagagtgtgcgctgcctttcatgctcccctgcaaatcaaaagtgttctgctctctgcccccagcactggggcctgcatgtcacctcccatccttctcacgcaccctcatgtcactgtggctgggagtcccatgagggcacgtggcgcccaaggcccttccacagcaggaggcagatgtgcaggggctacgggtttctgctgcttctgacaggctgtcaaggccaatgtcctgatgccctggtctgatggggaggaacgagtgccttgaggacactgaggagggcccccctggccagcatgggtatgcaggggagccttcctggagttgggcagtccatgatgagaaggagaagttcttaggttgctggtggtggtgaaatgagaggacgggtgatccaggcatcaagcacattttcatgtctttgaaataccagcataagagaagcaggggtgggtgagagggattgaagaatcagagcggctgtagctggagctggagtagggtggggacagaccagatcacaaagcatggactgaaggggtgagacaggagggcgggggagctgtgggcaggctgtcgcaggcacgtaggcaggaagggccctcgggggccatcagtgacttaatgatttttaccatgtgctagatcccaagctaagcatgttacatgcatagtctatctaatcttcagttttatgaagtgggttctcctgttatacccatttcgcagatgagaatattgaggctcagataggttaaataacttgactgtggtttcatgcacagccaggaactgtccatttgggatttttaatgcaggcagacagaagacaagttttgtgttttgaacttgtcactctgccatcaccttctggtctccaggctctcgcagcagctctctgcccattccgtcatccataacgctctcgcagcagctctctgcccactccgtcatccagaacgggattgtacgatgaagcctcccctaggtgatctttgggaaatgccacccatctctggaagtgagggatgctggtggttacagctgggtgggaatcccagctccgcgactcacctgctgggtgtgatattgtaaccctgccgatcctcagcttccttatctgcaaaatgttagttatggggaggaaaggagatagaggtaaagcaccaggcaggtagcacagtgccaggcacccggaaacgacccagtgacggtgctcctcggattcctattactgccctcgtttgccaaggcagggtggtgacaccgcggacccagggggtgcctggccaggcccaaacaggtgccagcggcgcgtgtgtgtggaggagctggggacagggagtatgaatcattcacaactgaagccttgcattattaatatcgttattctcagacttctaaggagggcccagctggatcccatatatggaaggcgcgactcagcctccggggca

SEQ ID NO: 19432 - DNA, 962 bp, Artificial sequence
  DNA replication origin
ctgagcccaggctaggggcaaggcggagttgttctgcgcagcctgtttccccaccaaattaccaaaaatatagttaaacttaggaattcagtttgatccataacataaacagtctattttaagaagtatttaccactgtgtctcagcccctgggagccctgccttccatgcaaccccactgctgagatttgctgagagtctcttctgcagaacccgctccatctcctgcgtaattacccgagaggctccacgtggggcttctctggcgctaacctcataggtgaacctcatgaagctacaaagattcccagtgcacaggtgggcgttagatcagcaaaggcctcatgacgggtgcaggagtcgggatgtctcccagggccacaaagagatgtaagcaggggaggatgctagaccactcaggcagagtctgagtaggccatggggtgggcctgcagtctaaggtgaggggagggggggaaataggaggaatcttgcggtattagggcagtggggcaggagggctcagcggggaaaggcagagtcaagtgggtgcctggcttctggctgggataaccggtggatggctgagaccattccctgggagggagggggtgacagcagatgccagtgctcagagggcaggtggatatttggggtagtgtgtgtgtgtctgtccgagaggaagagagagggatcatgaacagcagcatgcggtgggcagcagagcccgagtgtgcgttcccccaaggctggggagtgagctgggctttatgagtgggcacctgctgacccctgcattgaggtggaggcttagagggagaaccagggaggcaggcggggatctgggtgggggacagccgtcctggggctggggtcaggcaagaacatttctgtcacaatgccctgatgccatgctctgctggtggccaggactgctctcagctcccacatcttgatctctg

SEQ ID NO: 19433 - DNA, 1180 bp, Artificial sequence
  DNA replication origin
cttccaactgccctggccccagcgccctggggccgtccccgcccacgggccgcggctgcccacacctggcgcccgcgtgctgcctaccttgctccttcagactggtaatgagctgcagctgcttctcttcgtccgagctgttcattttggcgggtggggccgggaataaaagggaaagagggagcggcgcggggcacacaggaggagggggaagaaaaagcaagatgccggtggcttgcggctccactacccggaagttggatccgctcccgctcctcctcctcctggcgcggagcgcgcgagtgagatcatccccacgcacctactcggcggctgcggccgcttcacctgcaggcggggcggggcgggcccagcagtcccgttcagggggtggaggaacgagggcgggtcggcagccgctatgccagcctgtggctgccggcgcggcaggacgcgctggtgggagggggggcggccctgcgtggggtcgctccgcacccttttctccgcctccacctcccggactcagggacgcgagttcagagaaaaccggctgtgggttcgcagcgtgtgtgggaactccactttggacgcttcccgggggtcgctcccaaagaaccacagaggtagagcgggacgcaatgagccatgaacgcctgggcttcttccctagttttcccgcagtagactctgggggcgcggttgcaaaacctagctgcccacaggggcgggcccagggtggtacattttgcaccttgaagaggagacaaggatcgaatcaggccgcccagctacttaaatgaccatgccgtgagtgaaggagggccctggctagctttcccccatcgcaccaggtttgccaggtggtcagaacgtggaccctgctgcacgtggatggtggggcctggagggcccttgcagatcatctggttggtggcgggatgaccttccctttagagagggtgccactgcagtccgaatgccgaaggtcacgcagcccccgggcagcagaggctggcagttaagccaagcgtttgtcccagttcactgccctctgaactatttgaactcatgtctgtgttagaccatgcccaggagagaagtggcaggtctgcattgtttcaaaggtgcttctccccaacccctagttgcgagctaacctttggtcaagtctcctgca

SEQ ID NO: 19434 - DNA, 1885 bp, Artificial sequence
  DNA replication origin
gttgcttggtgaagtggcagcagaaatggagaggagaaatggtttcaaggcattttgcttaaataaaaccaacagatcttactgtctgactagaggtgcccggtggtagcattgatatcaagatcgggtccgagtggaattttgaaaccattttccttgtatcagagagggaatttgatcagagagcctgaagccaataagggtttagtgggggtactggaggccgagttggctccaaagctggggagatacctgtgaattggggcagaggcctcagcccggaaggcaggagggcccaagggcgggaaaggcgtggagcctgcgccatgtgagccatttggcatgcacaatggggcatgcgtgctaggaggcgaggcgaggggcatgcgtgctaggaggcgaggcgaggggcatgcgtgctaggaggcgaggcgaggggcatgcgtgctaggaggcgaggcgaggggcatgcgtgctaggaggcgaggcgaggggcatgcgtgctaggaggcgaggcgaggggcatgcgtgctaggaggcgaggcgaggggcatgcgtgctaggaggcgaggcgaggggcatgcgtgctaggaggcgaggcgaggggcatgcgtgctaggaggcgaggcgaggggcatgcgtgctaggaggcgaggcgaggggcatgcgtgctaggaggcgaggcgagggccaggtgctagggctagaaaggaggcagggctggcgctctagggactcctggagctctcctcctgtgagcctggacccggcacctcacgcagcccatctcccacagcttccgtcgacggaggccggggcctcaccaggaaagtggtaagttaggcctgctttgacggttttagcggcagggccccgacccacgctgagtccggctcccgtgctctcttgccagcacgggcagaaatagggactgaaaataccttcctgggtccggcccttaagacgccagctgtgacccaaggcagtggagcggcgggaagtgacgtcaagcggcggcagcgccccctgaaaggcccctgccagcacctagcgctccgccctccagacccacgcccttgacccccggcttcttgcactgagggaagcagcggcatgggggctgaggggcttgctaagggtgcacaggacggacggagtgccaggtttttgttttggtttccttcccttgcgtctcatgggttagataagactgccatgtgttagatcggtggccagaaagtcaggtcatcagcccattttactgagggtctggcttagtcccttcccgggaagagctaaaggcaaattcagttttctgtcctagttgtcagctgatgcgagggaaagtaagcacagtggagtgggagcattattggcagggatgggcagacagcctgtagaattctgagatgatcaagaaggtatttgggttcttaaccagggcatcccagggagaaacggaggggagagaaaaagaaaaggaaatgatgtgaaggaggtgggggtctcacatcgagtagaggtgtaagataaggcttgcaaagtggcctggtcaaggaagggcctgaagaccaaactaaagatctctattctgtaggtgaaggggaggttttgggcagggtaacgatgggaggaaagcccagttacaagatgagatgggtgccgacaggtgagaaaggttagtaaacagattggtgtcgaggtctgggattaagctgcaggtggggaggatagaaagtaggtaggtgtctcatcagtgatgggatgagaaacaagttagttaacacattaatgccaacatttgtttctagacatcaccattattttcgttttaagatcctctttccctgagctgcctatgaccgtctctgttcagagaccagtg

SEQ ID NO: 19435 - DNA, 1075 bp, Artificial sequence
  DNA replication origin
tactccccctgcctttagacttggtatcacagccattagtaagcacagcatctctaccaaaatgctaaattattattttaatgacttggcagacagctctcagctgtctgttcattggagactgcctcatctgaagagagccactgtactcaagtggtttccaatgactttccagggtggtttccaatgactggtagacctggggataagcctggttcttgcaccccaactttggatatatttgaagactcatcccatcttctaaactcttagaaggaatggctgaggcctctgttgggatccctatgcagtttgacttctgtccagtactgcttccttcctttcccttctacattgttgagcttgaagcactccttagtaaacctcctacatgctaatttcctcagttcttgagtcaaccaatttcaatggaaaggtatgagaaggagaatgctaagagctgggaatggagaggaagcagtgaggatggctgagtgcaagtagtgggagaagaggcaggaatgcaggcagcacctggaataccacgttgataacacttggattttgccatcagggcgatgaggagccactgaaaagttctcccaaggagatcatggaatcattgtagttctcattttacaaggtctctctggcaatctgggggagaatcccagaagaggtggcatgggaacaggagtgcacggattctgaggcagatgccagttagtgagtacacttccataggaacaggagagcaagagaggatgatggtgatgcgatgatggtgggggtaggggatgggggtgagggttgcttggtgaagtggcagcagaaatggagaggagaaatggtttcaaggcattttgcttaaataaaaccaacagatcttactgtctgactagaggtgcccggtggtagcattgatatcaagatcgggtccgagtggaattttgaaaccattttccttgtatcagagagggaatttgatcagagagcctgaagccaataagggtttagtgggggtactggaggccgagttggctccaaagctggggagatacctgtgaattggggc

SEQ ID NO: 19436 - DNA, 941 bp, Artificial sequence
  DNA replication origin
gggcattctgtatcctgaattttcttacaccttccaaatttcatcattggaagtatttaaaaactggttccacttcatctggttttacgtagcaattgcttttattgctgattagatcaaatttatcagtgtcgttgcctactacgacgtttgttactgtttcctggggtcgggggtggttgtgattggagttgccctaaaggggagaaaaaccgcaggatttgcccgccaggaagctgtgttgtgtaccgactatcccgagaggtccgcaaagcggggcccaggggctcccacaagccctggtttccctggcaagaggaaggaacgtcctccttttttggtctaaagaaacctggaagcccctggggtctgcgcgcagttttcctctttcaaatattcctaggaatagtcggcagcggcagcagccgcagcagccgcggatctagagcaaacgtcctgtgctttggagttagaaccagtcttttccctcctgggctgggcacggggtcagggcatcaggttgactaactcgggcatttttcccaattctttggatcgctcctggattcagaaggaagttgggggttggggaggaatctcagaggaaaggtagtagaaaaaaaaaatagcccgaatgagatgaaattggtagcagagtctagtgggaaaggagagctgtcagaggcctggtgggagccaggagcccagcgcaggagctctgggcacctaatgcgcgtgagtccataaatatcaccacaatagatactataaatataaatacagggaaacacttaaaatcagtccagcgcttttttctcggccccttctttattgttggtccgggagtaaggctcgaaggccgaggagctcagatatcgggcggagagttcttgcaaattcccagctagcgaaccagccattgttaacggggcggaggacag

SEQ ID NO: 19437 - DNA, 2652 bp, Artificial sequence
  DNA replication origin
gcccagggccggcaagctgggcccgcgcagcgctgagccgagagcgcccgtggcgcaaggcggcagcagcgcaggcaggccgggcggcgacaacaggcggccctgctccagcagccgtagcacgctgcacgtggccgcggtctccgacaccaccgagcgtagctccgagtccttgccctggtccttcttctgcttggtgcgccggttctggaaccagaccttcacctgcgcgccggggtgcggggagagttggagagaggggcagggaagaccagcgtcaaaggaagcgagctcccggggcgcgcggctccggggctctccccaagtcccagccctatccgcagccccacccagcagccggaggggtccgggccggggcgctgctgggggagctggcgccgccacgagggggacacagctgctccaccgggctgcgcttccgggtcagggaagcaggcccaggcaggcgccgcttacacagaacaaagtaataaaatgcccacggcaggaactcgaaggaagaccggaaagggtttcactggcttccgcgctaccccgcagcggtgtttggggctcacagatgtgtgaatcagtgcagtcccaaagccggaatttccggtggagggtgtgaggccctagggtgcgggtgcggtgaaggaagagggaagaaggaagagggaagtgggaagagaggcggggagggagtattgcccagcctttctggacccaggcccctggcccaatgcgctcggatttagtcctagaagcactactcctggtgaaggctacaaaggaccatttcctgcttaagacgtgaccattagctagcagcaagcagggaaagtggctgcaggagaataatatgtgcgggagactttatgtagaccgagatttctgcacctcttctcaccagatagctgcattgaagggtctggtgatactcttagtttatctctccactggtctgagtcatgaacttggaatcatgggagaaagtcaggaggctgaggtggattgaatattccccactaacctcccctctcattcttctgcccctctgcaggcctagcagtggcccagaagagttttgcagcaataggcaaagactatcctatctagattttataaactaagaggagtagtagcagagagaatagaaaaagctaccataccaactcaaactcaaaaagaacacccctatctgttctgtcagtcctcagctttcagcccagatcccggacctaaaatgctctccacctgcttcagggttgggcatggggaaaaggatcagtcttcagaaagaaggctgccgtagctaggccaagctggtgacatgccacttggcaagttcttgggtcctctcctgggcccagagcccacatggccagctccaaggggcatcatatggatttaatgtaaagggaaagatctaaagcacaatcagcagtactggcttctgggtcctagatctccttcccatcacacacctcacacatcactggcccagaagacagggtctcctaggtgctcagggctggggccagctcagaatggggaaagccttcctttaagggtcagggcagcctgatctgcacaggcagatctccaggagggcgtacacctaattcctgggaatcacccatggtgctggggcagggggtgttagatctagcctcactcctgtagaatgggcctggacgctgagtacagctgggtgggcccacaaggggtggggcctagaaatctagccaaaatggggtaccccaaacaagggcaaaagtcagttctttgtagagcagaagctcgaaggaaatgctcaaaaccgggggacaataaaaattccaaaaggacaggatttggggccttctgggcctaggccaaggtggataaaacatgggccctggaggatttggggatggcaggaatggtggggggaaaggatgtattatctaggggaaggaatccttaggcctgtcttacccatccttcccatctcctccacctcccaagggtagttctgtccagagcaggttaggaggtgaagagcaggctaggtaggggtggtggggaggaaggctggtgcagaactgtgtgcggcctggtcgccgggtacctgggtctcggagaggttaagctgccgggcgagctcggtcctctcgcggcccaccacgtactggcagcgctggaactccatctccagccgatagagctgctccgcggtgaaggacgtgcgcgtcctcttaggccggtccaagtccaggcccttgggcaggatgatctctcggatggaccccttggcatctggggaaggggagatgtcagccgccagaaccctcccgtccccctccacctccttggcccgagctggatttggggacacagtccccagaagcgtgcagttttggggatggggggcggggtgcggagcgcgaccacaaccaggtagcaaagacactgtgtggagggcaaggggcctaactccataccgctgaccgaaggagggaccacactttgtctttttgtagagtcctccagacaggggagagaaaaaaatccaatcaattccacataggcggacgtttcttccggcctgggggggcctcggctgagccttccgggtcccctgtagcctgagggtacccttgtcgcccc

SEQ ID NO: 19438 - DNA, 1001 bp, Artificial sequence
  DNA replication origin
tcaccttgccggggcagaagccctctccacgccgctctccccattcattcctttatgggaaatgcggagcaaaaggagtgaaagatggcaattatctaattggactattaacaaacagtcctctgagtgcggcggtctggcgtggctcctgggcgggggaagggccgtgttccctgccctcattcacaaagagtgcaggggccggggaggaaaggggttttttaaagggggtgggtggggggagaggagaggtgggaggtttggctgagaatttttccacacaattccaagaatggggcggaggcggggggaggggagggggttggggagggggtcgcggcgagcgggtgggaggaaggccgggagggggaggggtgcgagtgtgtgtggcgggcccctaggggctccagctcgcagcgacgcgcgcaccgtccgcacctcccgccccgccgccacctcccctgcctccgccgccaccccgcgggacccctctaccgtcccaagccaggagggggccccctgagcggggtctttcgcgctgtccacccagccacccctccagccacttaggggcacccaggtttggcccagctccggagggcatctctggccctgcaggccgacatcaggcttccactttagttgactgggcggagcggtggaactgtcccgagctactctccgcagggcggcgggtttccagggtccccagcgggctgatcgcccctcagcccggcttcgctgcgcacgctgccctcgaagtccgacgccgactgggcgcccggggaaagtgcctttgattacgagctctgctccggcgggttggtgaggcgggtgggagcagagacgggtaagaggggtaagggactttgcggccaccctgttctgaagatgtagagtgggattgtgttaaaatccggcgaactctcctgttacctcccgcaacgctcaaaagcccagactggcgccttgaggcaccgagggctttgctcccatgcggc

SEQ ID NO: 19439 - DNA, 2084 bp, Artificial sequence
  DNA replication origin
tggggtccccgcctgctgggcaacctcacctcaacgtctggcctggcctggggccgcttggactcggcagcggctgcactcctacagagcccagacgcgccttctcgctttttcctttctgggccggggccctaaactcccggaactcgccgcaagaggagcgttgaaaacaaaagggacagcccaagctgtcccgcccgctgcgcccgaggagcatccccttggcgctgcaggctgtcgcctcccccagcacctggcggggcgggtgccaggctgggcctctagacggtttcaccgctgcttatcatttctccttcattttgcaggggcaggggagctgcccctcccttcggagaaaggccgcgcctgcacccaaaggtaaccctcgggtgaccccgggagcggggctgtctggccttggtgcgagaccccgggcggggggtcagaggtttctgttgcatcagagaaacacggcagcgtcaaaaagaaaaagcttccagtgggtctgggcctaaagctatttttatttaagtctcaaattgtctagtttgccattttgcttctattttttaaaaaattatttctcagtggcatgggggaggggagatcaaaggtgacggatgggtatctctatgttggtgtcaagtatgccttcatgtctgtcgtttcttcagcagttgtcccagtaccgtccacataaagtatcttcttccaaggacccgttgcaataaaacgggatatttctatttggaccgttctatgtcaaagaaggttggcagcagcgccaggcttacccatgattaaagggggacatttcctacaataaggtagagtcaatgcagaacccacaagctcattgatttccatccctgtgtcgtcagcttgttcactttctcctaagattatgacaatagtagtaataataataaccaggacacaaataactcttgagaggtcacttgtaactacctcttcttggaggtgagaaacacacacatgcatacacacatacacccctgtggacttatggtttatttttgtcagaggaacttagaattgcctgaggtggtgtgtgtgtgtgtgtgtgttttttttttttaatgatttatttacagacttgctaatgcctccgcagaaatcctgtttatcagcccaatagttgtgacagggttagaaaaccagtttaaactgttaatcggccagaaaaagggccctagattgatgcctttcacttacctttgaaaggctataaaagcaacgccatacattgggatgaaattagacagcgacaaaatcattaccttgacttcccacaataaagacaaccttaaaagggggctattgatggtttcaaattacataacggtggtttatatgttcttcctctgcgctcacagaaagcaattttaaagtgtgaattcttcaaagaacgggcaaagcattcacacacagacatgcgtttttattttatgtattgcaaagcgctatgagagagagagagagaaaccaaaaacaaaaatcccagcaaaaggaggccgagtccaaagagaatatgtccggtttctatttcaccaagctcctggactcacatttggccccggagccgagtgctcggtctctttccccgggacgggacagggagtggagttcctagccccttgggtgggaaaagccccgcgcacgtcaccgggtcccgtctgctcactgcttctgcatattttaagcctggacacagcctcctttaggatagaaaggcatttcccaaacaacaccgattctgggggtgtagtgggcctggcgctgggtcctggagagaaggttcagccccccttctcatccctgtactttggggatggctcgtacttggacaggggtgggcctccgccttctccgccttctatcggacctttcttcggatggatttctacgtaaactcggaaggcgatcaaatgcaggcggccaacctccagcgcttttttttttcctctcaaaggcggcgcctgcatttttgggggctccagcccaggctgagaaagtcccctcaaacctctactctgaggttgctcacacggcctgcaaaaacc

SEQ ID NO: 19440 - DNA, 866 bp, Artificial sequence
  DNA replication origin
gcaaggcctagcacccagtggccattcattaaatacgtgctggctgacgagctcaggaacggctctagggagcagctggctcggaaacctcaagtccaagcccactcattcccgtctccctccccgacggccttttagttaccgtgccctgggccgcgacggcttccttttagattggggcagcaagggagcccctgcgcagcgaggacgccgacggggcggcggggaggggttgtccggcggtatccccgctccgtgctcctcgccttccactgcctccccgggacacagcagtcatggcttcgactgtgacttcttaactggctcctccctgatcgctgagctaagccacaggagaaggggaggagggcttccttcccgggaccttggtccaggcgctggtctgcgtggtgctcgggtggataagtctgatctgagcaccacacaggccgggcgccgggaccaagggggctcgacaagaggatctcagaacaagctgagtctctggaactagctggggtgcgtggaagtacgcgccacggcccgcgattcctgggagcgtgtctcaacttctgccagtgccaacgcaggagagagaattgcggctcagagagggtagcgtgaatggaaaccgaagggcgagagcttggctctctaatgccacccaacttagtggttcagagcttggcctccaaggaagattcagttcaagtccccgctctccaacttaccagctgtgtgatcttgggggaagttaacctctctgagtctgtttcctgctctgtaaaatggaaatttaaaaacttaaacatctacttcggtcgaggctgttgtgaagaagtgggattgtgggtgcatagctctta

SEQ ID NO: 19441 - DNA, 930 bp, Artificial sequence
  DNA replication origin
atggcttgagcctgggaagtcgaggctgcagtgagctctgatcatgccactgcactccagcctggggaacagactaagaccccatctcaaaaaaaagcatgtagaggaggggggttcactctctctgcttcctttctcccttttggagcaggatgcttttctcctcctgcctttagacatcagactccaggttctttggcttcctgagtgaggaagggaaagacagagggaggaaggaagggagtgaaggagggaggaaaggagatatgaaaggaaggagagaaagagggagggaggaagggaaggagagagagagggagggaggaagggaaggaggaaaagagggagggaaggaaggggagaaggagggagggagggaagaagggaaggagagagggaaggaggaggaagggaaggatggagggaaaagggaggaagtgaggaaggaaggaaaggagggagggaagaggaagggaagaaggaagagagggaggaagaggggaaggaagggaaggaaggaaggagggaggaaggaaggaaaggagagagggagggagggaatgaggaaggaaggaagggaaggagggaggaagggagtaagggagaaagggaaggggaaggatggaggaagggaaagagggagggaaggaagagagggaagatgctctccttcaagcaacatcaccaccactgacttctcctcccctgcgtgcaccctctatacaatggactgaatatttgagttccccctgttcatatgttaaaatcctaacccccagtgtgatggtattagaaggtggggccttcaagagcagtcaggtcatgagggtggagccctcatgaataggattcatgcccttataaaacagaccccagagagctctctagccctctttccatcatgttaggataagtgaggagccaaccatt

SEQ ID NO: 19442 - DNA, 1380 bp, Artificial sequence
  DNA replication origin
gtgctacctggtgccatctcacagaaataggtaatttaaaactttctctcagccacattttaaaaagcacaaacaaacaaacagatacaaaacccagatgaaattagtttagttgagcccaggaagtcaaggctgccgtgagttgtgatcatgccactgcactccagtctgggcaatagagctattccctgtctcttaaaaaacaaaaacaaaaacaaaaaagaatgagcccagatgaacctactggaacatggacatggcagaggctggtaaatactttatcagggctttatgtgttcttacaggtcaaagcccagggaggctgtgatgaccatgtaaagctcaacatttgcagcagagagaggacttgagttgggctctgggctaggaataggattgggaatggtggagggatgaggcgaatagcataaccgatgactgtttctggggcatggagggaccagtgtgattcaagcggaggtagagtgagggatggggtggggtggggtggattgcagatgatcttggaagccaggcaggagagtgtagatttgaggtatcagggagctaccttaggctcctgaacaggggaggggtttgttgaaagaaagcggtggttcatggatatctacagagtcacagatagactggaggcagcacatggtgccgggtggggcagagaggaggctgctggggtaggaggtggtggcagggacaggagtggggatgaagagggaacatgaaacattcagtagagaattggagggtgcctgtgccataccgtgggccttcagctttgatggcacagctgggaccgtgggatgacatctgggcattttgcttttggctgggctcccccggccaggggcaggaacgacatcctaggaagacgatctgcctaagcaaagactcagcatcaggaatgagcagaggttggggcatgggggatggccacagggaatgctggggaaggaggggacataaatgattctattattgtagctttaatgagcagagacagcagtcccttgttgcatcataaattgggtgggtttcatggtcactcagtaactgacggtggggaaaatattttccaagccaaaccaggtaggaagaggtgagggcttggataggtagaagaaaggaagtggatgttccaggtggaggaagccacttaggcaaaggcatggaagctggcctgagcaacagcagatcactggacccacaaggagacagccagcgagggccgagccttctgcgtggtgggtgcctgatggcatttgtgaggtgcctgggatggtaaactcacttcgtaagtgatcagggaacttggatcagccatagcatttactgaacttttactctgtgccaggctctggg

SEQ ID NO: 19443 - DNA, 2166 bp, Artificial sequence
  DNA replication origin
tccccgccgcccccaactgtgccacctcccaaactgcacgctcggccccgtgcaccttgcgccctgcgccctgcgccccggctgccccggggtccccgcagccccgcccgcgtagctctgggggcctccctgcctccctgcctcccccgggcccgctcccctccggcaccgcgccctgcgagcagggaaccggggccgtgttacctcggggtcgcttgcgatgcctgcccgggtcctccgtgcccgcgccaacgcccgcaccgcagtgggctccgtcagtccgggcggctccgggtcgcagtctccgccccagcgccccgccgccgccgctcagtttaccccgtccggctctgacgtcacggccggagggagcgggggcggggggctggggcgccccggcctccgcccgcccgcgccgtcgctgcgcaggaggggctgccgcctccctgtccccgcctcggccgcggccgcgcctcttccccggacccagcgcgtggccgagtgccttggggacccaggcctggggaagaggcaggggcgcagagggaaagaggtcagagagcctggacgaagagtgaagggccagggaccaaggcgaggaggcacggaccagggctttcttgtggctccaagtggtggctcgagctgctttgaataaatcacgtggctctttgagcctcagtgtccctgaaatgggccgtgaggacgggaatgatggccgcggggtgagatcgccaggggtgacaggtgctgggagccagggacaggcttccctttcctgaagaagccaccctttgcacccaccatcccctcccctctccgacctctgcagcccgatgcggggtgccactcggaggagcctttgagccttgggcatcctcaagctggtgacttggaaacgggggggggaaggggacacttttcagtgtcgccctatggtgggagttggggaggtgagggtcccaggtctcagaaagtgggagcagtgggtttgggcctctggggccacctgagcaggggaccctggaggctaggtgagtacacctggcctcagagaaagggctagggggcgggctgtgggcggggcagcaggcctaggccctgtgtcctgtactctctccccaccatgctgtgcctgggcgtctgggtgagaggtggttcctagagccaggggcctgcgtgtggctggtgcagagctgtcatcctcactgctaagggctaagagcctgcctttgatttccaggtcccttttataagcaaaggagaaacaaacagatgccctctgacatcgctggagctctgcaggccctccgaggggaccgtgggagcaagagctgttttcttgaaaagctacctagaataaatgttaccctgtcacagtctcttagcagaagagtgggcttgttttattaatgttagcttgttgacagcaggaggccactgagaacagcagtgtgatgtgtggctgcccccgctctctccacctccctactcccttgcagagaccccctgtgcttctcattgctaccccatgtgtgagaagagatggttgaataggtaagtaggtcaggaacatgggtctccaggatgtcacaggatgtgcacaacttaaacattaaacagggaggacagaaggaaaaccacttaggaggaggaagcagatggcagagagccgtttaagatggcaggagggtatcactcagggagtgccccagagtgcttgctctggagtttcagaacccaaggatgcagactctaccccagggaccacatggggacagagaggcattatggtaaagggtgcctgccaggatgcccaggtcccagtctgctacttccttgactggtggccttgggctggttatgtatcctctttgtggcttagtttcgccatctctggaatggggatactcactggacctactgcagcgtggttgtgagaattccaggggaatgcataggcagctcttagcacagtgcctggcacaaagtgagagctccgtaagtgccggcccctcattcatgcgctgaatatgtgttgagctcttactacgtgccaggcactatggttaatgctggggagacagtaaagcctagacaaatccctgctgacattctgacctgatagcagcatcatagcagtgaacactggaagccacaccaaac

SEQ ID NO: 19444 - DNA, 1184 bp, Artificial sequence
  DNA replication origin
gagccgccggcggacgaggccgcccgcgcgggcgagggcttccgctacatcaagccagtgccgggcctgctcctaagggagtacctttatggcggcggccgggatgaggagccctccggagcggcccctgagggcggcgcgacccccaccgcggcccccgagacccccgccccgccgacgcgggagacttgctacttcctcaacgccaccatcctattcctgttccgggagttgcgggacaccgcgctgacccgccgctgggtcaccaagaagatcaaggtggagttcgaggagctgctgcagaccaagacggccgggcgcctgctggaggggctgagcctgcgggacgtgttcctgggcgagacggtgcccttcatcaagaccatccggctcgtgcggccagtcgtgccctcggccaccggggagcccgatggccctgaaggggaggcgctgcccgccgcctgccccgaggagctggccttcgaggcggaggtggagtacaacgggggcttccacctggccatcgacgtggacctggtcttcggcaagtccgcctacttgtttgtcaagctgtcccgcgtggtgggaaggctgcgcttggtctttacgcgcgtgcccttcacccactggttcttctccttcgtggaagacccgctgatcgacttcgaggtgcgctcccagtttgaagggcggcccatgccccagctcacctccatcatcgtcaaccagctcaagaagatcatcaagcgcaagcacaccctaccgaattacaagatcaggtgagctggaggtcggggagggggcctggctgccgggaacccgggcctgggcgggacgctgcgtggattgggaagggcaaaggctcatttctgtcctggcgcctgcttctggggccttcccaccctggacagggccccagatcaaggcgagtcgtgaacacttgctttgcttccgaacggcattgataggagctagaaaccttttcgcgtgttcatggggactcagggtgctgtcaacgcgggcagaatcgtctccttttataagcagcatattggaaatggaagggaagcctaccctaatccccaggagtcgcttctgggactgttgagaaactctccctctatgtggttgctgcattgagggcagccgcgtcactggctttgcagcatccccttggccgcttt

SEQ ID NO: 19445 - DNA, 1105 bp, Artificial sequence
  DNA replication origin
cgggcacgcggacgcgggtcctcctttacttctctgcggcccttccaacctcgtccccccacgccaacattccaatccccgcggcgcgcgccgccacccacgtggccgtcacttctggagctgcggtcgggatctgggaggacggctggggacgcgggctggaggataaggcggtccggcggagcgggcctgacgcgttccggatgccggccatcccgttatcctcggctgcgcccatcccccgtctctggccgcagtccccgcggttacctctgcagcggcgtcgctcatcctgcggtgtgcttcttccactcgcacccgtgacagcccggctggcagcggcgctttccctgcgggcagcaccgcagacgatccgagcgggcctttcggacgcttcccaagcccacggcgagaggggaccgactgcctcagaggcagccatcgcggacctgccgtccccccggcagacgctctgcgtccgcggagggtgggccctgggaaggagggacgcagggaaagggcgcgccacgcggaatgactttcccaccgaggtggatcttcgaaatttcagggaggaggaagttgaaagaacagccaggaggagagatgcatagtgaaacgagtttgccaagtgattggaagattaatatgcgacccgctgtcagtctctggttaagccggtagtccatctatgaggcagttattcactgttagcccccacccacttgacagatgccaacactggtgcagagagcgtggggaggttgcgtggggccgcagagtggagcctggtttatctaacactaaaccctaatgtcttgatcactactctctgccctaacacagaaactgcttcagttgtaagcaggccagtgggttccctaatgttcaggaagggagaattggggaggcggattagggaagacggcaaggaattttgcatagagtagcaccttaaccaaagccacgaagctaagccaggttgcccagcaacagcgttactcctcctgccctctgactacttagtggttacatcataaatgcttatccctccaagcacgtggagttccagtcctgcaggagtcagatatcccataccttaaag

SEQ ID NO: 19446 - DNA, 1146 bp, Artificial sequence
  DNA replication origin
agctttgccggaccaggaggccctaattacagacgggctctgctgcaactcgtgggggcccggcccccaggggagagcgaaggaatactctagttctggcccccgcagctgcccccgcccccggccacacgcacattctggggcccctcgatcctggaggttggccataccaggcccggctcccctgtttgcatcccctcggcgtctgggcgcgggaaggctccgtgcaccccgcttctcccacggccacgcggagccctcggcttcgtggcctgcccctggcgtctggaggagacaccgcgagtgaggcccgagggagcctctggggactcgcagcagccgaagcccgcttgggcctcggaggcctcctctacgctgggcccgaagtgtcctcccacccctggcgtggacccggagaggcccgaccgcggccgccctccgcttagccccggccgccagcagcttgccgggggcggcgtgcgcaacaaagggtggcatcgcagcggcgcggacagggacagcattgattcaatattagcttttcattccagtctattgtgcccatctgagataatattgactctgaggtgagagcccacagacaacagggcttgtctaacactccgctgcagggcgctcgaagggaagagaaccagaaagggcgagttaaagagagtgcgaataaaagctgctcgcgcggcgcggtggccgccgctggcgcccagaacctcggacccgggaactgggggtcgtgggagggccgaggggtctggaggtggctctgaggaagggagctgtgctgtgcgttcccaacgaaaacagccctcgcttaacacacactcccatctgccagacacttgatgttgaggttccccttctcggtagctctggagaaaaactaattccccccacacactgttttgggttgctagtaagccagcagcggccactgagatattttccccttgtaaatggtgtaactctttagggtaacttttctgtcaaaatgtttcttctatttccccaaccagtgaagagtaaacacgcagcaattatcattaaactgcattacttgagagagcgtgtttaatatcaaatttctaactgtgcatttggctgtgcgttcaatcgtctccttccagccca

SEQ ID NO: 19447 - DNA, 1917 bp, Artificial sequence
  DNA replication origin
ggggcgggggcagctgcgggggccagaactagagtattccttcgctctcccctgggggccgggcccccacgagttgcagcagagcccgtctgtaattagggcctcctggtccggcaaagctgcggctgctcccagagagagttggggtcttctcagggcccgcgatgggggagtggtcgtggtcagacccccgtgagccccttcggaaggtcccagtccctgtccattcttctgtcccgcagctctctccgcgcaggcggggcagagccggggaagaagacgctggacgaggggtcttggggccgcctcgctggctgcggttggaagcacccgttttcccgcccgcccgcgcaggcgctgctctgtggccaccagcagaggtttcccggccgctgtgagtcgcccacgcgagcgacgtggggatacggggcgcacggagtctcagctgccgccacgcagcgcttgccctgcccgagcttcggctcactggcagcggcgaggccaccgaccaccctccgccttccagtcctaaactcggggctggagaccgcaggagctaaaccaggaagaagaaagagggcagggcctgaggccgggaagagcggcccgggggtcaacggtgagcgggtgcatacgaggcaagagccagagtgacattaagtggggccgcccgggcaaaccttgcgcgtgcaccccggcccacctgcagggcattctcccctgccttttctccttggcttgagtgcgggcggctgactcctgtgggcggggaggagagggtggtcttcccagggctccaagtggagtgatcactgcacccatggccaggaggtgggggtgcgcggagtgatttttgtaacttccctgagcctcagttttctcatctgaaaagtgggtatcacgactgtttccctgaccacaccaggttgtgatgttcactgaaatcatgggcttgagcacacatacttttaaaaaattgctaaaactcgatacaggtgagaggaattgttagttttcttgtaagtcttgccccaatcctccccatatttcaaggagggccgcagagtccaaaataaaaaacctccagtttcctttttttcctcagttggctggatttcccctccaagccccagcccagcccccacgtccagaaaatggggaagtattaaaggaagagacgattaagcccctgagagtgtggctcctgggacgccagcgtttcagaagtagcataggctcctagatggacgctgacaaacccaagtagcgccttacattgtcgggcgaggaccagactccaagttaaaaggccggccgggctatcagtggcagagagcagagcctcaaacacgaaaagccagaaagcgctgcagaggcgtggaaggtgcgccccgcttcgctccccatgctggtcctctgggaactcaggagccggtgcacgctctggtgggctcatagagatgtagctttgggggcgatgggaaggacttgccacgctcccacccaccctccatcccgagagagtgcaagggagacgcaactgtcttcatccctatcccgggctggcgcccgaactagagagtgtacttcttccctagctcctgcaccaccgtctgtgtgtacgtctgtctgtccctcccagtccttgctcggtcctaggctttcatttgaaggcagctgagggagaaagaaactgcaaacccctttggttctgtttccttgctttcaataatgaatcgagacagcgtgtgtgtggtgagggagtgacgagtttcaacgtgatgaaggagataaaacccgacggtggggtcctgccagtggctccatgcgtcactgaaacattgggtctcaaaacggatagatctccggagacgcagaggttcgcgcggatgtccagaggaggacagcgcccctgca

SEQ ID NO: 19448 - DNA, 979 bp, Artificial sequence
  DNA replication origin
ctcgcggtgctcttggggcgatcccagttctcccgacgcggggccgcgtaaggcagcagcggcggagcgctaggctagaggaatctgtctgtccttctgtcctaccagcttgggcgaggcaggctcgggattcagggggccgcagcggaggcggcgccggccagggactctgcagggaccggggtgccccggagggagtggtgctggtggaggaggaggcggtggctgagggggagtaggtggggaaagaggaggaggaagaagaggaggaggaggaagaagaggaggaggaggagaagaagaaactggaggaagaggaggaggcgaaggaggaggagaagccgcagcgggcgccgcaggagcgagtgagctgggagcgaggggcgaaggcgcggagaagcccggccgcccggtgggcggcagaaggctcagccgaggcggcggcgccgactccgttccactctcggcccggatccaggcctccgggttcccaggcgctcacctccctctgacgcactttaaagagtctccccccttccacctcagggcgagtaatagcgaccaatcatcaagccatttaccaggcttcggaggaagctgtttatgtgatccccgcactaattaggctcatgaactaacaaatcgtttgcacaacttgtgaagaagcgaacacttccatggattgtccttggacttagggcgccctgcccgccttttgcagaggagaaaaaacttttttttttttttgcctcccccgagaactttccccccttctcctccctgcctctaactccgatccccccacgccatctcgccaaaaaaaaaaaaaaaaaaaaaaaagaaaaaaaaagaaaaaaaaagaaaaaaaattaccccaatccacgcctgcaaattcttctggaaggattttcccccctctcttcaggttgggcgcgtttggtgcaagattctcgggatcctcggctttgcctctccctct

SEQ ID NO: 19449 - DNA, 1222 bp, Artificial sequence
  DNA replication origin
ggctgcggagccggccgaggtcaggagcctggggactggctcctctgcgacagcggctggttgggtgccgcaccggtggagacccggcgttccgggccgggcagctgagcaggcgttcccttcgtgagcccttgggaggaccaccggcccccgcaggtcgagcggcgcggctatgcgaaggccctgagcacggtgccgggccagcccggctcgggagaagtgcgcggctccggtcagagcagccccccctaatgggatttctgctgtgctccccgcagggaacgacactagccccgagagtttccttttgcacaacgcgctggcccgaaagcccaagcggatccgaaccgccttctccccgtcccagcttctaaggctggaacacgcctttgagaagaatcactacgtggtgggcgccgaaaggaagcagctggcacacagcctcagcctcacggaaactcaggtgactgcggcccgggcgcgaggaacccatctaggcgtgcgccccctccccaaagctggctcccaagcacacccatgagcacggagctctgtgagggccttccgcacaggtcctggtagctggttccacgcctgggctcgggatgtatgtctcaaggtgctggctttgttgggctccagaaaggggctgtaagtgccaatctgccccaggttctggggaaacgcgccgagttgtttctctgtccagttgggcatgtcctggctaagacatccctgcatttctggtgagacttttgatgagagtgtgaagacccctgctggggtccaggaagagggagagcacagtggggtttctgggtgtttggagctggaggctggtaaggacaggatgtgggttaaagatgagttctgagcgactgtgagcccacggctcacaccgtcggctccagtgacttccctgaaggagatgggcgatgggaaggtagagggcaagcgtcctgtgtgtaccctatatcagagaagtaaagttgggaggctgcagagagggtctgcctcagggcacaggccttctgcacagcagggtccctgggcgggcctggcttgggtttatcccagggtggggagggggtttaggactacactaggcgctactgtacacggagccgcagggcggggtcaaagttcccagcaaacagtaacgtttttttgggcagactaagttgtaacacttttcctgggcagctcagaaaggtcgaggctt

SEQ ID NO: 19450 - DNA, 809 bp, Artificial sequence
  DNA replication origin
gcaggcaagccgagcaggagctggcgcattggctgcggcccggaacctgccgggccacttttgtgcgaggggcggattgtggcagcctgagagccgcgccaggcgggccaggcagaaagggggctccggcctgcgctcggctttggaaacctcggctcctccccgtccccgcctcgagtcgcaggaaacaaagtctgggacgcgcaggccggctggggagggactctggctgctcggaggcctggcccggggccccactccgtggtgggggttttagggctggtccaagtcggtgtaaggctggcagggtgagggtctgttcttgtgtgtttgtatagggtgagagcactagtttgtggtataatggcatttgtgtggattgtggaatagaattgtgtgtctcagctaggactttagtcaatttgtgtcagttctaattgtttgaataagttaaaggctggagaggctggggctacttatgtagatttggtcaagatgtctagctgtccttgtgcgtctagattgttttgagttagggccagcacgtgcagttgtgaggctgcagagtgcctatgacggtgtggaaatgcagtttattgaatgtgtgtgccgcggtctggttgcactgtgtatctgcgaattcgtctggagttgcacatctcagaagatgggggtggcctcggtgtgtgtggcttgcggggacgtttctcggtgtttggatgggggtccctgtgatggatgtccatgcccagccctagggcaacatctgtgtgtcttgggatcgaggcgtgtgtgtctagtgaggaggc

SEQ ID NO: 19451 - DNA, 1629 bp, Artificial sequence
  DNA replication origin
catgcctggtgggtgaggacggagcagtgtggcgtttgtctgcagactctggaccctccagtcacgaagtccctggtgacttgctgagcagactctcccatggccactccccatggaccactcactttctgctacccttttctgcgtttctgagtcctcctgtgagcccctgagaggcatgccaaggtgaggctgcagctgacacaagacctgacctgagagagccacagggtggcagccaggagaggggcccgagtcttggcaggtgtgtgcgggtaattctgtgggtgctgaggggaggggagaggcccctccaaagagccatgaaggtgtatgtgtgcgcacatgcacaaatgtgtgtgtgtgtggggctatgtgtggttgctcatgtgtttatataggggactgtgtgggtgcttgtgtgtgtgtatggatgtatgtttgagcatgtgtatgagtgtgcataggtgtgtatgtgtgtatatgggtgtgtgtgggtgtgtacatgtgtatgcatatgtgtacaggtgtgtctgtatgagtgtgcatgcgtatgggtaggtgtgtatgagtgtgtatcagtgtgtggggatgtgtctgtgtgtatatggatgtgtgcatgtatatacaagtaggcatgtgggtgtgcatgtgtgtccgtgggtgtgtgtgtctgtgcatgtgtgtctgtgggtgtgtgtgggtgtgcatgcatgtctgtgggtgtgcatgtgggttcgtgggtgtgtgtgggtgtgcatgtgtgtctctgggtatgttggtatgtatgtgtgtgggtgtgcatgtgtgtctatgggtgtgtgggtgtgcatgtgtgtgcgtatgtgggggtgtatgtgtctgtgtgtgtgggtgtgcgtgtgtgtctgtgtgtatgtggggatgcgaatgtgtgtccatgggtgcatatgggtgttcatgtgtgtctgtgggtgtgtgtgggtgtgcatgtgtgttcgtgggtgtgggggggtctgcatatgtgtctgtgtgtgcatgtatgtctatgggtgtgtgggtgtgcgtgtgtgtctgtgtgtgtggtgtgtgtgagtgtgcatgtgtgtgcatacgtgtgggtgtgcttgtgtgtccatgggtgcatgtgggtgttcatgtgtgtctgtgggtgtgtgtgggtgtgcatgtgtgccttgggtgtgtgggtgtgcatgtgtgtttgtgggtgtgcatgtgtgtctatgggtgtgtgggtgtgcatgtgtgtgtatggatgtgtctgggtagtgtgtaggtgtgtgtgtgtgtgttggggagatgaatgagggtgggaacattttctgtcgcagtttccttttaagcacctggtctcggtgtggctcataggggcctaatgttcctgcctctgtgccctcacgggtagcacttccttgccttgcccaccatcatttccctaacctgctgaccccagtggttccctccctctaaatctgtaagcccagtctctccaacaggcagtaagaacgcggcgcgagggaatggggctggtccttgcccctcttggttgccctttggtggtcggtccttctaggggcgctcagtctcttcttctgtccttcctgccccaccgcccctcctcctgcccct

SEQ ID NO: 19452 - DNA, 1089 bp, Artificial sequence
  DNA replication origin
gggccaggccgaaccaagcgcccgcagccctgcagcccgctgcccgccccacgtcccgccggcgccggggcggccgcgttccccgccctcccccactccacccctggctacccgctcccgcccgagaggaggagctgaggcgagggggaggaggaggagggagaggtttgcgagagggagcgaggccgcgttagccgccggcggttcgtattaccggggtcgggaggaggagccgggccgagcctgcggacgaacgccgggcgggcgggaggcgcggaggcagcggaggctgctcggccgcaaggaggcaggcgggaggccaggggtgcagaattggggcgggggctcccttcacccccgcagccctccgcccgggtccgtgtggccaggcctcacgtgccccgcaggcctggggaaggtggagacaggggcgggggtccgcgcagaggcctgcacggcgcggccaggtgatggtgggcctctgtgtttctccagacgaaaggggacccccggagcggccgtgcccctgggctgcccccgcgaggcgttttgacatcagccatagggaagtcggggagccctgagcctgcctgtttccgttaagtgtccttaggatgcagtgattaaggaattaggctctccctccgggaggggcactgcctgtgctagggaactcgggggcagagaaacaggacaggatgatgctgtccgagcaagcccaaaagtggtttccaacccacgtgcaggtcacagtgctccaagccaaagatctgaagccaaaaggcaaaagtggtaccaatgacacatacactataattcagctgggcaaggaaaagtactccacctctgtagctgagaaaacccttgagccagtttggaaggaggaggcctctttcgagctacctggattgctaattcagggaagtccagagaaatacattcttttccttatagttatgcacaggtccctggtgggtctggataaatttttagggcaggtggcaatcaatctcaatgacatctttgaggacaaacaaagaaggaaaacagagtaagttatgtaatttattttgaatttgggggagttta

SEQ ID NO: 19453 - DNA, 1169 bp, Artificial sequence
  DNA replication origin
cgctgcctccgcgcctcccgcccgcccggcgttcgtccgcaggctcggcccggctcctcctcccgaccccggtaatacgaaccgccggcggctaacgcggcctcgctccctctcgcaaacctctccctcctcctcctccccctcgcctcagctcctcctctcgggcgggagcgggtagccaggggtggagtgggggagggcggggaacgcggccgccccggcgccggcgggacgtggggcgggcagcgggctgcagggctgcgggcgcttggttcggcctggcccggccggcggctcctaacaccgggcgggcggctgcggcggcacttccgggttggccttctccatgttggtctcgggaacgtgaaggggcggggcctcgaggtcaggggtcagcacctccctggttgccgtggcgactggaggcgcgcgacgcgggcgcaatggcggggacccggggcttgatgctgcttgggcctggcccagtggcgggtcctagggacgtgggtacctgcagaggccggcaggtgagccctggggagggctggggaccgctcgtgagaggaggtcatcaaagacccggagacgcccctaactagggcgtctttgagggcaggggatctgtgttcgctgtgtcctggatgcccagtgcctggcaggagcaggtccataaatggtgttggaacgaatcaggcctcttcactgaccgaaaggaaacttttctccaatctcctatccacccttctctttttgaaaagtccgtaaattgactgaaaatgacatcccccacccagacgaagggcgatagggaagcaaatagtttccacagggagtagagatgtagggaggcactgggctggcatcagaagacctggttccggccgcgcctctgccgctatcagtgtgtgtgaccttggccgagtcatttcacctccatgagcctcagtgttttcacgagtaaaaaagccagttctacctcatgtctaagactccatcacgactctatgggctcgacgtcaaaaggacccccgtggggactcacactgtggtggactgtgcaaatcatgtggagaccatgccccaaacacgggtttcgagtttcaggggataatacatgtgcctttcctagcacaatgcggcacataaatctccttttgcccctctatttc

SEQ ID NO: 19454 - DNA, 1527 bp, Artificial sequence
  DNA replication origin
gcggcgggcagcgccagcaccgcggacagcgcccagatggccagcacagcgtaggcgctgaggcgcagcgagatgcgccgcctcagcgggtgcaccagcacgacgtagcggtccactgcgatggtggtgagcgtgaacaccgacacatagacggtgaccggctgcaggaagaagaccaggtggcacaggccgccgccgaacacccagccgcgtggctcgaaggcataggccagcgtgagcggcacgcaggcggtgcacatgagcacgtcggacaaggccaggttgccgatgaggaagttcgtcacgttgtgcagccggcgcacccgcgcgatcaccagcaccagcaggcagttgcccaccagccccacgaccaccacgacgctgtagagcagcacgatcagccccttcagctgatgcaccagctgcaggctctggaagggcgtgacggctggagcgtccgcgccagccaccgacccgttgcccgccgaggcctctgcgctctggttggcgggagttgtgaccgccggcggcagcccagaaaataagtcagaaaccctggggccccgagtggtcgatgaggccatggccacctgttcaaaggtaatcaaagtccgtcacttcccttgccatactccatccgacctcctacaccagccgcgcccctcccccatcgcctgagtcctcccttgggaataaccggccacagaacaacagcaaaagtagcaaaaagtgttgtcctctcacctctgtaaaataaacctaagcacggttagaacatacggtttatttaaacgcttccgcctctatttacggtcctcgcagtccacgcaggcagactcaggagcgcgatcctacctgggagtggggtttggagagcgggaaagcactcgcgggaagaaggggcagaatttctgctggccctcggtagtcctctgcccacgtcggtgatccggtctcgcttctccgcgggagctgaacggatccaaatgtttcccagtgggctagcagcttcttagagggactgggagcgcctcccctcagctccgccccccactccagctcccatgtatggaaaataggggtggagcgcgctctgccatgctcggtgcttagagaactagtgaagaggacagtgtggggaggatggaatccgaaacgggaggaggggccggcaaacctggccagagcagcgaagaggacgaatctctactgcaggagcttgcacggcccctggagggtcagggtccggaggagcgcacagtggaggagggcggaggagaggcgcgaagcgtcaggctatcgggaggagccggtgcagtcttaggagggaaggagcggggaaggaagtagcggtgggagattgcaatgcagctgggggcttgagagaggcacgactgacccgttcttaaaggctggatcctgcctagcggccaggttgcggagggcagagacgctagagggctcgggctgggatttaacagcagagcctggagctggtcgcggacctgaggaccctcaccctcccgt

SEQ ID NO: 19455 - DNA, 932 bp, Artificial sequence
  DNA replication origin
tccgaaacgggaggaggggccggcaaacctggccagagcagcgaagaggacgaatctctactgcaggagcttgcacggcccctggagggtcagggtccggaggagcgcacagtggaggagggcggaggagaggcgcgaagcgtcaggctatcgggaggagccggtgcagtcttaggagggaaggagcggggaaggaagtagcggtgggagattgcaatgcagctgggggcttgagagaggcacgactgacccgttcttaaaggctggatcctgcctagcggccaggttgcggagggcagagacgctagagggctcgggctgggatttaacagcagagcctggagctggtcgcggacctgaggaccctcaccctcccgtggccccgccacacgagccccctgcttggctgcagcgcgctcagcgggcagcgggtccggccaagccaaaggcaggagtcagcaccacggacagcttccgctggatctgccgcccctcgggcggatgatgtggggaggagcaggggaaaatgactagggaattcctgcccctctctggatccgggtgtttggggaaggaacctggtccggttcaaagacctgcctcgctgcctgctttctgggctggggctgagaagagtagggtggagtggaggcagctgagccgggggcctgggggtcggagactcatgacttttgctcctcttggtggtcaccgcactcagtgccaaggacggcgtcgtcttttacctcccggggtcagaaaatgcagctctcctgccagttattctacacaggcacacttcagtctggcccagcgactccccggctcaccctttctctcgctttctttctcggctaccgcgacctgtgccgtatctggctgcttctcccagcacagagtagttcctggactgagacttgacccctccctcc

SEQ ID NO: 19456 - DNA, 863 bp, Artificial sequence
  DNA replication origin
aggttttaatgggatggtaaggggtgcatgaacagtcaccaaggagggagtagaggtgtcctatacttgtggattaaggtggggagatacaaggggaggatgtgaaggaggctttgggttgggaagaagggtggcaatgagatgtggctgtagtccaggaataatcagggaagcagataatttggttaaaatgtctcaccctaataagggaactgggcaggtggggataactaaaaaagagtgcataaaagaatgttgtccaagttggcaccagagtgggggagttttaaggggttttgaagcttggccgtcaatacccacaacagttatgggggcaagggaaacaggcccttgaaggtaatgagtgggtagcccctgtatccgttaaacagaggacggacttaccctcttctgtaagagttacctgaagctcggtgtctgagatggtccaaggggcttccgaggcaatcgggcagtgtcagtcttcagctgctaagccgaggagatctgggaaggagtcggccaaggaacactgggtttgggctccaggggctttaggagcagcagtgatgtgagtcaggcagtccgacctccagtgggggcccacacagacagggcatggcttaggagaaatcccgggctgcaggcattctgaggtccagtggccaggcttttggcatttgaagcaaggtccacaaggatgttttgaaggagcccctgggagctgtggcttggatgttctgaagttcttgtatgctggagacatggttgtgtgttgtcttacagtggaggcaagtagctgtaactcagaaatgcattgctgtctggctacctcctctctattattgtacaccttgaaggcg

SEQ ID NO: 19457 - DNA, 961 bp, Artificial sequence
  DNA replication origin
tgttgggtacacctcccagacggggtggcggccgggcagaggggctcctcacttcccagaaggggtggctgggcagaggcgccccctacctcccggacggggcagcggccgggcggaggcgccccccacctccctcccggacggggcggctgactgggtgggggctgccccccacctccctcccggacggggcggctgccgggcagagacgctcctcacttcccagacggggcggctgccgggcggaggggctcctcacttctcagacagggcggctgccaggcggaggggctcctcacttctcagacggggtggccgggcagagacgcttctcacctcccagacggggttgcggctgggcagaggcactcctcacatcccagacggggcggcggggcagaggcgcgccccacatctcagatgatgggcggccaggcagagacgctcctcacttcctagacgggatggcagccgggaagaggcgctcctcacttcccagattgggcagccgggcagaggggctcctcacatcccagacgatgggtggccaggcagagacgctcctcacttcccagacggggtggcggctgggcagaggctgcaatctcggcactttgggaggccaaggcaggcggctgggaggtggaggttgtagctagccgagatcacgccactgcactccagcctgggcaacattgagcactgagtgaacgagactccgtctgcaatcccggcacctccggaggccgaggctggtggatcactcgtggttaggagctggagaccagcccggccaacacagcgaaaccccgtctccaccaaaaaaatacgaaaaacaggcgtggcggcgcgcgcctgcaatcgcaggcactcggcaggctgaggcgggagagtcaggcagggagtttgcagtgagccgagatggcagcagtacagtccagctttggctcggcatcagagg

SEQ ID NO: 19458 - DNA, 848 bp, Artificial sequence
  DNA replication origin
gaggagcgcctcttcccggctgccatcccgtctaggaagtgaggagcgtctctgcctggccgcccatcatctgagatgtggggcgcgcctctgccccgccgccccgtctgggatgtgaggagtgcctctgcccagccgcaaccccgtctgggaggtgagaagcgtctctgcccggccaccccgtctgagaagtgaggagcccctccgcctggcagccgccctgtctgagaagtgaggagcccctccgcccggcagccgccccgtctgggaagtgaggagcgtctctgcccggcagccgccccgtccgggagggaggtggggggcagcccccacccagtcagccgccccgtccgggagggaggtggggggcgcctccgcccggccgctgccccgtccgggaggtagggggcgcctctgcccagccaccccttctgggaagtgaggagcccctctgcccggccgccaccccgtctgggaggtgtacccaacagctcattgagaacgggccatgatgacgatggaatagaaaagggggaaatgtggggaaaagatagagaaatcagatcattgctgtgtctgtgtagaaagaagtagacataggagactccattttgttctgtactaagaaagattcttcttccttgggatgctgttgatctatgaccttgcccccaaccctgtgctctctgaaacatgtgctgtgtccactcagggttaaatgggttaagggcggtgcaagatgtgcttcattaaacagatgcttgaaggcagcatgctcgttaagagtcatcaccactccctaatctcaagtacccagggacacaaacactgcggaaggccgcagggtc

SEQ ID NO: 19459 - DNA, 1592 bp, Artificial sequence
  DNA replication origin
gcgagcggggcgcccaggggaaagcctccatgggcgggctgcgggccgcgcgccgcctccccgccgccggcgcgggccggacggaagggacacgccgagcctgcccgccggcctgccgcggggtggggccgccgcgccgccttttatcgggcccactcctccccgccccccggcctcgccgccgcggccctgccccctgcgttcccccgccccggccacctcgcccgcgccccggacggaggcggagcggaggcgggctggctgtgtgcgcgctccgctccagcccgcgcggctcccgcgccccgcgcgctgcgccagcctcgccagctgtcgggcggccttcattccgggagggggcgggcgaggcgccgcctcgagccgtggcgctcattggctgcagaccagagccccccggcgcctcgggcgccgctccggacgctgattggtgggaacacggggagggggcgtgttctccgcgcagctgggaggtgaggagaaagtaggggagagaagggccgggaagggagggccgctggggcccgcattcgagcgccgggcctgggcttggagcaggtgaccaggcctgggtctcctcggcctggtggtgaggccccccgaggacaggggtcagggtggccacaggtttacgcccccacctcccagcctttaatggccctaggccctaatcctgagaatccccgctatccacccccttctcaccaacatcagcatgaaaagctggacgcgttggaaggatgcagctctcccatcacagccgcccaaccagccagtggcttccgtttgcaccgcgcgttggagcgctttcccctgggcgaaatccatacaaaccctgaggttcggggaggctgtggttcctgccgcggtaagagcggagggacgcaggactttccggctgcacgcagcagccttcctcccaacaggtgctcagggacttcagccaatgggtggccgatagccggttacttaggtcggggttggggctgggccggaaaatctcatggctggagagcctaggacagtgactgggatgtgtgtgtgtgtgtgtaccccctcgccccagaggcctgagtcaaaatgtgggttgtatgtgcagtttgaaaaacaacgtgtattcaatgttatattttgtcttccttccttccttccttccttccttccttccttccttccttccttccttccttccttctttccttccttctttccttccttccttccttccttctttccctccttccttttctttctttttttttcttttctttccgcatcccgggttcaagcaattctcctgcctcagccttccaagcagctgggattacagatgcccgccaccatgccgggctaattttttgtattttagtagagacggggtttcactatgttggccaggcttgtcttgaactccagacctcgcgatccgcctgccttggcctcccaaagtgttggtgttacaggcgtgagccaccgcgtctggcctctttctttctttctcactctttcttttttcttcttgatttttcttttttcttttttttttttcttgagacagggtctcactatgttgccta

SEQ ID NO: 19460 - DNA, 1114 bp, Artificial sequence
  DNA replication origin
cccgccgccgccgccgccgccaccaccaccagcgaggcgacgccgcgcgaggagcgggccccggcgtgggcggccgagccccggctgcacgcggcctccggggcggcggccgcccggctgctgaagcccgagctgcaggtgtgcgtgttctgccggaacaacaaggaggcgatggcgctctacaccacccatatcctcaagggccccgacgggcgagtgctgtgtcccgtgctgcgccgctacacgtgtcccctgtgcggcgccagcggcgacaacgcgcacaccatcaagtactgcccgctctccaaagtgccgccgccgcccgcccgcccgccgccccgcagcgccagggacggcccgcctggcaagaagctgcgctgaaggcccgggctcccggccgcccagggtcgccgccgcccctcgcaccgctaggtctgcgcaccatctcgcccccgccgtggggaggcgtgcggctcagcggtcggctcgacatgggacgtcgtcctggtggtttttgaaaagcagccgaccgtgtggagtacttccgtgctgaacgattgggactagacgctgaaatccccatttgtcttcagtttctagtttgcacatccagaacggcgaaggctgggtgtgtattccactaactgaaatatggcaacttagaggcgctgtttatttactgtatacgtcgacctattttagatgcgcatcagtatgaaattgtctcaatcttggatgtttcattttatgaatggaggcactttactaggtctagaatatttttttaaaagcctctgaactgagcttaaaactggcgattttatgaaatgtcggcaaaatgactattttattgtttgaagcgagttaatattctcagttgtctttaaaaatcagttactctaattccaggtgaagcaagccgctggtagcatcacccttatgagaagtgaaggttttgtaaactttccagtattaatttgggcgggtattccccgcttgtggcttgtttctgtcctagctggaggtgtaaaatgcacaatgtgtagcaggtagaatacagctccttatcgttctatgtaccaggtattttattactgaactagcaactagcctt

SEQ ID NO: 19461 - DNA, 1124 bp, Artificial sequence
  DNA replication origin
aaaaaaaaaaaaaaaaagaaaaaagaaaaaaagatgagggtgggattgtattcctgcagacaccaaggaccctccctaattagctctgtgtgacttggggttggggcagacagtagatccagaggaggaatcttggagccaaatcttccaatgtctgagtcgttactatcattcagatctcagttcaaatatccctttctcagagaagcctttcttgacacccattttagagcagcacacctccactctctaacacactgcctccagggcacatatcgttgcctccagggcacatatcattctgagcttttttactattatctatctatctgtcatctatttatctatttatttatttttgagacagggtctcactctgtcacccaggctggagtgagtggcaggatcacagctcactgcagcctcaaaatcctgggctcaaatgattttcctgcctcagcctgagagtagctgggactacaggtgcatgccactatgcctggctaatttttaaattttttttgtagagatgggtctcactatgttgccaaggctgatctcgaactcctgacctcaagtgatgctcctgccttggcctcccatcgtgttgggatcagaggcgtgagccacctcacctggcctggattatttattctactcgccaattgtctgtcttccccagtggactgctctgtcttgttcagccctataaggtatccccagtgccttattaggccctcaatttttgttttgttttgttttgggggtggctggatgaaggaatggatggagacccttcctccatcctcaggacgcctctttttaggaacaaggtgacctgttcttttgagcttgaccagagggcagaggtagaacaaggaaagcctacgacgggaagaaagattggagtggattgagaagaagaaggatgaacagctggattagagaaattgaggcaggctgcggagactcaaggaggtttccaagggcgaagggccacgggcagaagacgagtggagctgcactgagcaggtcctggcagggaggactggggctggaataggtgggcctgcgggtggggcggggccgacggggggggttgatggtcctgtgatggggcgggg

SEQ ID NO: 19462 - DNA, 1042 bp, Artificial sequence
  DNA replication origin
tgcctggaagcccgcaccctggttctgcctctgctccacctcggcccggggcagcccgggctcccgcggcccccggcgccgaccgcatgaggagggcgcggccccctccctgttgggcctggactggggactgcggagcccggcctccttggtgcaggggacccggcccgccgccctcgcccgcccgcccgcggccgcctgtggggcctgcccggcccgagggagcccggggacctccaagattccggggtggagctccccctgcacgccccgggttgcccggcggagccgggacgtcgagcgctcccaggctgggcagctgcgaggggcgctgcgcgggcggggccgggccgggcgggagcagccggctggcggcgcggcgcggcgcggcggggaggaggcagggtccggttcccccgagccgggggcgggcggctgcctcggagccacgggtgactgcccgcccgggcggcccccatcgtgggaccgggcagctggagactgctgggccgggtgctgcgcgttgtacacacattgtctccttttagctctcaccaaggaccgaggggccgtgggaaacgtctgacgcccacttcacggaggagcaaatggaggcccaggccgtcattgtgcacggacacaccataggccgtacagagccgggagtgggaccctcgcagtgtatcccagagcccccaacccccaccagtggagagctcctgcatcatgtgatcgagcttgtgcataaataaagcaggagtttctacacaatcctgtgtggtggaatctcggttagctctgaggaatgtaattatcttccataattaaaaaatatcacacggggatctttgggcagcctcgtgcagtatttaggggatggaacccgttggttcccttcgaaaaagttttattttcccgagatttttgcacacccctaaactctttctattccccaagtgcgcaataacattgcttaggctttagcaaaactgaagaaatatgctgattatttttcagtgcctcaaagcagtgcgtttatgtg

SEQ ID NO: 19463 - DNA, 985 bp, Artificial sequence
  DNA replication origin
ttcgcattaggtactgtgatgacgggttccgatagtgaccccttggggcctggagacggcccggctccccaaaggtgcggagcagggcaagcagggttgggaggacgtggcccgtgggagagctgcgctcgccggaacagtgggcgcgcaagggccccgaggcgctgtgacacgggacgtcgggcgcgcgggcctggggcgggaactgcgggtgcgcgcggcccggggcggggctcgccgcccggctcctcctccacgcgcggcctggcggcggcggccactctaaccagcgcaaaatgtccctggaacaggaggaggaaacgcaacctgggcggctcctaggacgcagagacgccgtccccgccttcattgagcccaacgtgcgcttctggatcaccgagcgccaagtacggcccgggcccggcgcgactaggggcagggagggggcgggccgggccgcgtggagtcgggctgacccgggtgaccttggccaggccacgtgggcgccccctgtctccgtttcctcctctcggagttgtgccgggaacgcgcaccaccggccttcaccccttagggcgcggcaggggacgcaggggaaatcgaagctgccagatgcccacgaccacaacgtcaccctccagattgccctctcggaggggcccagtccgcgcaggtggctgctccctactgcctgagctgtggctgagcagcagattggggagaaacaggctctcgcaccttggtaagctcagccactttcggtgagacccccgaggctttgggaagccacccttgggcaggacataagcaggacttatctccctgcagcgtctagggcagcaccgtccaatagaaatatgatgtgagccttacaggtaattaaacattttctagtagccacattaaacaagataaaaacagctgaaatttttaacaatacagtacatttagcctagcaggtgcaaaatattaacatttcaacatg

SEQ ID NO: 19464 - DNA, 1103 bp, Artificial sequence
  DNA replication origin
agggaggtggggggtcagccccccacccggccagccgccccgtccgggaggtgaggggcgcctctgcccagctgcccctactgggaagtgaggagcccctctgcccggccagccgctccgtccgggagggaggtggggggttcagcccccccgcccggccagctgccccgtccgggagggaggtggggggtcagccccccgcccggccagccgccccatctgggaggtgaggggcgcctctgcccggccgcccctactgggaagtgaggagcccctctgcccggccagccgccccttccgggagggaggtgggagggtcagccccccacctggccagtcgcccagtccgggagggaggtgggggggggtcagccccccgcccggccagccgccccgtccgggagggaggtggggggggtcagccccccgcccagccagccgcctcgtccgggaggtgaggggcgcctctgcccggctgcccctactgggaagtgaggagcccctctgcccggccaccaccccgtctgggaggtgtgcccaacagctcattgagaacgggccacgatgacaatggtggttttgtggaatagaaagcggggaaaggtggggaaaagattgagaaatcggatggttgccgtgtctgtgtggaaagaagtacacatgggagaattttcattttgttctgtactaagaaagattcttctgccttgggatcctgttgatctgtgaccttaccccccaaccctgtgctctctgaaacatgtgctgtgtccactcagggttaaatggattaagggcggtgcaagatgtgctttgttaaacagatgcttgaaggcagcatgctcgttaagagtcatcaccactccctaatctcaagtacccagggacacaaacactgcagaaggcctcagggtcctctgcctaggaaaaccagagacctttgtttacttgtttatctgctgaccttccctccactattgtcctatgaccctgccaaatccctctctgtgagaaacacccaagaatgatcaataaaaataaaattaaaaaaaaaaaaaaaagaaaatcctgtacctactaaatagttccggctgggcgcactg

SEQ ID NO: 19465 - DNA, 1273 bp, Artificial sequence
  DNA replication origin
ccggacgaggcggctggctgggcggggggctgaccccccccacctccctcccggacggggcggctggccgggcggggggctgacccccccccacctccctcccggactgggcgactggccaggtggggggctgaccctcccacctccctcccggaaggggcggctggccgggcagaggggctcctcacttcccagtaggggcggccgggcagaggcgcccctcacctcccagatggggcggctggccgggcggggggctgaccccccacctccctcccggacggggcagctggccgggcgggggggctgaaccccccacctccctcccggacggagcggctggccgggcagaggggctcctcacttcccagtaggggcagctgggcagaggcgcccctcacctcccggacggggcggctggccgggtggggggctgaccccccacctccctcccggacagggcggctgccgggcggagacgctcctcacttctcagacggggcggctgccgggcagagggtctcctcacttctcagacggggcggttgccaggcggagggtctcctcccttctcagatggggtggctgggcagagacgctcctcacctcccagacggggtcgcgaccgggcagaggcactcctcacatcccagacggggcggtggggcaaaggcactccccacatctcagacgatgggcggccgggcagagacgctcctcacttcctagatgggatggcggccgggaagaggcgctcctcacttcctagatgggatggcggccgggcagagacgctcctcactttccagactgggcagccaggcagaggggctcctcacatcccagatgatgggcggccaggcagagacgctcctcacttcctagacggggtggcggccgggcagaggctgcactctgggcactttgggaggccaaggcaggcggctgggaggtggaggttgtagcgagccgagatcacgccactgcactccagcctgggcaccattgagcactgagtgaaccagacaccgtctgcaatcccggcacctccggaggccgaggctggcggatcactcgcggttaggagctggaggccagcccagccaacacagcgaaaccccatctccaccaaaaaaatacgaaaaccagtcaggcgtggcggcgcgcctgcaatcgcaggcactcggcaggctgaggcaggagaatcaggcagggaggttgcagtgagccgagatggcagcagtaccgtccagcttcggctcggcatcagagg

SEQ ID NO: 19466 - DNA, 1387 bp, Artificial sequence
  DNA replication origin
tccccagcacccccccgcaggctcccgcttgcccccttcccgccccgtcgccagcccggaaagcggagtgcacgggccccggtgacggcgcgtgaagcgccgcggcccggcaggagccagtgcgggtcccgagccgtgctcggagtgggagggctgccagctcggccgcgcgccacagcccgcttcctccggtccgcgccaggcccgcgagggtctgagtcccgggtcagtgacgcgcgcccagggtccccgcacgcggcggcggccggcccggcctggcccctgcccagcgtctcccacgcggcgcctcgggccgcggacaaagatgcactttgtttcctcggagggcgcgaagggctctgcgggtcggctgcgacccggcgctggctgcccgcgctgctctcggtgcgacccgagcgccccccgccggccgcggtgcgcggcgcggggtctacgcggacggcgcctggggctcagggtccagcgtgggaagctgcttattctgtgaataaactgccttccagcacacccggccagcaaatccacgagcctccctgcagccaaacccagccagattaagtaataaaaacgcagacggagtcgccggagtctccgccgtggggagcgttaatgagtaacagccaggccagcgccaagccggcgtgggattaacgtttttaaattccggtcttatttattttggggctcttagctccttccagtgttatgctcagaacatcagactccaggtctgtgctcagccccgtttccttgctccctccgctccgaaggccccactcctggaaatgggctgtcttcggtcacccgggatctgccacgagtgtcctacagctgggggcggggcaggcaggccccaaagaacaatgaggcctttgcctcctctgcatcctgcgggccggatatccgttcagaagccgactctgggccttctctgtccagaaggaggaaaccctctgtccccagggctgccaggaagtcgcagggaggtgccgagagaaacagagaacagttattatgcattggagaatataaagaaatcaataaaccttccaggccttggaaactggtctggtcactgattgtaacaacccaagattacctgctttcctgggggagtatacccaccaccaccacttcctggtgtctagacttgggtcagtgagtctcccagggcctcatttatcttgtctgcaaaatgggggcaacaacagtttacctgtcagaaggcggagggctcagcgggtaacttttcaggcacttaccactccaggaattactgttctaagcaatccaggcttggtctttgctacatattcacgtgcctagagccctaacctttaatgaaaggatctctctcagacagcga

SEQ ID NO: 19467 - DNA, 1157 bp, Artificial sequence
  DNA replication origin
gacagccgcgcgccagcccagctcagccccggcgccgcgcggccgggaggactccagctcccagcaggccccgcgccgcgagcaccgaggcaggaggcgcgcctgggccggcgcttgcgcagtgcggccgcccgagcctgctagtaccacacccccgggagggactgaggggaggcagaagcatccgaggcattaaagcatccgagggagccggaggggaggagaatggagtgacagagacacgcggagggtggggggtgggggggagcgtgttgagggaggggggaggggggacacagagggaggaagaagcggcggcggcggcggcggcggcggcggctcctctttgcagagggggaaactcttgggctgagagcaggaataatgcggtaggcaaggcgggctgctggctcccccggctccggcagcagcggcggcagcccgagcagcggcagcagcagcggcagcaccccaggcgctgacagccccgccggccggctccgttgctgaccgccgactgtcaatggagctggaaaacatcgtggccaacacggtcttgctgaaagccagggaaggtaagaggcagggccggtacgtgcccggcgcgtccgccgcgggccagggtgcgggtgtcgggtggcgtgcgggctggggctgcgcccgtgcaggatgcccgctgccggcgagtgggtcgcgagcaggacacttcggagagcggctctgcagacccttcagggttcctgccttggggctcagagaatctggacttgggctgagaaggttgcagggatttggatgctaacatatctcctagtttccagcgctcgccctgcagagcgtgccatctcggcagctgttgaaaggtcagttggaaaagcattcattcggggagcgacgagcaaacatgcacataaaatagcgtttcaagtcggcccgggatggttctgtgtgaactggtgtgtgtgttcgaggggcgggggtggaatgagcagaagccaagtctttgcctgcgcaggctgagttgatatagactattgctggaaaccatccgctgggatgtttcttagggaaatcccgtcgtgtggaaggaagccttttaaaggcaaagtcagatgttgaggaattagccttttcatagaattatcaaaggatggctg

SEQ ID NO: 19468 - DNA, 968 bp, Artificial sequence
  DNA replication origin
tgcccagtctggaaagtgaggagcgtctctgcccggccgccatcccatctaggaagtgaggagcgcctcttcccggccgccatcccatctaggaagtgaggagcgtctctgccccgccgccctgtctgggatgtgaggagcgcctctgcccggccgccaccccgtctgggaggtgaggagtgtctctgcccggccgccccgtctgataagtgaggagaccctccgcccggcagccgccccgtttgagaagtgaggagcctctccgcccggcagccgccccgtctgaaaagtgaggaacccctccgcccggcagccacccagtctgggaagtgaggagcgtctccgcccggccagccgccccgtccgggagggaggtgggggggtcagccccctgcccggccagccgccccgtccgggaggtgaggggtgcctctgcccggccgcccctactgggaagtgaggagcccctctgcccggccaccaccccgtctgggaggtgtgcccaacagctcattgagaacgggccatgatgacaatggcggttttgtggaatagaaagcggggaaaggtggggaaaagattgagaaatcggatggttgccgtgtctgtgtagaaagaagtagacatgggagacttttcattttgttctgtactaagaaaaattcttctgccttgggatcctgttgatctgtgaccttacccccaaccctgtgctctctgaaacatgtgctgtgtccactcagagttaaatggattaagggcggtgcaagatgtgctttgttaaacagatgcttgaaggcagcatgctggttaagagtcatcaccactccctaatctcaagtacccagggacacaaacgctgcggaaggccgcagggtcctctgcctaggaaaaccagagacctttgttcacttgtttacctgctgaccttccctccactattgtcctatgaccctgccaaatccccc

SEQ ID NO: 19469 - DNA, 1223 bp, Artificial sequence
  DNA replication origin
ttgcaccgcccttaatccatttaactctgagtggacacagcacatgtttcagagagcacagggttgggggtaaggtcacagatcaacaggatcccaaggcagaagaatttttcttagtacagaacaaaatgaaaagtctcccatgtctacttctttctacacagacacggcaaccatccgatttctcaatcttttccccacctttccccgctttctattccacaaaaccgccattgtcatcatggcccgttctcaatgagctgttgggcacacctcccagacggggtggtggccgggcagaggggctcctcacttcccagtaggggcggccgggcagaggcacccctcacctcccggacggggcggctggccgggcagggggctgacccccccacctccctcccggacggggcggctggccgggcggagacgctcctcacttcccagactgggtggctgccgggcggaggggttcctcacttttcagacggggcggctgccgggcggagaggctcctcacttctcaaacggggcggctgccgggcggagggtctcctcacttatcagacggggcggccgggcagagacactcctcacctcccagacggggtggcggccgggcagaggcgctcctcacatcccagacagggcggcggggcagagacgctcctcacttcctagatgggatggcggccgggaagaggcgctcctcacttcctagatgggatggcggccgggcagagacgctcctcactttccagactgggcagccaggcagaggggctcctcacatcccagacgatgggcggccaggcagagacgctcctcacttcccagacggggtggcggccgggcagaggctgcaatctcggcactttgggaggccaaggcaggcggctgggaggtggaggttgtagcgagccgagatcacgccactgcactccagcctgggcgccattgagcactgagtgaaccagactctgtctgcaatcccggcacctcgggaggccgaggctggcggatcactcgcggttaggagctggagaccagcccggccaacacagcgaaaccccgtctccaccaaaaaaatacaaaaaccagtcaggcgtggcggcgcgcgcctgcaattgcaggcactccgcaggctgaggccggagaatcaggcagggaggttgcagtgagccgagatggcagcagtatagtccagcttcggctcggcatga

SEQ ID NO: 19470 - DNA, 1820 bp, Artificial sequence
  DNA replication origin
aattgttcatttttttttttttttttttgagacggagtctcactctgtcgcccaggctggagtagagtggcgcgatctcagctccactgcaagctccacctcccgggttcacgccattctcctgcctcagcctcctgagtagctgggactacatccacccgctgctaatttttgtttttgtatttttagtagagatggggtttcaccgtgttagccaggatggtctcgatctcctgacctcgtgtggtgatccgcccgcctcggcctcccaaagtgctgggattacaggcgtgagcctctgcagccagcctaaattattcactttaaaatggttaatattcagtgaatttcatttcaataaatgattattttttaatggcgatcagggtcagcctcatggagaacgtgagagctgtgcaaaagctgcaaggaggccaaacctgttaacccaaggctgttttctcccaaggagcaggaggagggttccaggcagagggagcagctggagcagccagagcagcgagaatgagaccagctgcacctcgagagcccaatccggccactgcctgtttttgtaaatgaagttttatgggaatacagccatgctcatttgtctacatactgtctctgtgacccagagaccctatctggccctttgcagaaaaaatcctcaggcaggaacatgcctggggtgtttgaggagaagagtgtggctggaatggagtgagtagaggtgagagtgggaggaggtgaagtcagggaggcagtaggggccgaatcatggtgcccctgtgagacttcctgcttcctgtggcacccctggcaatgtcgggacagacgctggcatcatgctgatgtggaagctctgggagtatgtgtgtgtatgtagggcatagtagggtagagacatagctgaacttagagtcagatgtcagaggacctagtcttgagacctgctgtttgtcccttgccagctctgtgtcctcagttctctcacccacagagcctgatagtagtggtgatggtggtagtgatggtggtaatggtggtgctggtggctgtggtgatggtgatgctgatggtggtggtaatggtggtcgtgacggtgatggtagtggtaatggcagtggtgatggtggtggtggtaatgatgatggtggtggtgatggtggtggtggtggtgatggtggtgatggtaatgatggtagtggtgatggtgatgatggtaatgatggtagtggtgatggtggtggtaatggtagtggtggtggtgatggtgatgatgatggtggtggtaatggtagtggtggtggtgacggtagtgatgatggtggtggtaatggtggtggtgatggtggtggtaatagtggtgatggggatggtggtaatggtggtggtgatgatggtggtggcaatggcagtggtggtggtgatggggagggtggtggtgatgatggtggtaatgagtggtggtggcaatggctacatttagtggcacctatgaggtgctaggtattttgcatatggtgctaatccttaacagagcaatgccaggtgggtagcagtgtctcagtttgcaggagaaaacacggagggacttaaccaaggccacacaggtggtatgtagcaaggcttagatagcagtgcagtgacacccgcttacattgcagtgaagatgtcatgaggcagtggacggttgtgtcctggtgaacagtgcagctgtcagggaggggaggtagcctttgtgggggaggtggcctggtgtcagcaccaccctccctggaagggtttcctgggagggactgtccccagcctctcca

SEQ ID NO: 19471 - DNA, 1048 bp, Artificial sequence
  DNA replication origin
tatcagttagggccccaccctgaagaattcatttaaccttaattacctccccaaagccccacccccaaatatagtcacattgggggttagggcttcaacatatgaatttggggacaacacagttcagttcataacacaccctgagccccctccactgtttggagtcccctaggtcacaccaggggggttgctggtgctgtgcatcagaggagccatttggagagactgtgccagaggccaggggtggggctggggcaatccaggaaggcttcctggaggagatgtgtgtacacacgagagggcttgggggcagtacatgcccttacgggggcctatttcagggaaccccacatgtaatccacaccagtaactcagatgagctgtagctgttttccaggagccactttctctccatggttatggcaagaggggagcctccgggtcctgcgtggcccagcaaggcagctgtgggttgatgcagcaaagcaggttgtgtttccaggtcattcgtgtggaagggaatgggatcccaggtgggcagggccaggcaacaaaggccagaaatcgagctgagcacccacgaagccttcctcagagcaaagacctgcagaggggaccactgcatgtggcagctgccccagatgctgtggccctggctgctgtgggagggtaatttttgttaagatgaactaagttgggactgcatctcacacagtggcctttgtataaattcgcttgccttcctcatccggtatctgtcccctctttggttcacaccctggatgcaggtgttcgggggaatgtgcattgccacacttagaacattcaagtttctgccatccctgtgtttctggagtgacagtgatgttcccgggggggaggtgtgggttcatgcagcaagtcccatgcagagtccggggcaaattcaggtcctgagtgaggtcgtagtgggtacctggctagcaggctgaagggaggttgaggagattgaggaggctgagggggcttgaggaggctggggaggctgaggaggcggagggaggctgag

SEQ ID NO: 19472 - DNA, 1012 bp, Artificial sequence
  DNA replication origin
ggtaatttttgttaagatgaactaagttgggactgcatctcacacagtggcctttgtataaattcgcttgccttcctcatccggtatctgtcccctctttggttcacaccctggatgcaggtgttcgggggaatgtgcattgccacacttagaacattcaagtttctgccatccctgtgtttctggagtgacagtgatgttcccgggggggaggtgtgggttcatgcagcaagtcccatgcagagtccggggcaaattcaggtcctgagtgaggtcgtagtgggtacctggctagcaggctgaagggaggttgaggagattgaggaggctgagggggcttgaggaggctggggaggctgaggaggcggagggaggctgaggaggctgaggaggtggagggaagctgagggaggtagagggaggtggagggagactgagggaggtggagggaggttgaggagatagggggaggctgaggaggccgagggaatctgagggaggcagggagggaggctgaagagtctgagggggtgaaggaagttgagggaggctgaggctgaaggaggctgaaggactctgctctttgggtagaacttcctgtttctcatgtttcctctctgtagaccacagtgcccagccctgccccaaagcagagccagagcttgtgtccatttcttgggtgtgtagtgtgcctttggcttctctttagttgtgccttggaatggcacacggggctgggtgggattctggaggcgcttagtgggtggcttctcagagctcaggccacagcccttgtgagtgggaagagtctgtgtgagtgggaggagcctgtgtgagtgggaggagtctgtgtgagtgggaggagcctgtgcgagagggaggagccttgtgagtgggaggagcctgtgtgagtgggaagagcctgtgtgagtggaaggagcctgtgtgagtgggaaaagtctgtatgagtgggaggagcctgtgtgagaggcaggagcctgtgtgagtggga

SEQ ID NO: 19473 - DNA, 940 bp, Artificial sequence
  DNA replication origin
tgttatttttttaacgtgggttttagtacccacagcaagagtatttttagctggttattgaggctgattagtgagccccaggcctccatttggttaaatagagccaccttcacagatgtattttcgtacagtgcaaatctagtgttctggatggtatagagttaccccaaatgatggccggccatttgcccagggcctgcgtcctgcagagcagtctagctacattcccacggtgccggaccaacggcgggctgtccaggggcagcaggaccctgggtgcttctcattctggaaaacagcaggcagctggctctagagtgctcagcccctttggagacgccactgctgccccgtcgcttgctagctgtgctgtattggaacctcttagacccttagtttcttcatctgcaaatcgggactaataatacctaccatgtagatataataataataccctgccatgtagggtgagcctggaatcagcactccatatggggtgtgtgtctgtgtgtgggtgtctgtatgtgtgtgtgtaggggtgcgggtgtgtttgtgtggatgggtatctgtgggtgtgtggtgtttgtgtgtgggtgtctgtgtgtaggtgtgtgtgggtatgtgtgtgtgtgtctgggtctgggggggtgcgggtgtgtttgtgtggatgggtatctgtgggtgtgtggttgtgtgtgtgtgtctgtgggtgtgtgtgggtatctgtgtgtgtctgcgtctgtgtggggggtgtgtgtgtgtgtgtgggtatctgtgggtatgtgtgtctgtgtgtgggtttgagtgtgtgtgtgggtgtctgtgtatgggggtgtgtatctgtgtgtgggtacgtgtgggtgtgggtgtgtgggtgtctgtgtgtggatgtatctgtgtgtgtgtgggcgtgtgtgtgggtgtgtatctgtgtgtctgt

SEQ ID NO: 19474 - DNA, 1769 bp, Artificial sequence
  DNA replication origin
gaataaagggcatgcccccctctgggggtctctatagtaacaatacctactgctccaagcacacatgggggcttctataatcctcacacaagctcagggagcagggatcattattgtccccattctgcagatgagaacgctgaggcttcaagaggtgaaatgagttgcccgaggccctagctggtagcggtgggctggagttggggtctaggcagcccatgctctgtatcctgaccccacactgccactctgggaaggtggacacagattggggttgtgtgttgcacagcccagggctccagaaccgggcgtgggcatggcgaacacagctccactagactgccctgtaattggcagaatcaggactgatcctccagcaagagttggctgtgcctcccagtatcagacctggtgaagtgggactaatggcagtgatgctgttgatggcggtgatgctgatgatggcagtgaggctgatgatggcagtgaggctgatgatggcagtgatgctgacggtggcgatgatactgatgatagcagtaatgctgttgatggcagtgggatattgataacagcagtgatgctgatgatggcagtgatgctgatgatggtggtgatgctgttgatggtggtgatgctgatgatggtggtgatgccgctgatggtggtaatactgatgatggcagtgatgttgacgatggtggtgatactaatgatggtggtgatgctgttgatggcactgggatattgataacagcagtgatgctgatgatggaggtgatactgatgatagcagtgatgctgatgatggcagtgatgctgatgatggtgatgatgctgatgatggtggtgatgctgatgatggcggtgatactgaggatggtggtgatactgatgatggcggtgatgctgctgatggctgtgatgctgatgatggcggtgatgctgatgatggtggtgatgctgatgatggcggtgatgctgatgatggcagtgatgctgctgatggtggtgacgctgttgatggcagtgatgctgatgatggtggtgatgctgatgatggtgatgatgctgatgatggtggtgatgttgatgaaggcagtgatgctgttgatggcagtgatgctgttgatggcgatgatgctgaagatggtggttgatgctgatgatggtgatgatgctgatgatggtggtgatgttgatgaaggcagtgatgctgttgatggcggtgatactgatgatggcggtgatgctgatgatggcggtgggatattgataacagcagtgatgctgatgatggcagtgatactgatgatagcagtgatgctgatgatggcggtgatgctgatgatggtgatgatggcagtgatattgatgatggtggtgatgctgctgatggctgtgatgctgctgatggctgtgatgctgttgatggtggtgatgttgatggcggtgatgctgtttatggcagtgatgctgttgatggtggtgggatattgataacagcagtgatgctgatgatggtggtgatgctgttgatggcagtgatgctgttgatggcaatgatactgatgatggtggtgatgctgatgatggtgatgatgctgatgatggtggtgatgttgatgaaggtggtgatgctgttgatggcggtatactgatgatgatggtgatactgatgatggcggtgatgctgatgatggcggtgggatattgatgcagtgatgctgatgatggtggtgatggtgatgatggtggtgatggatgca

SEQ ID NO: 19475 - DNA, 804 bp, Artificial sequence
  DNA replication origin
atgcctctgcttctctctctgggggcttcactgttcaacaaaggctcaaggcactgggttgggctgggcccaggtgctgcactgttctaagcagtccctcagaggcaagtctccttctgcaggggctgcagcagctggccaggaaggtggcacaaacgaggatgagaaaggcgaggggtgggctgggtgggccgggccgggctatgtgtcagctcctgccaggtgggacggcagccagggcctggggcttctgcttttcaagagaagccagaaaatccaggttattacatgaaatctcctcatttctaaatcttggcaatgaacctaccatttacttcttttgaaaaaccgtgtgcaggttgaacacccgcctatatgctgccatttgaaaccctggcatccagtcaacagtttgcagccacatcgtcaggtaaagagtttgcaatcatgctatcaggtggacaccaggagaagtgagaggaagagaaggtgtgagctgggatgggtggggcaggcagagcgggcttcctggaggaggggtacagatgggctggaaggacaagtgagaccaagacggctgaaaggcaagagggagctggaggggggctaaggcccagtgctgggactgagcaggggtttggggaagatggaggctgaggtctgggcccatggactgggctcaggagacaaagtggtgagatgtgtgaatttctgggctccagaggagggggagtgggttctgcggctgctaaggtagaatgggggacagacctgggggccagagactggcttcctcactgattg

SEQ ID NO: 19476 - DNA, 691 bp, Artificial sequence
  DNA replication origin
caaggactgcatcaatagctctgtctcgtgcacatactcagctaatttgcagagttgtacctcctgggtgcaagccccttcctgacagagaaggcaccaccgaggcacttggcctctaggagtgctcagactcatggggggctaatcatgctcagaggacgcatcaaggtgatacagatcgggcaccccgggggcagggggcatgactggctgccagctggaggtcagggagctgcacggggaagaggtatttaagttgagtcttgcaggacaaataggctttcaaggtgtgggtagggggaggggtatacaggtagagggaactgcaccagcaaagcagagtggcaggacgtgcagggtgagtctggggaacacccaaaacacgtttgacttagaaagcgggaggagggtgcagagatgggtcaaggggagggggctggtcagggagagatgatagaggatcctgaaggccaggtcaggtggcgggattttcatctggaggtagaaggagccagggatggttgaggtaggagagtgtcttcatcagaaccacgaggcaggaaggttactaggagaggaagagtctttgggagcagacacccaggtgagacgggatgaggctatgaatgaggccagagggctagacctgcgcagggggccttgactagccatggccagccacacgaccaca

SEQ ID NO: 19477 - DNA, 1389 bp, Artificial sequence
  DNA replication origin
ggcacggtggctcatgcctataatcccagcacttgggaaggctgaggcagtcgggttaggagttcgagaccagcctgaccaacgtggtgaaaccccatctctactaaaatacaaaattaaccaggcttgggggcacacacctataatcccagctacctgggaggctgaggcaggagaatcacttgaacccaggaggcagaggttgcagtgagctgagattgtaccactgcactccagcctgggcgacggagcgagactgcatctcaaaaaataaaaagtgaaagtcactgaatgctgcaaactcaatctgcagatgagcttgagcaggcagggggaggatggtaatcacagcattgctctcgaccctggctgcctggcgaaccgcctggggagcatgaacaacactcgccttggatgcagtccccagggagtctggggtaagactcgggcttcaggagttttgaaacctccccagctgattctagcgtagagccagggttgagagtcactattatgggaagtgccacatgcaaggagtgtgttgtttgttgtttgtttttagtgccaagggctttgggagtggccactccttggtgttccaggaaaccacatagtgttgagtgcatgaacatcacggttgtgccattgggctgatgtccgaaattggagaggatgtgggcatccagactgggggtgtggcaaaggtttggaacccgggtggccatccttgtggcctctgggctacctattgctatggtgacgggctgagattagtcatcgcattggagctattcctctaccttccagcacactccaggtcccgtgccaggccccaagggagatcccatggcacacaaaacagttggttgtttccagtctgaagaggagcaggggtgtcagcaaaaccccttaaatagaagtagaaatacgagtcacaagagaagagaacaggcagcctccgggaagatgggagagtagcggggcctccgtgcgtgcacccaggcatggctggagaaaagcgctccaggccctggaagcagcatgtggaaggaggcggctctgagggtcagagcgaccaactgtcctgctttgcctgggactgtcctgcttttagcactgaaagtcctgtgtcctggggagacagggacagttggtcaccctgggagtgaccctggccacttcgaatcagggcattaggaggatgaggtagcagagccccgcaaagcgcacagcctgacaaggtgcacagagcagcccaccggtgccctcctgcctcagccgtgtaccctgtggcccagggcctctgttcctggcatccgaggcctcaggtcagcaaaggttgcaggccctggagtgcgaagccgctgtgagctggggactttgcctttt

SEQ ID NO: 19478 - DNA, 1242 bp, Artificial sequence
  DNA replication origin
aataaaataaaataattgccatttctaaaaataataataataaatgaagggatgaatgaagggtgaaaaatatcgggggtaccatttacattgtactgtagtactccttggagttatgctattcagatgttctaggatggatggatggttgaatggacgggtagaagcaaggaatgaaggagggaaggaatgtaggagacgaaggaatgtaggaggcgaaggaaagaaggaagggaagggaacggaaggaggaaggaagggagggagggaaggaaggaaaaggaaaggaagatccatgagtatgaatgaatagatggttagatggaaggaagcaaggatgggtaggtggtagatgggtggatgggtaaaaaggtgggtaggtgggtagatggattggatgagtggatagaaggaaggaaaggtggggggtggatggatggatagatgaatggatggatggatggttaaatggatggaaggaagggtgggtgggtggtggatggatggatgggtgggtggatggatggatggatatataaaaagatgagtaggtaggtagatggatggatgtgtggatggatagaggaatagatggatgaatggatggctcaatggacagatggatagaagaaaggaaaagtggatgacagttggatgggtggccatggtcctatgaacaagttacgctctatatacagacccagtggaggatacacttctgcaaaggagcacctgtgcaaagcagaccttccccagagaatgtccaaacctttgcctggtatcttgtatttatgcaggtggcacttggcccagcagaatcaggtatggagggtggttatttaaccaaggtctacagctcttgatatggcagcccctgaccttcaagcacttctgtgtggcagtgcccaatgcaatgatgtgggacagagcgcacattctgaactctatatagaagggttgggtcaatgctggtcaccatagtgacgccatttctgctcttaaggatctggtaaagacactcgggatggaacagggtttcactactccttctggataactacagtgagtcagggagtaagagagaagtattagaattaagtctgaagtcccctcagggcaccagagaaccctggcaggagattttgtccccagccctcggcagaaaggagaggagcttagtgctcaactccccacagagactcacctgcacacctgtatgccgtccagacctggctcagggga

SEQ ID NO: 19479 - DNA, 1177 bp, Artificial sequence
  DNA replication origin
tcagccatggccagcagagcagggtaggctgggcactcacactgggacagcaggcacatcttaggagagtgagggggctgcacacagatggggaagccacaaagactcccgggatagcagggacgaggggggcccccaacttacctcagtcagaggcaggcagagaacggcagatctgactactccctgccttccccacacaccctcgcaggggaggcaggccagctagtacgcccatgtgtgggctgagtaaacaagacacagacacggtcccaagaccactggcttgtacatggcaaaattcagccctggtacccaaggcagagcctggaagggagtaagagaggagggaccagagcgagggaggagggaccagagcgagggaggagggaacagagctaggggggagggaacagagcaaggggggagggaccagagcgaggggggagggaccagagcgaggggggagggaacagagcgagggaggagggaacagagtaagggaggagggatggaccggctgggggagcacagggtgtgcttcatggtttcaagccagggcccaggttctcaaccctgctgctcaccacagtcacctgaagaatttgcagaactagggctggtggtggccctggtggacaccattaagtcagaacacctaggggtgggctcagctgtggtgtctcagtctcagcgcctctgctgtaaaatggggacaataacagccctccaacaaggttgtcgtgggatttaatgaggtgacctggcaggagcgcttcaccgggggcctggaggtggtaagtgccaagaaacagtggccatgttcctgtggtctcgagtgatgttacaactccctggcaaggtgggcagtggcacccgctatggagatgggcacgctgacctggttgctaaagtgactcacccaaggccacacatggaggaagctgcagcgcgaggttgtggacccagcaccctctgactgtggagtgtgactgagttgagtgtccacactgctgcctcagtctcccaaagtgctgggattacaggcatgagtcaccacacctggccattttaaatgttttattaatgtactgtatgccagcatgatataggtcaaagagtgttacagttcacaaaccacctttccccacctgccagtcctgccctccagccctgc

SEQ ID NO: 19480 - DNA, 2164 bp, Artificial sequence
  DNA replication origin
ttttcatcactagtattctaaaactgttcagtcaggggctttggaggcagaggcggagttcattcattgtgtgaattctttgtggagccatataatctggaaatttgtagttctgggaaatggtcttatgttgttattgttatcatcattttagtaactttttttccttccattgtctctggtctcttttccaatgatgacctttcacgccctgcattgagcccttaatttcatgttttattcttcctattttttaattttttttttttttttgcttttggagattttgactacatcttcagatcctcctattgagttttttctgcttttttatttttccagacaagggccctctagtctcttcctggggggccataagcctgatatgttcctgaactaaacatatttctaattaactgtgtcaggagaattttgctggcgcggggggtctatatttggaatttccctgaatccctttattcggttcggcgtctcattcttgccgtcctctgtgcctctctgttccggagcctccctgggtctgtttctttagataagaaaactcaactcttctgttgaaggtggcgggggagccacctgactgctcaagtttggagcaggacctggggtggaggacctgggggtctgatggcttctttctgccgccctcatcaattccgtctgggctacctgatgccctcgagctcctgccgtctccggacgcgcttctcgttggcaccccctccccacctgttcaggggcttggcttcattcttctgggtctctgcagagtcatctgctgtgtctccgactgcttctcatttcctgagccagttcttgaaaatattctcatatcatttattggatattttctttgcctcattctctttctgaaattgatgttagtaaagttagtgtcttgatcctttcattgtcctaggaattgtctcccacattccatctctggaagaagacggggtggagaggagccggaggccagcagacgggatgggggtggggagtggctacaggggatcgaagtttccagcttcccagagtaggggctacagggcctgccagccagaaggggaccactctgttcctttgtgttaattcaaggtgtcagtgggatgtccatgcccacattgctagaaaccaactggctacatgggtcagtagcttgggggagggttggtctgaaatctgggggggacatggagttagagttgtcaccaaggacagaagtctgggaaaccccagaattcacggaggggacagggagacaggagctgggggacagacagggagacagaagctgggagacagacacagggagacaggagctgggggacagacagggagacaggagctgggggacagacacagggagacaggagctggggggcagacagggagacaggagctgggagacagacagggagacaggagctgggagacagatacagggagacaggagctgggggacagatagggagacagaagctgggagacagacacagggagacaggagctgggggacagacagggagacaggagctgggggacagacagggagacaggagctgggagacagggagacaggagctgggggacagatacagggagacaggagctgggggacagacagggagacagaagctgggagacagacacagggagacaggagctgggggacagatacagggagacaggagctgggggacagatacagggagacaggagctggggacagacagggagacaggagctgggggacagacacagggagacaggagctgggggacagacacagggaggtgttggggatcctgagaggacagggctcttacaaggtgagggaagcgggaagagaagaaagtcgcaatgctgagcagggctggggccagctcactccagaggaaggtctgagaggcctcgctgcctgggcagcgtcagccggctggtggagcagcgctggctgggcggaagcctgtgtgtagcgtgaggaatgaatgggagggacaatggaggcaggggtgcatgcttttcttttaagagatttcaaaaaggaattggagactaggcacggtggctcacgcctgtaatcctagcactttgggaggctgaggcaggtggatcacttgaggctgggagttcgagagca

SEQ ID NO: 19481 - DNA, 1190 bp, Artificial sequence
  DNA replication origin
ggccgccgtcaggtaagcggcttcgggggcccgcgggctcggggtcggggcgccgtttcgcccgcccggcctcctgccctccctcttgtgctcgggcgcggctcggtggtacctcccagactggagccccggccgaccgcaccacctctccccgctgggtaccgcaccttcgcggtcccagccgcgacgggagcgcagagctcctccgggagccccggggaggaagtttggctgaaagaggaacagccgcagttttctttttagtgatggtctgggagaaaaaggagcgccccaaatctccaaactttggaggtgacatggggctccagattccgaaagcggaacggcgcgcgggcttctccctccgtgacgctctccgcctccgctgcgggcgtgggtggaaggatgccgagcgcccgggggagcacggctggacccgggcatccgactgggcccctgggcctggggcgtcgggggccttcgcttctgccgcgaggagccaaaaggtgggatcgcgagggtggcggaaccccaggatggagaagggcacttctgcggtccgagccagcgaagttctgacgttacgaaggattcgccttggccgtcactttgggccagcctgagccacgatctcgggcaacttgataggccaaagaccccacggtgaaggtggagccgtgcccttgattccggtccttccacccttttgctcatcacaatagctacgacctgtgcaggcctttgggtgcgccaagggctttgtccaccgcgttgggtgaactctcccttcacccctaggacaacccggtgagtgaggagggagcggaagccaggcgctgttaggtaacttgccccagtcacactccgcaggtgatggggaggctttcaaacccaggttcccctgactctgaagttcgggggctttgccgggcttcccacgccaagattcacttctgcttggcgctcagagtcccaacgcgttggtgcatttcctttctgctcctggtattttatgagggacattgtggtttagagactgggaccagactggctggatccgaatctcaccttcgccatattcaccagccgtgggacctttctgcagaatgaggttctgcacagtgggaataacagtagctactcgccttttaaagtacttaattggaacctgtcttccatccatcaggttt

SEQ ID NO: 19482 - DNA, 1790 bp, Artificial sequence
  DNA replication origin
ttttttttttgagatggagtcttgctcagtcacccaggctggagtgcaatggctcgatctcagttcactgcaaactctgcctcccgggttcaagcgattctcctgcctcagcctcctgagtagctgggattacagatgcctgccaccgcgcctggctaattttgtatttttagtagagatgaggtttcaccatgttcgtcaggctggtctcgaactcccgacctcaggtgatccgcccgccttggcctcccaaagtgctgggattacaggtgtgaaccaccgcacccggcctttttttcctttttttggagacagagtcttgctctgtggcccaggctggagtgcagtggtgagatctcagctcactgcaacctcctccttcagatcttggctcactgcaacctcctcctcccaggctcaagtgattcttctgtgtcagcctcctgagtagctgggattacaggcacctgccaccaggcctggctaatttttgtatttttagtacagatggggcttcaccatgttagccaggctggtcttgaactcctgacctcaggtaatccgcctgcctctgcctcccaaagtgctgggattacagacgtgagccacagcgcctggccctaactatgcatcttaatttttgtacttactctctgatgtgctaacaggacagtaaaagtgatttaaggctgttatattttccctttatttaagagatgcctggggttcttagctcaggagggattcatagcatgtcttaagccacaccagtgtttttcaggacacgctagggtggacttggcaactagcaaaacactgagctgctgtgcctaacttttacccctgtgtgccagtgtgcttatttcctgtcttaggattacttgtaatttggtctcggggaagttttctgggtgagtgcgttgcaccaattcccttattgttttaagaacgcagtgacctcacttggatccaggactctgccagcatttaaaatcccgctcttacgaaaggtgaaactcttgcctatagttaagtatcacagcttgatcccattacaatgagatggaagtttgtctgggcccggagtaggccaacaacagcagttttaaaagcagaactccccgcgctgggtctaaccctgttcttggtcaccgcgttcgcttcaggagcctggaaatcctcttttggcagcagaagggggagagtgcttggaaatgctcggaggaaaacgacttttggagggggaatagcggggagggaaacaacaagcaaccaccggccacacttggggtgcaactggggctgtggggtgggtagagggagagggaaagtgagcagaactggaagctcagaatagaagatacaaaagaaagtgccaagtagtgaaaaaaactgcaaaaggacggggggatggggggagggcgactggggaacggtttggaaaaatagcaattagtacagctaaaaataaagaccaatttagagacaaagccagatacacaaggagaaaaataaaactcgccagaaagacaatttcttgcaaaccaaatgttcaagaaaatgggggctaatgacatcccctctggggctgctccatagaagaaatgaaataataggagaccgtagagcgcgcagcgcccagcaggtgacgccgtgggggcttgagtggtcccggtcgtggagcctgaaggccctgccagaggcagtgcccacgtgtccccaaagttagagaagtgtcccgagagcgcggtgtgcgggacagagcaccgcccggcgcaggaaccgggggg

SEQ ID NO: 19483 - DNA, 896 bp, Artificial sequence
  DNA replication origin
atctaggaagtgaggagcgtctctgcctggccgcccatcgtctgggatgtggggagcccctctgcccggccgcccagtctgggaagtgaggagcgcctcttcccggccgccatcccgtctaggaagtgaggagcgtctctgcccagccgccatcgtctgagatgtggggagcgcctctgccccgccgccccgtctgggaggtgaggagcgtctctgcccggccgccccgtctgagaagtgaggagcccctctgcccagcagccgccccgtctgggaagtgaggagcgtctctgcccggcagctgccccgtctgggaagtgaggagcatctccgcctggcagccgccccgtccgggaggtggggggcagcccccgcccagccagccgccccgtccgggaggtggggggcgcctctgcccggccaccccttctgggaagtgaggagcccctctgcccggccgccaccccgtctgggaggtgtacccaacagctcattgagaatgggccatgatgacgatggcggttttgtcgagtagaaaagggggaaatgtggggaaagagagaaatcagattgttgctgtgtctgtgtagaaagaagtagacgtaggagactccattttgttctgtactaagaaaagttcttctgccttgggatgctgttgatctatgaccttacccccaaccctgtgctctctgaaacatgtgctgtgtccactcagggttaaatggattaagggcggtgcaagatgtgctttgttaaacagatgcttgaaggcagcatgctggttaagagtcatcaccactccctaatctcaagtacccggggacacaaacactgtggaaggccgcagggtcctctgcctaggaaaaccagagacctttgttcacttgtttacc

SEQ ID NO: 19484 - DNA, 1380 bp, Artificial sequence
  DNA replication origin
ggtgatgactcttaaccagcatgctgccttcaagcatctgtttaacaaagcacatcttgcaccgcccttaatccatttaaccctgagtggacacagcacatgtttcagagagcacagggttgggggtaaggtcatagatcaacagcatcccaaggcagaagaacttttcttagtacagaacaaaatggagtctcctacgtctacttctttctacacagacacagcaacaatctgatttctctctttccccacatttcccccttttctactcgacaaaaccgccatcgtcatcatggcccattctcaatgagctgttgggtacacctcccagacggggtggcggccgggcagaggggctcctcacttcccagaaggggtggccgggcagaggcgccccccacctcccggacggggcggctggctgggcgggggctgccccccacctcccggacggggcggctgccaggcggagatgctcctcacttcccagacggggcagctgccgggcagagacgctcctcacttcccagacggggcggctgctgggcagaggggctcctcacttctcagacggggcggccgggcagagacgctcctcacctcccagacggggcggcggggcagaggcgctccccacatctcagacgatggcggctgggcagagacgctcctcacttcctagacgggatggcggccgggaagaggcgctcctcacttcccagactgggcggccgggcagaggggctccccacatcccagacgatgggcggccaggcagagacgctcctcacttcctagatgggatggcggccgggaagaggctcctcatttcccagactgggcggccgggcagaggggctcctcgcatcccagacaatgggcggccaggcagagacgctcctcacttcccagacagggtggaggccgggcagaggctgcaatctcagcactttgggaggccaaggcaggcggctgagaggtggaggttgtagcgagccgagatcacgccactgcactccagcctgggcaacattgagcactgagtgaacgagactccgtctgcaatcccagcacctcgggaggccgaggctggcagatcactcgcggttaggagctggagaccagcccggccaacacagcgaaaccccgtctccaccaaaaaaatacgaaaaccagtcaggcgtggtggcgcgcgcctgcagtcgcaggcactgggcaggctgaggcaggagaatcaggcagggaggttgcagtgagccgagatggcggcagtacagtccagcttgggctgggcatcagagggagaccgtggaaagagagggagagggagaccatggaaagagagggagagggagaccgtggaaagagagggagagggag

SEQ ID NO: 19485 - DNA, 1446 bp, Artificial sequence
  DNA replication origin
ttctacacagacacggcaaccatccgatttctcaatcttttccccacctttcccgccttctattccacaaagccgccattgtcatcctggcccgttctcaatgagctgttgggcacacctcccagacggggtggtggccgggcagaggggctcctcacttcccagtaggggcggccgggcagaggcgctcctcacctcccagacggggcggctggccgggcagggggctgacccccccacctccctcccggacggggcggctggccgggcaggggcctgatccccccacctccctccccgacggggcggctggccgggcggggggctgacccccccacctccctcccggacggggcggctggccgggcggggggctgaccccccacctccctcccggaaggggcggctggccgggcggggggctgaccccccccacctccctcccggacggggtggctgccgggcggagacgctcctcacttcccagatggggtggctgccgggcggagaggctcctcacttctcagacggggcagctgcccggtggaggggctcctcacttctcagatggggtggttgccaggcagagggtctcctcacttctcagacggggcggccgggcagagacgctcctcacctcccagacagggtcgcggctgggcagaggcgctcctcacatcccagatggggcggcggggcagaggcgctccccacatctcagacgatgggcggccgggcagagacgctcctcacttcccagatgtgatggcggctgggaagaggcgctcctcacttcctagatgggatggcggccgggcggagacgcccctcactttccagactgggcagccaggcagaggggctcctcacatcccagacgatgggcggccaggcagagacactcctcgcttcccagacggggtggcggccgggcagaggctgcaatctcagcactttgggaggccaaggcaggcggctgggaggtggaggttgtagcgagccgagatcatgccactgcactccagcctgggcaccattgagcactgagtgaacgagactccgtctgcaatcccggcacctcgggaggccgaggctggtggatcactcgcggttaggggctggagaccggcccggccaacacagcgaaaccccgtctccaccaaaaccagtcaggcgtggcggcgcgtgcctgcaatcgcaggcactcggcaggctgaggcaggagaatcaggcagggaggttgcagtgagccgagatggcagcagtacagtccagcttcggctccacatgagagggagaccgtggggagagggagagggagagggagcggtactttttatttttgagacacagtctccttctcttgcccaggctctgttttttgttttttgttttttgttttttttttgagatggagtttcactcttgttacccaagctggagtgc

SEQ ID NO: 19486 - DNA, 940 bp, Artificial sequence
  DNA replication origin
tgagaagtgaggagaccctctgcctggcaaccaccccatctgagaagtgaggagcccctccaccgggcagctgccccgtctgagaagtgaggagcctctccgcccggcagccaccccatctgggaagtgaggagcgtctccgcccggcagccaccccgtccgggagggaggtggggggggtcagccccccgcccggccagccgccccttccgggagggaggtggggggtcagccccccgcccggccagccgccccgtccgggagggaggtgggggggtcagccccccgcccggccagccgccccgtcggggagggaggtggggggatcaggcccctgcccggccagccgccccgtccgggagggaggtgggggggtcagccccctgcccggccagccgccccgtctgggaggtgaggagcgcctctgcccggccgcccctactgggaagtgaggagcccctctgcccggccaccaccccgtctgggaggtgtgcccaacagctcattgagaacgggccaggatgacaatggcggctttgtggaatagaaggcgggaaaggtggggaaaagattgagaaatcggatggttgccgtgtctgtgtagaaagaagtagacatgggagacttttcattttgttctgcactaagaaaaattcttctgccttgggatcctgttgatctgtgaccttacccccaaccctgtgctctctgaaacatgtgctgtgtccactcagggttaaatggattaagggcggtgcaagatgtgctttgttaaacagatgcttgaaggcagcatgctcgttaagagtcatcaccactccctaatctcaagtaatcagggacacaaacactgcggaaggccgcagggtcctctgcctaggaaaaccagagacctttgttcacttgtttatctgctgaccttccctccactattgtccca

SEQ ID NO: 19487 - DNA, 1040 bp, Artificial sequence
  DNA replication origin
caggcccggctccaccccctctgctggctactctccccgagcgcccggctccgcccctcagcctcctcctcctttcagctccctcccgcttcctgccctttcctccgccttctcccgggtgtctcctcccagctcctccccgcgggtctttcctcctccctctcgtccttccgcccgcccctcccgctcttgcccaggcccctcccccggcgcgccagccttcctgtcgtggtcaccggtggcagctcgggagctcggccgagtcggtctggactgaccgcctccctccgcgcggccttggggacaggcgcccaccgctggggcctcccctccgtgcagggaggcgctcacgcttcgccaggccgagacctgaatccaaccccacacccgctctcccggagcggtgcggggtacgttccccgcgggcctgcgctgcctgcccgtaccgaaaccaggcgagaccccggggcctggctacaggggttcatccccagccaggcccacagccaagcggaggcgtcttctgttttcgtattccctattagaagtttgacaacaggaggcattcaataaatgcacatcaacgagggaaagcatgtaacaatagaaaacacacaagcattagcagcacgcggctaaagagcgaggaggaagggaggaatgtacaggtgctgctgtgtcccgaattaagcagggcggtttggagaagacttcacaaatggagccagttaatgaagcaagcggaaggaatatcgtttggcgaggataagatgaatggagaccctctcggggaaggaggagtctcccccaaacatccttgagctcagtctgtcttgaaaaaccagttgatatcctgaacagaatgggtctggagaatgaggcccccacttccggggccagttcgaggactatctagctgtgtgatcttggggaagtctcttggtctcagatggtggttgaactaatgaccttttatgacacccccagttctataaatcattgagtcttcctactcctaactccttgccttctctaatgcc

SEQ ID NO: 19488 - DNA, 752 bp, Artificial sequence
  DNA replication origin
ggctccatttgtgaagtcttctccaaaccgccctgcttaattcgggacacagcagcacctgtacattcctcccttcctcctcgctctttagccgcgtgctgctaatgcttgtgtgttttctattgttacatgctttccctcgttgatgtgcatttattgaatgcctcctgttgtcaaacttctaatagggaatacgaaaacagaagacgcctccgcttggctgtgggcctggctggggatgaacccctgtagccaggccccggggtctcgcctggtttcggtacgggcaggcagcgcaggcccgcggggaacgtaccccgcaccgctccgggagagcgggtgtggggttggattcaggtctcggcctggcgaagcgtgagcgcctccctgcacggaggggaggccccagcggtgggcgcctgtccccaaggccgcgcggagggaggcggtcagtccagaccgactcggccgagctcccgagctgccaccggtgaccacgacaggaaggctggcgcgccgggggaggggcctgggcaagagcgggaggggcgggcggaaggacgagagggaggaggaaagacccgcggggaggagctgggaggagacacccgggagaaggcggaggaaagggcaggaagcgggagggagctgaaaggaggaggaggctgaggggcggagccgggcgctcggggagagtagccagcagagggggtggagccgggcctggggcggagccagggaaggggaggagc

SEQ ID NO: 19489 - DNA, 1157 bp, Artificial sequence
  DNA replication origin
tcaaaaaaaaaaaaaaagaatggctatgtctgtgtatcccgttttgaatactaaaattgtaacaatctgtagctcggttttgagcaagtaagcatgttttcaggtttttaaaagagttattcatatgactaatcactgatattttatataaaaattgctagccagcagttgccaagtgccacaagcaaagtagtagcaggagaccaaagggaaagcatctttttaaaactgctgctctgctgccccagtgatgctgtatcaaggagggtggggtgtgtacaatgtgttcatgggagaaggggagtgatggtcgtgaaagctccaatggcagctactgctaaggcactggaggtaggagtcaacaagacaaagatcctgcctcaacctctggttttggacatgttgagtttgagatgtctggtagacatcccagtggaaatgttgggatatgtgaggctggagttttgggagagagctgggctcgaaataaacatttgggaaggtggggttggcataaggacagtattggaatccatgagtctggatgaaatcactgagggagtgaatgcagatgagaaggggatgagggaccaaacgttggggcacctagacatcaagcaggaggctggaaaggaactgctcaaagcggcagaggaggagtgaccagtaggaaggagccaggtgaagccgtgtgttgtaggatgagggagggactcagacgctactgagagttaagaaccaagagcattggatttagcaaagtggaggtcattgagcatgcttcagacagcagcttgggagagtggtaggggtgaaagccaaatcggggggtggggtggggggcgagttggggagagaatgggaggagtggagctggaggtactgaggagtgcagagtgagtaagaggacagcagtggctgaggaagaggagtcgctcgggggtgtgcagaggagaggagcggaggaggatgggcctgtgtgctgacggaaacgatcacagaaagagggatgccatgtccataagcttggttctgtcttctctccttccgtgtcacctggaattcttgctagttttgcttatttgaagggaaataaagtgagctgttctggtaataggagtataaagcttttctccctcatctttagttcccttgtc

SEQ ID NO: 19490 - DNA, 1095 bp, Artificial sequence
  DNA replication origin
tcagccccccgcccggccagccgccccatccgggaagtgaggggcgcctctgcccggccacccctactgggaagtgaggagcccctctgcccggccagccgccccatccgggagggaggtgggggggtcagccccccgcccggccagccgccccgtccgggagggaggtggggagggggtcagacccccgcccggccagccgccccttctgggagggagggaggtgggggggtcagccccccgcccggccagccgccccgtccgggagggaggtgggggggtcagcccccccacctggccagccgccccgtccgggagggaggtggggggtcagccccccgcctggccagccgccccgtccgggagggaggtggggggtcagccccccacctggccagccgccccgtacgggaggtgaggggcgcctttgcccggccgcccctactggaaagtgaggagcccctctgcccggccaccaccccgtctgggaggtgtacccaacagctcattgagaacgggccatgatgacaatggcggttttgtggaatagaaaggggggaaaggtggggaaaagattgagaaatcggatggttgccgtgtctgtgtagaaagaggtagacgtgggagacttttcattttgttctgcactaagaaaaattcttctgccttgggatcctgttgatctgtgaccttaccccccaaccctgtgctctctgaaacatgtgctgtatccactcagggttgaatggattaagggcggtgcaagatgtgctttgttaaacagatgcttgaaggcagcatgctctttaagagtcatcaccactccctaatctcaagtacccagggacacaaacactgcggaaggccgcagggtcctctgcctaggaaaaccagagacctttgttcacttgtttatctgctgaccttccctccactattgtcctgtgaccctgccaaatccccctctgcgagaaacacccaagaatgatcaataaaaaaagaaaatgcaaacataaaaaataaaaataaaaataaaatgtcatccaacataattaggagagtactgattaaagatttcttcttctggtcagttgc

SEQ ID NO: 19491 - DNA, 1212 bp, Artificial sequence
  DNA replication origin
ctccccacctccctcccggacggggcggctggccgggcggggggctgacccccccacctccctcccggatggggcggctggccgggcagaggggctcctcacttcccagtaggggtggccgggcagaggcgcccctcacttcccggatggggcggctggccgggcggggggctgacccccccacctccctcccggatggggcggctggccgggcggggggctgacccccccacctccctccctcccggacggggcggctggccgggcggggggctgacccccccacctccctcccagacggggcggctggccgggcagaggggctcctcacttcccagaaggggcagccgggcagaggcgcccctcacctcctggacggggcggctggccgggcggggggctgacccccctacctccctcgcggacgaggtggctgccaggcggagacgctcctcacttcccagacggggtggctgctgggcggaggggctcctcacttctcagacggggcggctgccaggcggaggggctcctcacttctcagatggggcggccgggcagagacgctcctcacatcccagatggggcggcagggcagaggtgctccccacctctcagacgatgggcggccgggcagagacgctcctcacttcccagatgtgatggcggctgggaagaggcgctcctcacttcctagatgggatggcggccgggcagagacgctcctcactttccagactgggcagccaggcagaggggctcctcacatcccagacgatgggtggccaggcggagacgctcctcacttcccagacggggtggcggccgggcagaggctgcaatctcggcactttgggaggccaaggcaggctgctgggaggtggaggttgtagccagccgagatcatgccactgcactccagcctgggcaccattgagcactgagtgaacgagactccgtctgcaatcctggcacctcgggaggccaaggctggcggatcactcgcggttaggagctggagaccagcccggccaacacggggaaaccccgtctccaccaaaaaaatatgaaaaccagtcaggcgtggcggcgcgcgcctgcaatcgcaggcactcggcaggctgaggcaggagaatcaggcagggaggttgcagtgagccgagatggcagcagtaccgtccagcttcggctgggcatcagagggagaccgtg

SEQ ID NO: 19492 - DNA, 1136 bp, Artificial sequence
  DNA replication origin
gcgggctgccactgccgcagcagccgagcccaagtctgagggcgttgtggctatgactttcaagatttttctcctttttgcagggcttatggttaaagttcctgtggggttatatttttcctgcaaattacttcttttccaaagtctgatgttgatgtcccctgaagacagcggcttttatgcgaccattgttgcagtggtcgggcttcatgtggtgctggcaattttcgtcttcatagtgtggaaggagggcttgccccagtggcgggaaaacaaaaacgaatagagcagcttcttcagagctgcagacgtggggggtggggaaatacctaaagggtttttgtcttgtttcttgttcgtattgaacgtgctttttttttttttttttttttttttaaaggggaagggtgggtggggagggaattaaatatttactgcagctaagacttcagtaaaattgggggtggggggagggttgacattttccgactgcctgttacgtgccaagtgctttttgttaaggacataatgtttttgactggggatcatgtttggctgatgtaaatattaatgccaaaataggagctaggatgaaagtaacactgtaattagtagtagaatttatttcatattaaaatgtgtcatgacgtaatttttatggcttggctcaagcaacaattttcagagtgcacgtaagtatcaacgcgtaaaacttaacattttacagtgttatttggtattattctctatgaagctgtctggatcggtctccttttcccattggttaattggttaatgctcagattttggctcctagaatcgatctgtgtgttcccggtcttggcatctcattatgtcatttgctgtattttttgatatattattgtacgtgcaaattgaggtgaatttgttgttttagattaagactgttggactcaagctacaacgaggtgtctctgatgtaaaaaactgcagtttaagattatggtaaatccttccctgcagtacctgttaaacaatgacctcattcttacgcagatttaataaattttttttccactattattttctgcttgttattagtagcattttgataaggtctagggaataggtatgaaatcccaagggagaaatgt

SEQ ID NO: 19493 - DNA, 1337 bp, Artificial sequence
  DNA replication origin
gaggcgcgggaggcccgcgccccgcggctcgctgtgcgtgggagggcgcgagcgaacgcgggcgaggagcggccgagccgctgaagaggagctgggcgccggccgcccggccgcgctcggcccgcggatcgcctccgcccggtcttcgccggccccggcccctggcgagatgccgtgtggggaggattggctcagccacccgctgggaatcgtgcagggattcttcggtgagtggcggcgccggggggcgggccgggcgggcagccgagtttgccgggccccggggcagggccccgccgcgcggcccccacgcggtaccatctcgagggctcgcgtggcccgagacggggccccggggcctgcaccggccccagctgggacagcctctcccccggtcgcagcaggcaggggcaggagccgggccgcaggtacctcccacctgcccgagtcgcagcttgggagccgccaaggtgaagtcgtggggcgcgggctgtgattcgcgggctgtgattgacggcctcgctcccagcctgtggcagggccagggccccggccccgggcgcagcaaactcggaggtcctcgaaccctggggagggcccgcagagccgcggggagggaaaaccactttgcctgtgggaagcccacaggatatttcaaaacttccggtgcgtcggggagtgctcgcttgcacagaagttggttctaactcctgtgctaccctcattctctctttcagagataagatttaatgttcatagcttagttttcctgttgggatgactttagaacccatctagtctggatctgctcctgtgccagagccagcaagaaatattgagctacttgagtttgtacacagggctgagaatcctgcaggcgagcttagtaaattttggttgcgattgctgttgctactttactgcgaagggtatacgaagaaaagtttatatttgttgtcgttaactgggcattttgacaaccgttccattccccagtgtctttttacacgtaatgagtggcggagtcagatccagctagaaatcactgtagatggcaacacctgacttgtctggagttaacttagagttgtagagcggccttagctcattgaaaaaaacatcttggggtactagagagaaaaggcagtgggaagctaaatcatcctcagcagccaaaatcgacggcaaacaatgtatggtatttcttataggagggcctctagtgcttactcaggaagtccttattaatttacctgtaattctaattagtttagttacctggcttcccaggctgtaactaatggcattatattagaaaaaagcctggatagacgtcc

SEQ ID NO: 19494 - DNA, 882 bp, Artificial sequence
  DNA replication origin
ggctgagccaatcctccccacacggcatctcgccaggggccggggccggcgaagaccgggcggaggcgatccgcgggccgagcgcggccgggcggccggcgcccagctcctcttcagcggctcggccgctcctcgcccgcgttcgctcgcgccctcccacgcacagcgagccgcggggcgcgggcctcccgcgcctcagggagcggcggctgcggtggggccgccgaggagctgctggcgacagtcaggcgggcgcgtacgggcccctagccttcacttcgcacaatggcgggaaatagccgccgccgaccgcgctgcctgcgacctgggtggagctcgcgtggggaggggcggcgggagcgcgcggcgcagcgcggctctgcgcggcgaggaggaggggcggcggcggcgccgccatcttggagacgggcaaaaggaagggcacgcagcgccgctggaggctgcgcagcgcggggcccggcgacgcgctccaagggcggcgcgttgtcgtttgtacccctgggccggcgtgtagcgggaactcccatagtgggcttataagagggcaaagcgagtctgcacaacagctgaaaagcattaagctcagagacctcagagtcatctctgggcaaaattagtgggcgaaaccgccttgggaatccgcccacctcctcttcgtgccttttttttctttttttgctgatggcagcacttttatttgggtccccggcccgaaaccctgagtggtgacttttccctcagctgcacaaggtctccctgaggaaggtgcacatttagagaaggggaacctcggaggaccccacgctccttctgcagtcgcgtcaggccctgtggctcagggacggttccttaccgaggggc

SEQ ID NO: 19495 - DNA, 1083 bp, Artificial sequence
  DNA replication origin
atgtggggagcgcctctgccccgccgccccatctgggatgtgaggagcgcctctgcccggccgcgacccagtctgggaggtgaggagcgtctctgcctggccgccccgtctgagaagtgaggagaccctctgcctggcaaccgccccatctgagaagtcaggagtccctccacccggcagccgccccgtctgagaagtgaggagcacctccgtccggcagccaccctgtctgggaagtgaggagcgtctccacccggcagccaccccgtccgggaggaaggtgggggtcagcccccgccaggccagccgccccgtccgggagggaggtgggggggtcagccacccgcccggccagccgccccgtccgggaggtgaggggcgcctctgcccggccacccctactgggaagtgaggagcccctctgcccggccaccaccccgtctgggaggtgtacccaacagcccattgagaacgggccatgatgacaatggcggttttgtggaatagaaaggggggaaaggtggggaaaagattgagaaatcggatggttgccgtgtctgtgtagaaagaggtagacatgggagacttttcattttgttctgtactaagaaaaattattctgccttgggatcctgctgatctgtgaccttacccccaaccctgtgctctctgaaacatgtgctgtgtccactcagggttaaatggattaagggcggtgcaagatgtgctttgttaaacagatgcttgaaggcagcatgctcgttaagagtcatcaccactccctaatctcaagtacccagggacacaaacactgcggaaggccgcagggtcctctgcctaggaaaaccagagacctttgttcacttgtttatctgctgaccttccctccactattgtcctatgaccctgccaaatccccctctgcgagaaacacccaagaatgatcaatcaatccatcaatcaataaaaaaagaatttgaaagagcagaaatatactctattatatgtgtgtgtgtgtgaatatgtatatagccttagatgtttttatcagttctactgaatcttcataaacaatgtttatat

SEQ ID NO: 19496 - DNA, 1325 bp, Artificial sequence
  DNA replication origin
atcttgcaccgcccttaatccatttaaccctgagtggacacagcacatgtttcagagagcacagggttgggggtaaggtcacagatcagcaggatcccaaggcagaataatttttcttagtacagaacaaaatgaaaagtctcccatgtctacctctttctacacagacacggcaaccatccgatttctcaatcttttccccacctttcccccctttctattccacaaaaccgccattgtcatcatggcccgttctcaatgggctgttgggtacacctcccagacggggtggtggccgggcagaggggctcctcacttcccagtaggggtggccgggcagaggcgcccctcacctcccggacggggcggctggccgggcgggtggctgacccccccacctccctcccggacggggcggctggcctggcgggggctgacccccaccttcctcccggacggggtggctgccgggtggagacgctcctcacttcccagacagggtggctgccggacggaggtgctcctcacttctcagacggggcggctgccgggtggagggactcctgacttctcagatggggcggttgccaggcagagggtctcctcacttctcagacggggcggccaggcagagacgctcctcacctcccagactgggtcgcggccgggcagaggcgctcctcacatcccagatggggcggcggggcagaggcgctccccacatcccagacgatgggcagccgggcagagacgtcctcacttcctagatgtgatggtggccgggaagaggcgctcctcacttcctagacgggatggcggccgggcagagacgctcctcactttccagactgggcagccaggcagaggggctcctcacatcccagatgatgggcggccaggcagagacgctcctcacttcccagacggggtggcggccgggcagaggctgcaatctcggcactttgggaggccaaggcaggcggctgggaggtggaggttgtagcgagccgagatcacgccactgcactccagcctgggcaccattgagcactgagtgaaccagactccgtctgcaatcccggcacctcgggaggccgaggctggcggatcactcgtggttaggcgctggagaccagcccggccaacacagcgaaaccccgtctccaccaaaaaaatacgaaaaccagtcaggcgtggcggtgcgcgcctgcaatcgcaggcactcggcaggctgaggcaggagaatcaggcaggggggttgcagtgagccgagatggcagcagtacagtccagctttggctcggcatcagagggagaccgtggaa

SEQ ID NO: 19497 - DNA, 876 bp, Artificial sequence
  DNA replication origin
cactgacgcgggggaacaaccgaccaagcctctctgtgccctaacttagtttgcgcagccgcttcccactggggcctgggttcgaggtcccttccccgccaagtgcccgcaacgtgtcctacgggaccaagagagacccttcctctctccttcctgggaccctaggcgcggagcgaccaccgcgcgccgaggctgagacctgctcccgggtctcaccgggcccgcgcctgtcgccagccccgcaccacctgcccgggggatccagggctgcacctctaaacagggacgcgcaccctggcccgtgccctcgggaagtttctccttctgtgtgatctttgaggcccacgttggaagtctttacccctggccccgtctccgattcctccccgctgtgcccagggccagactccttccgtgtccctggctttagcgcccgcggtcctggcgagcgttttcccagcgggcgtttgcggcgcttctcctactgagaaactgttgctgtggaggcttgagaagtcaaggggctgcaggccggggtgggatacacacaccctggagctctgtgcccggtcgatgtccgctttgggggcggaggccctccaggggtagccgtgaaatgcccagggtggctttgagcggctggcactgagaacagcgatcccgaaaagaagaaggggtggtggcgcaggttctttcagagatgcctgagcctcctccgtgcgcccagggacccaccgctcattgacttccagggcccaagctgcagggagctgtcacatctctctttcagacctgagcccagaacaccagctcagagccaccccgcagcctcccgtgagctgctgtcacctaggcacccacacctgcactggtccc

SEQ ID NO: 19498 - DNA, 1000 bp, Artificial sequence
  DNA replication origin
gaactcttccccaccacttgaggaggagctacgctgggaagagatgagctgatgcccagctcagtatgtgtgggggaggggggtgagctgatgtccagcccagtgtgtgtgtgggggggagggggatgagctgatgtccagcccagtgtgtgtgggggcagggcaatgagctgatgtccattccagtgtgtgtgttgtgggaggggggtgagctgatgtccagtccagtgtgtgttgtgtgagggaggggggtgagctgatgtccagtccagtgtgtgtggagggaggggatgagccgatgtccagcccagtgtgttagggaggggggtgatctgatgtccagtccagtgtgtgtggggggagggggtgagctgatgcccagcccagtgtgtgtggggggagggggtgagctgatgtccagcccagtgtgtgtgttgtgggaggggggtgagctgatgtccagcccagtgtgtgtgtgggggggggggggatgaactgatgtccagaccagtatgtgtgtgtcggggggatgagctgatgcacagtccagtgtgtgtgtgtggggtgggggatgagccgatgtccagccctgtgtgttggggagggatatgagctgatgtccagcccagtgttggggggaggggggtaaactgatgttcggcccagtatagggggcaggggctgccccattgaagtgcgagtttctgagagatgggcatgactggtcactgctgacttgcaggagaccccactccaacatcagaggagagtgggtgtgcggccaccagcagctgggcgaagatgaggccaagtcacataggaaggacccaggtctgggagagcaactagaaactgagaccctctagtggggcctagaaaataagctaaaccaccagagatgcctcccaggagagagcagccacagcagggcagtcaccagagacaagtctgttctccagcccctcacccagctctcctacccaaccaaccctagggccag

SEQ ID NO: 19499 - DNA, 1359 bp, Artificial sequence
  DNA replication origin
tctgtttaacaaagcacatcttgcaccgcccttaatccatttaacccttagtggacacagcacatgtttcagagagcacggggttgggggtaaggttatagattaacagcatcccaaggcagaagaatttttcttagtacagaacaaaatggagtctcctatgtctacttctttctacacagacatagtaacaatcctgatctctctttcttttccccacatttcccccttttctattcgacaaaaccaccatcgtcatgtcatcatggcccgttctcaatgagctattgggtacacctcccagacggggtggccgggcagaggcgccccccaacctcccagacggggcggctggccgggcgggggctgccccccccacctcccggacggggcggctgccgggcggaggggctcctcacttctcagacggggcggctggtcacagacgctcctcacctcccagacggcgtggcggcggggcagagacactcctcagttctcagacggggtcgcggctggacagaggcgctcttcacatctcagacggggcggcggggcagaggcgctccccacatcccagacgatgggctgccgggcagagacgctcctcacttcctagacgggatgacggccaggaagaggcgctcctcacttcccagactgggcggccgggcagaggggctcctcacatcccagacaatgggcagccaggcagagacgctcctcacttcctagatggggtggtggccgggcagaggctgccatctcggcgctttgggaggccaaggcaggcggctgggaggtggaggttgtagcgagccgagatcacgccactgcactccagcctgggcaccactgagcactgagtgagtgagactccgtctgcaatcccagcacctcaggaggccaaggctggcagatcactcgcggtcaggagctggagaccagccgggccagcactgcgaaaccccgtctccaccaaaaaaatacgaaaaccagtcaggcgtggcggtgcgcgcttgcaatcccaggcactcggcaggctgaggcaggagaatcaggcagggggggttgcagtgagtccagatggcggcagtacagtccagcctcggctgggcatcagagggaaaccatgcaaagagggggagggggagagggagccaatattttgaaatttattgagacattttagaacctagtatatagcctcttggtgaatgttctgtgtgttcttaaaaagtgaatgtgtattctaccactgttcagtaaatgccaattgggtcaagtttgttgatagtcaaatctatatccttacccatctttttgtcccattttttctgtcagttattgaacaagagg

SEQ ID NO: 19500 - DNA, 1120 bp, Artificial sequence
  DNA replication origin
ccctgtctctactgaaaatagaaaaacttcgctgggtgtggtggcatgtgcctacagtcccagctactcgggaggctgaggcaggaaaatcgcttgaacccaggaggcagaggttgcagtgagcctagatcgtaccactgcagtccagcctggctcatagcgagactctgtctcaaaaaccaaaaccaaaacaaaatgtaaccagaggggtcaattttcgctttgcagttagggtattttttgttttgttttgtttttgtttttgttttcagacggagctctcgctctgtagccaggctggagtgcggtggcgctatttggctcactgcaacctctgcctcccaggttcaagagattctcctgcctcagcctcccgagtagctgggactacaggggcatgccaccatgcccagctaatttttttgtattttcagtagagacagggtttcaccatgttggccaggatggtctcgatctcttgacctcgtgatctgcccgccttggcctcccaaagcgctgggattacaggcgtgagccaccacttgaagcaaggcagccgacgtgaaagcagagcgagaaaagctacacacgatgcggcctctgctgttcctgttcctgttcctggtcagtgatgttgcaggtttagggtcagcaaaccacagccggcagcccgaatccctgcctctttctagaaatatggtgttactgcaacaaaactgtgcccacctgttcattgtctgactgttttcaatgatagggttgaaaagctagaagggaatcaagtggcctgaaaagcctaaaatacttactctctgggcctttacagaaaaatagttcaataactccttctctagggtcgaaatgcttcctggtgatgaaatctcagctgtctaactgccgtattgtttacagactggtatgaggtcctttgtaatttttctgcagctaggtgcattagaacctacctccttagaaggttgttgttataagctccgtcccatctggcttcttcataggcccatgttgccatgggaatgggcccaggagactccaaggtttatccgccaggctgaccttagtcttattgagaggtgacatcgtgctggcagtcctcagagcc

SEQ ID NO: 19501 - DNA, 916 bp, Artificial sequence
  DNA replication origin
atcggttggggtggtgcgggatggagagggttatgggatcgtttggggtggggtgcgggatggagaggggttatgggatcagttggggtggggtgtgggatggagaggggttatgggattggttggggtggggtgcgggatggagaggggttatgggatcggttggggtggggtgtgggatggagaggggttatgggatcggttggggtggggtgcgggatggagaggggttatgggatcggttggggtggtgcgggatggagaggggttatgggatcgtttggggtggggtgtgggatggagaggggttatgggatctcttcgggtggggtgcgggatggagaggggttatggcatcggttggggtggggtgcgggatggagaggggttatgggatcggttggggtggggtgtgggatggagaggggttatgggataggttggggtggggtgcgggatggagaggggttatgggattggttggggtggggtgcggtgtggtgtgttctgcttttggccaggctggagaggtgagctccataacatggtatggtcatccttgccatgtttgcctgtagtgacctcccctgaacactcctagatgagatttttgtctgcatggaagggagctcaaggaaattgtgatgggacccacagtactgaagtggacaggagctgaacaagcatttgcacatgatacccctatggaggttacttggtaggacaggctatgaagtaggggcagtatggatgaggtcacgtttctttagcccattccttgagatgatgatgatgatgatggtgatgatgataactggctaccatttattgagtgcctgtcatggttggactctgtgctaggtactttaacatatattatctctcatcttaataacccagaacatcttgggttttc

SEQ ID NO: 19502 - DNA, 1706 bp, Artificial sequence
  DNA replication origin
aggaatgaaccacattttctaagactgggggtggcagggaggcctttaatacaaaaatctctaaactctacattttttatgtacccactcgatgtttcaagttatgtcataggatttcaacactgctggagcctccccaaatctcatcataaaaactgctccttttagctttgactgaggacaaaaatggaggagggaaaagaatatgccacatcatttccaaaggaggaataaagaaaacctctgcttcaaagatagcacaggtgaaacggtgtgattcacagcaaaagcaagaaaagtatgtgtgcagtgtgtgtgtgtgtacacggtgtgtgtgcgtgcatggtgtgtgtgtatgcacggtgtgtgtgtgtacatggtgtgtgcgtgcacggtgtgtgcatgtgctttcagatagcttgaaagatttttcctcttaacttttctttcctcttagtcaagagcctcagaagataatttcggatctatttctacatacatgtgggaggaaagtacacaaacattctcattgatttactaagcatttgcagaatgcaggggaattttctacctctaacacgacttcaggaacaatcctaagtcctcgcagaggtttcaccccaggctccttccccggcctgctcgcccacctgtccctgcccagaggagcctccttggctccaggcagagaaaggtggacagggcgctccgctgaatctcaagccgttccatcatcccgctagctggcactagaaatttgcatttcagccatttccaggtccaaaccccacggcagccccctccccaaaactctggaaggcggagacctaaggcgacaggtctgcacagttcctcacaccagtggacaaaagtatggtgcgacctcctaggcaggataattaggtccccaggctcggtgttgggaatacaggcccagcatgccgctggcggccacaatcccggcttcctgccttcaataccataatccttcctggagtctgagccccagtgaaagccccagcgtgtttatttttccccttgaaagggaactctcttctcagcctgcacgcgggaggagttgtcaccctccctctgatggatggctcttctcggccgcccgccccccggtccattttcacctcggcacaagcctgcccccaaagacaggcagagtgacaagcaggaagggcttggctgcggagcggtccccatgccaggcctgtgctgggctcttcaatttaccatgacattcccaaaacccccgccctccaagaaggcagaccaatacagtgccctccgctttgggcttccacctaaggggtgatctgtccactgctggctcggccactgggatcacctggtgttttgttcctgggtagatttcacatcaggaaagtcaacagtgtccggctcctccaaagtgcagacccatctcttcgcttaaggcctccctacttctccccagcactgagtaggagcgggagctgtcaaggggtcaaggctagggggaaattcctcaacaaattgaaatctcaaaaaacacacactgacccaggaccacaaagccctcccggtttaatgcttgcgtccaatcagaacttgcgagcagcttgggggtgctccccaccaccaccccctttcagggcagcacttctttcatttgtttgcctgaaatatcctgtttttctcccccttctcggggcgct

SEQ ID NO: 19503 - DNA, 884 bp, Artificial sequence
  DNA replication origin
ggcaagctgcggcctcggggcccccggggctcgcggccggcccccgccagcccggagagcagtcgccgcgccgggccaggtacgccgcatgcagccccgcggcgcccgagctttgtggcggccgcgcgcgctccctcgcccgctccgcacccgccgcccgcccgctcggctctccaccgcgctctcctccagccgccgcccgcgccgccgccgccgcccccgcctcctcgcggcgggtcacgcccccactgaaacccgagccgtttcctggacggcggcgccctctctgccaatcagcgccgcgcgcccgggccgccccgagtcccgcgcggctcccgacgcctccgagcagccggagacaccggcccgggaggcgagggctcggccgcgatgcggccgtagggatgcagcgacagcctccgaataaggcctggtcccgcgccccgcgccacctcctccctcctccccgggcgagcgaggctggccaacggctcgctgagcgactgcgttacgttgttttatgtcaagttagaaaacaaatgaccgaaggctctaaccctgccctcccgctaaagagactttaaaatgcgcctgcttgatactgcggggagggttgccaggcagctgaagcttttggaggagaggaagccacttggaaatgttcgcaggacattgcatgtttctgtccttctaaacaatagaaatgagaggaaaaaactgaatattaatggaggccctactatgggagggtcacactacataggtgattctatttcatctgcccaaccaccctgcagagtactattcccagtttctgataaggaaacaggatcagagaggttaagtaatttgcctaggaccacacagctggctactaggacagc

SEQ ID NO: 19504 - DNA, 1318 bp, Artificial sequence
  DNA replication origin
ctgacgacggcggccccttatggagaaggaacggaaatagtggaaagctgccctcggtcaagatggcgcgggcggcgtcagctccaagaggcgccgggccggccgggcctgcgggcgcccgagtggcttcgcgcgagcctcgggaggctcccgggcggcgcgctgcattgtggggtggcggcggcggccgcgctagcgacgcggggccgggcggctgagcgttcgcggggccgaggccatggctttctgggcggggggttcgcccagcgtcgtggactatttccctagcgaggacttctaccgctgcggctactgcaagaacgagtcgggcagccgctccaatggtgagcgagccgggccggcgggcgtgggaagccgggcgcccgggtctcgggatcccagggtcccccagcgaggacgcgagggggccggagcccctggccccagtgccacggccgagacggagggggcactctcgggagggccgcggcgccggcttagcggggcagcttcgcggtgcctgttctgcaggaaaatcctaaccggtgcccgtactctcgaaatcgtggtggtctccccagagtcgggagacggacgcccgtctggggtagattgtgtgaggtgaaggacggcgcgcagtgccagggaacgccccagagccgtagttaatggccggggctgaccggtgggtgctgcggtgggagcgtcccgggagcgagggcgaaacgcggtgcagagggagctgtgggtgtgcacacaggtgccggtcatgtatgaatcagacttccctggacgaatgtacaggaaggatgagccctttgcatctctgggttaaaaaaaaaaaaagttaaaaaaaaaaaggacaagaaactggtgaccgcggtcgctaccggcgagggattctgtttgtcctgatctgtttgaaatttttaccatttgcttatatgccgtgtctttcctccacccacccggacgacagcaaagccagcccacaagtttgttttgtttttccatcgtgattcagatttctttgggggagatttgttgctggtaaacaaaacatcgtgtttatttcctctcttgccatgcatttgccaatatagaatgtagactctattattttaatagaacagtctagctttgtggaaaacgagattcgcatgaaaacacacaggcattttccatgaaaaaggtgtaagtggggaatgatttggtcgataacggtgtgtgcatttgctccttcattaaaagtgtttattaagtgctacttgtgggcagcggttttgagtagacagttatgcaatcgttagaagtgagg

SEQ ID NO: 19505 - DNA, 832 bp, Artificial sequence
  DNA replication origin
gccgaccaaggcctgtgccgccagatccgccatcagtaccgggcgctcatcaactccgtccaacgtaaggcggcgcctccgggcggcgcgggcccggacgggccgctgtccccgccctgcgccgggcgcggggggagggcaccggaggcaggtgccgggcggaggcccggcgcggcgttagtagagacgcgccgggtgccagcccctcgccgcaccttaaattgttgacaaagtgctcccactttgtggctggagccgtacgaccttggcgcgggtccccgagtggcgggctggaaaagctggaggccagagccgttcgcggactcgcccgagcccagccagccagtggggagaggcaggacgcggactccgcgtgctttgattgcgcccggcagtcctcggcgtgggctcccggcctcgcagcggcagctgcagctgcagcggcacgcgagagctgtcaaatgcacgttctcggaccccacccggacccgcggaattcgaatctctgggtgggtccgcgcaactgtggagtggccctccaggtgatggtgtgtattgcttgcaaagtttgagaaccactcagttatggagcactcagaggctgcagccggagtccagccctttgggttaaggttagagggagctagggtttccttttaaaattcatgctgcataaagggtagggtggcctttctccttttccgggtcattttggttaaaaagataaagatgttcgaagtaattactcagagcgcaggggccggggcttggctttactgttgcaggtgataaccttgtcaactgcttattagtgaatgctgaacaaatttcc

SEQ ID NO: 19506 - DNA, 924 bp, Artificial sequence
  DNA replication origin
tcaccgtgcaacttcggaacggcggaagttcgcgccagaaactgaaacccctgctctgcgccagcgcctgctcccggcggaacgcggctcccgggcccgcgcgagcgcacagcgacgcctgtggctggaggccggcgacgggcccggccgggtctccaaggcgcctggggggaccgctgggtgcacaagaggggcctggcggggatcctttgttcccttgacaagaggtgtaatgagctcttactccacactgcagggctgtgagaatcttggttttctgcccctactttcccaccctcctggacctgcatcttccctaggtccctttgcctgcccaggacacagccgcagcctggcacccacatgggcacgcagtccatgtgtgttgaacgagcttcctgctgtggagcaggatgagcgcgggatgtggagtccagacgcggtctgctgctcacctgcgacctcagtttccctgtgccatcatggctggggtcgggggggtggggaacaggggtgggtggatgaatcaaatatttatgtgcagctggcaataccattttttgtgaggatagcagaacaaattaacaggtaaacatccttctaaatatctacaacagaatgtcaccagagcaccagggttttgttctaggacccgctgccccctcacagaaatcactgagaaaaccattattaccaaggaagaaggctttagtagggtgctgcactcagggagttggaagctcagtctcaaatccattgccctgaccaactaaaattaagggtttatacagttgcagggaagcaatgtaacaatgtatgggaaaagaggaactcgggagggggaaggaagctatggggatgcatgaggggcttggcatctcattgtctggaatgcggtgatatggcgagtttcagttttttgat

SEQ ID NO: 19507 - DNA, 1193 bp, Artificial sequence
  DNA replication origin
cccggccgcccgcccgtggccccggcacttacccgcccggggagataggggatggcccgcacggagccgccttcgttcggagtcgcaactgccaaagagcccgggggcgctgggttttccgagcccggtggcggcgcggcgcgtggggtcaccacggtccggtgcggccctgggacgcaaagtttcccgggacaacggcgcagggccggcgtggctccccgaaaggctcgggaaaagttgcagcacaaaaggccaatgactgggcgagcggcggctgccgggccaggctcctcccccagctctgggctctccgacccggggcagcgctcggccagctgctcgcgcagggcgcccgccgcgctctcctccccggccaggaatgcgcggggccgggcgcgcccagacgcaccgaggggcccgcggccgcagagcggcaggcgagagacgcacggaccgatggacgcacagcccggccgctgctcctggaggcgctgcagacttccaggagtctctgagtcatgacaacttgttactgttcttagtttgtccacggccttcccactacgcatggcaacgccgggaaggctgtggcgtgagaacggactgggaaggtcaagtaccggccaggcggcccgcgcttcctctgcggggccgttgcccgcctgaggctacccaggagcctcagaaagaagctgggggtgaaatggtgcctcgcttgttcctggagccaaattccggcccttttttcttcacctgtgtggtattaatggcgcttaaccacagaaacagcgcgggctgtgctggacagtttgcaaaacttgacgtgcgttctatttggctgttgcacactctgaagtcggcagaggctaaatccaaaccaattccagctgccatatttctaggagttatgtatctattggcatgtgaggtctgttttcctttaagggcctaactaactccttcactgacatggacctcacacccagaagtggtgcttacctgccaacaccatggcatatcaccttttctctagaaatttctgcagctaggccccaatcatgaagagcccgtgactatatatagacagcaggcttcccatttttagtgtcacagaaagcactgctatagattatatactcagggaccaaagggcatgagactcagaaattactcagcacttcctttcctcctct

SEQ ID NO: 19508 - DNA, 1917 bp, Artificial sequence
  DNA replication origin
agcgtcctggcgcgattcctgcagccgggagccggggcgagccggccggcggccggggttgctgcactgcagaggggagcagctgcgggcatccgtggcggcgggagcggcggcagggagctgcgactcgcggcccgagccgggggccggggggcgagcgccgcgtatgtgtgcgcgcgagtgtggccggcgcgcgcccgagtgtggccggcgtgcgcggctctgcccggggcgtgcgggtatgagcgtgagcgccggtgtggtccgaaaggctcttctcttaaaccccccggcagccggctcctgtgtgtgacacgatgatgtcatcatcgccgagcagccccaacgcctgcatcttcacaaagctccatcgcgggctccggaaacggggctgggggtggggaggcgaagaccctccctctgccccggcccctcccgcctcgccgggaccgcccgcattgtgtagctttgaaatgcaaacgagccgcggcccgggagctggggccctagaaaggaggggcgtggtggtcgggcgggctgaccaccgagagagtagggggctcagccctgttggctcatccctccaggaaggaggaaatggtctctcccggcccaggactaaggggatggctggaggaacaggtaaataggctgcagtgggcagcgggcagcgggagcgacgctgggagagacgtgcgcccttttccaccgccggcttctgcctccttcaggccccgggtcctggaggcagctgaagtctgtaccagggagagctgcggcacctggctctcccctcacagccagcccggggctagcctccaaggacctttgcaccgcacagtctgagggcctggggcaagctagggagcaaaaggtactgggcctgcgagcgggctggggctgcaacaccatctttggccaccaaatgagctccacaaagccaagccctgtgcaaaggctcaccctaaacaagcagaggcgcggccagctgagccgcccaaggcaggcccctaatgcagcatgcgtgtacagggcaaaggcagttctccgtgacatgcatcggctcagctctgtgattctaaacacgggctgggcctgtaggaatgtccgtgacaccccatcaccaagctcccagtgcccagtcagccccattctgtagctggcagcatgtcacccatcagcagccaaatccctgtccctggcctatggcaggctcagaaaccctcaagacttgagatcctgagcctcctcactggaggctgctgcagaaagagttcatctctgtataggtacaggaggtttggggcacacctgggaaccccaccatcccctcatgctgtacattcaacacaaccgcttcctgcgctcccagcccagactcacaactgaattcaaatggaacctctgatgggtaagtggaagactcttccacatttcccagcttgtcttcacccacagggcagtgagcctaaaatgtatctaaactgtggccaaaagcaaaagaaaataaaaacaaaattgttcaaagcattttaaaattgcctccaatacactgttttctagcgacgtggccaaggatgtttggatgggctcttttgatactgacactcgaggtcacagtagttccagagcttcacggggactgactttccactgctcttattcagtatcagtgtcaaacagaatgccagaggatcaacatcgttttctgggatgtaacagcatgaaatttcccagaaacactgagaaggtttacttttgcatttatatgaaaatagctaatgattatgtcaatcttgcggggaaggtggctgtcggggtggtgtgacgaggtgtgctctggaaagcacctcccggggaagccgtcactcactgtcagcattggatgtcacttggtggcaaggatcctgcaacctg

SEQ ID NO: 19509 - DNA, 1610 bp, Artificial sequence
  DNA replication origin
agcccgcgatggagctttgtgaagatgcaggcgttggggctgctcggcgatgatgacatcatcgtgtcacacacaggagccggctgccggggggtttaagagaagagcctttcggaccacaccggcgctcacgctcatacccgcacgccccgggcagagccgcgcacgccggccacactcgggcgcgcgccggccacactcgcgcgcacacatacgcggcgctcgccccccggcccccggctcgggccgcgagtcgcagctccctgccgccgctcccgccgccacggatgcccgcagctgctcccctctgcagtgcagcaaccccggccgccggccggctcgccccggctcccggctgcaggaatcgcgccaggacgctggccccgctcgcggctagcttgcacgccagggcacagcgaggatgggagggtcgcagtccctgcagccagccccagccagcgacctgaacctggaggcttccgaggcaatgtaagtgctccgcccgggccgccccgagtctcccggggaggaggagaggatgcccgggctttgttagtgtcgcctttcctaatgcctgtgcaacctggagcccaggctggcctggggttcttcgcagccttggaaagctttacctggggctgctctgggaggagcatctggtagccccaagttactgctgtgggcagaaacgattccctggaattcagttttggtcgctcagcagtgggtgcatggctggggggcttctcctgccgtcagcatctttcctctgcacccccggcacagtggtatttcctgcaagggaacagccaggcatcagcgactgcctcctcctaggaagaacccatgagcgtggcagctccgtgcccggggcgacagcccagtttccgggcagctgcgcttgtggctgggcagatggcgtggtgcgctctggtggacgttccgtctagttagcctaagcatcatccacatactctggtgaacactcgaggacaaggccgcttgctattattagtaaagggccgaaccgtcctgtcattggtggaggcagtgcttgactgtgcatcgatccaggaatccgatcttttctctcaaccacagagctaacgtgctcagaagtggcctttatcctggccgagtgtttattagaattcacgtttctgttatggtcgtctccattacctacccaggcatgtttggacgatggggcgtattgaatgggtctgccggccgggtcgcatttcagcaactcaggcttgtatccaaagtggacctcccagcctcacctgcccccacttttccagagagaagactatgtttcagagaagagtattttctggggacttgggggtaggggtagtaaagtgggttcttaagagtcatggatgtgtagattaaaagatggtggggattgatctgtgtgttgtaggagggatggggccccggggggtacttcctcactggtccctcgacccctgggcttcagtgaggagctggctcggcgtagtgatgtaatgctaggctgagcctcgtggttttctgggctccagctctttagcagggagtcattcttccgagcaggtgtgcacccatcatttgtcttcacccct

SEQ ID NO: 19510 - DNA, 1409 bp, Artificial sequence
  DNA replication origin
gtggccactgtgggcgggtgaggtcgctgtcctccccgtgtgaacacagccactgtgcgcaggtgaggtggtcgtcctctcagtgtagatgtggccactgtgggcaggtgaggtcgccatcctctcagtgtagatgtggccactgtgggcaggtgaggtcgccgtcctccccatgtgaacatggccactgtgggcaggtgaggtggccgtcctccccatgtgaacacggccactgtgggcaggtgaggtcgccgtcctccccatgtgaacatggccactgtgggcaggtgaggtggccatcctctcactgtaaatgtggccactgtgggcaggtgaggtggccgtcctctcactgtagatgtggccactgtgggcaggtgaggtggccgtcctccccatgtgaacgcagccactgtgggcaggtgaggtaactgtcctccccatgtgaacacagccactgtgggcaggtgaggtgcccgtcctctcactgtagatgtggccactgtgggcaggtgaggtaactgtcctccccatgtgaacacagccactgtgggcaggtgaggtgcccgtcctctcactgtagatgtggccactgtgggcaggtgaggtcgccatcctctcatgtctcctcacctggctctatgcaggccccaaactctccatcgtccttccagcctgggatgaacggggcttggatctggtggctgtgaacccatatacccctggctcgatggccagggcccccaggtgcagtgccagcctctgcctggactgcatcagaatctccagtggtctcacctgttccctggtcctgggcccatgaaacactcacattgtgaagagggagcagccggcccaagagggcccgagtgcctgtggcagccagatccaggcctgaaaaggctcggccctcagcttgctgtgtgctctggtccgaatgtgtgtgtccccgaaattcctatgttgaaatcctcatataaggtgatggtatcaggaggtggggcctttgggaggtgatgagctcatgggggcagtgtcctcatgagtggattagtgcccttacgaaagaggactgaggaagactgtgtgtcctttcaccatgtcaggacacagggaggaggtgctgtctatgaacagaaagcaggtcctcactagacaccaaatctgccagtgccctgagcttggacttcccagcctccagaactgtaagcaatacatttctgttgctaacaggtacctggtctatggttacgttgatagccgtgtgatcagacctaagacagtgtgctgtcatcagctgtcatagggaattcttgtgtgggtgaagagggagagtctgtaagcacctggcccaggtcatagcaggtgtcaggaaaaggcaaccacagccccctgctcttcacacgcca

SEQ ID NO: 19511 - DNA, 891 bp, Artificial sequence
  DNA replication origin
tgggaagtgaggagcgtctctgcccggccgcccatcttctgagatgtggggagcacctctgccctgccgccccatccgggatgtgaggagcgtctctgcccggccgccccgtctgagaagtgaggagcccctccgcccggcagccgccccgtctgggaagtgaggagcgtctccacccggcagccacctcgtccgggagggaggtgggggggtcagccgcccgcccagccagccgccccgtccgggagggaggtgggggggtcagccccctgcccggccagccgccccatccgggaagtgaggggcgcctctgcccggccgcccctactgggaagtgaggagcccctctgcccggccagccgccccgtccgggaggtgaggggtgcctctgcccggccgcccctactgggaaatgaggagcccctctgcccggccaccaccccgtctgggaggtgtacccagcagctcgttgagaacgggccatgatgacaatggcggttttgtagaatagaaagaggggaaaggtggggaaaagattgagaaatcggatggttgccatgtctgtgtagaaagaggtagacatgggagacttttcattttgttctgtactaagaaaaattcttctgccttgggatcctgttgatctgtgaccttacccccaaccctgtgctctctgaaacatgtgctgtatccactcagggttgaatggattaagggcggtgcaagatgtgctttgttaaacagatgcttgaaggcagcatgctccttaagagtcatcaccactccctaatctcaagtacccagggacacaaacactgcggaaggccgcagggtcctctgcctaggaaaaccggagacctttgttcacttgtttatctgctgaccttccct

SEQ ID NO: 19512 - DNA, 1121 bp, Artificial sequence
  DNA replication origin
ttcttagtacagaacaaaatgaaaagtctcccatgtctacctctttctacacagacatggcaaccatccgatttctcaatcttttccccacctttcccctctttctattctacaaaaccgccattgtcatcatggcccgttctcaacgagctgctgggtacacctcccagacggggtggtggccgggcagaggggctcctcatttcccagtaggggcggccgggcagaggcacccctcacctcccggacggggcggctggccgggcagaggggctcctcacttcccagtaggggcggccgggcagaggcgcccctcacttcccggatggggcggctggccgggcagggggctgacccccccacctccctcccggacggggcggctggctgggcgggcggctgacccccccacctccctcccggacgaggtggctgccgggtggagacgctcctcacttcccagacggggcggctgccgggcggaggggctcctcacttctcagacggggcggccgggcagagacgctcctcacatcccggatggggcggcagggcagaggtgctccccacatctcagaagatgggcggccgggcagagacgctcctcacttcccagatgggatggcggccgggaagagacgctcctcactttccagactgggcagccaggcagaggggctcctcacatcccagtcgatgggcggccaggcagagacgctcctcacttcccagacggggtggcggccgggcagaggctgcaatctctgcactttgggaggccaaggcaggctgctgggaggtggaggttgtagcgagccgagatcacgccactgcactccagccttggcaccattgagcactgagtgaacgagactccgtctgcaatcccggcacctcgggaggccgaggctggcggatcactcgcggttaggggctggagaccagcccggccaacacagcgaaaccctgtctccaccaaaaaaatacgaaaaccagtcaggtgtggcggcgcgcgcctgcaatcccaggcactcggcaggctgaggcaggagaatcaggcagggaggttgcagtgagccgaggtggcagcagtacagtccagcttcggctcggcatcagag

SEQ ID NO: 19513 - DNA, 1233 bp, Artificial sequence
  DNA replication origin
cctccccgctcgccacagcgggaaccgcgctccagcagcccggcagccccgcagccgccgccacctcgcgcctggccccgtccaccacccctgctccagcgcggccgcgttcttcaagctaaactttaccgcggcctcggcccggagcacccgcgccgccgcggccccggctcccacagaggctcggctgcccggagcggcgtccgcgacggccagcccgcgcactgcgcacgcgtccccacgctgcctcagccctcagacggcggctgagattccggagcgggcgctcccagcccgcagagactacgagtcccggcaggccccgcgcgggtccctgcggcgtggcgggccgagtttctggcgtcttcctggttccagcggcggcggcctcggcgcgccggggaggcctgcgcgcggagctctgggccgccgcgccgcggtgcttcctggtattcgtagtttttgaccaccactgggcttggctcggaggtagaactccgggttctctgatgtcatcgcctagagctgcgaggaacagggatctttaaaaataggcttcgttagtttgcagataatttgtttgcaagctgtcccataatcggtccaagtgtcacaaatttacaggctgcggtgtgacctggagaaaaacgctttacagctctgcgcgccaatttttcgctcttctctctccctgcaaatgtagctccactgcctacttacaatggtgttaatagtacaggagggtaagagagacttaaagaagggttagtcgaaattctttcagcaacggtggagcataaatatgtattctggtaaatattcgttgagtgtttagcaatttctcgagcacttaactgtgtgccaagtacgcgataggcaacccggcattcatctgagaaagagacactgtcactgcccttatggagcctgcagcttgggggaaactcgtccgcaaactagcaaaatcgttccagattttaatagaatggccagactgagaaagttcaagagacagtagcggtggcggggacggggggaggctcttcagagagagtggcaaggcaagttctctgaggatgtgatatctgagctgaaacctgaagaatgagaaatattcagacaggcaaagaactgggaaagaattacatgccacgcctttcacagcgcatgccactctaggctcttaataaatatttgttctttttgtgtgcttcttcctttcctctccttgca

SEQ ID NO: 19514 - DNA, 1167 bp, Artificial sequence
  DNA replication origin
ggagggcccgtgcggcgaggggctgcagtgcgtggtgcccttcggggtgccagcctcggccacggtgcggcggcgcgcgcaggccggcctctgtgtgtgcgccagcagcgagccggtgtgcggcagcgacgccaacacctacgccaacctgtgccagctgcgcgccgccagccgccgctccgagaggctgcaccggccgccggtcatcgtcctgcagcgcggagcctgcggccaaggtactccgccgcgctcctgggcagctccccactctctccatcccagctcggacctgcttctgcgggactggtgggcaggttgaggggcagcgaagcgttgtggggtggccagggcaactctcggggacaggcaggtgggccccggggtggcggatttccgcgggctgcctcggaaccgagcttcgcgcccagcccggggccggttctgcgcccagacgatgccagtacgcccggcctgcactctggggctcgagacgccgggcgaccggccatggagtgccctgagggcaaccacacagcgcggggaccccaggacaaataagaggaatgggggcataaaggaaggagagaagttcaggactgggaattggcgcctcgcagagcggcttcaggaccacaagaagtcatttcggttgctttttcttctatttacgtcctccgtcccctttaaaattcactgctttgatcacgggaccgctcagtgaaaactgtatgtaactcttttggaaaggaacagtgtttgccggcccgccccggagtttctccaaaaagtctaccccgagcagggaacggtttggcaccgctctcgtttcggcggcgttgctgcctgtcttgctttcctcgttttgagccagccctacaaaaatgaaagtggctccttttgaataagctgaatcgggctttggatcacgaaatctgcagaggcggagaagggaccgggttagtgatgaggaagaagtctacccctctgttcctacagccgcacacaggacctgttctggcaggggagacggtggtgatgggggaaggagtggaatggagcaatgtctaactctctcgcgggaccttccggagagatgctcctcatcttcaggcagaggccatgtggaaaaataatatcgagttcagcagcggccagccccgcgttgta

SEQ ID NO: 19515 - DNA, 1356 bp, Artificial sequence
  DNA replication origin
cccccagagcacactgcacagtctacctgcggactactttaaatttaaattactttaaaattttataaaataattcccaagacagaaaccaagtaagagcaagaggtggcctagatctggaccgtccactgagggctggcagggcactcttgcagggagaccactttgggggaagccatctcctccccagccccattgtcactgaggaaatgggaaggggaatttccaggccactctgccacagacttgtcagggagctcagaacttactgtttggacgggtgatgttgagaaaaggagctgttgacaaaaagaaaagatcaggatcagttttctggcatccctgacacagctgtcgactgctcatgagctgtgcagatgctgtgccaagcctgagtccacagggaggagctggacacaggccttgcccttggggagctcacttgcctttggggaggtctggaggagagcgaatcccagcacactgggaaaaggatgagattgaccaaagcctggggaaggagaggagcctggaagtctggcccctgccccagatggagtggggaaaaaagggcagtaattagggggcaggcaaagaggtagaaacggggtgtcccaggcagaggaacagcaggtgcaactgcacctgggtggaatagatttgggaacctccgtgtagatggagcaggcagaggatggggagagggcaccaagcatagggagcagatcatggggagccctggcagtcatgctgtgctgaggagcggggtcatcaccagaagaccctgaggaatctcttgaaggggctgcacagtggagaatggatgggagggcacaggcctgaagctgctgctatgggaggccaggaggggatgacaaagcaagcagggggcggggcagtggggggtgttggagaggtgccagggccatgctgggaacactcagagcagctcaggggcaggcagggaggagctctgcgatgcagtgggccccatttggccaacactggtcagggtctggtgtctgtgaggacagtcaaatctgacaggtggcgggcctcacctcgggactgactggagatcctaatcttaggtgggtcaggccactgaagcacagagaggggcacactatcctggtggccggcaggggaggggacaggggctgtagaggatggtaccacagatgaactccttggagagtgagcaacatgccctgcacagtctaggcagcagtaatggagagacctggagaccagggaagtggaatggaaatcggagggacttaccaggtgtcgatagatggtttcctgaaaaaggaatagaaaaaaagcataggtcacagacatgtggcttggagg

SEQ ID NO: 19516 - DNA, 756 bp, Artificial sequence
  DNA replication origin
ctccagcctctggtccctgggagcaagcagggcaccggtggagcaggtgcctctggggccgcacggaaacccagctaggccagttcctccactgcgccggtaggcggcggagacgctgcgcgtgcgcgcagggcagacggtagagcggagacgacgctcccagactcctccggtctccccgggcagcatgaagaccgccgagaacatcagaggaaccggcagcgacgggccgcggaaacgaggcctctgcgtcctctgtggcctccccgcggcaggaaaatcgactttcgcgcgcgccctcgcccaccggctgcagcaggagcagggttgggccatcggtgttgtcgcgtatgatgacgtcatgcccgacgcgtttctcgccggggcaagagcgcgaccggcggtcagcacggaggggcggggcctgggccgcggggcggggcggggcggggcggggcggggcggggacactcgcgtccacgcggtcctgggtgatttgccatgagcgcccattgcttggtgtgggaggtgaagttcgagaaaagtggagctgggttaacatagttactgcagagggtgaatgcgttggctgtagaaagtggttacaaagccaactgttagaacgatgcattttagatgcttatctgtatatttgatgcatgtatatgttgtatattctatacagttgagtcttcagacagggtcaggttctcaagtcagcgtgcaaggtggaaagcccctatagtcaaatgcact

SEQ ID NO: 19517 - DNA, 1047 bp, Artificial sequence
  DNA replication origin
cggcgattgggcgcgtacaatggcaaatgggattaggcaggcgaaggctcagccgagccccggccccgcagccgcctccgccaccgccccctcctcgccttccctcggattttggcgctttggcttcgggctataagagcccgcccgttattggctttatatagtccaattaggcagcaaatgaggacaagcctattagcacaaaaggatattggctcccgctaaagaggcactcggagcgctcctgcgagcgcaggaggcgagcgagggacgcggagcaggcggcgcccttggccgaagcgcactaacggccgcgagcccggagaccgcgcctgcctctcccccctgcggcgcagggacccgcttcccgccgccaggcctgcgggaggggggaggggcggaccaggccctcccgggtcacctcggggttatctgcgctcgcagctgccgctcccccgccccctggggctggacaggggcccgccgcccccacgcagctggagagccacgcagcgccggcccaagaggcaggacgtgacctcggccctcggagaactcatcattttcctaccctttggggtccggcgacctcggtatttttcctaaagcctgctaggaagggcgaggccaagaagagagggatttgggttccccacccaccatccagccgatagtaagggaatccaggtgtaagtcctcgcactgcgtcttcggactcagaaatccgcgtggccttggcctttagccctggaaaaccgaagagtgagccttcccccgggaccaggagtgggtgtgcctgtgtgcgtatgcgcgctgacccggccaaaacccgcgcgtcactcggtggggctgctggggcaacagcttctcggcaccgacggctgctctcggaagggcacccctctgctctggccgccggtgcccaaggctcgcggatcaactccgagtctgtgaccccgacgacagcactttctcccaggaagtctctccggccagctggcgtttggagctgtctaactaacgctttaatgggggcaaggtgaaccg

SEQ ID NO: 19518 - DNA, 1729 bp, Artificial sequence
  DNA replication origin
gttaccgactgcggccctgcccgtggcagaactcttccctacttaactcctcgaggggctcgttaatgggctaattgattaggagtcggccgcgcagccggggcaggggcaggcgagggggcgggggccagggggtgcgcgcagcggcccgggaggccagcgaggggcaggtgccggcctccgtcaccgcattaacctcttcagggctcagcggcagggtcgagacacattacaaatggtcagctttaatcatggtgtcagctcattaacccggaaggacctggcgctgaaatacaatttgtgcgttctcctctgcgccgcggcggcgcaggctcctgggccacgtcgcagcgggtcccgcgtgctcccgcgctgttggggggtacgcgggaggttcagcgaaagaatcgtcggattctcactaaccatccgcttctcgcagacatcctgagctaggcgctgcctccggagccagggtcaaggcagccccgaggggaactggccagctaactcggggagcagtgccagccaccccgctggggaagaaagctgggggcaggcagggaaagttggtcgaaccttcctgaactgtaaatatgtcgtgcggggaacatgctggaagctccccagcattcttcgctttaatcctgatggcaaacaagtgacacagatctattcactcaatgtacaggccgggaaactgaggctcaagaaaacaagagactagcccaggcagacaaagcaagactcgtgctcaaggttgttccactgccaatacatcacatttgggaggagggagagaggagcagacacaggcattgagcttggaggatggctgcggggaagactgtgaggatcctgctgactcgggatggcgggggcgggtatatgggtggggcaagagcccaaggagtgatctctgtcagatcaggggacctcgaagtgggcctcggaaaagcaactcccaggccctgaaacagtgagagactggggagtcgacccttgcaagaagcctggcttgcggactctaaacaaggaagttatgaagccttgcgtccctatctctccttcccctagggatagtttgggaagtcaaaaagatccatcttgccttgtatttcctctgtcccgtccctctaatcgcttcgagggtctgatcttcaccgaggcacttcctctgctgccacacccggcaaaggacgcattaattcgcatgaaggcacttgcataaacgcctgcgcacactcacacattcattcagcaaacgttcactgagctcctactagtgcgtgcactttaccagggaagagatggtggtgggcacggggctggggcaaggaaggctgtggtggagacccagctctgcagcctgactgactgcagttcccctgagctcccctcgattgatagcccgagggacctcccgcccctccagcacctatagccgtcacaccgcaaggacgggagggacaagaaacaaccttccttgccgcccctttctagcatatggggatcttcaccgggagcacggaggcccagacgccctctcctgggcccagtgtagctacaaaactcactcccaggaacactcagttcctggaaccaccacccacagacacctcatgtctctcccctaacgagtggcaatccttcaactcagtactatcccacaccccgcccacctccctagccttgggatagctccgcccaatcctactcagtttaatac

SEQ ID NO: 19519 - DNA, 1371 bp, Artificial sequence
  DNA replication origin
gcctggctctgggtgcgcccgcccagccccggtgcaaatgccccttcctcgcccgccaactcgccgggtctccggcggcgcggaggcggcgcggcctcatttgcatagaggttacccgaacgcggccaatcgcagcgccgccgagcggccccggaaaatttcaaaacgctccggccaggcacacagcaccggtgcgcccccagagcgcgccgagggcctggcgggcatcagcggcgtctaaccaggggcagccagggctgaaagcagctgcagattctagcccgggttcctggcggctgcggcaactccgactccttggaccccttggacccttctctccagaggcaggggcggtgcgggactcggagctggagtggctcgacgcctccgcaggcgacgggtctccgcgcctcccaggggcttgtacaggctgctccaccatcctcccccagccctccaccccttctagccccagtgggcgggcaaagccggcactcctgggaccgtggcgccctgcgtgggggtgaggtgggttaggagcaggcgtctccaggcggacgctcatcctctccagcatggccaggagccttgggagcagacattccccttccccgtctgcagacctcatccctgtcacaggttctacggacctacagaatctttagggggagggaggaagccctaagacctctagtcaagagatctgggttcaaattccggcacaactatttacacactgcatgaacttgcacaactcatgccgattaaagcctctctgccctcatagttgaaaataacttctcggattgcctcaggtagggattaaaagcctcgaagcactagcagcgcatagtaggtactccataaacctggccgggtagcccatggcccacccgtgttttaagcgaatctgtgtttttgttttgtaaattttgaaggtttccgaactgctgcagaaatagacgccttactcccaggaagaagataaggaactggtgacaggactcggttttagaattgagcagactcgactcaattctcggctgggtgatcttgggggaagacatttggaaattctgaggctcggtttctttattcctaaaattggaggaagcagtgcctccctcgcagaggctgttgtgaggtcaaactacccagcaccgagcctggcacaccgtggtgctcagtaaatagtgattccctctgtgttctcatagcccccttctgtgccctggctctcgcccctttaattcctagatcagctgttacccgagctagaattagcccagccaagcaaagcggtttggggccacagtcgtctgcacaagcttcctggaaactgaagtgaggcaaggcccgaagtgctcaggc

SEQ ID NO: 19520 - DNA, 1239 bp, Artificial sequence
  DNA replication origin
agttcttggtttccttcgatttcttatgaacccaggatgggcagcaaagaagatgcgggcaaggggtgtccggcggccggtggcgtctccagcttcaccatccagtccatcctgggcgggggcccctcggaggcaccgcgggagcccgtcggctggccagccaggaagcgcagcctgtccgtgtcctcggaggaggaggagccggacgacggctggaaggcgcccgcctgcttctgcccagaccagcacggccctaaggagcagggccccaagcaccatccccccatcccttttccttgcctgggtaaggatcgcacgtcgccagtgtggcagcgagcgagcgcgaggggagggaggctgagcgccccgccaagactcccgcgccgggccccctctggccagagctgcggcagccgggggttcgggaccgcggggagaggggcgcgcactgtggtgcctcctccgcccggtgggcccctgggagcaggcgaacacagacccgtgccggcttgggcttcctggggaaggttgagttgttgagagagtggaccacagcgagagggacacgcggccggccttacacccggctgtcctcaatcactgcacatctggtactttctttccggacacgaggtggagatctgcaagtcgggtctgggcagtctgtctccaccgtaatctctttctgagtcttcttcctcactcgctccgtatctctgcctttctctctctctcctccttggaatgattagcactccaagatgattgacaatggtgcatttcagagacggttcctctttacaacatttgacgaaggggagtcctgcgttagtccttagcgtgatttccaaacaaacggcctgtgaaatgatgccaccctataaagctcgaggaactcttccagctcaattaccaccaagcaaattcgccttttaaaaccatgctaatgtttccccctccagacctcctctccctgttgcccctggcccattcataaaggtgggagcacagagaccccatactccaagtagctgggtccctctcttgtcgcttttaaaggacggggtgctgggtttggggggccagtgagagggataagaggaggggattggtaaggtgggaccaaggctgcaggcgcttgccaaccgcttggtcccagggagagctggcggtctccgaggctccccaaccaactccatggcctttctgtctgttctcgctcctcaggtacccccaagg

SEQ ID NO: 19521 - DNA, 1914 bp, Artificial sequence
  DNA replication origin
tgtttctgccctcctgacacctcatttcatgagcatttaataaagtttggatgtttgtcccctccaaatctcatgttgaaacataatccccaatgttggaggtgggccctggtgggaggcgaaggcgattggataatgggggcagagccctcatgaatgggttggcaccatcctgaatgacttctcagtccatgagagatatggtgtttaaaagcctgggacctcccccttctctttctggctttcactcttgccatgtgacatgcctgctcccactttgccttttgccatgattagaagcttcctgaggccctcatcagaagctgagcagatgttggagccatgattgcataccttgcagaatcatgagccaattcaacctcttttcttcatcaattacccaatctcaggtattcctttacagcaaagaaaaatggcacaatacagcatctacaatgtgcttggtactatgtgaaggagataattaagtataatgaggtctctaccttcagggcgtagagtccaccacgtccttgcttggcttactttatctagtggcttgaggcccaggaatgtccagtcaccactggccacaccaggaggctccagaacagggctttctatgtccaggacagggatctgaggttgctgacatggtgcagggggtcactgcagggcagcatctcacagagttgaagggggctgcaggggttctgagagctgcccctgcctgtccatccccaccccttccccacagagtcttggttgagaaccgaagggccacagtccctgcacactttgctgaggggaggcaggggtcccctgtgtccagggtctctgttgcttggaccatgcctgccagctgacaccctccccattttctgaagagttctggcaccttatatcaggcaggtccctcataaactagaatgtgctgcctcaccagtctcagggcagaggggtgtgtggcttcagggctacaggaggcagctgctggaacttggagcaggacaacagagtatccaccatactagggttagctgtctaggctggttgtggacagcctggcttgcccaggtgggagcagtcagggtcagcaaaggcatctcccagctggagagatgcccaggggatgttacagagagcctcggggtccctgcagcaggcttaggattcagccgaagctctggctgtagggcgagggaaagaaggcactgagaatcgagtaacctcagtcatgcagcagctgttcttgggacagacaggctgggacactcacgtcaaggtctgccaggatagcatgcaggcggggacaggtggcactggggcgtgaaggtgtccaggcatcccttccttttctcagagagatttccttgactcagcctgtctttgacacacacggggggatggaggatgttgggggaagggagccacagtgagccaatcaccctgcaccggagccttcggggctggttccctccgagcctgtaagtgtgagtgtgtgtgcgcgagtgtgtctgtgtgtgcaccagtggggatttctgtgatagaagcagccagattccagagacagagagaagaggagggggaagaacaagagaggggagaaaattgggggtgggagagacagacggagagaacagcgcggggggcggggagagggagagaggtggaggggagagcagagagagagagagcgagccagagagcagagagggaggaagagagaaagcaagagagcgggagggtgcgcggagcggagcggagacagagctcgcgggcatggggtgagagcgggaggaagcagaggcagaggcggagcaggggcgcaggtgcctgcaacccaggatcccggggcgctaaaggcttcgggttctaccgcacgctcagtcgctggctccagaggtgctgctg

SEQ ID NO: 19522 - DNA, 1009 bp, Artificial sequence
  DNA replication origin
cgcgctcagcatcgaccgctgggtggccgtggtcttcccgctgagctaccgggccaagatgcgcctccgcgacgcggcgctcatggtggcctacacgtggctgcacgcgctcaccttcccagccgccgcgctcgccctgtcctggctcggcttccaccagctgtacgcctcgtgcacgctgtgcagccggcggccagacgagcgcctgcgcttcgccgtcttcactggcgccttccacgctctcagcttcctgctctccttcgtcgtgctctgctgcacgtacctcaaggtgctcaaggtggcccgcttccattgcaagcgcatcgacgtgatcaccatgcagacgctggtgctgctggtggacctgcaccccaggtgagccgagcgcagctaaggctctgggaacagccgcgcgggatctcggcgggagtgggaggtccctagccccaggggctcttttccaccgagcctctgtttcttctgagaactcgagggtggggaaagcggcccagctgtggggcttaaggaggtgcttagggtatcagcaaaccagggccacaaaaaatgcgggtgagcccatctatacatcggtttttgaagcatcagggtagaaatcacagacagtcagaactctgttgggcttcttcatgcacattttctgtgtttgtagctttcactttaaatggcacatgggaagtccgtggtctttgttccctattaaagaccttcaaagtgtttgattctggccgagagggcggcctcgatgcttagggagctccttaagagcttttcagacccaagtgtgtcgcttctctgagtctttcccttctcgggtgtgtggcgctgcctctgtctcacgactgtgtgtgtgtgtgtgtgtgtgtgtgtgtgtgtgtgtgtgaattctgatggactcgggctgcgtccttctctgtggtgggccctgaggggtggggtggggggctcttcctgccctccccagagagcactgtccaatgtctgcctgact

SEQ ID NO: 19523 - DNA, 1483 bp, Artificial sequence
  DNA replication origin
cctagctttggttgtgagaatctctttccagctcaggctctgtctgttgtgccaacacccacagtactattggagcagcggggatcacacagcatcaggacgggatgttggtgctcttgagggttgtaaggtcagaggtgtggaaatgcccaagttctccctgcaaatcacctctacttgctccctagaggctcaaagaggcacagaatccctaaaaatgcaggtttgttctaagatgagctttgtgaaaagcctttcttgagtgtctgctgtggtcccatcgaataggcattgggaactcttaaggtggaaagactccagccttgtggttctaacataggtgacagcaaaggcatgtatgtgcacctcgagggcaggttttagaggctgctcatctctgatgactgcagtgggagggtgggggttgactggcaaggaaggtgacctttcacccggatgcagaagatgaaccagagttcagctggctgactgggtggggtaggggagggggaggataagagcggggtctctttagggagaggggacagtctgtgcagtggctctgagggacacgagtacattgtatttgaggagctataagaggaccccaaattagaaagggaaaaaaaaccagggtggggaaaggcaggtgatgctactgctgggttcagctgtgagcctttccgtgtggctgctccaggcccacagagcactcacaaaggccgcacttgcaatcccaagaagcacaaagaacagggagcacagcttctcactgagaagtgatggggtcatttcagagtactgttgcttttgtctaaaagcgtgcaagttaaagagctttattttaataaatgaagtggaaaaattgtttagtctttaagaaaggaggataaattggcctttaaaaaaagtcaagcaactgtgggacaggcctttggatttaattgcaagcgtatatttggcaaatctggtacctttgcaatcacctcccacacatttgcctgcccagtgagccaggcagggagactggggagacaggtgtgcttgtttccttcttcctgatgggaaaatgaggcctggggatggccaggaacttgcctgaggttttttccaattatcaagcagcagaaattttgagagactggcatttagtaaaggacagacgattgaaaagattgcaagatgggagtttggagcaacaatatccacaatgggatattttgtctaactgtgtgccttggtttgggggttcccaacagtcaagtctgagatgagaacttgagtgcagggagtcatttggggggtggttccaggaagcaggagggagggaacagagaaagggacatggtaggggagaagctaggatgaagttcactgtgaatggcagcgggagcctatggaatgcctcttgctatggtcttgctatggccatgtgcaggatgggaggttttgtcccctgctcccctcccattggccaaggctt

SEQ ID NO: 19524 - DNA, 1224 bp, Artificial sequence
  DNA replication origin
aagatggatggaacttctgctgtgagccaggctctgtgcctgagagcacaaggacggggaggctcagccctgagccctgagacgctcgctttctggttggcaatggaaagtcttagcaggagttccacgttcagcttttctttggagaattctgatggtgaaggaaaggagtgggtaagatgccaacgtcagaaggaagaccaggacaagaaaggtgaatttctctctttgcttcttgggaatctggctgtttctccgctgggcggaagatccaggtggagggaaagttagtggggggtggctgatggggcaggtccctgaggggctgactctgggacaggggctcacctggaaaggaggagggtctcctttaccctgagacctcacctggggggaagatccaggtgaagggaaaattggtggggggtggctaatggggcaggtccctgaggggctgaaactggggcaggggctcacctgaaaaggaggaagttctcctataccctgatatagttaaggtggggagcagtgctcagggctgttccaagccttcaccccagagggtttcacattcttggtgaagtaggaggtggagtcctctgcagacaggggatgtgacaggattcgggtctggaaactcagagagtgtaagatctgcattgagataagggacagagagcatctttctccagttgcagagagggctctgtgggtgttggagatgtggaattgtcactgttcttttgggcacgcttggtggtatgttcaccaggggcagtggagttggtggcagttgcagctggaggagatcaggaacaagggcgttgtggcactggtggcacaaactgtgtcaggagtgagggactgtgagactcaaggctggtggggcaggaattcaagctagagggctgattacctggaggtgcagggcaggttcaggagccgctgtgggagatgaggcttcagaagtgatggaggattggcaggggaagacagtggccctatttgaggaccccacagggcagtggagttgatgactggggtcagggttcaaggggctgagatggagccaaggggaggttccaaaggagcagatttctgggaatcttgaggcttgaggactggctactcagcaccatccccgttgcggggatctccagggtacactggaccctgcaagggtcgggagaggagatgaggaggcagctgaagtgacagtggggt

SEQ ID NO: 19525 - DNA, 974 bp, Artificial sequence
  DNA replication origin
ctgaaaccacagctggcagagtgaagataaatagaggctattcccaggccaccaggaatcgcctgacagaacctgctgcctagccagcttggtgtcacagtcagtgggtggggtctctctctcagtgggtggggtctctcggtgggcgggatctctcaggacagaccggttattcctgagaatgctgactgtgtctaaggcaggataggctgagaccaggtgatggggagaagagcaaggagtgagcaggagacgaggatgagaatggggcacagcagggcagcaaccccagcttagggagcccaagagcttcagccagagcccaggctcctggggccaggctgcaggatgtcctggagtcaagcctctccaaagggacaggcagcctaatgggtcagtggccttgactctcagagcttgccctggattctgacaaggccctctggtggataccagtgaccgctggggactgtgagctccaagaggcgaatggcatccgacagcaggggcccattgtcctgaggtgagagtgaagggcacgggcccaggctcccagctgtctcagagagtgacggggtgtgggattataacctgggctcaggggccaagctgcggaggtgccagaccacgagagtggcagggtggggcttctgggacagcatgagaaggttctatgaggaggcagggctgttggaggcccagcagtgaggatttctgagtatgtcgtgtgaggattaaccctgctggtcagccacttgaggtccatttctggtaggcaggatggagagtgaacatgtgggacccaggaactgccaccacatgggtcagattcatgtccttcaggcctggaaggtgtgagggcaaaccctggggaaggaagggggcatggtagccaagtttttctctgtgaggtcagcctcgggtggttggcatgcctgctgcacaaaccccctcaatgcggggacccccggttc

SEQ ID NO: 19526 - DNA, 1851 bp, Artificial sequence
  DNA replication origin
ccagccccgcgggccggtcacacgcgcagccagccggccgcctcccgcgcccaagcgcgccgctctgctgtgccctgcgcccttgccccgcgccagcttctgcgcccgcagcccgcccggcgcccccggtgaccgtgaccctgccctgggcgcggggcggagcaggcatgtcccgcccggggaccgctaccccagcgctggccctggtgctcctggcagtgaccctggccggggtcggagcccagggcgcagccctcgaggaccctgattattacgggcaggagatctggagccgggagccctactacgcgcgcccggagcccgagctcgagaccttctctccgccgctgcctgcggggcccggggaggagtgggagcggcgcccgcaggagcccaggccgcccaagagggccaccaagcccaagaaagctcccaagagggagaagtcggctccggagccgcctccaccaggtaaggaactttctgcgctgggcagcccgagggggcgccggtggttgcgcgcctccaggggacaactggcttctcccattgtgtgtgtctgggatgggccagtcccgggaatctccctgttgccgcctctgcctccctagggactgtatctgcgcttcctgccggcccgcccagcttcccagaacttgtccttgaccctgacatgcatttcagctctggcttatgcccttaggtaaagagggagctgtgcaattgggaggctgcctatgagagtcaaagttcttgtttcaagcttgaaatcccctgagctaagggtctttctgctggatgcctcttacttctctgcctacttcttcaatcctcaaatgcggctgaatttccgctttggggatgtggatggctggctgttttggcagatggccttctagggaaagctctgccagtaggcctttacccagtcgtgtcccttctcagctccctccttcccactctcagcgggtctcttgggtcctctgcccggctggggcaggatggcacagcctccactggggagtctgtgcctggagtctgctgcagcctggactccggcttgggggctccctggctgcctgcagtgctccgtctttcatccaagtctcatacccttctcaaatccatcttcagtttctgccaacctcattttcttaggaaaatgacttccactaaatgacgtagtttattaaccaccttgtgaagtggggctttctctagttccaaatgttctttgcttaaattgcaggggctgcaggcctggtatttcaagagtggggcatgagcaggaatgtggccaaattctctggcctcgcaatggcctttcctgaaaggagatacgtgcgggtgccaccgttacagggctccgggtatggaaggcatcgtctttgtttggttaaactgctcacgaaagtcagcagccagggcagtgggaaagtggaggaggggtgaggacacagaactcctgaaagggtggacctatatgagcacccccctttgcagaggccctggcatgcttccatttgtggacaactttgaatgggcggagatttctgagttgtgtgacaaccctgaacacatccagaatttccagtgtttcagggagagttatgggaattcagatgtttaagagctacagtggcttaataacaggattaggagtgggaagagacttatatttgtagaatgtcgactgtgactccattagaaactttatgtgccagtttcatttcatcctttcagtggctccgaagggtgggtgaggctcagacagtttaagtaacttgctcagcgtcacttgctggcttgggatatttgaaagcctttcttctgtcctttttaactcaaggc

SEQ ID NO: 19527 - DNA, 1675 bp, Artificial sequence
  DNA replication origin
agcggcggagagaaggtctcgagctcgggctccgggcgcgcgtagtagggctcccggctccagatctcctgcccgtaataatcagggtcctcgagggctgcgccctgggctccgaccccggccagggtcactgccaggagcaccagggccagcgctggggtagcggtccccgggcgggacatgcctgctccgccccgcgcccagggcagggtcacggtcaccgggggcgccgggcgggctgcgggcgcagaagctggcgcggggcaagggcgcagggcacagcagagcggcgcgcttgggcgcgggaggcggccggctggctgcgcgtgtgaccggcccgcggggctgggctgggctgggccggggcggacaggggcgcgcagaggcgcggggcgggcgcaggggggccggccccgcccttccttcttccctccctttcccggcgacccctccgaggccggtccttggaggcaggtgttccaagcagccaagcccaagaaagcccccttcccctcccccgcaggccagccagcgtggggcctgcttccccagagacgctaatgagtttcaatcttagaagaaaacactgaggcccgctgttccattcctgttttacaggtggagaaacgtgacctgagagaagaaaagattggcccagggtcctaaagtaaatcagagcccaagcagcctccagctctcaaaccgtgccccgtgtgctgaccattccgcagacgtggacttcccactagccatgctactgtttcaggaactgggaatgaggaattcctgaggttcccggggtttctgggagtaaagttccctgggagcagggcctagggaccctggaggagccctctcccatctgagactgtgattctgttgggtcttgggaaagacagtgacgttaccccaaggtggccatccaggggtcacaagagggtttgtggttcatccaagagcaggctcttgcccagagggtcctttgagaaagggcctcctgctttggacaactctgcatgggttctttatgcggagcccaggcccatggccctgcggcttctgctctccaggcggggatgtggggaaccagggactgcatcgtttcccttgctgctgtaacaaacgatgacaaacttagtggcttcaaacaacacctatctcacagctctgcaggtgagaaggctgatgcgagtgtcaccaggccaaaatcaaggggtcagcaggactggtttcttaggggagcctctggcgaaaagtccacttccgggctcactcaggtattggctgaattcagctccttgcggtagtaggactgacgtgcagttcactcgctggctgtgggctgaggcgcctttcctcctgctggctgcctgtgttcctcctcatgtcttctgcaggctcctccaggcctctccctggtcctcgcacgtgggcccggcatctcagagccagagctggcacagcttcaaatcgcttcccttcctgccacatctttccgccttccagctagagaaaattctgtgcttttaagagagtgtgaatagatgggcccacccaaaaaattcagtatagtcatcctatcttgagtggtgaccttaaccacatcggcaaagtccattttgccatgttccctaactttttgccaggttccgtaactatctcttgttctaggtat

SEQ ID NO: 19528 - DNA, 992 bp, Artificial sequence
  DNA replication origin
gattgtgtgtgaaggtgtttgtgattgtgtgtttgtgtggcgtttgtatgtatgtcagtgtgtgggggggatgtttgtgtgtatgtgtttgtgtgtgggtgtggggtgtgtgtatgtgattgtgtgtgtgaatgtgtggatgtttatgtgtggggtgtgtgtgtgactgtgtgtgggtgtggggtgtttttgtgtgtgattgcgtgtgtgtgtttgtgtgtgggagtgtgtatgtttgtacgtgtttgtgtatgggcgtggtggtatcttataggctgagaacccagggctgggtccactggtgcgggagagatgctcctcttcatcagcgaccatctgggttcctgggcctcccagaaaagcagcaggtggctgcagggggcggggcaacgtagggcagggggcagggcaaggtagggcagggggcgggcaaggtggggcagggagcggagcaaggtgggggcagtgcagacgctgagtcttctggggctaggcctgtctagcgctgggaatacagcccaagcaaggagctggagtgtctgtcctccacaagtgtcctcacacaactgtcctcaagtatccttgggctcacagtttaagccgggtgagtagcgatcattcagggctgcggagtgcggtgggaagcagagggcggaaccgcgcagtggagctggccaggggactgctaggatagaggctagggcactgaaatgagctgagatgtcgtgggtgcaaagggaggtgcaagtggccagacggagagagtggagagaggaaaggagagagcagcgggccagcttcatagcacttagctcccgcctctaaagcaacctctctccagcactgtggactcagacccagcccttttgcctctctgcttgggcgtctagtgaactcctcccgctcccctttatcgctcctcttgggtgtccagtgaatgcctcctgctctccgtttgcccctctgttttagtgtccagtgaacgcctccca

SEQ ID NO: 19529 - DNA, 1461 bp, Artificial sequence
  DNA replication origin
tccatctcctccccgcccctccccacctctccgtcccgtcccctcccccgctcgttctccgtcccgccccgcccctccatcccctcccttctccacccctccatccccgcctctcccatctcttcccctccctactcctcccctccctttccctcccctcccctcctctcccctcccctcctcgttctctgccccgccccgccgccacatttctgtgggtttccacagctccccttctgcatcaccgttgacaacttgagttaagtgggatcgactcaggagtcaggatacaagtacgttcgctcgtatcccttttgaatggctccactgctgaaaaaagaagtttcaaagtcatttctcattcataaatcaaatgcataatcaataattaatatactgtattcaattttaaaaaatatgtacttttgaggcgagctggtttttcaggcttttcctgtcttttcaaataaaactctcagaccaggaatggggaagggggaggaggggaagaaaagaagttaaaccttgtgagtgtgagaatgtatattgggtgtgttcgtgtgtgggtatttgtgattgtgtttgtatgtgggtgtgttgggggtgtttgtgtgtgtgattgtgtttgggtgtttgtggggtgtttgtatgtgtgggtgtgtgtggagtgttttttgtgtgtgtgtgtttatgtgttgtgtgcgtttatgtggttgtggggtgtatgtttttgattgtgtgtgggggagtgtttgtgtgtgtgtgcgtgtgtggtgtttgtgattgcatgtgagtgtgaagtgtgtatatgtttgcgattgtgtttgtgtgtcagtgtggaagtgtttgtgtgtgttcttgtaattgtgtgtttgtgtgtggggggtgtgcatgtgtatggggaatatttgtgtgtgtgggcatgtgttggtgtttgtgtgtgttgggggtgggtgtttatgtgtgattgtgtgaaattgtttttgtgtgtggagggtgtgtgtgtgtctgtgtgtggggggttgtgtgtgtgtagggtgtttgtgtgtgtgactgtgtgtgggggtcatgtttgtgagtgactgtgtgtgaggtatttgtgattgtgtttgtgtgtgagtgtgggatgtgtatgtttgcaattgtgtgtgtgactgtgggggtgtttgtgtgtgtgtgattgtgtgtgaaggtgtttgtgattgtgtgtttgtgtggcgtttgtatgtatgtcagtgtgtgggggggatgtttgtgtgtatgtgtttgtgtgtgggtgtggggtgtgtgtatgtgattgtgtgtgtgaatgtgtggatgtttatgtgtggggtgtgtgtgtgactgtgtgtgggtgtggggtgtttttgtgtgtgattgcgtgtgtgtgtttgtgtgtgggagtgtgtatgtttgtacgtgtttgtgtatgggcgtggtggtatcttataggctgagaac

SEQ ID NO: 19530 - DNA, 839 bp, Artificial sequence
  DNA replication origin
gacgggacggagaggtggggaggggcggggaggagatggaagggaggggcggggatggaggggtggagaggggtggggatggaggggtgggatgggaggggagaggatgtaggggaggggaggaggtgaaagggaggggcagggatggaggggtggagaggggaggggatggagggacggggtgggaggggagaggatgcaggggaggggaggaggtgggagggagggatgcggcagcgatggggagaagggaggagcagggagaggagagaggtggaggagcgaagaggggatgaaggtgagcggcagggcggggatggagggacggagggacggagagggcggaacgatttcccgccgctctgaacgccccgcctggccgtgctgctcgccgtgctgggagcgcccctggaggaggctcccgggcgggtgggcgtccgctgccagagccgaggccgcttctctcccgggcgggcacgttgcgggctgttcctcgctgtctctgctggaatgggtgggcaggtctttgtgcgctacttttaagtgctataatgagcgccctctgattcccagtcctggaaggggcagtagctccggggagcggatggggtgtcgttcgctccgatcccacgtctggacgcaccaaagccatagcaatgatcatagggaccctcggccgccaggccggggcgggtgatggggactctccgctcttcgttgcgccccgcgggtggctgctctgcacctggtggacgccttccctgaagttcttgttcccttgaatacactcagggccaagcagattttcctccaggtgtggggatgggaaatagctggcg

SEQ ID NO: 19531 - DNA, 1141 bp, Artificial sequence
  DNA replication origin
ctcctgcctcagcctcccaaagtgctgggattataagcgtgagccaccacacccagcccagggattgctttctcgatttctttttcagatagtttgctattggtgtatggaaacagtactaatttctgtatgttgattttgtaccatgcaactttaatgaacttatgaattctaacggtttttttggtgaagactttagaagatcacgtcatcagcagacagagaaaatttgacttctttctttccaatttggatgctctctatttctttctcttacctaattgctgtggcagggacttccagtactatgttgaatacaagtggtgaaagtgggcatccttgtcttattccagattttagaggaaaagctttcagcttttttttattcaatatgatattagctgtgggtttgtcatatatgtcctttattgtgttgagatatgttccttttcacacctaatttgttggtgattttcatcatgaagggatgttacctttagtcaaatccttttgttgacgttgattgagacgatcatatggtttttctccttgcagagtctcataggagtcctcagtgaaatgcaagacagcgcaggttcctgacagcatctctccatccaggccaaggcagactggccgtctcacagctggatggggacacagatcgagttctggcaactgaaatgtgagtggacttaaatgggtcgcttctcagctaaggcaatggtagttccctcttctggtgcatgggctgagagggccccgtgttccaagaggcatagccactggttggtgaggggctgtgatacgtgaacaagcatgggcttgagggactggggaaagggagcgattaagaagtgcaggccgggcatgatggctcatgcctgtaatctcagcacttcgggaggccaagacgggaggatcacttgaggtcaggagtttgagaccagcctgaccaacatggtgaaacctcgtcctactaaaaatacaaaaattagccgggcgttgtggcacacgcctgtaatcccagctacttgggaggctgaggcaggagaatcacttgactccgagaggtggaggttgcagtgtgccgagatcagccatttcactccagcctgggcgacagagcgagactccatct

SEQ ID NO: 19532 - DNA, 1410 bp, Artificial sequence
  DNA replication origin
gttagggggcggagccggggtccctgttagggggcggagccggggtccctgttaggggtggagccggcgtccctgttagggggtggagccggggtacctatcaggggtagagccagggtccctgttagggggtagagccagggtccctattagggggtagagccagggtccctattagggggtagagccagggtccctgttaggggtggagccagggtccctgttaggggatgaagccagggtacctatcaggggtagagccagggtccctgttagggagtagagccagggtccctgttaggggtagaaccagggtccccgttagggggcggagccggggtccccgttaggggcggagccggcgtccctgttagggggtggagccggcgtccctgttagggggtggagccggggtccctgttagggggtggagccggggtccctgttagggggtggagccggggtccctgttagggggtagagccggggtccctgttaggggtggagccagggtacctatcaggggtgaagccagggtccctgttagggggtggagccagggtccctgttaggggatgaagccagggtccctgttaggggatgaagccagggtccctgttaggggtggagccagggtccctgagtatgtttctttcttcctggagttctggtcccacctctgaggataccaacaccacaaaggtgagtgctggaacagaagacagcagcaccgtgcaggtgcaagcggctcagcaaggagcaagacctgccaaactcttctctcttaccccagcctgagtctgccagctagaaggaggctcacagttcacagcatggtccccccaagtagtcaccgtgttttcttcttttaataacaaatactctatgtatcctaggaactgaatgtgaaagcttcttgcctccctggtcctcagcctaacagaaatagttggtcaattcaaacacatattcagcccctgccacaggctgggtgctgtgctgggcactgagcatacgtgccctggtgaacaacagtggcgacccagtgcctaccccctggtagctggtgctttatcagagaagtgggcggcggcttcgtcatggctcatgtcctggtgctgaggggaagggcaggatgccagggcagcagcgtgtgttaggacgctgacccaggccttgcattgcctgctgtactaattagtactgctgcggaaaaagtttgccaaaacttagcagcttcaaacagtttctgggggtcaggaacctgggtgcagctttactgggtcctctacttaaggtctctcatgaggctgtgacctagctgtcatcaggctgggggtcgtcaatatgcttgactgcagaaggacctgctcccaagcgcacatggttgtgggcagaattcagcacctc

SEQ ID NO: 19533 - DNA, 934 bp, Artificial sequence
  DNA replication origin
caaaagaaacatttacactttagctcactgtaggacgaacatcaaaaggatgaaagcaaacgtttgtcaggaaacacattaagagttggtctagggaaaactttgaagattcccttctagtcaacctgagtccattactggaaaacaccctcgtggcctgccaggactctggttgacaataggcacgtatcacccctcagctccagtgaccaaacctctcctggcacaaggaaaaggttacagagaggaaacagtgatctgaggaccgcagggtgcatggggttaagctggagcagagagggatgggcagtggtcatggtaagcctgcggcaaagggctgagagcaaggcctccagaatgatctccatgtggttatcatatggaacccataaggcagatggggcaggtcagagaagctgaggcctgaagcaactcagtctcccccaggtgcagtgactgcagctggaacagcacatagctgagaacagcacagagcagaggaacagcacagagcaggggaacagcacagagcaggggaacagcacagagcaggggaacagcacagagcagggagcagcacagagcagggagcagcacagagcagaggaacagcacagagcagggagcagcacagagcagggagcagcacagagccaaggaacagcacagagcaggggaacaacacagagcagggagcggcacagagcagggaacggcacagagcagaggaacggcacagagcagaggaccggcacagagcaggaaacggcacagagcttgggagcggcacagagcttgggagcggcacagagctgggagcggcacagagcagggaatagcacagagctgggagccaagagcccggatcacgcccttcttgctggcccttactggccactggcacttactgctgactgctcgggtcatgtgcccg

SEQ ID NO: 19534 - DNA, 1029 bp, Artificial sequence
  DNA replication origin
aggcggggagccggggctgcggggcggcgaagctggggagccggatggcagcggccggggcgcggaggcgacgctggcggtggagatgtaatgcgagtctgttgggttgtgtgtgccgggagataggacgcggtggctgtgggtggctgggtggcgggctgtggcgcaattggccccctgggatggcaggatagaggcgccggggcgaagggaaccttgcctttgggaaaatgaatgaagagccgtggaagcaccttcccgactcctccaggcaaccgatgggccggcgtgcgcgcgagtgtgtgcgtgttgaggcttcggagccgcccgggtcctgggcacagctgcttgacctccccgtcgctgtccgggtgcccacgttcccgcccgccctgcgcccggggccggccggcgcggctgggacggcgggtatagaggaggaaggctggggctgggttgccggctgctggcggctggaggtccgcgcccagtgtagggaagtcttcgaaggaggctgccaggctggaggctgggaccagctcctgggggcgggggcccttcttcgtctgcctgcgtgcgcggagccgctgtgacagctgggcgccttcgccttgttcacgttggttaagttaattgtaccgagttctcgggaatgaagtgtggctccgggatgccccgcagagggatgtgacaagccggtcagtgaggctgagcaaaggggctaaccttgcctctgggcgccctagcagtgcccccagcccctctttatcagctgcaattcctgagtgttgtgggatgcctcggtgggttagggtagccacccagcgttggggcagaaaggcctcggagggcatctgcacccccgaggggccctgaagtaaactgaggcctagagatttgcccagcgtttctcctggaccctccttggaccttcctggaccattatccatcccccgctttcctgcttctcctcccaggaccggcaaccttgcaaaatcaggaaccctcccttccagaacatggcactta

SEQ ID NO: 19535 - DNA, 843 bp, Artificial sequence
  DNA replication origin
cgtttggcggtaggggacggggattccccccagccttgcgctccgcccccacacccctatcgcactttggggaagtttccaggcgcggcccggggcaggtaagtgggcatccgccactctctccccggttgcgagctcggatgcgcttccagaaccctggctctagccttgcggcggttccgggcggggaggccagagctctcccgcgcctaagcccgtgggacccggttcagggaagggggatggcgggggcgggcctgggaagagataggggagcggctgagccccgagcggtgtgaacttttgctccccgccccctcctccttcctcctccccgccccgcccccactgctgtcccctccctgcgccccgccgcgtctcgggaggcggcgtgactcgggagttgccggcgcttcccggcggtggcggcgtctctggccggccttggtgcggcgagccgagcgaggcagctctgagccgcgcggtgaggccagaggcggggagccggggctgcggggcggcgaagctggggagccggatggcagcggccggggcgcggaggcgacgctggcggtggagatgtaatgcgagtctgttgggttgtgtgtgccgggagataggacgcggtggctgtgggtggctgggtggcgggctgtggcgcaattggccccctgggatggcaggatagaggcgccggggcgaagggaaccttgcctttgggaaaatgaatgaagagccgtggaagcaccttcccgactcctccaggcaaccgatgggccggcgtgcgcgcgagtgtgtgcgtgttgaggcttcggagccgcccgggtcctgggcacagctgct

SEQ ID NO: 19536 - DNA, 1323 bp, Artificial sequence
  DNA replication origin
ttgcgccccccgccggcctccggctatccacggcgccaccacgccactgctcggtcccctgtcccctcgctccggccgcgtcctctctgcgagggagggggcgtgtgtcgccgctgggtaacccttcccgcggggtcctcaagcgcgcagggcgcccggagcgcggccaggaccaatggcgaagggactcctcccgctggggatcgctgaagcctcggggaggccgggccaaggagcccggggcccaaacctgcctcggctcgtcgagctcgcaagttcattgtctgcctgggccgccgccgccaccgccaccgccaccaccgcgccgggagcgccgcggggagtgaggctgcgcgccgcctccgccggcccggactccctacgcccagccccggccgccgccggcgctgcctggcccgaacccgcggaggggcgccggagccccgagcccagggccagacctcctaccgccgctcctcgccgaccccacctcggcgtctggcacctaacttgtacctgagaagcctgagtccagcccgggagcctctgcggctccggctccgcgggagcgcgcccagccccgagcctctagccccgcatccagggcgcgtcaacctgactccccgagcgctgggaggaaaagtttgggagtgacgtgcagacggcgaatgaaacatccgaggagaaccctccccccgccccatgtcgcgctgacacacatcagctccagtctggaatgtgagatcaaggcgtgtgcgccgagcggtgggtttggcccctgccccctccccctccgagtcaacactgcttgtgtgttgcggtgattccaaataaaagcacatcgaaacccctgaaatctggcagtgacaccttgccagatacttcttttttttaaagacagagtttcgctcttgttgcccaggctggaatgcaatggcgcgatctcggctcactgcaacttccgcctcccgggttcaagagagtctcctgcctcagcctcccgggttcaagagagtctcctgcctcagcctcccgagtagccgggattacaggcatgcgccaccacgcaaaataggctaattttatatttttagtacagacggggtttctccatgttggtcaggctggtctcgaactcccgacctcagatgatccgtccgcccccccaacccaaagtgctgggattacaggcgtaagccaccgcgcccggccgccagagacatctttaaggaacttggcggtctggagccagcccgtacattaatattcaaggccacagcgctggtgagttcggcgccctctgttgtatttttgcatcccggg

SEQ ID NO: 19537 - DNA, 1194 bp, Artificial sequence
  DNA replication origin
  misc_feature (679)..(679): n is a, c, g, or t
  misc_feature (897)..(897): n is a, c, g, or t
ccagacaaacacaggccatcctgctgcagcttccgccttacaaacccacgtgcaccagacacagtccccgggaacaataggcggaaatgagggggcctgggaacgctgcccgaatcctgcccaattgttcaggacccttgcatagaagatgcgggtggtgtggagaggaggcccaagagggtgggcctgacagtaaaaaaacaggaaccggtgcaggaagtcgggggtgttggacgtgtctgatgtgtgtgtgacatgtggtgcatatatagggtgtgtgtgtgtggtgtgtgtgtctctgttgtgcacggcatgtggggtggatgtgggggatatggggtgtgtgtttgcggtgtgtgtggggtgtctgtggtgtgtgtctagcgtgtgctttgtgtgtggatgtgtgtttgtggtatgggtggtgtggtgtgtggtatgtgcatttgtgtggtgtctgcggggggtggtggggggtggtgtgtggagggtgtgtgtatttgtggggtgtgtatttgtggtatggatatgtggtgtgtgtaatatgtgatgtggtatatgtatggtgtctgtgatgtgtgtggtgtctgtgatgtgtgtggtatgtggtgtccttgtggtatgtgtatgagtgtatggcatgtgtatttgtggtgagtgtgtggtgtgtgtttgtggngtgtgtgtggggtgtgtgtgtggggtatggtgtatgtatgggtgtgtgtggtgtctgtggtgtgtgtgtggtgtgtaaatgaatgtatagtgtgtgtggcgtatgtatgggggtgtgcgtggtgtgtgtgtacgtgtggtgtgtacatgggtatgtagtctgtgtggggtgtatatatgggtgtgtggggtatatgtgggggtgtggtgtatgtgggngtatggtatgtgtgctgtctgtggtgtggtgtgtgtatggagtgcatgtgtggtgtgtgtgtgagagatgtatgtgtggtgtgatgtgtgtggtgcatttgtgtggtgtgtgtggtgtgtaaatgaatgtagtgtgtgtgatgtgtgtatgggtgtgtgtggtgtctgcggtgtgtgtatgggggtgtgtgtggtgtctgtggtgtgtgtatgggggtgtgtggtgtctgtggtgtgtggtgtgtaaatgaatgtatagtgtgtgtggtgcatgtatgggggtgtgtgtggtatgtg

SEQ ID NO: 19538 - DNA, 2670 bp, Artificial sequence
  DNA replication origin
gagggcagcaccagagctgtgccctcgcagggccagcggggcacctgcacgcttgccttcctcttctgatctgcctcctgaccacccaggccccctaaaagcagagtaactggccctttaggatcactctggaaagttaaaacctaagaagagaacaaagagaggcaaagagccagacactggtcatggccaagtgaccgcgtaggtctgagagctctgcattccacagggctgacctgcggctggccttccgggcagtggcctggctgctcgggggatgggccctggtgggggtctctggacaccattccaggctgtaacagtggtgttggtgcaggcccccaacaagggttgctctgggagaaagactccttgccactgtgcatgaggacatcatatgtggatgtgtggatgcatatgatcatgcgtgtgtgtgaccgtggaagtgagtgtgcatgtgtgtgtgagagcatggggggtatgcatgcatatgtatgtgagcgtgggggtgagtgcatgtgtgtgtacgcatgggggtgtgtgtgtgcatgcatgtgtgtgtgagcaagaggtgagtgtatatgcatgtgtgtgagtggggtgagtgtacaagtgtgcatgcatgtgtgtgagtgtgggggtgagcgtgcatgtgtgtgagcgtgggggtgagtgtgcattcatgtgtgtgagtgtgggggtgagtgtgcatgcatgtgtgtgaaagtgggggtgagtgtacatgcatgtgtgtgggggtgagtgcaggcattgtgagtgggggtgagtgtgcatgcattgtgagtgtgggggtaagtgtgcatatgtgagcatgggggtgagcatgtatgtgagtgtgggggtgagtgtgcatgtgtgtgagcatgggggtgagtgtgcatgcgtgtgtgagcatgggggtaagtgcatgcatgtgtggggtgagtgcatgcatgtgtgtgagcatggggatgagtgtgcatgtgtgagcatgggtgtgtgtgagtgcaggggtgtgcatgcgtgtgtgtgaaggtgagtgtgcatgcatgtgtgggggtgagtgtacatgtgtgtgagcatggaggtgagtgagtgtgggggtgagtgtgcatgcatgtgtgaatgtgggggtgagtgtgcatgcatgtgtgagcatgggggtaagtgtgaatgtatgtgagcatggggtgagtggggggtgagtgtgtatgtgagtgtgggggtgagtgcatgtatgtgagcatgtgggtgagtgtgcatgtgtgtgggtgagtgtgcatgcatgtttgtgagtgtggaggtgtttttgtgtgtgagcgtgggggtgagtgtgcatgcatgtgagcatggggtgaatgtgcatgtgagtgtggggggtgagtgtgcatgtgtgtggggtgagtgtgcatgtgtgtgagtggggtgagtgtgcatgtgtgagtggggtgagtgtgcgagtgtgtgagtggggtgagtgtgcgagggtgtgtgagcatgagggtgagtgtgcgagtgtgtgtgagcatgagggtgagtgtgcatgcatgtgtgtgagtgtgggcatgcgtgtgtgggggggtgaatgtgcatgcatgtgtgagtgtgggggtgagtgtgcatgtgtgtgtggggggaggggtggctgcatgtgtgtgtgggggttatgcctgtgagtatatatgtgtaggtgagcctacatgtaagtgtgagtgtgcctgtgtgtaagggtgtatgtgtgagtgtgcctgtgtgtaaggatgtataagtgctgtccgcatatgtgtatttatgtgtgaatgagggtgtgagtgtgcctgtgtgtatgtagaggtgtttgtgggtgtgagcgtgtctgtgtgtgtctgtatgtgtgtgtgcctgtgcttatgtgtgtgtgtgtgtgtgagtggacctatgcgtatgtataagtgtgtgtgagtgagggtgagtgtgcctgtgtgtagaggtgtgtgtgtgtgcctgtatgagtgtaagagtgggtgtgagtgcctgtgcgtatatatgagtgtgtgtgagtgggcctatgagtatgtctgtgagggtgtgcctgtgtgtatacatgagtgtgtgtgagagagtgggcctgtgtgtatgtataagtgtgtgtaagggcgagtatgcctgtgtgtatgtagaggggtgtgagtgtggctgtgtgtataagtgtgtgagtgtgcttgtgtgtaagtatgtatacatgtgcgtgagggtgagtgtacctgtgtgtaagtgcatgtgtgtgcctgtgcctgtatgtgtgagtgggtgtgagtgcctgtgcctgtgtgtatgtgtgtgtgtgagtgggtgtgagtgcctgtatgtataggtgtatgtatgtgtgtgtgcctgtgtgtaagtgtgtgtgtgtgagtgtggctgtgcatatgtataagtgtgtgcgagtaaaggtgagtgtgcctgtgtgtagaggtgtgtgtgtgtgtgcctgtgcctatgtgtgagtgggtgtgtgtgcgcctgtccctgtgtgtatgtataggtgtatgtatatgagtgtgtgtgtgcgcgcctgtgtgtatgtatgagtgtgtgtgtgactgggtgtgagtgcgtgtgagcacttcccacagcacgggccagtcctctcccaccacaccctttgtggcccccctgctgacgtgc

SEQ ID NO: 19539 - DNA, 1191 bp, Artificial sequence
  DNA replication origin
gggactggacttctgatgccctcacactggaggacaggggtgcgctgggtaggagtgtccatgggcagtgaagaggggaactcaggatctttctcctctcaggcggatccaggcattggagcgggggaaggaggtgggcatggaggggaaggaggtgggcatggaggcattggagggggggaaggaggtgggcatggagggcatggaggggaaggaggtgggcatggaggcatggaggagagttcagaccctgttgctgaggtctggagtccagcaggagccctctgctttccagctgtgtgaccctggccagtcctggccctctctgagcctgtttcctgatcttgacttaggaaaatgacaaaaagctctgtgtcgcttgcttcactgggctgctccaggggccgcttcacagtgtgtgacctgtgcaggcagcacacagggccccggcctcaagtttcctgcatttgggttcattctgtccagttgctgtcctgaaatgctcggtcatttggaagaagggcctgtgttttcattttgcatggggccccgtgaattacgtagccagtcttggccaagggatggcggggggcttgctgggtggaaggctagggtgtctgggggaggctgggtggttgcagtggggccaggcctgggcagtcatgccgagtgtgtacggggtgggctgcagccggcacagggcccagcaccactgtaagggctttgacttttactctgagggaagcaggaaaccacaggaaggtctgagcagaaacccctgacttactctctggcccagagcactgcaggatccacctggctgtcacgtgaagaggagactccaagggcagaggcagggaggtcgttgggaggctgctgaggagctcagagaaagacgctgggggcttaggcttgctgggagctgggatggtggtgggaagggggttttgggatacactttcaaggtggagccaacaggacttgtaatgaattaggtgtcatgcagatttccaactggaaggctggctggatggagttgtcatccactgggggaaggctgtggaggagcatgtctgggggaaagatcaggagcttgattttgaaaggctggtatgagacgtcctggtaagaagctcctcagaacaccgttgacaattccacccctcccaacccttcctctccctgctcctt

SEQ ID NO: 19540 - DNA, 858 bp, Artificial sequence
  DNA replication origin
tggctcccaggcttccatttgcacacatgtgaaatgggcctcataatgcttccttctcaaggctgttgtgagacttagatacaatgctgcatggcaaacgtccagcacagagtgcttgtggcagtgccctctcagcgcgggaggacaatgttgggcaaacttgctgggccacacgtacacagcggtgctaatggcagtgcctgccttgggatcccgggaggatgaagtggaatgctgatgatggcgaggaccattctggaacctagcacttcagcacccagtgaatgtgattcagagatggtgtggggagccaggtgcacacttgtaattccacctactcaggaggctgaggcaggaggatcacttgaggccaggagttcgagaccagcctgggcaacatagcaagatctctgtctcaaaaaggaagaaaggaaagagagaaagagagggagggagggagggagggaggaaggaagggagggagggagggaggggatgcagagggcaggggaagggaagaataactgggcactgggcttgtcctcttgaagactgccaactcctgcccgcccaacacagcctagccccagaatgtttattgcaaacctggtggcgtggaaacgcagatgccatttggggaaagaatcagccttcacgggagggagaatgcagtgaggagggatggaggaggcctgagtccaagaaggaagaaggttatgtagacgaggtcagatggaaaagggtcaggacagatgcaaagaagatgctgggtgtggccagtggtgctgacgcccctcttggcccacccaggctcaccaggggcaggtggacagtacacctgcccacccacgcagcatg

SEQ ID NO: 19541 - DNA, 1597 bp, Artificial sequence
  DNA replication origin
atcatagtccataatcccctgaatgcgacatcaattaaacagtgtcctccacaggaagggctttgatttctttcctcagctctgacgggcggctttattgatgtcgctgcttctttccgatagtgcttgcgaaagccgttcctgttctccaccgcgagaggtgcctcttgtttccagtgatttattgcacttacaacgttgatgtttacaaagaaccgcatatttattcaagcacagaagttcgtttcccgcaaatacacgtgtgaaggaaaaccagatgagtcagagtgtgggaggccttcccagcaggatggatgttggtttccttgatttccccagcacacctgcccctgcctggctgggcatcttgaatcaatttgcagacaactgccaagaaaagcttgaggtgcattattttcagaaattgatgagcaattcgaaatcaaaccagggtctattgggtgtttacagtgccaggatctgagctaggggccagagaatgaaagctaagaaaagacagatagcatctcaaagtcgtgggggaggagagacaaaaacagcaaaactcatacaagtcaggatgaagaagtggttgggacagagctggggatgagcactgaggagctggggcatcagaggaggagctggagtgtcagggcagtgcacggagttgctgtggaatcgggaggagcacagaggagctgggaggagctagggagtcaggagaggagcacagaggagctggggagtcaggggagaagcatggaggagatggggaggagctgaggagtcagaggaggaccatggaggggatagagagttgggaggagcagagaggagttggggagtcaggaggagcatggaggagatggggagttgggaggagcacagaggagatgaggagtcaggggaggagcatggaggagatgaggattcaggggaggagctggggagtcgggaggagcacggaggagctgcggagtcaggagaggagcatggaggagatagggaagagctagggagtcgggaggatcacagaggagatgggaaggggctgaggagtcagaggaggaacgtggaagagctggagagttaggggaggagcacggaggagctgaggagtcaggagaggagcaccgaggagatggggaggatctgggaagtcgggaggagcacagaggacacagggagtcaggggaggagcatggaggagatggggaagagctggggagtcaggggaggctcacggagaagatggggagtcaggagaagagcacagaggaggtggggaagagctggggagtcaggggaggagcaggggagtcgggaggagcagggaggaggtgccattaaatcaggccttgcagcctgggaggagtgtgaccctcaagggaaagggagtcaggcccaggggttggtggtgggacatggctgcttctgcttggctgcagagtgggcagagtagattgaagggagccagccaggcaaaattccccgggacctcaacctttgaggacacaacagcaccacagaaaataagccgaattggcaaaatgtaaaaagaccccgcccccatcaccgtgcaaggctctgggaa

SEQ ID NO: 19542 - DNA, 1290 bp, Artificial sequence
  DNA replication origin
tgactcccacacacgcgggactgaaccagcgccccagagtccccagaacacgcatgggcccgcggggccgcagcccacgcccgggacagccgcccgcagtctacgcagggaggggccgcggggctctggtttctgcaagttctgaattgtctccaaggagcatattccaacgtcagaataataaacttttacagaactgtattgctctgcagcgcgcggggggactcggcccagcgaagagcgagcgccctacaggcctcggcggaggagggcacggtccccagcgcggctcctggccccgcccacggccccgccccagctcccgagccccggcctcgcgcacgcgcatctcgcgggctcgcaggacggccgggaagcaacgctttgcgggcagcgccccctgccgtcccaacgcgcgtggggccctatggctgcgagcagttccggccaaaagccccaggacccggacttggggttattgacttgcgcgtgggcgctgagtcttggaggggaggggacaactcgccacacccccgtcctctccctggagctcgaagcccctttctgctgaaatggggcctccttttctcgggaaactgactttgggggaaactaagtctcaaggggatcttaaaacccaagacgggggaatgggaacctcacaggacgtgggggcgcttttctggccatctctatataaaacctgccgggggcctcagaccctggctcctctgtcagttcccaagacccgtcgcgcgcccacctgagcccggtgcccactggatgggggctcaggctcacctggtcagtcctcacccccacctccagagaccaggcagtcatgcccttctaatatggcggaggtcccaaaagattataccatatttttactgtgccttttctgtgtttagctatgcaaatacttagcattgtgtcgtagcaggctgtgccatctaggttgtgtaagtacacgccatgatgttcacataacgagaaaatcgccaaaggacgcatttctcagaacatacacctgttgtgaaaccacccgtgactgttctgtcctaattcaaccccctcattcgataaaggacagagaggcattgagttgccagaggtcatcctggttgtcagaggcaaaagcaaaaccgaagctctgagcctcgcagcaaccacccacgccaccgcctcccgtcatcatcaggaggcctccccaggtttctgtcccagggagcgcagccggtggacaagtcccttccgctctctgagcctccagtaacatgaaaacactgg

SEQ ID NO: 19543 - DNA, 1260 bp, Artificial sequence
  DNA replication origin
gtgtacccggttgtcctcaggcgctgtcaggtaccgtctgggcgccgctgtcctggggctctggttcgggccctggccggggttccctgacagcggcgggggaggcgggcgggcgcggggtggccgcggcccgggttcgggggatgctggctgagggggcgcgctgggcctcggccggggaacgagccccgcttcagcggcccgtttactctgcgggcggctcggacccgggcgccctggagtctccggccggcgcgcagcttcagggggcaggggcgtggcgacccacggcttgcaggccggagtcctggttccagcccagagcggccgacgggcgggcggcagggagaggctgaggatgtggcagccccgcctgccagaccgggcggagccgccgccccctgcgctcgcggcctgtggaggccaggactcggcccacccggcccagagaccccgaggcgccccggggttccgggtaggaggcctttgggcacccttggttcctggggttggcggggaggctgcgttctggggacgggggagctgtgcagtaaaccggtggccctggtcacgcggcgggggcgctgatgcagccttggagggctgggtcctcccggcctgctcctgcgccctgcagatcggcctgcccatcgctcccctcttccagcctatgattttttttctccagcctctgtcgaaataaagaaaattacggaagcagaaccttccttacagtaacgtgcaggttaattagatggtgggggatgggggggcaacaggactttcagcatgaaaacctcccgttgggggctttttgcaaaccctgctgagcatcagtaaatgggcctggccagtgcgtttcctcgatcgccttcccgggcgggacgggaggggtcattgtccgccctttgctggcgagaggactgaggcccgaagtcacctgggcactcgccctgtgacccaccgtctccttttgtcactctacatcttaccttttcggtgttcagttttacctcttagataaattacggtgataaattaagggcgaacagacagtgactttggaatgaagtggctttaccttaagaaatgactaatgttcagtttccaaattctaaatttctccttctgggattgaaagggtttctgtggataagctagttctttcagttaaccccggaactgttctttagattgtaatcaatcgctcttagccatgtgaaataacaatagactcctttcattagaatatcctggttc

SEQ ID NO: 19544 - DNA, 1753 bp, Artificial sequence
  DNA replication origin
gaaccccggccagggcccgaaccagagccccaggacagcggcgcccagacggtacctgacagcgcctgaggacaaccgggtacacgcggcgtctatgaagcgcaacagtgacgccggagagtcactgcaacttaaaggctgattctgccccgcccccaagacaccctcgccgctcattggctggggcggagggcaggataccaatcgcgtgggtcccgtcctccgccccgccctccggccgcgcatcaaggatctttgctcctcccgcggattcgatccgcgctcgcgcctcctgagcccgccggcctgtacctgagctcaggcccctcggtcgcctcctctggcgggacgagaagagtccttgtccgcccttgctgacgagaagactgaggcccgaaaaggaaaagtctgttgggccccccactgcgcgggccgggtgtggctggaggccgagagacgtgaggctggaccgcccgccctgtgctcctggagggagggaccagccccagctctgccccagccacagctgcgggagccccatgcccttgaaccctgatgcgccgcgcggcttagttgtgcctctgaatccacctccaaaagtcgtcgctgcctatggaaaacacactgcccacctgttcgcagctgctgtcagataattgagtggcagcaacccactcacagtacagatttgcctgtggtgccctccacagccggttattaaattcagaacacaaaatagatattccgggacaacctcatgttagaatcggaagggacttggacttcacttagcccacaacaagatgttaaatattggaaaacagagacccagagaaggaaagcgacttacccagtcatccaacagtaggggcagtctggtcctgtgtgcccctcgccacccctctcagagggcaggcgctggcagctgccggcaccacactccattagaccacaatgaccagtcgggggcccagctggaaacagagggcacactccaatgtgaacatttcctaaaacgtggtggtgggggcccgtggttcatgcctgtaatcccagcactttggcagaccgaggcaggaggattgcttgatcccaggagttccagaccagcctgggcgacacagtgagaccccgtctccacaaaaaaaaataaaaattaatctggtgtggtggcacacctatgttcccagctactccaaaggctgaggtgggaggatcacttgagcccaggaggttgaggctgcagtgacctatgactgcaccactgcactccagcctgggcaacaaagcaagaccatctatcttaatcaaccaatcaatcaatcaatgtaggcaagtaaaccacaagggatggagaaataacctgggtctcatgcaccagcgagggccattatccatcctaggcccaacggcctccaagtggggtttccagaattccagaacccaaagagaggagtgtgggaaaggctatctggtcaccaaagtcatcagcaactgcatgggaaggagctggacaatgagcatctcctgtcaggcttccacatgggctgaagccattaggaggccagaggccaggggagccctttaagacagctcagcctcctgggacaaacagcagggtggaaaagggtggagacggggtaggggagcaattggaagacatccaacatacataactggctaagataagtcttagctaagcagaaagtaaagtccatgctaaatggtagggataagaaagtgatatgggtgc

SEQ ID NO: 19545 - DNA, 1275 bp, Artificial sequence
  DNA replication origin
gcgagcgcctgaacctcgcgctgtctctcagcctcaccgagacgcaggtcaaaatctggttccagaatcgcaggaccaagtggaagaagcagaacccgggtgccgacggcgcggcgcaggtggggggtggcgcgccccagccaggggcggcggggggcggcggcggcggcggctcggggggcagtcctggccctcccggcaccggcgctctgcacttccagactttcccctcctactccgcggccaatgtcctcttcccgtccgccgcctccttcccgctgacggctgccgcccccgggagccctttcgcgccgttccttgggccttcctacctgacccccttctacgccccgcgtctatgaatccggagccccctggcccctctttcgcgggattcacgagggattggcatcgtcgtgtgccctcggctcctccaccgggggtgcaggtgcgcgggtgtcagcgcacccctgcccgccgcgcgcacccgcgatcctcgcgggccaccaaggggtcagggatctgccgtccttcaaagtgtccggggacggaggctgacctcaagccttgccgtttctggaccttgctgttcactttgggtcaggtttaattcagttcaggggctagtttttgagggtctgggtgttcggcgcggggctaaccaagatgccaggagggaaatacagggagcagagacgccctggctgccagctgctggcggctaggatggaacctttaaaggtgctggctcatcagagggtgagaaacagtctctgttcacaactgacagcttcccctcctcgtgctcgatggttcagcccaaacccagagagttcttccaaatcctgaacgaggctggggagagcttggtcctggagcacagacggccgctctgaaacggactatttttaaaatgcataaaactccacatttctagatctttacttaagattcggactggaacacaatacttgttccaaataacctccccaggctattcctgagagagggggtaccttggtttttggagtaggccagaagtttgtggtaggaaaggtgactgatttgcagctagactcacctgctaaagtagacacgggtctgttgcactgcaggttttgagaacagcctggaccaaaccacacagtgaccccaaaggcataaaaatgataatgaaggcagcgatggctcaactaatatcatgaagtctatgcatgaggctgcctactttgatttgcagtagttgatactttaaaacttcagtcctggcttatc

SEQ ID NO: 19546 - DNA, 895 bp, Artificial sequence
  DNA replication origin
ccgggagggccaggactgccccccgagccgccgccgccgccgccccccgccgcccctggctggggcgcgccaccccccacctgcgccgcgccgtcggcacccgggttctgcttcttccacttggtcctgcgattctggaaccagattttgacctgcgtctcggtgaggctgagagacagcgcgaggttcaggcgctcgcacactgacaggtagcgcgtggcccggaacttgttctccaaggccaccagctgctcgtaggtgaaggcggtgcgcgcgcgccgcggcttggcgcagttgggctccaggcgccggcgcctgggacgcggggagccgggggatcccgggggggacctcacagggccgcccccgccgtcctcgcagggctccccagacgccaatgccccggccggggcgtcaggtgagcgcgctaggcccggcagcaagcgcgcagcccgctcccgcagccgcggcctcctcggatcctccgcatcctcctcctcttccgcctcggaaccctccaggggggacgcctggccggcgcctgggcccgcagcatctaggggagaaggggtcggtgaacagaagcctctccaggtccccaaacctcgtcctcgtcctccctagagcaagcagctgtccccccaacccaactctgggtgctgctcctgtccccacatcgcgctccccttaggccggactacacatcctcgccagcgggtttaggggaatggtgtcctcttgccctttacaaatctgccatcaagtaggcgtccaagaaatgtacgccaaatgaatgaatgacaccccgcattaagaaaaaatagtgacattattgggtaaccatactggggggtaggatcattgtattaagacatctagatgtcaaacgctttta

SEQ ID NO: 19547 - DNA, 1386 bp, Artificial sequence
  DNA replication origin
gggatggaagcctccctcgcgccctcggagagtcccagagggttgggcggaggcgcgcggagacgacaacactgtccccgcggtcgcgcgcaccgggcgcgcggaggcttccccgagcccaggcaagcggccgcggcacagcgcctgatagtcccgaggctggcccgggctgcgccggtgccaatcggcgcgcagccccccgcggcgctctccccgccccgcctccccgcccccctccccagcttcacttggcagcgcggacccggctcctggctggaaagctaccgccaagccacagccgaaggcaagcccgagcggcgccatccccaaccccgcgccgccgaccgccggcccgtgggcgacgggcatgctggcatggcaggacggcggggccaaggcggctccctcccaccacaagatttctttctctgtcctggacatcctggacccacagaaattcacccgcgcagcgctccctgccgtgcgcccggctccccgggaagccaggaaaagtttggcggaggtcgaagcggggaaagatgccagctccagggaccctgtccgacagctggagacccctggtaagatgcaaggcggccccggccccaggaggcctcagccccaacaatgcggagtgtatgggggaacagccgggcccggtgagtggcccttaacagcgtcttcctcagagagaaggcgcacgggaccgggtgcgaagtgtagcccccgcctcggacttggatagaggcagagaggaggctccccgcattacagggcagggatttgccgcatccctgctcacccgccaagctcacccgcaccacagttctgatgctcgcggtggaaacttacctggcgcctgtcttgccaggcttactcatttatcgggcatttaatgcgcttgccacgtgctaggacctgggctaagggctgggataaaggtgatgaaaacttcggaacctgagagatggacagcatcattaacatcacctccattttatggatgggggagctgacgctaaggcttgcgccgggggtcttcgtgagtagcgaggtcaggtgccacccggagacgcctgcggggctgggctgccccaggcgctcaagctccccagactcaactgttaactgggactgggctgggggcggggctcggatggagtgttgggaagctttcggtactttcttctcgaaaccctttctgaattactcccaacgctggcggacacctgatgaaggggttaggaaagtttgtggctggaaggaaggacggaagacagcaggagtcctgctgggatcagacagggaaaggcggctccctggagggtcagaggctcaggtcatcgggggaggctggatgccgcgcagccccctgctcccctcccc

SEQ ID NO: 19548 - DNA, 1487 bp, Artificial sequence
  DNA replication origin
acctccgccaaacttttcctggcttcccggggagccgggcgcacggcagggagcgctgcgcgggtgaatttctgtgggtccaggatgtccaggacagagaaagaaatcttgtggtgggagggagccgccttggccccgccgtcctgccatgccagcatgcccgtcgcccacgggccggcggtcggcggcgcggggttggggatggcgccgctcgggcttgccttcggctgtggcttggcggtagctttccagccaggagccgggtccgcgctgccaagtgaagctggggaggggggcggggaggcggggcggggagagcgccgcggggggctgcgcgccgattggcaccggcgcagcccgggccagcctcgggactatcaggcgctgtgccgcggccgcttgcctgggctcggggaagcctccgcgcgcccggtgcgcgcgaccgcggggacagtgttgtcgtctccgcgcgcctccgcccaaccctctgggactctccgagggcgcgagggaggcttccatcccggggatccctcaccccgacacacacacctctgtgacttgagtttgttccctttctccggtgcacccgccttagacttggggatgcaactgaggccaggactgcttactcccaggcaatgctcagcgcatctccttccccgccagtgaattactgtaatagcttcagacccggttacctcggaggtaaaatccctcacgttctcacagtttagcgttcacaaagccctgaggcttgcacgatctcttttgattatttgagcatccctgtgagatgggcgtcacgtggcacagaccactgtccccgttttaaagatgaggaaatcgaggttcaaaggtaagaaaagatttccccagggtcactgtgagttggtgacagagtctgggtttggacctcggtcttctactggaccagtcagtgcttttttagtacatcctgctgtctcagaaacggagggagaaaatcccggactctcagtcttttgcttccactccaaagccaagccagaggccagcaagaggtttggagaggtggtgagcccccaccgggattccagccgctttggaaaccttggtggcttcaggcacagagccaagtgagatggctgagggtgtctgccctggtttgctgtgacccggagcacagccctcaatggacaaacgtcaggccttctccagagtcacaaattcgatcatttgcaacagaaattggatctgagaattaggttgcatctctgacccccattccctctcagccccagaagcagaagattcagaaatgcctgtctggtttgaatttaaggtccgagaagagagacagttgaaatggccctcatctgccccaccaagtcccctgggaaagtgatcaccagtggtcggagaagcttccactggccacaccaatcctgaatttcttcttttgtctcttggaaagcacacagcagtctgtgagcactaagcatttg

SEQ ID NO: 19549 - DNA, 1450 bp, Artificial sequence
  DNA replication origin
ctggccgcaggtcaagcgctcagcagcgcacgtaccaggtggccgccctgtctgaccgcgcagccctaaccagcagagtcctggtgctcgccgggggcaacagtggggtcgtccgtggtcagcactgtgcgcgcaccggggtgggaagggggagaccgaggcggggcctgcgccgcggccccgccccctgccgccccgccccctgccggcagccagggagcgggctgagcttagagctcggcggccccagcggcgtcccggggcccactcacctggccaccgcctccaccgagccggcgatggccgtgccgccgcccgcgccgctgtcgtacagcacgcccgagatgtcaagcagcaccccgcgcacgccagccagccgcttgccccacggtgccatggcgcccggccctgctcctcagctccgcgtcccaaccgacgccggcgccggcgccgcggccgcgcaggggcgcctgggaactgtagtcccgcgggcggggcagggcaagaagaccgggtgcaaacccggaactggggcgcggcctgggcaccccggcgtcactcgcccctgaaacggtgtccttttcggaagctttcttcccaggagatcagcggacaaagagcaggaaaagcagaaaacaagtccctaagaaaggtcaaaggcaaattgagacaagaaggcacctgtagccaggggcggtggttcacgcctgcaatcccagcactttgggaggcagaagcgggcggacagcttgtgcccaggagttctagaccaacctagtcaacatagtgagaccctgtctctattaaagaaagaaagaaaaagtacaatacaaaattgaggccgggcgtagtggcttatgcctgtaatcccagcactttgggaggctgaggcgggtggatcgcttgagatcaggagttcgagaccagcctggtcaacatggtgaaacccctgtctctactaaaaatacaaaaatcacctaggtgtggtggcgcatgcctgtagtcccagctactcggtaggctgaggcggaagaaccgcttgaacctgggaggcggaggttgcagtgagccgagattgcaccactgcactccagccggggcgacagagcaagactttgtcttaaaaaaaaaaaaaattatatgcagataacagccctgcatagatgaggatgcataggacctgggctgagaagaaaacgggactatcacaatgcgttaaacccaggaggtttttggataagctataaaataccactcgatgctacattatttttgcaataaatacacattgatattaaaagggaggagtttcctcaatggcccctcggaacctttcaagttattaaatagaaacgagaacactttacttctggtccaacatagctttgagctttcaaagaagagaggatcatattatttcaccatttcttttcaggctcttgattcacag

SEQ ID NO: 19550 - DNA, 1046 bp, Artificial sequence
  DNA replication origin
cgggccctcgggccctcaggccctcagctgtcctcctccctccccatctctcccttcccatccttcccatcctccccatcctccccatcctccccatcctccccatcctccccatcctccagtgggcgcagccccccctgcccgccgtggaccctgccgctctcccagctgctctctgccacactcctctcgggcttgtggcttctgtatcagtgctgaccaccgctctcattcctgaccctgggcatctgcagcacctcaagcttgacgggtcctcactggcctccttcctgacttccccttcagtttccaaggccatctgtggccaggcctccgggtggggctcccctgggtccactctggcccaggtcccattagctgccccaggtcagcctcacatcccgtcccatcctcacagctgcagcccctcctgcctgcctgccgtcaggtgggagggagaggcagacgagcagatggagccctgtgatgagctgcgagtgggcaggggagaagagggggagaagggatgagaggacggaattgcaggcgagtgagcagagcactgctctgctggcccttgggagccctgtagttttgccagctcttggatgccttctgctgtgggtaggcctttgagtggatggcagggtgcctggtgctaggggacctgagtgacccgggcagccctttctggagttgtgaggctcctgcctgtgagatgagttctcaggcccacagcatcctgcttcttcaaggcccttgactcttgggggcacatttgggacagtgtttccgtggctgggcatacacctgttccttgatcccaaacttatgccatgtccctctctcttttcccagtatgcctgtggcatcaaagccgaggtggtggggaagccttctcctgagtttttcaagtctgccctgcaagcgataggagtggaagcccaccaggtaggttggcgccttgtgaagtgggtcaggggaggcagccccgtcagggaggccctggagcttggaatggattacaggactcaggcagcctgtgg

SEQ ID NO: 19551 - DNA, 911 bp, Artificial sequence
  DNA replication origin
aggtgagactgtgttttgggtacaacagaaacgagcttgacatggcagccagcccacaccccagcttgcacgggattagcacatgaccttgagacggggtgtggggttggagggcagcggatccctcaggcccttgcaattgggaggactctggaattccatcaccagggaaggccttgaggatatggcaggatccaggcaggccaaagaagaggtggtgggacaggtgaagggcgcagacagcatgcataaaggctccaggtgggactggcaggaggggagcttggcgggtgggcgtgtcctcatcccagggacctggcctctccaaactcgcagggaacactgggaggcccccaatgcccagagcgtgttcttaggcctctctctgacaaggtgccagggagacaagaaggacgggctggtgaggctgatgaggctaccttggccgctctgcctgcttcaggcccagggaatccagggctgcaggagactctgatggtggccctcggccctgtgcgctgtggtgttctccatgctcatcgtctgcacccgtgaagggtggcagaggagagggtcagtgtcctgaggaatgggcaggcttgtggaagcctggctaaagcaagcccgtggttcttggagctggggccccagggccccgagaggcagagggcacacagggcatgggggtggtgcggcatctgggagggaatgagtggggtgtgagcaggcccacatgtgtggcctggggcgtgggggggtctgggcgtgagtgtatgtatatgtgtgtgtgtgtgtgtgtgtgcatgcactatgaggccagcatgagagtgggcacctgtggatgtgtggcctgggcctgagaacctgtggggcctggcgtgcgcacatgtggatgcgggatcgtgtgggta

SEQ ID NO: 19552 - DNA, 1196 bp, Artificial sequence
  DNA replication origin
tgtgattttctgtattttccaaagaaggcatgcatttcttatattatcagaaaaaaaaatatattaatttttaaaagaaaaaaattgaaggtgccataaaaaatgtacaaactagaaggattaatagaatcccaaatatataaagtggcttttctgtgcgctgctgtgctgggcccagacaggccccacggacccctccacacagctgagaagtgcaagatacagcccagccgccgccaccatgggcagctgaactcctcacggctagtggccctggcaacctagaagtcccatctccagaaaggccctgagcccagagaagactccctgttttgaggccccaaggctcagcccttgtggggctcccagacctccgccttcccagggcacctctgccgttcccagtcagcacatcaccgcagccacggtacagccacctgcgcctgcactgtcctcgctggaaagatggctgtgggatgcgggcagaccccgcacctgggccgaccgggggtgtctaggggtctggaggacaggcagtgtctaccctcaggttggccacaaactcctgtccctctggggagtgcgccctgccaacccctgtgggggccatacaggaaggagcagccagggaggtggagtctgggaggatgaaggcttgtactgcccgagctggaacgggggcattttctctcccagtcaaccctcggacaaggccctgtccaggtatccagccccctgacaggtacagcctgaggacccgctgggcccacaccctgagatgggcatgggtggcagtgaggtgtggcacagcagcccccactcacagggcacacgcagtgcaggggcaacgacagacactcaacccagagctgctgcatccccactgtggcaagagccatgggcaggcagggaccggggagaacgaccgtgacggggcctagatgtgcaggaccctcagcctcggtcagggagacggctggacaccactgatgaaaggcaggcaggcgcgtccacaaaaccccatgaacgtgaggggaggcgagagggcagaggggagagtaggggcaaggaggcgatcaagaagaggcagcagggcggggtgagcccctggaaggaggcagagaggtgggcttctgggaaaaatgggcctccagcctggctgggccccagggtgcacagggctgggatggggacca

SEQ ID NO: 19553 - DNA, 1194 bp, Artificial sequence
  DNA replication origin
ccaccacctggaccagcctcctctgtgggacccagggctggtccctgctgcagagcttggacgttaccttggggacacacagggatggcagggccgtgggcaggagggctcagctgtcccagacctctgtgggcctgctaggtccctcctggctgccctggcttccctgcccccagctggcattccagagcctcctttccggaatcgccgcctggagaggggaagtgagtctatcttccccacgatcagccaaggtagggaaaaggcacgggggacacgcctgtgtgcacacatttgtacactggtgttcacatgagggacaggaagggaacggccctgtgcacataaacacactgcgcctctgcccctctggggccgcctcccacgccactgcagccacaccacccggtgcacgaaccctccacaccctcccccacccacacgttttcagaagtcctaggaagaaacaaaagcaggcgcactcactttgaatgcagtgccacaaggcgcaggggcagcgtgggcgcaaaggaggacaggccctctctcctgacagccacaagaaaggctgtgccttgtgtcgggggagaaggggggacagtcaccctccagctagtggaagggctcaacaaccaagacgggggtcaccccagccccctgccccgcagctgcctgggggcagaggccataagacacaggtcaggagagagggtatgaggatgactgtgccggcagcttaccaggctccctcggcaaggagtgagctccccatcacaggaggtgttcacgcccagttcacagcacgcaaaggagagaagtccatttgcaacgaggagcctggctcggaggcccttagttctctaacccctgggcctctgagatccagcactggctggaagcctggcccatccaccctgcatgccaaggtcaggacacctgtgccacccagtccctgcgaggccagcgtcatcctcacggccaccgattaccatgccaggtgcttcacagacacgacttcattttatttaacattcaactaagtaggcattgccacccccatttacagatgagaaaagcaaggctcagaaaggtggtcatttgtcccaaagtgccccactaggcactcagccaggattcaacccaggcctctgattctggaggccatgcctttcccggccatgcccaccccggcca

SEQ ID NO: 19554 - DNA, 958 bp, Artificial sequence
  DNA replication origin
gtgagttctgcctcccatagaccacatgtgtcatctgcgtgcacatgtgtgaaacccgaaagacaagcagatgagacccgcctgccaaaatatttgctgccgcgcagaacagtaagtcgtttttgacatatggatctcagcgcgcagccacagcaaacaggcagcgtggcgctgaggggcacaggtttgctggggggcgtgagccgggagcatcgccagcagcaggctcgcccccctgcgagggcgcgcacggattcgctcgccaccaagagcagggccccaagaggggccctcggcatagtcccctcgagtccccagaacttcacaggcagagagcctggctcgaggatgggcgggagctcagtctggctttgatctgcgggaggtgttgtgtgcagaagctgtgggcaccgggggctgcagagcttcagacctggagcctgctcccagggccgatctgaacccggcacctgtgctgacccaagggtcaaccaaagtcctgagtttggtggcgccgagggaggggagtggtcgcatcccaccgggtgcctggaatggtgctggaggaggcagcatctgatttgggccccgtagggccagaggggggatttgtagggacagagcaggagggagtggagctgaggctgggggagggcatggtcggaggtccagaggtgggagaggggccgccatcctgaagcacacccctcctcgtcttcctgaggcctccatcccttcctgatcttccaggtcatgggctccaggcttgggcccactgctgtccttctccactctctccccagggaacccacctgggttgtggccttaaacccagccagatgatgcttctccagcctctgcctcctgccgggccctcccctgagctcagaagctgccatcagtagccatgcaacctcccccttgccatcatgaagtatctcaaacttggcagcctcga

SEQ ID NO: 19555 - DNA, 984 bp, Artificial sequence
  DNA replication origin
ccccacatgctgcctcataccccacactagtactttatgttctgccgggttggtaatgggtttttctttgaacacgtttctgggaaagctgtattctcactcctgcctgccaggtagttttaacatgtgtgagcactctattaggcagtacaattataatctcatgtgaagtcaccctcagcagctgatcaagcccggggtgttcagtgaacacagtggttaagaaaccaggtctgagagctccggacaatgcagaaacgaccaatccagtgggaacccccatttctttcggctcatacctttctcatgaagcactgattagtatgtatcacagcaggccccaagggatgtgaacgttttcagggggccaccaggctgcccagacccccgacctggcacccaggtcctcacccagccctggctctctgccgtccaggcacctcatgcccctgcgacctcgcacacccaacacgccagcctttccttcactcactcatccacatgcacaatgcctttgggggtcagggtgtgggggaccgggatgcaagttggaggtggtgagagtgcaggggacacagatccgaccacgtgacgcagtggcagtgggtccagggaagctggtgcaggagtggacaaagggggccaggacgaggggaaagacagacacaagggccagccagtcctgcagacgcctacagaggtctctgctcagagcttggaccaaagtgctgaggtaggagtcaagaaaccctgtagctcctgcccccaggagaggctgcaggacatgggcacaggggactgtcatggaaaatcaggggctgacgcatcctaggaagaacaaagcaggggtcctgcagagagagaaccgggtgcttctgcctcaggcagctggagagggcttctccaagtaaatggcgtattagggagtgaactgtacctccgcccccactgaagccctaagccccagtgtgcctgtccttggag

SEQ ID NO: 19556 - DNA, 796 bp, Artificial sequence
  DNA replication origin
caggtgcacgagggcagggctttgcacaaacactaatgtggtctccccgtctacagggcaggtaactcctgccctaaagaacccccctcagccccccagtacccccgccctcagctctgcctatccctcgctcagggaaggagttttgtgtgtgcagtgaggagacctctgtatcccatattaccagcaggcctgggggcagaccatggaggagggtctgggggcgagatatgggggagtctggggtaagatataggggtggcagcaaagggggatctgggggcaggccatggaggggggtctgggaacagcatatggtagggagtgggagcaagatataggggttctggaggcaggatggatatgagggggtctgggagcagctcatggaaaggagtctgggggtgggatatacgggtaccgcaaggggggtcctgggggcaacccctgaagtggggtctggccctgctgccaccccagcgcccccacatgctgcctcataccccacactagtactttatgttctgccgggttggtaatgggtttttctttgaacacgtttctgggaaagctgtattctcactcctgcctgccaggtagttttaacatgtgtgagcactctattaggcagtacaattataatctcatgtgaagtcaccctcagcagctgatcaagcccggggtgttcagtgaacacagtggttaagaaaccaggtctgagagctccggacaatgcagaaacgaccaatccagtgggaacccccatttctttcggctcatacctttctcatgaagc

SEQ ID NO: 19557 - DNA, 1265 bp, Artificial sequence
  DNA replication origin
cagtgccatgggacgagcacccccagagtggatggctctgtccacagagcacgacactcggttcaagccacagtgcagacgcagctcctgggcactccaagtcaggccccaagcagtgggccagcacattccccaggacacccacagcatgtccagacagcaaaagtggcttctctttttctccttgttttgtacagaaagctttgagagccaggcctcccgaattccagtgacacgtgggacttgggcctcccatagccaggctgaggaactgagaggggagcggggagggctggcagctgcctggcagggagtacggaacccctggctgctccacctgcaagcctggaggcgggactggcagagggggcctgggctttggccatgggaagcgctggccctgagctctgtgtgaccttgggcaaatggccactcagagcctcccttctctcatcctgaaagtgcagctgaaaagagcccctcctggggctacgatggagattcaccgagatggtgcaggtcgtgggcatggcaggtgctcgcctgggtggatgggtggatagatggatgggaatggacaaacagacagttggaaggatgatgcatgcacagggatggacaggaggatggatggctggggacggatgggtggatggatgggtgggtgggatgagtggatgggtgagtggacagatgggcaatgaatggatggatggacatggatggatggatgggaatggacagagaagggtggacggcaggcactgcatcagggtggatgagtggatggatggacagggatggatggatggggatggacaggtggatggatggatggatggatggatgggcagagatggatagatggagatggaaggacagagatggatagatggagatggatggacggggatggacagaaaagggtggatggcaggtgctgcatcagggtggatgggtggacgaatggacagggatggatagggggatggacaggtggacagatggatggacagagatggatggatggggatggacagagaagggtgggtagcaggcgctgcatcagggtggatgaatgggcagggatggacagggggatggatggatggggatgaacaggtgtacgggtagacagatggacacgtggatggcaggaactgcatcagggtggacaggtggatagggatggatggatggatggatggatggacggacggatgggtggatggaccgctcccagcaattcctcgtgctggccctgg

SEQ ID NO: 19558 - DNA, 1110 bp, Artificial sequence
  DNA replication origin
caccctgccccttcccctgcccctgcagggtagagaggaggcgggtgggccaccgactgggagtcccgggcagctcaggtccctcaagagcccctcggggagaggccgcacccgtctcccttggtcagtgttccccaggaggcggtgctggcctgcgtgtgccctggaggaggcggcagggagactggcctcatggggctcttttgctggggcctggccaccattttccttcgattggtacaaagactgtccctgtgaagctggccaggccccaggcacagaaccgccttgttttctgcctctcactcacccgttccctgcattcggctgacagagcatgagggggaggaatcactgatgacaggcactggcctgcccagctgggggcctttgtttattcatttggtgggcacttcctgggtgcctgctctgggtcaggcctgtgggggggaccaccgagggcaggaaacctggcctgtccctccaggaagcgaagtcaacactggcacctgcagatgaagtggcagagcagcccccagctttgatggcatggggtggttggagggcacattctgcatgctcagaagagagagcaactcgccctgtggaaggagcatacagtgggagatggggacaggtgagtggggtcttgaaacgtgaacaggagtttgcaggtggagcaggtttcaagagcattccagggcacagcatgggcaatggcagggagagctgggatgtctgaagagcagcagcccagacactgagtggctggcgaggcgagggaggtccgcaggtggggcccagtcaggatggactcatctgccatgctgaggagccaggctatgatgtgggcaatagggagccacagcagtttacacaggggaggcgggagcagctgagcatttagggaagccactctggctgcaaaagaggagagggggccaggcaggagggagagccagtggagggggagggggaaggggaagggaacaggcttcagcagaagacctcctgccttcaaggggcccgggtcaccctgtgggttccggtggttaaggccagcctcctggtcctgcagccacatgcctcccagctgtgtgcctccgcttc

SEQ ID NO: 19559 - DNA, 2605 bp, Artificial sequence
  DNA replication origin
ggcttcccaagagtaagagcttgagaaggggcctgtccagagccctgggggacggtggacaggccagcccaggggtccaggcctttcctgtaggggccgaatcgttaccacttcaggctctgccagcttccatttggtctctcttgcatattactctcttctttttacacccctttaaaaatataaagacaggccgcaggtaggatttggccctctggcctacacaatagcaactgtgagcattatatgtggcttctctttctttttgagactctcatctgtcacccaggttggaatgcagtggtgtgatcacggctcaccacagcctcaacctcccaggctcaggtgatcctcccacctcagcctcccaagtagctgggactacaggcgcctgccactacacctggctgatttttgtacttttttgtagagatagggtttcaccatgttgcccaggctggtcttgacctcctgggctcaagcaatcctcctgccttagcctcccaaagtgctaggatgacaggcgtgagctaccacgcccggcccatatgtggctttttaattaaatttttgaggtataacattagtaaagtgctctaaaagtgaagaataggatgttagccccacccaggtcaagatctagaacattcctggcacccctattcacctttccgttaggaagctgccgtcccaccctctgtcactagtctgcctttgccagctctggagctctctgtaagtcagtcctgctgtgtgtattcctcgagtctggcctcagttgctcttcaggtctggggctcacccccattgccgcggcaggaactcaccccagattgagccgttgtggagtattccagtgtgcaattctgccgtggtctgttttcccatcctccccctggcgggcatttgtccagtgtttgacttttgctattgcaactaaagctgtgtggagcagtgtgcctttggtgaacgtgcctttggtgaacgtgaggatgcatttctgctgtgtacatacttaggagtgggactgcagggttgcaagtggatatcaacacgcagttttccaatgtggcccgtaccatagaaggcctcgtggtgatgccgagtccatattccagcactgacgcaggattgcgtggtgccaagtccctatttcagcactgacgcaggatcacgcatgtcttcaatgcccctctcctagatcgtagacaccctgtgtggcatcacagaatgacacacacaagacaagaggcctctaaagccctgacactgacacgggttgttcttgctggggttgctaatggagcgggtgcgggtgtgggtgcgggtgagggtgctgatggagcgggtgagggtgcgggtgagggtgctggtggagcgggtgagggtgcgggtgagggtgctggtggagcgggtgagggtgagggtgagggtgctgatgcagcgggtgagggtgagggtgagggtgagggtgctgatggagcgggtgagggtgagggtgttgacggagcgggtgagggtgcgggtgagggtgctgatggagcgggtgagggtgcgggtgagggtgctggtggagcgggtgcgggtgcgggtgcaggtgagggtgctgatggagcgggcgagggtgagggtgagggtgctgatggagcgggtgagggtgcgggtgagggtgctggtggagcgggtgcgggtgcgggtgcaggtgagggtgctgatggagcgggcgagggtgagggtgagggtgctgatggagcgggtgagggtgcgggtgagggtgctgatggagcgggtgagggtgcgggtgagggtgctgatggagcgggtgagggtgagggtgagggtgagggtgttgacggagcgggtgagggtgagggtgagggtgctgatggagcgggtgagggtgagggtgagggtgctgatggagcgggcgagggtgagggtgagggtgctgatggagcgggtgagggtgcgggtgagggtgctggtggagcgggtgagggtgttaatgaagcgggtgcgggtgagggtgctgatggagcgggtgcgggtgagggggccgcatactcatccccttgcctggtcccccaggctcctactttggtgtgtgctcattcaggagcagcagagtggccgtgcttgggacggccagccaagcgatccccactggtactggcatctgtaggtgcccctgcttggagcgggtgctggcaactgccctttgctggaaggggcagcaatgtccagcagtggtggaagctctcgaaagaacacagggctgggagtagaactcagtcagatcccagctctgctctccctgctgtgtgacctatagcaagtctctgaacctttctgagctgtttcctcacctgttcaagatgggggtgaccacttcttccttggaggatggaagggagagggatgtgaggctcgtgagtgctgtgctcggagactgtgcaggaggggaagcggccgtagccccatacaagcaggtgggcaaggaagtgggggcgctggaggggcttaggggacaaggggttctgtccttgggacctggacaagagccaaaaggtataccctcacagtcacaggggagcccacactgccc

SEQ ID NO: 19560 - DNA, 1096 bp, Artificial sequence
  DNA replication origin
caagggcgcggcggccttcccacaggggccctgggaacaaatcactcataactgaagtttcaggtttcagaatcagtcagctgaacagataacttgattgctccatttctccccaaatcagttcagaagctactgataacccttgagagactgcttctttattttattttattattattatttttgaaatggagttttgctttcgttgcccaggctggagggcactggcgtgatctcagctcactgcaacctccgcctcctgggttcaagctattctcccgcctcagcctcccgagtagctgggattataggtgcccgccaccacgcctggctaattttttgtatttttagtagagacagggtttcaccatgttggtcaggctggtctcgaactcccaacctcaggtgatccgcccacctcggccttccaaagtgctggtattacaggcatgagccactgcgcccggcctggagagcgcttcttatgagagaagccatgggtctccggagcaggatttccaccacatgaaggtggacgataagaaagtgtgggacccacgccggggaggggcaagtacagcccccgcaaggccgcccattaaatcaggattgggggaaacggtgacagtcttttcagcaagatgagaggccaccagccgggccagtgtcactggatttgagggagggccatttggccccttagttggaaaatatgcagatggctggctccttgatggagtcccctgatggcagctccttaggagacaatacaggacgttcaggcggcggctgcagttcagtggcagcctggaggggctgtgcgtgatgccgggctgtgcgtgatgccgggctgtgggtgatgccatgctgtgcgtgatgccgggtttgtgggtgatgccgagtttgtgggtgatgccgggctgcgggtgatgccgggctgtgcgtgatgccgggtttgtgggtgatgccgggctgtgcgtgatgccgggtttgtgggtgatgccgggctgcgggtgatgccgggctgtgcgtgatgccgggctgcgggtgatgccgggctgcgggtgatgccggggctgtgtgtgatgccgggttt

SEQ ID NO: 19561 - DNA, 1551 bp, Artificial sequence
  DNA replication origin
ggggtgaggtccagccacacctgtggtggggtggtgtagcccgagcctgttaccccgtctataaaacagagggattcacttcttttacaggcacttcctggccctgcggggtgccctgtctctggctggagctgatgagccgtggtgtgatgcttgcctgggggtcggtgttgcctagaagtgaggaatgacctccttcacccctggctccttccggcagcctggccacttccagcatgtggagggggcccgggccctggcagagacggtgtggaaccgccggccgcatgcggggctggagttcggggctgccaatgggctaaggccctgtgttcaacacatgtcgcggaactgtcgtgaaaaaaagactcaggaccacaggtccggggtgctcccaggggtctttcccaccgaggctgggagtgagcagcagcctaggcccagccacacctcccaggctcgggagctgccaggccaggcaaccgtgaagggtagcagggtggggggtggaggggaggacagggagagcaggcctctcgggcctcacccacccttgcaccttccagctctagggcccacacagtaccaagccctgggctcaatgtaccacttatgaaaactcaattcaaattggcttagtgcaacaaggtatttggtggtctcacatgacttgaacatccaggcctggctgtcacgggaaccgcatctcttcccattgcagctacttggcaggtggcgggatgtcccccagccaccgacgtccccctgcctgctccgcaaccccagggcctgcagaaaaggcccacgagactcagactggcagagacttaggcggaccaggaacaggggcgcagtctccgtcccacccaaaccctaaccagagagaacacggcacgttgtgccagacggaggacggatgccagcgagggtccatgtcctcactgccgacaaggctgggaactgggccaagtgaagcagaggcctccacgtcagatgtgagcgccaccggcccaggtgactgcagttcttccctccttccgttcggcttgagccctccagaggatcggaaaggctgaggcctgacctggtgccgctgtcctgggtgggtctgtcctgctggtcggttcctgcccctctcggggaggttggctggcagctggcaggtggaaagcctcctgtgttcacctcagggcagaggtggggacacagggcgggacgggcgagtgtggtgcccctctggggtgggtgctcttgggtccgcctcccgtgccagagtgcgtgtcaacagttccagctgcccctcagaactgtcctggtttaggaggtgaacacacggggcagcctacattctacgtggtttttttaacattataaaagcagcatgtgttattacaggaaatttaacagaagtatataaaaagaaaccagaagtcacccgggagtctgagcactgtgctctctggggcctttcctttcggccttcttccttccagccctttccctgcacactggacagagtggctgagtctctctcgtaagcccacagggtta

SEQ ID NO: 19562 - DNA, 1704 bp, Artificial sequence
  DNA replication origin
gtgcggtgaccaagcagtggtgacagctggcccttgaggccagggcctgtacctgtctggttctttaactagacctctagcacctaccaaggtgtgagtggtttcccaaaaatcgattgattgacaggatcttgctctgtcacccaggctggagtactgtggtgtgatcgtagctaactataaccttgaactcctgggctcaagtgatcctcccacctcagcctcccaagtagctgggactacagatgcatgccagtatgccaggctaatttttaagtcttttaattttttgtagagacagggtcttgctatgttgcttaggctagtcttgaactcctggcctcaagccatcctcctgcctgagcctccgaaagcactgggattacagatgtgagctactgtgcccaccctctaaaaatttattgaatacatggatggatggatggatggatggatggatggatggatggatggatggatgggtgggtgggtgtgtgggtgggtggatggatggatggatggacggacgaacgaactcacaaactgaggcaggaggcctggattcttccccattgggcacatcagctcctccattgatgatacttagtaagcaaggatgacagcattgtttactggggacagtgtggcaggcactgtgctaagcgtttgtgtagctgtggattatctttattacagccctggaaagtgggtattgttgtgcttgttttacggaagaggctgaggttcagagtagcggccacggtcacaggaccagctgtggccatgaggcccatgcttgttccactccccaggagggggtctgggcagggctctgggtgccaggcccctcccatctcaggtgttgtccacaaaggggtctggtccagtgagggctagagtcatggaggtgaggggttggctaggccttcctgccttgccgtggtggacacatgaggatccctggtgtgaggcagccaagcagccgggctcaccgatcggagcccagacctgggatggcagcagggatctcacatgacgtcatctagggagcttgctctggcccctgctaggccagccgtcagagccatgtaagacagtctaagatgacagttgtcactgttgtggatgaagcaggctaagattggatcattactgaaatctgaaacttgaatttaagtggggacaacgagcagtgtccaaacgggggcagtaatggtggccttggtagagcccaggaacctgttgaaggaaccccctcgtgcttttgacagggcaccagaggtgttggggtggtggtggcagaggacagtaaaaggtcccttccctcctccccactgccctggccttgaggcctagagagacctcgcagtgcgggacagtggctgtaagattgtctcagagcccaccagctgggagaaggaaaagcacaggacaggcgcagcttttattccaggtgtcagatcctgtttgggccctttcaggaggcctggcttacaaggagagctagactctgcctttttcctctgcagttgaggtgggttagagggcagccatgggcccttctgctcctgggcctctctcaaccttctggggaccattctcatcacagcatgacctggggaacactcacagaggacagaggtcccagtgtctgttgagttctgtgtgggatgcgacacacctccgtttaatatgctaactata

SEQ ID NO: 19563 - DNA, 763 bp, Artificial sequence
  DNA replication origin
tgccttttttttttcttttttcctaatgttgctggtttcctttttttctgccttgtttcgcctttgggttgggtcgggcggtttctccgggcgctcggtctcgcccctgatgcaggcgtgagacttgtcagagcacaggcatggggaagaacaagcctggctgcggcggaaaagtctgcgctccccaggccagggcgggcgggcgcggggactgctgcgcccgggggtgtcctctccgcgtctcaacttgagccctgactagccgctgcggaggaggcgcggagtctcgggagccgggcggccccattcgccccgaagttcccgcatcgtttgcagacaactcttttgttcgcggaagtttgcacccgccacccccggggtgcgggagcgaggcggcgggctccgctgctgctggactgtccggggcggtcaggatgggggtgagggggcattctgtcccgggcgggggaagcccgcggggaggccaccgctggggcttgcggagtgggggcgtccgcgccggcgtggcttttgcacatggcgagaagggccgtccggcacaggcacactggtcgagtcacatttttgctagtcttggattttgcaagcccgtgggagtcaggttccccgctcagggtttctcttggggcagagacgaaagaaacgaggacacccagaatccggggagggtttgcggtttgtgttgtcccaagtgtgttctcgctccccccgcccccccaccttgtcccccagcccccagctc

SEQ ID NO: 19564 - DNA, 910 bp, Artificial sequence
  DNA replication origin
aaccggcaccggccaggccgcccgcacccgccgccgccgcggagccgccagaccgcggctgcgtgaactcggcccggcgcttagcgggcggtgtcgcgggcccgggcgctaggcgcggcggcggcgtgcaggaggcaggcggcgtgcggcggcggcggcaggcgagtgtgcagtgcgcgcagccgccgatgggcggggagtgagggactcgcggcgcgccgccggcggggctagagggcgtcctgcgggctcagccgcgcgccgctcgccgcgctcgcgcctgcgaggccccgggacgcgggaagtggccccgggcctgggccgcgccaccgcggctgcccgggccccgcgccagaggccctacgggcttctctccccgcccccagcacgagccgggatgaaaacgctgggccgcataggcttcaggcgtccagcttccgggttgttagatgccgaggttcaaaagaaacgatcacttcagtggcgtgcaggacagcgggcgggtggggtcggggaggggggaccttaaagtgttgtcacactttgggaaaataaagcgcaaatttcctaactcggggcgctgtgactgtgtacttcagaagccacatccaaaatacatgcaactggcgaaggaaggatttgtggttgctaagcagaggcagagcatgtttagttctgtaacttaggatgttgacttaagttcaggaatgtaaccctgatagaataagcagagtattttcattgtgctgctcacctgggggagggggattgttttccttgtgaagccctagatttcccattactccttcctactggtgtatgttattttattgaccttgtatccaaaaagcgatttttaaagagaagtttttttaaaactccctatgcctgttttgtgttctcctttgcc

SEQ ID NO: 19565 - DNA, 806 bp, Artificial sequence
  DNA replication origin
agtggggtgggaatagcggatgacccgaggcgggagcggggagatagtgggggatcttggggtgaaagaaagcgatctgacctcaaacagacgctcaggaattattaaatgaattaatgtgggtggatgaatggctgcagggaacagttggggagaggtaaattggcgggatgagagggagcagggattctagagaatcattgtaggaaaagagacggcaaatgaaaaggattcagagggccgggtgcgtggtggcttacgcctgtaatcccagcactttgggaggccgaggcgggcggagcacaaggtcaggagatcgagaccagcctgaccaacatggtgaaaccccgtctctactaaaaatacaaaaattagcggggtgtggtggcgcacacctgtagtcccagctactcgggaggctgaggcaggagaatcgcttgaacccgggaggcggaggttgcagtgagccgagatcgcgccactgcactccagcctggtgacagagcgtgactccgtctcaaaaaaagaagaaaagcgtccagagaaaatttaaacggagggctagaagactggaataggcagagacaaatagcacaggaaagagactgtgtgcctgcacacttgagaccagatgtgcttgtttcatcaagttttgaacttgggtcagggacttagggatacgtggacaaatgtctttgtgtttttttaggctaaaacttattgttgtgcatcagatattgtcctaaatgctttacatgtacagtataaacgtattctgcttgcccatgtatttccttcttttaact

SEQ ID NO: 19566 - DNA, 1108 bp, Artificial sequence
  DNA replication origin
tggtccctcacgaacagcagtccccaaatacagccgctcttggacctcgacgaaggggatgccactaacgctgtggggagagcgcacggtccccgccggcgcagggagccgggggtagagcagagggcgtcgcgtccccatcccagccccagcgcgggggctggagcagtcgagagggcggcctcccgccgcctagaggcgccggtccgctcgtccgctctgcctgtgccccgtctctatggcggccccaacggccgtccaggacgtggagcgaaatgagctcgggcgctgacggcggcggtggcgctgcggtggcggcgcggtcggacaagggcagtcccggggaggacggtttcgtcccgtcggcgctggggacccgcgagcagtgagtgtgacgctgggcaggggaggatgagccgtgccgccctgcctgggccccgagaaggggacggcggggtggagacccggggctcagggacagggagaccctcgggggcgtgacgggagcagggccacctggcggggggcttacggggatttcaaagagtggaatccctaggggtcgccctacgcggttaaccgacgtttcaagggattggagcccaaggggcttgtgggtgcgggacaggctttggctcctgggaggccttttgggagtctcgaacctgagggccaggcttgggggaaagggggagagggcgaggctggcgaatagggctggtcggcgagagtgagagaccgagggagaagtgctgggcctgggagccgaaaaggctgagtaggaggggagggatgtgggagctggaagtggggtgggaatagcggatgacccgaggcgggagcggggagatagtgggggatcttggggtgaaagaaagcgatctgacctcaaacagacgctcaggaattattaaatgaattaatgtgggtggatgaatggctgcagggaacagttggggagaggtaaattggcgggatgagagggagcagggattctagagaatcattgtaggaaaagagacggcaaatgaaaaggattcagagggccgggtgcgtggtggcttacgcctgtaatcccagcactttgggaggccgaggcgggcggagc

SEQ ID NO: 19567 - DNA, 1181 bp, Artificial sequence
  DNA replication origin
cggagaccatgtcctgactgaggggagagggcggaggcggcagcagcggggcgggcggcggcgcgaagggaggcggagaggggccgggctcgactcgtagccgcgggctgcgcggggagtcgccgctgccgccgccgccgccgccgccgccgccgccgccaagcgcccgtcggacggggaggaggagcaggagctggaggaggagccgccgccgccaggtaaccgggccccggggggcgccccaccgcggcctgccgggcccctcgctcccaggcggcgcccaggttgccgggcctcacgggctgtccgcccgcccggcgccccaggggcgaccgcgtcgcaggcgcggggagggcaggggcccgggccgccgctgtcggcgcttccatcttgggcgctccggttgcggggacggcccgggggctgtgggagggcgggtccgcccagcttgtttaccgaccgccggccgcccgtggctggacgcggtgccggtcccaccgccgctcttccgccagatttccccacaacttcttttcctgccggagacggatcggcgagtggggtttcgctcccactccgcaataggccgtaaacacttgggtccatcgccacaagttggttctggtgtctccaaacttgtatttcagtccctcggccgcttgctttccacctcctgcggtggcctccagttgccatttgtaggaaaataaaggtgggggacgacgaggcgggtggggaggaggagctggagctagtggaaagattcgtctacccctcctgctcgcagtaacgagtgttcagtgcaaggatctgttttttctctgctatggtttggtgcgggtcatttcacagacaaaagaactgtagtgaatgctggcattaagcgcaagggacaggcagtttaggttaagcctggaagtttgaaccggcccattatctttgagatacactggtgttttgaaactctcttgctgaggatattgtatttcagtcagttgattacccttttctgtaactccgtagactatcgatttaagcgccgccccatcttaccagtattttggtttcaccgtgtttatgatgatgttaataaatctaatgtgcaaaaataccgttttaggaacacaattggagataatttttttttgtatttgagacggagtttcccccttgttacccag

SEQ ID NO: 19568 - DNA, 1147 bp, Artificial sequence
  DNA replication origin
tttagtcacccatcctcctgttcctgtgacctctgttgcagtcactttaaatcccagattacacacgcccttccctggcactccccggccccccggcagcatgagcccatctgtgtttcacagtaataaggtaaagaatgcatttgggcttgagctcggaaacctgtttgattcacaaccaaagagtcgtctcaaagccagatctcagtattatcaaagcatcaggtttcagagctggcccttttttgggctaggcatccatggcctaggatcacgtgtggacctttttctgtttatccatgtttaatttgtgtttagctgtgccatggattaacgtttcatcacggtggattaagagtggactgacattgaagcagccttattttgcttctgttacctctcaggaatcagtggcaggggtgggaacagccccttccagagggggaggcagggttcatcctaaaagtaccctggtgcttggaagagggagtataaacctgagcgtcagtgtggaagtaaatcccagttgcagcttgggagggctggatagagcaagccaccggcttcatcagtctaacgagatgtcacatggaacaaagctttagggttttatttagctcctaatccgcatgctgagagagccctggtccatgtgagcacaccagccaggaagggggacctggcaggctggggacagcctcctctccgggactgagctgtaaggaacagacctctctggctatcgttggggagtgaggcaaagttaccgtgagtcttatgttttgtctgctaaggtttcggaggattaataattcaggccatgctttgaaacagaaaacccccagttggttgtccctgccgtctcggaagggttagcacacagccaggtctgtttttgatgtatgtaattgaagatttataaagaaaagcttctcctctgcctcatccgcagtcattttttttccaatgccagttcccagcaggcatataaatattggtcgttctcagagctgggatgctgctgggtggtacgagggcccctgggagaacgccgagtccctgcggcctctggggaggagaagctccctgacgtatggcacagcagaggggacttggtttgagccaaaccaccgaccacaggacgctg

SEQ ID NO: 19569 - DNA, 1122 bp, Artificial sequence
  DNA replication origin
cctggaggccccgcccccgcgggccagaacacctggcggcgcggccccgccccagctgtgccctcttccccccgcagggcacttggcggccccaccctggcccctccgcgggccgcggtatctgacacccccgggcccccccacctcgcgcctcgcctttacacttgtaaatggagccgcttcccgccgcggggaagtcgttgagaggtgtgagaatgggccctgccccctccccccgctccgtgcccacttcctccttcctcccgctggcctttgtgctgggcggggccgctcggacccggggcggcgggggtccagctagacgccgcctcaagccagcagggtcgccggcccctctccggtccgcgaggccccggcaaggtaggagcctcgagaccacgcgggacaccaggttggcccccagcccgcactcgaggctcagagcaggggcggggacctggttgcaccaggccagagccgcctccaccccgcagcggtcgcggactccgggcactcatggggactcctggggtcgtggtgagtggtgaggttcgttgattgactgcgcgatggtggctgagttgcaagcaaacggtaaacagcggcatcatttccacttgaccggcttgggatctcgtctcctgggcagtgtttgggggtgaccacggttcttggataaccttcgaatctgggtgttttccttgtagtacaaatagcgcagtggcagttgctgtgggaaacagcgagggccactgagaccttcagcagaactccacgtcgaggacgagtgacatttgcgcgcctctgctgcgttctctgctgttcaccccggcggctcccaacacctgaagcctggcgaggcatgtgactagaggttgtccgagcgcagagtggtaggacggtgcgatctggcccgtttcgtcttgccctcgtcttctccatggaggaatttctgtgttcgcctctatgttttgcagacttaatttggtgctccagaaacttatgcagccattcaagtgcgctctacctgttattcaagtaactagagagcaaccatttcttgagcacttacttagtgtctggcactagctcgctgggccattgtgtgttgttgcgttgccc

SEQ ID NO: 19570 - DNA, 1757 bp, Artificial sequence
  DNA replication origin
ctctcctctgatcagcagaaatgtgcttcttgcattaaaacaaatccttaattatgactaaaagaaactgtcagctgccttaaagattgtctggaaatagtggcaatatttctgtgtctcattccagcccacgttgtggcagaagcctggaagggccacgttaaaggatgtgtcacagagacagtgtgtgtaggtcttcctgcagcacaagcaagctcagggcttgtaaagtccagcttatcgtggctgtgctccagccatgcctgaaatctggcctccagcaatctgtcccgtcccaggacaaacaaaaactttattatggagtcatggaacctgaggaagtttctctggaaggaaccgaagacctagaccgtggagggagatcaactcctctggcctaatggggcttttctttttccaagatggaatttaaaaatctcatctataaaatgaggctagcaaagaatcattttatggtgtaagtggccagaatctaacctggaagtgatagtattgtacctgccgcaggtgtgtgtgtggcagcgggagggtggagaggggaaatgagaggagaagagtttggaggggaaaacagagcattcgaggtttctctgctggagggggtgaaaggccaggagtttgtgcacctttccttttaaatgagctctagctgtgagtttattattttgctgatggatggtctttcgtgcagtctagaagtgcaaacacagtcggcttatccgctgcttgttcaggtccagggagaccaagggaacgggtgggggcagtgcttgcaaatccatctggatcctggacaccccacttggtgttgctgcagccagctcccaggcctgcccacctggagtacagccagcgccagcagcgggcagggcccgagagagctcttaaagccatgtcccaggaacggttgagggaactgagaatgttcagcctggagtggagacacccctgggaagcccaacattgtcctctgtgcggtcatgtggccttactctgctcggaacagggaggccttgctgttggagctgccgggccagatgggctgcgtgggctcctggcacaggcagaacttggctgaccattggctcccagtgccagccaaggctctgcaaacacccgagaccctgatggagactcaggctttgggagcacctcctaatgagctggggaggatactgtgttttcttcccagtggggggtgaccaataatcttaaagttttttccctttctccagacgttcagctgtggtccgcactctggattgctctatctgccctgcggactggatagaggctcagcgtagatgcccagctgacctgacatttcctacccatatttcctagtgtttcaggagcaggcagagacagacctgattcctttatctcggggctttcagattacggaatagaagtcacactaggagggcaatcaataaagagtatattttgctgtacagataccaatatgcacatataagtgcctacaagtaaaatctgggaatgtttttgatcttaaaaacatttcacagtcattaatcttcacgacgctcctgcgggctgggtaaatagagcaattcctattttatgccaggaagaaatattgaattgcctcccccaagtcataaagaggctgtttttcctccttgttcctgtgactcgcggtgtggggggcctggggcgcctggaacccctgcgatccgctcagactgactccaggacgacttccggtgtcctgc

SEQ ID NO: 19571 - DNA, 983 bp, Artificial sequence
  DNA replication origin
gcgaatcaaaaagaaaaagtttagcaggaggggctggctagggcgcgccccgggcggcagggacccggtgcggcgcagggacagccgggccgccgcggttcctcctcctcccagccctccgcggcgccggacggccccgcgcggccgaggggaagcgcctttctttctctccctcgcgctgcccccagcgccccgggcgagttgggcagaggcgcgcgggagccggggcgtgcctgggcctttctcccgcgggaggcccagcggcgtggcgggtcgcctgcagcccacgccgcgccctggggctcggaggccgcgggcccaagagctcagctcggtcaccgcgggccgcgccgagacacacacgcgcgcacacactccctcccgtggctcgctttccgccggcgacgacggtcgcggacacggagtgagcgtgtgcgcgcgagtgtttgtggttgtcccccctccccccgcccggtactttttccggaggcggcccaagcggcagttggctgcagaggaccccacgtttaggattttatagggaagaggaggaatttttcgtagaaatccccgctctgcgtgctcgtggtggaggctgctggcaatggcctacgtcgtcataccgggcttccttgccctgtccggggtaaacaatccttctgtgtatttacccccttttttctttaaagattggagatcgggttaagttcttagagagtctgatgcgagtggctggaaggatagacaagagaattctattctataaatatgcattgggaatttaaaatgctaaacgccttatttgcaattctgttggatattctagagactggtatatttttatctgacatggataattttgaggggacgttatattttggggaagtttacaaagtgattctttctgcctttctaacttgggcgaaatatatcgactcataccaccctttcaaaaaagatagctttctctactaggtgtttgg

SEQ ID NO: 19572 - DNA, 1650 bp, Artificial sequence
  DNA replication origin
caggaggatggccccggggggcggtggggggtcccacctcctcttcttgtctccacaccaacatccactccaatccacacataccctgtaggctcctgtggttaaactcacgtccctgaggcccagactccctgagcttaaattgcagttccaccatgttcgacctttgtgggcttggccaaggccctggccctctcgaagccacagtgttctcttgtgtacgacggggaataactgcagcgaggaagtgggaagaggactgagtgagttcagcagggagtgaacacctggccgtatgcacgctaaggccgtagccatccgtcaccaggtagggacaacaggttcacctcctgggggcaggccttgacctgctcaggactctgaggtgtgtctgcactaacgggcctcaggaaggggtcatctttctttctctctccaggtcaccgcaagcagtggggtaacgtgcacaggaaggggtaacgtgcacagaaaggttacgtcctgggcagtgggaagcagtggggtaacgtgcacaggaaggggtaacgtgcacaggaaggggtaacgtgcacaggaaggtgacgtcccgggcagtgggaagcagtggggtgacgtgcacaggaaggggtaacgtgcacaggaaggtgacgtcgcgggcagtgggaagcagtggggtgacgtgcacaggaaggggtaacgtgcacaggaaggtgacgtcgcgggcagtgggaagcagtggggtaacgtgcacaggaaggggtaacgtgcacaggaaggtgacgtcccgggcagtgggaagcagtggggtgacgtgcacaggaaggggtaacgtgcacaggaaggtgacgtcgcgggcagtgggaagcagtggggtgacgtgcacaggaaggggtaacgtgcacaggaaggtgacgtcgcgggcagtgggaagcagtggggtgacgtgcacaggaaggggtaacgtgcacaggaaggtgacgtcccgggcagtgggaagcagtggggtaacgtgcacaggaaggggtaacgtgcacaggaaagtgacgtcgcgggcagtgggaaacagtggggtaacgtgcacaggaaggggtaacgtgcacaggaaggggtaacgtgcacaggaaggtgtcatcgcgggcagtgggaagcagtggggtaacgtgcacaggaaggtgacgtcgcgggcagtgggaagcagtggggtaacgtgcacaggaaggggtaacgtgcacaggaaggggtaacgtgcacaggaaggtgtcatcgcgggcagtgggaagcagtggggtaacgtgcacaggaaggtgacgtcgcgggcagtgggaagcagtggggagtcaggggaggcatgggtgtctcctcagtgcccgctacctgcaggcacagggtagtggatgctgggaggtgctgcccagagacccttaacagcaagccagggaaattgccagctgaggctcccagctcactcctgtctgaaaatttcccaggactccccagctgtagctgcacccaatgactgggccataagtggagaggcagaaagacctcagtttggctgaaggatcatcagagccccagaccttcacaggggctcatctgagaccattgtagcaattttatcactgttcaggttcctctacagtccaaccc

SEQ ID NO: 19573 - DNA, 1394 bp, Artificial sequence
  DNA replication origin
agcatcacatttagcaagaaaaaaaagaacagagtataaaatcgtatatgcaccattcattcatttattcaacaaatatttcttgagcacctaccacataccaggcattctcacaggcccaggagatggagttgtgcccatggcagatgccctccaagctcggatgggatgcagccatcagtgggagagtgggaattggggtagaccggctataagcaagcaaatgagtcagcagaagaaatgactggtggtgcaaaagctctgcagaggcgatggtggagagcagcccctgccatggagacagcttccgtggagtgacctttacgccaaggtcggatttgccagatgggaacacctgtgggaatgccagtgggaggagcactccaggcagagggaggagcactccaggcagagggaggagctggagcagatgtcctggggtggggacaaaggggactcactccaggaggagacagggggcggtgtggctcctgtccaggggtcagcgggacaggattgaggggggcgggaaggagagcagggaccagattctgaggtctgatagaaggggaggtacagagggggctgagacttagatgaaaatgaaggaggatgcagcagtgagctgggtgctgggcagccaggagatgagggaggtacgaggacaggagtactggccttctcaacatggggacgagggactggtatctcctgacggcaaatcaggagcctggctggagcaggctaggaaacagaggcagtggctggagtcagttccatcaaagagtcctatgggtgacgggagcggagaaaaggggtgatacctaaagagggccgtgggctctagggaggccttcgtcccccaagtgaagatctagggtggcctttttctgctgttgggagtgaagggggagacgtgggtgattcaagaggcagggggaggaacaatttcctgagaaagcaagagaggacagaatccagagagcagtggggtgatgatgctcccctgggagaaaggtgctccctccgcaggccacacaaggacacagagggcgtggggtgggagccgctgggctggggacattggtcatgggagacgagagtgtttctcagatcacttctgttctcccactgaggtatgggtacaggtgagacgggagagctcacgcgggcctgcatgtgggtgtggggacaggggcaggaaggtgatttcagtagggaggagaggtcatgggcagggaagtgctgggtacccactaagactcatggctgggagtttaaagttgccctcccccagcatgaatgtgaatttctagataactagaatgtgataactacgtaaccaggacacaggatgaccgcatactgtatacctaccgtgtgtatacataaaa

SEQ ID NO: 19574 - DNA, 1079 bp, Artificial sequence
  DNA replication origin
acacagcacatgtttcagagagcacagggttgggggtaaggtcacagatcaacaggataagaatttttcttagcatagaacaaaatgaaaagtctcccatgtctacctctttctacacagacccggcaaccatccgatttctcaatcttttccccacctttcccccctttctattccacaaaaccgccattgtcatcttggctcgttctcaatgagctgttgggtacacctcccagacggggtggtctgggcagaggggctcctcacttcccagtaggggcggctggccgggcgggcgctgtcccccccacctccttcccggacggggcggctggcctggcgggggctgacccccacctccctcctggaaggggtggctgccgggcggagacgctcctcacttctcagacggggcagatgctgggcggagggtctcctcacttctcagacggggcggccgggcagagacgctcctcacctcccagacggggtcgcggccgggcagaggcgctcctcacatcccagacggggcggcggggcagaggcgctccccacatctcagacgatgggcggccgggcagagacgctcctcacttcctagacgggatggcggccgggcagagacgctcctcactttccagactgggcagccaggcagaggggctcctcatgtcccagacgatgggtggccaggcagagacgctcctcacttcccaggcgggttggcggccaggcagaggctgcaatctcggcactttgggaggccaaggcaggcggctgggaggtggaggttgtagcgagccgagatcacgccactgcactccagcctgggcaccattgagcactgagtgaaccagactccgtctgcaatcccggcacctcgggaggccgaggctggcggatcactcgcagttaggagctggagaccatcccggccaacacagcaaaaccccgtctccaccaaaaaaatacaaaatccagtcaggtgtggcggcgcgtgcctgcaatcgcaggcactgggcaggctgaggcaggagaatcaggcagggaggttgcagtgagccgagatggcagcagta

SEQ ID NO: 19575 - DNA, 956 bp, Artificial sequence
  DNA replication origin
gccgccaacccgcctgggaagtgaggagcgtctctgcctggccacccatcgtctgggacatgaggagcccctctgcctggctgcccagtctggaaagtgaggagcgtctctgcccggccgccatcccgtctaggaagtgaggagcgtctctgcccggccgcccatcgtctgagatgtggggagcgcctctgccccgccgccccgtctgggatgtgaggagcgcctctgcccggccgcgaccccgtctgggaggtgaggagcgtctctgcccggccgccccgtctgagaagtgaggagaccctccgcccagcatctgccccgtctgagaagtgaggagcgtctccgcccggcagccaccccttccaggagggaggtgggggtcagcccccgccaggccagccgccccgtccgggaaggaggtgggggggacagcgcccgcccggccagccgcccctactgggaagtgaggagcccctctgcccagaccaccccgtctgggaggtgtacccaacagctcattgagaacgagccaagatgacaatggcggttttgtggaatagaaaggggggaaaggtggggaaaagattgagaaatcggatggttgccgggtctgtgtagaaagaggtagacatgggagacttttcattttgttctatgctaagaaaaattcttatcctgttgatctgtgaccttacccccaaccctgtgctctctgaaacatgtgctgtgtccactcagggttaaatggattaagggcagtgcaagatgtgctttgttaaacagatgcttgaaggcagcatgctccttaagagtcatcaccactccctaatctcaagtacccagggacacaaacactgcggaaggccgcagggtcctctgcctaggaaaaccagagacctttgttcacttgtttatctgctgaccttccctccactattgtcctatgaccctgccaa

SEQ ID NO: 19576 - DNA, 1144 bp, Artificial sequence
  DNA replication origin
ggactagacacgtagggagaagatgtagcgatagcttgatggagaaatcgagtcagcaaatttttttttgtttgtttgtttacaacaacataaacttattatctgataattctgggggtcagaagtccacagtgggtctcactggacaaaaatcaaggtgtagggctggttttccttctgggggtccagggggaatccatttcttttccctctccagcttcagcgttgagctgagaccttctctcactgccatctctctgcttctgtcttctgaattcttctctcttctctctctctctctttcttttttaggattttttttcttttttaaacataggacttagtggtgcttatagaccgagggaaagaaggaatggaaatgcccaggctgaggctgcctgaggatggggaaggagagaaggggagcaggggcagcacggggaggggcctgcacctggaagggagacccacttctggcagtgggggatgggggctgggggagggggttgtcacatggcttaagtggatgggaagagatgaaagaaacttgagagtggggaaggaggcagttggggaatttctctggagtgagtgagggaggtggagagaggtcttcagctgagaatgaggcacctgagatgaaacccataggaagatgagcagcctgtggcatgatcatttcaagggaacgccatcaccaaggggaagttggagggggcccggcagcaggggggtggtctggacttgcagagggtttatgtcccactgtgggatttttccaacagaactcagcagctcaggagtgggggcaggagaaaatgaagaatgcgaagtggaaatcgttcttatggggaaaagcaaggagactgtgccatgagatggatgggggcaaggttcttgaggccgctgcctggcaaatctcctggggagctcaccacaggggtcccactggaccggctgagtcaggtacctgggggtggggccagcctcagcatttttgaagagctccctaagtgattctagggtcagccagggctgacaactgctggtaggactggaggaaatgtatatctaaaagacgtgaaatcaggatctcaaagagatgtgtgcactcctctgttcactgcagcactgttcacaatcg

SEQ ID NO: 19577 - DNA, 2032 bp, Artificial sequence
  DNA replication origin
caggctaagctcagttttttgggattgcagtaaactcccagggcttccagtgtgtgcgtctctggtgggatgccacagcacgggttgggggcccgcttgtgttgagaaaaccaccccgcattcactgtcctcctgggaaatgcatgtggtgagagaggacacaggagggactggctgtcgactgggcaaaaccactttttaactgagagaatggcatcagggagctagagggtggctacccttgggtgacatgagttgtacaacgttgcgctcttaggcccagtttcccagtgaggagtgagcggggtcctacagtgctctggaatacagtgtcctccgctagctcagggatgccctccgcagcagtcttaccatacagcttttgaattgctttcctgtctgaccagtccaactcaaaggcaggctcctggggaatgtaatttggttgcattatggatcccgtcctgtaggtgtgaggcaagcccaggacatggccaatttcatggacggccacctagaaggggacacacaccatgggtgctgggtgaagcctgggcgatggatccctgcataacagacgcaggcctgtgcttcgagaggagcgttgcttgtgaagaggggagcaccggtggaactggggagccattccacggattcacctcctcagaggttgcggacactacatgagaaaagcttggactttttggacgtcagcccatgagcactgctggtgtcttatcaacacagtggctcaggaccactgaccttgagaaggctgatgcccgtgtcactggtgggaggtgtgaagtgctcgtcgtcgtcaaagtgaatgtcacctaggcgccaggcgtgtgcaaactcctgcccgctcccatcgaaggcccgcggacagcccaggtgccggcctggcgagggggaggaggagttggtcccggtgaaggatgagtgccccccatacagactcctcacctagggggtccccagcctccaggagccggcagcagaggtagacagagtggcagctcctggattaagtcctcaatgtgcggagggtgggagacggtttgtttgtaaactgtgtttacagtccacagactgtcagagaccagcaggcaccaagtgcctgggagcagaggggagcggggctgggtgagagcccggctgggggcctgggaagatggcaaaaaggcctcacccggacaagatcggggccggatcctcgcctctgcggaggtcgtgaaatattgaaagctgggtcccttaaaatttgtctttttcagccaaccgtgtccctatacttctcaccctgggacattaacccagtgagaccagaagacagccctgagcacccccgggtcacagatggggctgcaaagcggcttgtctgcttgctgcttgtctctgaccacttccatgccctcacccactctccattctgggtgcctttttgtgggtatcccagatcccacccatccttgagtctaggccaagaccggattcctggggacgccagcacccaatttcaggtggcagtgatcctcttctgcttggtctgccccttaaaaacacttctgttgctagacgtccaaggtattttgtcccgcatttgtccaattgtaagacggaggtggtggcaacttgtgcctgaccctgccctgtcctgagaccccagctgctgctccctagggaagctggaggcacaggcagggggcccgagtgggactttgaggagcagcccgggcagcagcctgtgcccagggccggccctagtgtcccagtaggccacaccaggctatctgcagggtgaccatgattccgacaagacgacgctgaccggtggcttctgcctgccccgctgacaggtgcccccgggacaggccgggagggcttagccccccattctgcaggtggccgaggtgggggtaggtgcgccggggtccccgaggggctgggtcgggcaggcagggagcccggggtgctcttacctctcccaaagcccagcttgatgtcgaccgcggccccgggggcggcc

SEQ ID NO: 19578 - DNA, 1124 bp, Artificial sequence
  DNA replication origin
aggtcctcgcggaagtccagcggcgtcacctcgctccacatcctgaaggccagcgccacaatgcgccgctggtcggccacggacagttggctgctcagggcctcgcccagcagccgccagctcagcgtcctcttggagaaggcctgggcagctccgccgtcggggtagccccggggctgccaaccccgccgggacaaggacagcggcgcccgcggggagcgcctggagcgggctctggggggcgggcccgggggcgaaggcggggcggaggggggcggtgggcgcatgtccgggaccccgcagcgcggccggttcatggccgctagggtggccgcgtccagctccccgctggccggcagcgcgttcgcccgctggaacctgcgcaccgcctcggccagggcggcgcccttgggggtctccggcggcccctcgggactgggcccccaggccgcccacacccctgaccagccgtatctggacaggaaccgctgtgggagagaaaggcaccctaatctgggccgcctcgctcggggccctcccgggctgccctgccccaaagtctagagagacagagacatggggatagagacagagacagagagaagcagagagacagacagggagaaacagatggagatagcaatagaaacaggaagacagagagagatagagatacagagagagcggcagtgagagacagagacaggagagaggtagacaggagagaaggagcgagtcctgggcgccttcctgagtgcgggccctggatgggcaccaggctgagtcagaggcgccctagggccggaggagcaggagacctgggcagcggggtgggcgagtgccgggaggaggtaagaggtcgcgggggaggaagacgctccccccggccttgcggggcaggtcgcgcagggcaggtcgtgcggggcaggtggggggtgccaaggaagtccgggcgtggccacaccgcagagaaagccatgggaggcacgtcctgagagctgggaattggaactgaggggcttggcagtggttgggtctgaggacctggggggcttcctcatggccgcacagcgggagggaggtcagcggcctccacgcggctgcgggcctggccacagggcggc

SEQ ID NO: 19579 - DNA, 1006 bp, Artificial sequence
  DNA replication origin
atagagatacagagagagcggcagtgagagacagagacaggagagaggtagacaggagagaaggagcgagtcctgggcgccttcctgagtgcgggccctggatgggcaccaggctgagtcagaggcgccctagggccggaggagcaggagacctgggcagcggggtgggcgagtgccgggaggaggtaagaggtcgcgggggaggaagacgctccccccggccttgcggggcaggtcgcgcagggcaggtcgtgcggggcaggtggggggtgccaaggaagtccgggcgtggccacaccgcagagaaagccatgggaggcacgtcctgagagctgggaattggaactgaggggcttggcagtggttgggtctgaggacctggggggcttcctcatggccgcacagcgggagggaggtcagcggcctccacgcggctgcgggcctggccacagggcggctctcctgctccctgccctggcctctggggcactgtgggagctggggattggacttgaccctgagcatcagctcctggcctatggtgaccaaaggaccacgtgccagagcaggtgaaggggcctcatgggtccactccctgcccgccaccacgactctctggaggaggggatcgcctgcattggacctcctgggtgcttcaccacagactccggtgaagtccacggatgccaccccagacagctgttaggatccttactattgcggtgttggggaaccttgcagggctgtccccttctctacatccagagattggcatggtgagcagccacagaatgccttcggacagtgccttggccactacagtatcacatgcttgcctttggaaaggcacttggcatttgagtctgttgtctgcgcactgacatttctttctcactagggctgacctgtgggattgtcgaatcaggttaagcatcgattcatggttgttccaataggagccacaggagccactcctccctctcagcccagcctgcctggcccttct

SEQ ID NO: 19580 - DNA, 1043 bp, Artificial sequence
  DNA replication origin
gtgcttcaccacagactccggtgaagtccacggatgccaccccagacagctgttaggatccttactattgcggtgttggggaaccttgcagggctgtccccttctctacatccagagattggcatggtgagcagccacagaatgccttcggacagtgccttggccactacagtatcacatgcttgcctttggaaaggcacttggcatttgagtctgttgtctgcgcactgacatttctttctcactagggctgacctgtgggattgtcgaatcaggttaagcatcgattcatggttgttccaataggagccacaggagccactcctccctctcagcccagcctgcctggcccttctctgcctctgcacagccggcatcctggcctgtgcctgtgcgcgcgtgcgcatgtgcctgtgtgcacgtgcacgggcctgggggtattgctgttcttccagcttcctcctacctgagcagcgtggaggtcggcaatgggcttggcctggcgcagtggggacggctccaggtccgagcggtcccggctgtggaagagactctcgggctgggtgggccagggagcagccagccagcagagcagcagtgtcggacggaagatggaggcggcgagcattggcctggtctgaacccttgccctccctgcctggcttcttccccgtccccgtcacctctccttaaggagcaggacctagggtggcttttataagctacgcaggagggagcacccaggtttccaagcatttctcacccagccctgaagtgtgcccgctaggaggccacgtggcaggccctgggcgtgctgcctttgaagaccccaggctcacctttcttgttggtgtgagaactccttctctcagcctccagagtttgccatgtcctccgataattacatcctccagttgccagtgcctgtgggttccatttctatggagatatactgcgggcaagtttgccgctaaatgagctgtggaattaacagaggcacgagactgcgcccctaacaacatgcctctcagagctgagcctga

SEQ ID NO: 19581 - DNA, 1480 bp, Artificial sequence
  DNA replication origin
ttaactgcggtgccggctttaaaaaaacttttaggtcaagaaatgcgctccagaagctcggcgagggtaggctgggcaggcgccttccgtcaccggcgcagcggtagcggcagcggacatccccgcctgggcaggcccaggtccgcggaagcctcggggccctggccccactgtgtcacacaccgcccggggccgggcccctgcacgcccgcgggcttcggcgtccgtaccggtacagcgggcggcgacacctacctcgcgggaccgtgcccagcacccggcctggcacacagcgggcacccggtcggggggcggtgtcgcgcagtcccagcgaaaaggctgcaggagcaatgacaacaggggcggaagccccctccccacgcagcccgaggggccgcggcggccacccgcgccgggccccaggaccccgcacctcagactggggtcgcgtgggtggctgcgcgcagctaggcgctcgcgcatgcgcaccgccatccaggccacggaatgaggccagaggttagatgggttgaaccactacgggaaggggaggggaagctttgggaggagtgatggagggtggaaagcggaagaaaaaagcaagatgggaccgcaagctggacgtgactgtaaggggtcatggctgcggaatccagcaggggcattggggttgacgtgcactcagcgccgagcttcttcgtagttcctcacccccttggctactatgggctggtccggaaggtcaggcaaggggaagctgcgcaggcgcagtgtgagcggcaacatggcgtccaggtctaagcggcgtgccgtggaaagtggggttccgcagccgccggatcccccagtccagcgcgacgaggaagaggaaaaagaagtcgaaaatgaggatgaagacgatgatgacagtgacaaggaaaaggatgaagaggacgaggtcattgacgaggtgagaaggacacgctcccctagttggtttatacctgagaaaaactttttggcaagcccaggctgtgtaaaaatagtgtagggtcttccctgaccctgagggtctgtgaggagaaactggagataagttctttctcaggtttctcctcggtctttaacacactgcagccatagtagttattttttaaaggtctagtccggtccagttaatctcccaacccgcgtcctccccgaaaaagcccgccacaacaggtgtgttcttctcgtcctctttagttctcaggctgaagcctcagatcctgaatcggccaccccgggctcgcagagggggccctctcccctcggggcagcagctgtcctcctcttcactctgcgggcggcactcacttgggccctcagtttcttgaaggctcttgccgcgttctaccgtagaagccttttcaaatgctcttctttatcctgcagttttcccttccttcttcagatctcagctaggctgtattttctggctcctggggcagctgaccaagtc

SEQ ID NO: 19582 - DNA, 1321 bp, Artificial sequence
  DNA replication origin
cgcgcgtcgccggggacactgagcgagggtagcggccaggtcaccggctgaggacactgctcctgaagcccggtcaggcggtcgcgccctccctggcggcccccgcggccccgcaggacctgtgccccgacgtcgccgacccgcggtccccgctgtcgccgacccgcggcgtccgtcgggcgagtgggcctgcccgcgggtaaggcgccggccctgggccgccctcccgggaatcgggagccgccgctgcaggtaacagcggggccccggcggcggaaggggtcgggggtcggcgcaggggcgggcgcgccccgagccgggtgggcggccccggcgcacctgttgtagccgcctgggggtcccctgcccgcagttggccgtggacgttccccgccccgactccgaaacgccgagggcggcctccgcgcctcctgctccgggagccgcgcctcagcgggaggacggagccctgcgggcagccctcgcaccaggggctccctccgagcccgggcatgggccgggcctggggcggtccctcgagcccccctgacgggaagcgtggagcaatgcgagccgccgccgtcgtcgctgtcgtccccagtgagcctggcgcgtctcctgaatcgcgagagccaggagcacggttttgcccggctttgccccgtcatccccgtgtcccatttcaggcagggggcccgggttggatctttctcgctggcttcgttttttgtgtgttgatttgtttcagtccttcgcgtttccggttgagttacggaatctgcccacacgttttgtggccaaactttgtagggctgtgaaacaatgtaacattatcccacacaatagtctttcatactggttttaaaacacagtgattcagggtttgctttaaggaagctttgaggatcacaagagattattatctggtaggttgtaaaaattcaaacaaccaggagagtatcataggttccggaacaccagaaggaggaaagaaaaatggagacgagagaaaaaggataagcaagaaagtgcaggggcattaagggtgtggggggctgcaggattgatttggtattcaggtctggagattatggcccctctattaattccaaccgctgctccagacagtacttgagggaaatggaaggaagagccgttttgggggtcatggaagtgattactaatcttgccagtagaaagatttccactccatggatgacaaggacactaaggagaattactttcctcttagggaatcattgagaggttaattgaacttgagaagcatatattctgtgatggaaactgacatttattatat

SEQ ID NO: 19583 - DNA, 964 bp, Artificial sequence
  DNA replication origin
gcgcccgcccctgcgccgacccccgaccccttccgccgccggggccccgctgttacctgcagcggcggctcccgattcccgggagggcggcccagggccggcgccttacccgcgggcaggcccactcgcccgacggacgccgcgggtcggcgacagcggggaccgcgggtcggcgacgtcggggcacaggtcctgcggggccgcgggggccgccagggagggcgcgaccgcctgaccgggcttcaggagcagtgtcctcagccggtgacctggccgctaccctcgctcagtgtccccggcgacgcgcgggtcctcacgcgctccctcacttcctgcggcttttggtccctcccgctcgccgtccctttagttctgcccacttcgcctccgggttgtcagggcaaccgtagcgacgccggccctggctgagaggcgttaggagtccgggggttcgcccgcggaggccggggagcagccgaccatggagccccagagtaagggaggcccgggctggagctgggaccggggcgggcgaccgggctggggctccccgggaacgagtgtgggcgccccgcgcgcgactccgcaggtttcaacgctcggacacggaaatacggtttgcgtctcctcgcgcttttctctcctggagaggggagaagggggctacatcctgccaagtctgtatggttgggccgccggcgccctagagtccgcgctgggggctgggagcgactggagagccccgaggtatgggtggggaagggcgcagcgaccccagcgtgcgtcttcctgaaacttcgcccggacggttccatttactcctcctcctactcatgattttagtttggtagtttggttcattaattgtaagtagcccatttttcttctaaaatgtcagcaattaaacacgtccgaggctgggtcttgtatttattagagaccccgtcttactccccgccccccg

SEQ ID NO: 19584 - DNA, 1215 bp, Artificial sequence
  DNA replication origin
gaggaaatgcatgacagcacatggctgagccagatggtgaggagatggggacaccaggagaggcttcttggaggaggaagcagtgtttgacttgggccttgagggaagagtggatcttccaaagtcaaaagggagggcagggagtagtgtgtcccaggcagaggggcagcaccacgcatgtggcggcatgctctggaaacagccaaaaaaacagcatggcgggaatagggtggtttcctcaggaaggggatggtgggactgaaaaagaagattggatccaaattatgcaagaggtttaccagaaaaaaaattgaacgggggtcagccaggcttgggtttaagatctagttttgcccattatcactgagaggccatgaggaagtcacttttgtggtctctgctttttacctgtaaaccaaggagcatgagacctgctcgtggcttgtgtgagcttcccatgaggacaaggaaaggtgaggtgccaattcaggagaggccccggtctgcagctgggatgaggaagggaagtgagctgggtcagtacctggtgatatggggatggggcaaagggctttgagagggtggcgatttcaaggtgcaaactgcatgacagcaatgctgggggttgggaaacgaactccaggcccctgaggatgccatgccttagttggctgctcaggtgacaataacatctgccccattctcatgaaaacaggaatcataacaatgaagaaaaataaagtatgacctactgcaactatcatcagcaccccacagagtgggtacgcatgtgagtgtgtggtgtacatgtgggaatgtgtgcaagtgggcgcctgtgcatgtcagtgtgtggtgcgcgtgtgggaatgtgtgcaagtgggggcctgtgcatgtgagtgtgtggtgtgcatgtgggaatgtgtgcaagtgggcgcctgtgcgagtgtgtggtgtgtgtgtgggaatgtgtgcaagtgggcgcctgtgcgagtgtgtggtgcgtgtgtgggaatgtgtgcaagtgggcgcctgcccatgtgagtgtgtggtgcgcgtgtcggaatgtgtgcaagtggacgcctgcgcatgtgagtgtgtggtgcgtgtgggaatgtgtgcaagtgggcgcctgtgcgagtgtgtggtgcgcgtgtgggaatgtgtgcaagtgggcacctgcccatgggagtgtgtggtgcgcgtgtgggaatgtgt

SEQ ID NO: 19585 - DNA, 1603 bp, Artificial sequence
  DNA replication origin
tgttttacatggattgcaatatgttgaggatatgcctggcttaaatcagttagaccccgatggcaggtctccgctgcagtctacttaacagcgagtgtttgagagagtgtgcggaaaacataaaacacagacgggccctcacactcactggcaaaggcacgtgggcctcccaagtgctgcccctcactctcctcagcagtgcacatgtcgtgccagagaaagttgccctccttggcagcgttgagctctgaaacccctgtcttctaagctcacctcctctgagctgccagaggggctgcctgggcaggctcattcacagggcaccctggccctgtcacgcagtcatgagcaaaggagaggaagaggggaaggagagcaggcaaggcagtgggaaggtgacagggccctgaagagaagagtgtgaagaaggggtagtccttagtcataggtagagagctccaggatggtggaggagtctggtgaccttgacaatggagatgcagcaggtgagcccaggtcaaggtgacaggcgaggtgaacgaatgttccacagcacagttccaaagggaagcagagaggcgggatgtgaaaaccagagacggggacttgaggggaataactggagggatggggctgagaggggacatgggtgaagctgcagaggaacaggcagaaggatgcagagcacagagggatacacacaacacaggacatatctgcagagcacggggtaatgcacacagcacgggagaaagcacagagcacagggagagaatgcacagagcaccgggagaggaggcacagagcacagggggaggcacagagcatggaggggaggatgcacagagcatgagggatgcacagagcatgggaagatgcacagagcatggggagaggatgcacagagcacggagagaggatgcacagagcacggggaggatgcacagagcacggggagagaatgcacagagcatggggagaggatgcacagagcacggagagaggatgcacagagcacggggaggatgcacagagcacggggaggatgcacagagcatggggcagggatgcacagagccgggggtggggatgcagagagcagaggcggggaggatgcagagagcatggggcggggatgcacagagcatgggttgggggatgcacagagcacggggagaggatgcacagagcacagggagaggatgcacagagcatggtggggaggattcggagagcatgggggtggggatgcacagagcacgggtgggaggatgagcagagcatggagtggggatgcacacagcacggtggggaggatgcgcagagcacggggagtagatgcacagagcacggtggggagggtgcgcagagcatggggagaggatgcacagagcatggtggggaggatgcacagagcatggaggggggatgcacagagcatggaagatgcagctaaggatgcacacagcctattctctactgagccagaacccatagtggcctcaatagtcttaaaaaagagcacacggctgggcacagtggctcacgcctgtaatcccagcactttgggaggccaaggcgggcagatcacgaggtcaggaga

SEQ ID NO: 19586 - DNA, 795 bp, Artificial sequence
  DNA replication origin
tgcccaagggagccgggaaagatggggaagaatgagctgcgctggtggggaaaaggtgaggagaggaatgggaaatggggaggagagcattccagcgagaggggactgcatcctcaaaggcatgggggtgcagaaacagcatgctagcgggcaacgcgcagaggggaggggaaatgacacggatgccaggtggtcagggcgcagggcctgaggcagggagacccgctgctgctgagacaggcaggctggggacagaacctacatgctgcccaatgctgctgactttatcctgtgccatgcagagccgccaaacacggaagggacctgagcagacacaagcttcagagccacaggtggttctgacagccacacagatgagacttggaggggaaagagaaaaatacaggctccaggaaggttagcaaggaggctggtgtgagcgtccatacagagcaccaggccaggacacaactggatgggaaattcaggggggcccagaatcaggaactgcgtaacagactgaggactcttgcgtgatgtcaacagagatgggtcactcataaaggagagaagagacatgagttcagtcttagccatggatgtagtttagatacttgtccccactcaaatctcacattgaattgtaatccccaaagctggaggtggggtctggtaggaggtgtttggattgtgggggcggatccttgatggcttggtgctgtcttcgtaagaatgagtttttgcaagatctggtcaattaaaagcatgtggcacctcctcctcccaccccttcct

SEQ ID NO: 19587 - DNA, 1519 bp, Artificial sequence
  DNA replication origin
aattcctccttttctcttgccaatgcaaagaaatgtttcattatatgtttggcgttttatacggcctcaatggtatgatttggggcactgattgattgaagacttgatactgagaatctaagggtaaacaagcagtgaatcctggaatatatcacaataggtaacccattcaaagtgcttaggcctccctggttttctattttgggtcatatctgtcttaaggaaacactctctctaccaaagctgaactcataaaatagtaaaagtcctcccccgcccacacacacaagaaataatttcccattattagctggatttaataaacattttcttccaaaaaaaaaatttgtccctgctcagtagacttctctttatgtgtacaaagcacgtgccaagttaaagaccatgtcaggcacactttgagacactttccgttttttaaaaagttctttcttaataaacattcaaaaggaccaatttgtttaaaagtctttcaaagcacaattcactacaggtcgtagagttctttaaaccctcagcaggattctttcttgactttctcattgctttgtgcaatctttgtatttaatcatttatccccgaattggtcttcgcagtgtggcttttaacaagaactgggttttagccacattacagtagacgcggtgggggcggagggcagcagtggcaatcgcaaaataaaacgtatcataaagtggtaacggttcgtgatttaggccagttgttgaaaaataaatgcctgttatatagaatcacagaacttgagagcttgcggccaagggaagtcgttcatcggtggaccgacagcgccccgggcggcagaaagaaggcggcggcggcggagacccggggaagttgccggatttttaaaaaggcacctgctgggtgagtcctcactgtgcaaacgggagccacaggtgcccgattttaaggggctacaactcgggaaaacctaagtctgtaaaactaagtacgttaaactaagtaagttctcgctgtgcaccaagttgatgggggcgattatttacggcggagaaactgagtggaggaaggagggagaattccgctaaagtttgcctgcgactgacagctagggagtgacctggaagccaggaagaggggcagagaggaaactaaagaagtaggtaagagagtcagtttatgaaaatagagcctgctgtggagagcagcaggcacacctgcggaggagggggctgcctcacctgcggggccgctgcgcgcccccctaagtgtgttagcgggggaggcggggctggaaaggaaacctggtgaagggctggcccggagcctggggtggggatattcactgcgggatagggccagcaagaggacccgacacgcatcgtcccgagtgacacgtgtaaatgtcaagatacagagacatctgcaaatgtcacccaagagggtgaggacgggggagcggtcccgaggctgtgccctccggggcaggtactggctcctgtggggctgcgggcca

SEQ ID NO: 19588 - DNA, 1278 bp, Artificial sequence
  DNA replication origin
aacagcacaggaaagacctgcccccatgattcaattacctcccaccaggtccctcccacaacacatgggaattcaagatgagatttgggtggggacacagccaaaccatatcagtaaacaagcctaatcattattaactaggttaagtaactagctcacactgtccaataatgatgatttatcagtttgatcagaaagaaaagtctttgaaggcaagaggctttctcgtttagtttcccaagttctaacatagggttgctcatgtagattgactgaatgaatgaacaaaagaagtacactgcaacgctggttggtagtacggttagatatgacacagggcttgaaccaggcctggtttccagatctggtactgagatatggcagcattgggaagggggctggagagcctgtgcttcccactaaggttttttaaaaagaaagtcctgcaccttgttaggaggatcgacctgggttttgggaacactgcaaaacctgccgtgggagggaactcctgagaaaactcctctgcagtgggaagagatggtatggaaggcagcttcctcaaatgctggataaccgcctcctaggagtgggtgctccgtcaggaatcggtgcgaggtcgcaggaccaggatggaatttctgcaggtggtcctaggtctgagcagcacagtagaatcacctgaggctttgaaaactattgagctccacgcattgtgggaaactgagttaactggtgtctggggctggcaatgtctttaactcttactattctaataagtccccaaggttgggaatcatggtaacccgcagggtgggcatcagccatcctccatagctccagccatttctgtctgtgcgggccccctcgctgctgcttttcatggtctccctgagggccgagcgaggctgaagaggtggggtcagcccggaacaaggatgagaaggcaaggcgcaccattctttcattggtgtttctccaaacaccctgggctcccctggcctcacagcctggagagtctcattctgaaagcgtaggagggcgcccgggaatctttttaacaagccaacccaggtgcttcttacaatcaggaaagtttggggaacgtcactgtacacccttttctgggtccaggtcatggaatggaaacgtgagccaatctatcaacgtaaaacctaacactgttgatcaaaagtaacgcccaggtgtcttgtgcctgcgagtccaagcttgtttctcgggcgagagatgcccctttgggcgcttagggccgggcgg

SEQ ID NO: 19589 - DNA, 1311 bp, Artificial sequence
  DNA replication origin
cctttgaagaggaagagacataattagatttgctcaagaggaaactactgcctcgtgcgcaatgtggaggacagatgggagaggagcacggctgggggctgaggcccagccggcaaggagagcgtggagtcactgtgaaggaggggctgcggctgcagagacgctcaggatccagggatgggtctttgagcagtgaagaggtgggagtgttagggttggcccttgggtttctggttctggtgctggggagaatggtggagaaggaggcagagaaattgtggcttcctcccctgtgcacagggtgaactagaaaacatgctcacaagaagacatggaaacagtgtggcagaaggcaagattaactccacaggacgggggttggggctagtgttaggcctgaaggggcactgggagacggggggtgggtggggcagagtagtcgctcttttccagaaggaaccagagcaaatgctcagaaaaatgaaagagcatgactggaaaccttctaagtggtgtgctgttggtagagactccaaagcgacagctgcaagtgggacgtctaccatgaacagccatgaaaactccagttggcttgggcttgtaggtaataggaactgtgggtggattttgagcagaggttggacagctggcccaggagagggaggacccaggcataaatggtgagttgtagttgttgtagtcgttgtaatcatggagatgcatcccacggacaggtgagcctccagaaggccacctctccactccccagagaatgagctccttttgggcacctggtgctgtggagagatgcagagtgggtatgatatggtccagccctcgacggagtcataggcttgtggggtgaaagtatgatcttccaaccccacctggtgatggatgctgctgaatgagtgatgtgtgttccctgcagtgacgtagcagaggcagggatgggtcgtgccttgggaaggggagggagacttttggaaggtttggactcagcctggagggtgggagtccactgggcagaggaatcaaaggggctttatggagataggcaagcatgtgggtgaggagtgagggagaggctgccatgcattttcagaactggggtggtttcagggtgctgtgttgaggggaaggtgcagtgaggcaagtagtggggctcatatgggaggggtgagctaaggacagagtgaaggacattgtgttgcttgctgagtccagtaagtgcccagtgaatactcattaatccccaatccatcagaaactgtcttgcctgagatgctgttggatccattcatttcctga

SEQ ID NO: 19590 - DNA, 785 bp, Artificial sequence
  DNA replication origin
gttggcacaggaaacggtcagcagcatagccgtgtctgtgtggtgggccatggggaagccgaggacggcccctgacactcagaggagggactgtgcagaggcatctttgccaaggaagtgatttgagcaggaacttgaaagtatatttgacgttttcaaatcagacctgagggcaaagagcattgcaggctaagggaaaggcacacatgacgcaagtggctgggacaggaggaacatggttgatctggggacctgcagagggtggggccagggcgcaagggttgtgggggtggcagtggctggcgtgagtctgcaggggtcacgtgcatcaggttggaaggcctttctaaacccacttaggaagtctggattgaaggcagagccaagcctttgaagaggaagagacataattagatttgctcaagaggaaactactgcctcgtgcgcaatgtggaggacagatgggagaggagcacggctgggggctgaggcccagccggcaaggagagcgtggagtcactgtgaaggaggggctgcggctgcagagacgctcaggatccagggatgggtctttgagcagtgaagaggtgggagtgttagggttggcccttgggtttctggttctggtgctggggagaatggtggagaaggaggcagagaaattgtggcttcctcccctgtgcacagggtgaactagaaaacatgctcacaagaagacatggaaacagtgtggcagaaggcaagattaactccacaggacgggggttggggctagtgttaggcct

SEQ ID NO: 19591 - DNA, 1011 bp, Artificial sequence
  DNA replication origin
gagataagagagagagtaggttggaaagaggacatttaaaataagatggcaggcgtaaattttgaggagaggtcctggggagagccaagacccaccaagaggaataaagtcggtgtatttaagggataaacacagctgatcgccggagagatgtgaacaagggcagagggggggcagatcaaagctgagaggtagacaggcataggggatctagagggttgggttgtattctaaatgtagtggcaagtcttgggttttaggctgagggtaacatatttgatgttttttttaaaaaagcctccgatttctttatcgagagtacactgaagaggaccaggaatcaaggtaggaatctgttaggctagagatttccggagagtaggatggcttggctcacagtggtagccagggacataacacgactcagtaatgagctgcaagtggggagggaggcaaagaggggattccacgaggcctctgagatgcttggtttaagaggctggtggttggtagtggaggtcaccaggatgaaggaaggcacaggctgtgggtaagggagggaaataaaaaattctgtttgaccctgttcagcctgagatcattgttaggccatgtcaatgggcagttggatcaaggagtctggagttccaggaggaggtgggggcaggagagagggacgacagagtacaatcaatggcatttggagcctggagacaggatgagattatctgggagaactgtgtggagaggaaaggaaggaggtcccaagcggagtccacgtgtgccatcaattagagccagaaaaaggggccgggggagccagctcagggagctgaggaggcacactcaaaagaccaggagggagccccggaaagggtggggtcctagaagccaggggagaagtgtttcagcagggaggagtggtccaccgtggggaagggggctgagaaggtaagacaagcacacagcagggaccactgactcggccacatggagctccagtgtggcctt

SEQ ID NO: 19592 - DNA, 1367 bp, Artificial sequence
  DNA replication origin
ctgggcttggggcgagaggcgcggcggcggcggcgctgctcacccacgccgtacttctcctcgcgcttggtgggcacccagcgcgtcatggcgccgccggagccgccgcgggtcgggcaggaaactccgcgtctaggccgccattttccattcctttcgagccgcgacaggatggggaggaaaaagtttgcggcggaggcggcgtcatgtgggacggggcgggcggagcgtcgcgggccggatgggaaaggccgggagcgccggcgggaggcgggacggccgcgggctctgcgcccgccctcggcgcggaccctgggccccgaccccgcggtcgccggggctccccttcctctgtcccagtgcgcccagccccgcgctccgcacccgggcacccccgcggggttctcctgagttcctggagctcccggggctggcgctcacgccgtgagaggggtgcgcccttaggggggcgggacggacggggggtttctacgggaggtaggaaacgggcggcttgcaaggcgcgggcttaggccggagcctggtggtgcgaggtccccagctcggatttctccctggtggagagtcccggagcagaacaaaccagcagaggctctggaaagggtcctcctgagcacgtggctcattcattcattcgacaaacgttacctgagcgcctgcccactcattgcccgagtgtgctgggagcgccgcaccaactgcctggtaggtgggagaagggacacgtcaggtaacaaacagcacaggtaagtgccggccactcaaatggggtggaaagaggtggcacagcgctgccgagggagtgcgttccagacaggtgacctcttgcttgggtgctgaatgagtggagttttccagagagaccaagaggaagcagccgcagaaacctcagcccagctgggcttgcagaagctaatgctagaatagttgtgggactcaggatctgctgaagtcgggggaagagagaagtagggaaaggaaagcccaggccacgcgtggggctcaggaacggcatcctcgcccgaggtgggagttcttctcaggccctggtgtttcccatgacagtaaaaggtgggggcttcagatttctccaagggaaaagttaaagcaacacacacctatttatttttactgtaatttcagaaaagagaggttaaaaccaagacatggacaaagcctccgaatgaaggcagccctttaaatggaataaatttggtttcatggcacattaatggggtgtcttctctccgaagacacagagacaactacagtaggtctgggggccgtcagggattggaggaacgaaggtaagaaaaggaagaaggtaagaaaaagaggtccctacc

SEQ ID NO: 19593 - DNA, 1110 bp, Artificial sequence
  DNA replication origin
cgccgccccgctcgcaatgcccggcgaccccggccgccccgcgcccccggcggcgtcagctccagccccggggatgcgggtcgggaacacgagggggtggggtgggaatgggggcgggcgcgtccctccctagggtgtcccctccgacgcccgctcctctggacctctgccgtggagccccccgggctacccccaactccccggccccggccgctgctatctgcgcggctgggcccgtcagggaagcccaggggtcactgtctcgcggcggcttctgcttcttggatgaacttgcgtcccgcgtccgggctctgggtgggcgggctcaggtcggcgcggtcccagcggataattccgccctttcccggcggggaggagggggcgcgacctgggtggccagcgccccttgcccctcggcggtctcgctggggaccgtgtgggaccttggagagaaggcgagcggccgagcgccccagtggccccaggcctggagacccttccgggagagcgggggcctgtttttgctccgcggctctttgtcgcttccgaggggggatggaaggagtcgggttgcaagtttacatttcggacccgagtgcgcattcctgagagggaggctttcccttgcggctgaatagacgggcccgtccgcgtgggacccgcatccttgcgccccggggacccgcagccggtcgccgaggcctgcggacgcccacctcttcgtgatctgcgcgcctggtgtcgggactgggccgtggctactctcctgctctcccgggtccgggatcttcccagttggttttcgggcttgctattccccgtcccaccatccacagacatccttgaccgcctgcctcatccaggccactcgacccgactgggaagacctttggtggtctcgcctcccacagcccaggctgtgtcctccaagggcaccgtctcagcagcagccccgcgcccattctgtgcctggcccgtgctggacctgcccgaccctctgctggtgtggttcgaatcctggctctctgacttttgggaagcgccctggcagcccttgtccccggagcgctctcctttctgtgaacagttgcttctctctgctgtcaatga

SEQ ID NO: 19594 - DNA, 1308 bp, Artificial sequence
  DNA replication origin
cgggtccgggatcttcccagttggttttcgggcttgctattccccgtcccaccatccacagacatccttgaccgcctgcctcatccaggccactcgacccgactgggaagacctttggtggtctcgcctcccacagcccaggctgtgtcctccaagggcaccgtctcagcagcagccccgcgcccattctgtgcctggcccgtgctggacctgcccgaccctctgctggtgtggttcgaatcctggctctctgacttttgggaagcgccctggcagcccttgtccccggagcgctctcctttctgtgaacagttgcttctctctgctgtcaatgacttacagtatgccctgaccacggagccagctggacagtggtcacggggacagtcctgggacagccctgggtcctaccgggcctgcacttagcttgttccacatgctgggaggcatagggggcctccttgcttcaggaccattatgactgagcttcctccccatctccccattttgcagatgaggaaactgaggcccagacacattcacaaaagtgcaggagagctcatctgactgcagactcagtgtgtaacctgcaccctgtgcaccacctaatggattcagtctggggcacttggcacgggccttcagtctgcatcagaggcgagaggttcggggtggatattccacctgagaatgcttgggttgtggcgacagtgggggtccctgcgggggtagtgtgtagaggagagagctgaggactgactcccagggaacctagcaccagcacacgcagagagagaggaagaggtggataggcaggagaggcaggaggctggcagaggagcaggcatcccatagccctggccctgctgaggaagcaacttaggtgcccatggccagggtgcagtagtggccattgggggtgtagtgggggccatcggggtgcagtgggggccatcactgctcccattctacagaggcaaggaagaggtggattgcttgcctgaggtcacatcaccagtaagtggtgcctcctgggtgtgaagtgtggccgccctgggttcagctgccacagtgtcctgtgcttgcctgcagatggggagggcttctctttgggacgccacattttaagagaccttgttacccttcgtctgcccccagagagacctggatggtgtcagttaggatcctatagtgtagctggatggtctggagaagactgaaaagaatgttcgtagatgggagaacggggtctccttgctggggaggaggctgagggccagaacagggcggtgcgcttgagtctcacac

SEQ ID NO: 19595 - DNA, 897 bp, Artificial sequence
  DNA replication origin
tcagagcagtggctggtgattgaaaggttcagagtggatgattcttgaagggtccagagctatatcagattttgttgcaggaagagttcatgggcagtggtttgaagaacgggaaggagaggagacaggtgatggggaggcatggcagccgtgcaggggaggtgatggggcctgagtggggttgatggtggtgggggtggggaggagccagtgggtttgagaatattaggaggataaggagtgccatgtcctgactgattggttgtagacgaggggagggaagtgtctaggcctggatgcaggggctgctggtctccggtggtcctggagaaggatgaactcagggtacagttcttccccagcactgggcacagggtgcagggctgtgcccgtggtagacagtaggaaatgcttgctgcaggaagccctcagcacgcagagccatgtgtggtctctgaaccttgcaagcggacctgccgaggcagctgttgggtggctggagcagtttacgcagttgggagtcagcacgaagatgcgtatggaagcctccagagatgacctgtgtgggagggtttggaaagtgaggagaagctgaggagctggagtcccaaagaacaactgcgcaaaggactgagatggaggagaccggggagcggaggcccagggaggacaccaagcctgaggaggaagtgactgggaaggaaaagaaggaagagtgtcattgctagggtgccctcggctctgcagggcacgtatcagtggcgaggtggattggggctcgtgtgggcaatgtcgccacagagacttggctgcaaaaagacaagagagctctcagtaagaagctggagagggtgttatcaacagctgtgtaacagatcacaccaaaacctaggagct

SEQ ID NO: 19596 - DNA, 950 bp, Artificial sequence
  DNA replication origin
aggttctgtgtgctctggatggagcttaagcatgagcctcttctgtatcttcatttgaggataagaatacctttctggctggtgccgtggctcacacctgtaatcccagaactttgggaagccaaggtggaagattgcttgagccccggagtttgagaccagcttgggcaacacagtgagacccgatctttactaaaacagttatcctggtgtgatggtatacctgtagtctcagctgctcaggaggctgaggcaggaggattgcttgaacccgggaggcagaggttgcagtgagctgtgattgcaccactgcacttcagcctggggaacagagtgagaccctgtctcaaaaacaaaaagcaaaacaaaaaaaacattaaaccttcctcctagggtattcttgaaggtcaggcaaggtggaggctggccaccttctggcacgctgcctggtatggataggggctccattgtagttgctgctgctggaataatgtgttcattcacctgactatttctggggcctggcctgccctgggccctccatgtggggtgggtgtgcctggacaggggggctgcaggagagcagcctggagagcaaatgcacgagcacggtcatgatgttatggtgtgcagatcatcgagaagcttgggcctgctgttgttcaggggagttggagaggcctggtgtgtggtctgcagagctggggtgccggcccatgactgtcaatggcagatgtgtgtgtggtggggcccggcctgggatgtggctgactggaggggtttcaagcagcatggagtgcctggtggtgggtggtgcatggcgggggagtgcggggggtgggtggtggctggcagctgccgaaagcatcattgcattcctgtcctgtcccaacagtgcatgcaggccaggggttcagttacaagggcatcaggtttatgtctaacgggag

SEQ ID NO: 19597 - DNA, 903 bp, Artificial sequence
  DNA replication origin
tggcttccaccaaggcagggggagtttgcaatgtctagggtcagccagggtggaccccggtgggtgtggggtgtgggtgttgggctcaggaggaaggggagccctggagatggatcagaattgggagtcattggcatggcaggaggtgaggtcccttgtgggatatgtggagggaccccgaggaacccacaggcaaggggctgggggagcagggccctgcgcagggagctggaaggagggtggagaggcaggtggccaccctgggagtgagggccacgcgtgccccagaggtgaggtggccaaagtgtcatcagaaaggccacttgagaacagcctgaagtcatcgtggccttggcaggaacagagctgtggtgcgggccggagtcaggctgcagtgggagtgaggaggggtcgtgtgggaagtggacgcaggccttgcccacactgtggggtattgtccgatggagcagaggctcgcagggcctggggctgcttttccgggtgagaggctggtgtgggcttcatgatagaaagcaggaggcagaggggtgagaactgaaggctctgaggagagagagaggacaaagggcaggagggccttgagcagacagcaggggaagaggttggagccccacagggcaggcaggtgccccgaaaacccaaggcaggggcagaggttgggagctggagtcttgtgtttggtttgggtggttggaagcttagcgagttcctttcttgtggtggcttttgtttttctctgaaggaggtggtgacatgagatgggaggggtgggggtcaggcttgagaagagcaaagaaagactgagtcagccacaggggagagtggagaaggagaggaaacccggcccttcaggagaacaggtggacccacagtgtaagacgt

SEQ ID NO: 19598 - DNA, 1768 bp, Artificial sequence
  DNA replication origin
gagctggcccagccgctgcctccccgcgcgcgtcgctaagcggggccggagggacgcgagcgacgcgagctgcggcgcgggggccggccgggccagcagggccgggccggcagcggtggagggggcgggcagcaggcgcgcagcgggccaagtccccggagccgaggcttcctccgcgtgagcgcggcgagtctggccgcggatgccctgtccggagtgctccgtgccgccccaggcttgccagggtccgcagcgagacatgcccgagccaggcgctgcatcgacctcgacttatctgtaagcagcggaaggtaagcggagccccgcgtgccctcctcccgcgcccccgcgcccgtcgtacttggccgcgggcagagcaccgctgggacgggcgccgaccccgattcgggcgcacacactcggccccaaaccggcttggccggaaactcggcggctcccggggccgggacaccccggtgcagccgggagcggacccggtgcggtcgcaggtggggggcaaggttatgcaactgcatctggcgcgaccgggtcgctgaggggcgtctggcaactttggcgacgtcagggaggagcggggctgcgcctctgcgatgtgggttccagacagacgccacagcttcgtgagcgcccgacagccctagccaggcaaaactgggagatctgggggcggccgtctccccggaaggtttcgaggcttttaagtattttccaaactaaagcgccctggaaagtacaagtacggctgattaacttcgggggggggatgagttggaacagaggggccctgacgccggccgttgaggagaggcgcgagcagcagtgaaggcagatgcccacgtgaaatgctcgtctcctccactcgctggggttggcaccttcccggggctgcgggttggggtcggcgccgcggggcttcccggtgcctggcagcccgagtcagaccgggacaggcgtgggaaaccaaccaacgctgcagacctaagagactgcgagctggcgggcgagggcaggagggaggagggagcccgcgggcagcccggggtcggggcagctcctggagcccaaagtcaagagcgagagtctgcatcttgctggttcatgctcagggctccaggctgatgtccccactgcttggataaagagccgctccctgtgacctcagcattctactacccaaaaatatgccacagggagagggagccagtgataaagagatgccaggagtgggggaggagaggtgcctctggagtaaataggagagaaaatgggtgcgttttgcttatctacagcccagggctcccgcccggacccctctcctgctgttggtctgtgctggggagctgcacgcgctctgggcccctgcgccagaagcagcggtgaagcggtttactttgaccttgtctgcttaggcgctgaaattctgcggaagcatcccgaggtgaaactgcaagagtgggaatgaactttgggggagccctgccttggctgggaagccaaacgatcatttcagaagactacagctcaggatagcacagggtagacgtctgtgcacttgaacgctcccccctcaacgaggacttgctagagggttacctttccatgccttatctcagtggggggactgtcagagtgactgcgctggctgggtacttgatgaaaaaataccactcacaagacccgggccattcccagagtagtacatacatgaaaatgatataacccttattaagcttacgctacagcaagt

SEQ ID NO: 19599 - DNA, 1012 bp, Artificial sequence
  DNA replication origin
gccaggaggcgggggcggggcagaggagggagcaggagggaagtcctttccgctgctccaggtcccagctactccgcggagccgggcggccagaggcgagggcgccccaagccgcgcgcctgccgcctgtgcgcccggctggcaccgaggcgggcggagccccgggccccgcggggcggaggtggggcgggggcggcgcggggccgggccgggccgggccgcgtgcgtggggtgggggatagggagggagtggaggagccccctcccgccgccgccagagctggaggaggaggaggaagaggaggaggaggtggaaggagctgccgccggctgccgccggctgccgcctgcgcgcggggctccgccacagcgcgtcctccgggtttctgggctgcaggcggcgctgcatggcccgggaacttgttgagtctaccctggagccgcctccggagcagctggcgggcgggggactccgtgtgttctctcagggatggggggtcgctggggaccctgctgcatgactgtctgctgtgccagccagcctggcccggcggggctttgggaagccaggcttgaagggtgcgtgtcttgtaggtgcctggccgctcacctgcggatgctgccttgtagaagcaggagttcggggatcctttcagtgctggctccaacctggtgtcagcctctctacatggggacaggaggtcctatgagtggcctgaggactgaagtgggagggcctgcctggtaatgttgcatgctgacatttagggacactccagagcaggcgccactgccactcctagccaggaaccctaccccccatccagagcacacaccacccgtcagcagaagccacagggcgcagaggctgagttcctttgtggcagagtagaattctcttgggagaggaaaagacctaggatgcacacggagctatccccgcccttaatttcccacccaccaaagagtattgggtgttttgagctcagagcagcagacccaggggcccctc

SEQ ID NO: 19600 - DNA, 868 bp, Artificial sequence
  DNA replication origin
cgtgtcttgtaggtgcctggccgctcacctgcggatgctgccttgtagaagcaggagttcggggatcctttcagtgctggctccaacctggtgtcagcctctctacatggggacaggaggtcctatgagtggcctgaggactgaagtgggagggcctgcctggtaatgttgcatgctgacatttagggacactccagagcaggcgccactgccactcctagccaggaaccctaccccccatccagagcacacaccacccgtcagcagaagccacagggcgcagaggctgagttcctttgtggcagagtagaattctcttgggagaggaaaagacctaggatgcacacggagctatccccgcccttaatttcccacccaccaaagagtattgggtgttttgagctcagagcagcagacccaggggcccctctgatgcctgtcaggccctggggtctgggccagggactaagcagccagccgagtgcagggctcctggccccctggatttgctcctagaatgtaatgtaaaatgtaagtagccacatttattagtctgtttctcaggaaaggtcagagaagtagtggaccccagggaagggacaggcttcggagaggaaattgggaggacaaatggaaagtcccttcacccacccacctctccagacacatcagtgggcagtgagacctctttgcctatacatccctgagtctctgcacctagcaccagctctgtgcctgtgaccaagccatagctccatccttgttcgctgagctgaactgagcctatcactgccttatagagtgtctgttttttataaatgactttatacgaaataccttctttgtatgtggatgctttgggcagtgt

SEQ ID NO: 19601 - DNA, 1260 bp, Artificial sequence
  DNA replication origin
caggggcggcggggggaggggtttggctgaagggaaggacgctgcagaggtaactgggtgtctacctcatgcagaaggttggggagccatccacagccatggggagtgggttcagagcacctccttggggataggagggacctgtgctcagccttggggacccaggtgaaagtggggtctgggatcaggtgaaggtcaagagttgaaggtacattttgtactcaatctcagtccacttataaagaaatccttggaaatcaatgagagagcactgaagagagattttagaataagaacctaaaaaagaaggctgagaaaagagccttggagaatgccagtatttcttccgggcagaagaaaaaaaaaatgagctagagagagagcgagagaagggaggatagaggaaggaaagaagggaggaagggagggaagagaggagaggggaggggaggatagggccgaggggaggagaggggaggagagagagggggaggacggggaggggaggggaggagaggagagggagagagatagagcgagagggagagaaggaatgagacatgccagagggaaacagcgcaagacgcggggtcatggaagctactggacaagagcacttaacagcaagggcgccatcaacagtgtctgagactggggagggcggtaatgtgggcttattgatgaggacaccattgataactgcagtagaacagatttcattagcctcatggggagatgaagagtgagtgaaggctggggacctaggggaccactctgtgtggtctggctgtgaaggacaaaacagaggtgtccacagtgagggtgagggtgaggtcaagggagcttccctgcagtagaagaatctggaggtgaagggacaatcgacaaggaaggctccagaggacgtagacagatgactcggagccccagatccagggtttcctgggggcaaatccattctacacctgccacacctagtgcttaataaatatttctagaacaagcaagtgcctaagtgaatggcatcgtggccagattttaaactgaggatctgccaccttactaccattgttattcttgtctctgtctcttctctccccatgtctagtttcaggctcgccactgtccctgggacacctctgctcactccatccgccttgagcccattcctcacactgctgttgggtttacagcccccacctgccttccccagctctgacctctttccgggctctccatcctggtgcacggtgtctgatt

SEQ ID NO: 19602 - DNA, 913 bp, Artificial sequence
  DNA replication origin
gccggcccttcccctcacagctccccactcttcctcactgctgctgctcccttgtcctatttgacaattaaaaccgcatctttagcaccttgatgcccgcaggcccggctctcctgaggggtgggctcttgtatccttgctaatcccccagttctcaaatactaccagcaactgtcatcttccacctacaggacagtaaagtctatctgagaatggaaatccctcacccctcagcctccttcaccacccaagggagaagcactgtgcagggaggcggggaggggtggggagcatcggggaggggtggggaggagcagcatccgggagaggtggggagcatcggggaggggtggggaggggtggggagaagtggggagcatcggggaggggtggggaggggtgggaagcatcggggaggggtgaagaggagcggggaggggtggggaggggcaaagaggatggggaggagcggatgcacctggcctcccaaatccagattgtggtgccagctctggaaacacagcaagtcactcctgaattacccaaaccgcaagtggaaaatccactgcagctgagtatcatgtactttaggatgtctgaactttaggatttccctgggatcattatcattctaatcattctgggacctgagagaagtaactgagtcgggggccagcaaggcacagacactgatgaagttcagcctagcagtggccagtttttttttcttgatacagagtctttctctgtcgcccaggctggagtgcagtggcgagatctcagctcgctacaacctccgccgcccaggttcaagcaattcttctgcctcagactcccaagtagctgggattacagacatgtgccaccacgcccagctaatttttgtatttttagtggagacggggtttcacca

SEQ ID NO: 19603 - DNA, 1009 bp, Artificial sequence
  DNA replication origin
catacaggattacagttgagcagctgtgtcatcgagcctgctctgctcatcctcgtgtcaggagatgtgagaaggaaagcactgattacagaagagcgcactgtggttcttgaggcgaagatcctggccggtaaatcaacaaccgcggccagctgccaccttattagagaagactctggtgccctaagcacctgtctgtcactcacggcatgagtgggctacagccaagagtgatcatctcaaccacagaagatcaatctcacctggcagctctgctgtggtgcgtgggaggccatgcgccttggcccacagtgctggtgaagaaaaggaactggagcctaggccactccctaccaggacacgctagctctaagcgcagccctaaaccaggtgagcactgatgcaggcagactcggttaaggagggggcatctcagctggggagacggcccagcattgaggccatggtaggagaggcccgtccatggttggggaaagcacgcaggcagcaaagctactggacttgggtgggtgggagagaggaaagcgccctgcataactcacgccccccaattgcccaggaaacacacgacctgaacactgcttggaggcttgtagtgctggctcccccattcccattttgctcctgcactaatgacaaagggatcccagcagctgctgcggccagggctgggaaaggatgcagttggctgcagggtgacctggcaggctgacgtccttgcagcatttcccaggggtgggacacacagaaagcaaaactgtggtgaagccctgttctaatctttcctctgaggttggtgaggttctcgatgtgcaggtgggtgagtccccttccagccaagcaggggttggacaagcccaggaaagtggcatcagaaagaggtggcccccctgaacacaaacaccccctgcgcccatgtcccccagcagaggtgaaatgctcacagtgggatcggcctagcatgtactgacccactcaagctctgcac

SEQ ID NO: 19604 - DNA, 813 bp, Artificial sequence
  DNA replication origin
tgttgtgatgattaaagggtaattcatgcagagtacttagtgcaactcttgccacatcgtgtctgggaagtcacagctgttaatgatgaggagggggacggtatgtggaacgccataggagcacgagaatagcagctatgggggcaggagggaaggcgtcctggaagaagtgatgtctgcgatgactatctgaaggatcagtgttagccaggtggattacagttccacacaattacaattacatggaaatagctcatgtaggagtcagagtgaggaggcatggtgcgttggaggccatttcagcatggctggagtgagcacaggggagaaagtgccggcagggacgtcagggatgtagaaggcacatgaggggtttctccagtgggaattcaacacaggtttactgggcactgacacaatcaggcttgaattctagaaagacttgtcctgactgcagtgtggagagtcattgaagggcacagaggcaggggagggaggaagaccaggtgatgtcctgctggaagataacagtggtctagacaaggattgtggccgtgaggatggagagcccaagaacagaggttggaagcttgaatggggtgaatcctggtggtgagggagagagaaacgtcaaggaagggtcacagtgccctggctggggcaactgggtggtgaggggccagtcactaaactcagaaacagggatgaacagggagtggacaagggggaaggtgggcaagagcaggcagagacacagggggatcatcacactggccacagaagcagagggcacacctgtcagggaacccaggg

SEQ ID NO: 19605 - DNA, 1492 bp, Artificial sequence
  DNA replication origin
tggcgaggtggagaacgcggggctgggcctggacagcggccctggggtcgtctggagtcctcgctccctcaacccggaaggcagcggactgacatctgcgccgaagtcgcgcgtaccccacggagggtcgggaccctggaaatttcgaacgccccagcagttcagggcagtcatcgcttttcccaagccggggagtccggggccccgccaggtttctccgcgctgtgacctcgggcgcgcagagcggagagcgccaagctctctgctgggtgtcggaggacgcgccgaaaacagggacgtctctgcagtgcgtccgacaccagctctccagtcctgctgccgcccggggttgctgcagcccgggttatcccggccccccaagctgcccggctttcggcctcccctgctccccgcgctgtggggtggcggaggatggacccaggctgacgctgggctgggtacctggaaagagggcccgcctcccggactccgagtcgggcacctgtgcgaaagaggcgaaaattcaggcctggtgctcaaggctcagagatgaggagacctccccatccccccagattcctgccggcggtgttggcgctgacctcctggaagctggcctcgccctgggtattccccagcgttacgcgggcctgtggatctaattttaattcatttgtaaaacaaaaggaccaacccttcccgacttttggcggtggaggaggcttgtaggttgaggccagcggttcgatcgaggaaagagtttgggtttggggattaaagggcccatttgagtcagcgacttactggtggtgcagcccctcggcctcccagatcgtagttccaaattttatgtaaaacaactaatttatggaacaatttaacaaatggcagaaagaagtgagagtccctctgttgggacgttggcctctcgccttagaagtgaagccccttcagaagtggtgggtgaaccgaaggcatttcccaagcagtcaagagaaaagaaataccccaaaatggttctttgaggtcggcttttcggctggactctgcccccttttccttccccctttcccaaagatttctgatttttgtcaaaggaatgctagttgtgggggtcccaggtgccttttacgaagccgccctccccttccatccccgtcgttgcaggggcggttgcggggtcaacgggaagtactcggggtgggacacgcctcttcttgctgagtctcaggtgaacacagtctattgcttccacccaaaagagcagccagtgccacctgccactcagcttagcgatttccagtgcccccctcaggggaaaccatgctgctgtccgtaggtgtgaccagctttttggtgactacctcttgaagaaagtgtctttccctcagcacatgtgtagcaaacaggacttggatcctctccttatggtgcaaacccatatcaccgcctatagacacccactttcctcccataacacccttccggagct

SEQ ID NO: 19606 - DNA, 1509 bp, Artificial sequence
  DNA replication origin
tctccatgggctctggccccgacggtgtttaaagggcggagggctgggccgggctggtcgcacccgggcgctgctggcggccaagctggatgggtcgccagtgagtttcggtgcggcaccgctggcccaggcccgggcgcggctggacatggccacctactgcgacgacctgggcccctcctcggccccgcccggccaggcccaggccaccgcgcaccccccgggctatgagccaggggatctgggcgcggtgggcgggggccccctcctgtgggtgaacgcgccagcgctcagccccaagtcctacgcttcgggtcccgggcctgcgccgccctacgcggccccgagctacggggctcccggcccgctcctcggcgccccgggcggcctggcgggcgccgacctcgcctggctgagcctctccggccagcaggagctgctgaggctggtgcggccgccctactcctactcggcgctcatcgccatggccatccagagcgcgccgctgcggaagctgacgctcagccagatctaccagtacgtggctggtaacttccctttctacaagcgcagcaaggcgggctggcagaactccatccgccacaacctgtcgctcaacgactgcttcaagaaggtgccccgcgacgaggacgacccaggtaacagcggcgcgccggctcgctccgtccaggactccccatcttcccgccgggccgcgggcactccgggggtgggagcaccttagacaacctaatttctccctgcgcggttggggatacccggggaggagggagaaggggaagaagtgcttgggcatggacaggttctcagacagcggctgagcccaccacaggcccgcgtttacagtgcggcggtcccggggctctcaatctctgtgcgctccttcggaggaagaagcgggagagccagcaagctgggtgaccttgggagtgactcaacttccctgggcctcagtgccctacctggtaaaatggggaagacagcgcctaccccaaggatgggcaaaacaaataggatgcccgtttggaaagctctggagcctacctgggggcctggcgtggtctgcgctgtccttggcagagcggctggcggagtcccaccattagcatctcgcaggccttccttcaccttaacggggctcggcctttcccagggctcccttcctcctcctttctggattgtcactttcttcccagtcctgctgtggaggcccatcgggtacagagtgcccgtcaagggtggaatgggggcgaggactcagaccctctgtaagggccagcaggggatctttctgaagctgacctcctcgctggctcacaccacggcccgtcaaagctcgaaccttctgaactgggctgtttcttcttctgcaggtaaaggcaattactggaccctggaccccaactgcgagaagatgtttgacaacgggaacttccgaaggaagaggaagaggagagctgaagccagcgcggccgtgcgctcgggagc

SEQ ID NO: 19607 - DNA, 1292 bp, Artificial sequence
  DNA replication origin
aggagccctgctctcatttccagcactggtggcagctgcagtgaggggccctgcaggcagatcaggaatacctgcgtggctggggcttaggattgctaaaccagcctgtcccactccaaagtaacagtaacctgtctccactctcttcctgggaaggacccctcccaccctcccccaaaatgcagggaagataggtacccccatcaacaacaaggtgggtaccccccccccaccaacgtctccatctccagggagtcccagatgccacaaagactcagggcatctgactggggcacttaggtcctctaaggagtacagaggccaaaaaattcctcttcccagtgactgggggctccttgtccttcacaaagataccatccctaagaaggaactgggtggggcagggttcaatttacacaggaggctgctgttcaggagctctgaacacacgcacagctttggctcaaactgtgggtttggaggggaaagagaccaaaacaagtgtggccttccatgagcctgtgtgagtgtgggtgtgggtgtgggtgtgggtgtgggtgtgggtgtgggtgtgtgagtatgagtgtgggtgtgggtgtgagtatgagtgtgggtgtgtgtgggtgtgagtgtggtgtgagtgtgggtgtgagtgtgagtgtgggtgtgagtgtgagtatgagtgtgggtgtgagtgtgggtgtcagtgtgagtgtgggtgtgagtgtgggtgtcagtgtgagtgtgggtgtggtgtgagtgtgggtgtgagtgtgagtatgagtgtgggtgtgtgtgggtgtgagtgtgtgtgggtgtgagtgtgggtgtgggtgtgagtgtgtgtgagtgtgggtgtgggtgtgggtgtgagtgtgggtgtgagtgtgggtgtgagtgtgagtgtgagtgtgggtgtgggtgtgggtgtgggtgtgagtgtgggtgtgagtgtgggtgtgagtgtgggtgtgggtggcacaaacctggacccttggggaactcctgggtgctgggcaccgctcctgtggtcagtggtggcggggccctggggagttgccttgtcctagaggggggtcatcaaggaccagggctgagtgacagggaagggagctggtatcccaagggcgctttctgcccacgcagtgcttctccctcccaccaccagcagttccaaccattagcaagaccttccttacacaggacccaatgccaactgtctcagatcccctcactgcaggctcctggcccacctggagcccactgcagctgctcctgagctctgtccccca

SEQ ID NO: 19608 - DNA, 1241 bp, Artificial sequence
  DNA replication origin
ataatctctctcaaccatttcgagtgtgatattggccttcaggcaaaacccccaagatgaagtttcccaaggccacctttttcttctaaaaaaaaaaatatagcaccagtttctctgcaaaaatcaaattcaggtaaagcaaaacaataacaacaacacaaatccaaaaatggttgtttggaactacaagtgcctgccccaagcctccagcttcccaacagccacagccagggtattacaggagggccctgggctgttccctgacctgctcaagcacccttgcaaaaggaggcagtaggatggatggagggtgtgggatggatggagggtaggggatggagggaggcttctgaatgaaggggggctgtgggatggacggaggctgcgggatggtgggagggtggggggtgtatgaaaggtgagggatgaggggaggctgcgggatggagggagggtgggggatggatggaagatgcgggttagatggagtgtttgggatggagggagggtgggggatgaatggaaagtatgagatggagggaggctgtggggtggatggagagtgagggatggagggagggtgcaggatggagggagactgtgggatggatggagggtgagggatggatggagggtgtgggatgaatggaaagtatgagatggagggaggctgtgggatggatggagggtttggggtggatggagggtgtgggatggatggagggtgagggatgaatggagggtgggggctgggggagggtgcaggatggatggagggtgaaggatggatggagggtgagggatggagggagagtgtgggatggtgggaggctgcccaatggagggaggatgctggatggatggagtgtttgggatggatggaggatgcgggatggatggaaggtgtgggctctcgcaggctgataggagggaagctaatttgcctgagcctttcttccacaggacagagggtgcaacagggcatgtggcctccctgggcacaacttgcagtgagaaacctctgttccaatcctgaaaaacatggtccccctcatcccttaggggtatctttcctccttacgtttttcctagcttggcttctaaagcagacccatctggtcccataattcggagacatgttttaatcattggtaatttatcaaccagctgacgtacttcatagataaaagaattttacagacaaccttgcctagatctctctgttttctaaataaagattc

SEQ ID NO: 19609 - DNA, 933 bp, Artificial sequence
  DNA replication origin
acagtgagactctgtcaatcaaaaaaaaaaagagaaagaaagagagagagagaaagaagaaggaaagaaagaaagaaaagaagaaagaaggaagaaatagaaagagagagaaggaagaaatagaaagagagagaaagaagaaagaaaaaagaaggaaggaaagagaaagaaaaagaaagaaagagaaagaaaaagaaagaaagaaagaaagaaagagaaagaaagaaagaaagaaaaagaaagaaagaaagaaagaaagaaagaaagaaagaaagaaagaaagaaagaaagacagacaaacgaaagagagagagcaagggagggagggagggagggaggaaggaagtgggggggagagagaggggggagggagggagggaggaaagaagtggggggacagagagagagagggagggagggagggagggaggaaggaagtggggggggagagagagagagagagagaaagtgagcagcacctgcgcacttaggcttgcaattgtagggcatggaggactccaggccatggagtgacagtgctgcagggtggggcccgcaagggtgtgctgggtgcctgggtccacggaggagtctcccctggagatgagacttcagctgcatctagacgcacgtggcctccatgacaaggctcctcaagagaacttcctgaggctgggccttcacagtgtgcttgagaaacaccctcgctcctgttgatcccagctctctggggccctcctctgtgaatgacatcctcacagaggggactctgtgctctggcacctcctgcactcagggaccccttccctggcaccaccctcacggctgctccccttggccagcctcctccgccaccataacgcagaccaggaggggagcaagcgatccctcatccttccttcaatcagcagggtcttgtggtgggctctggag

SEQ ID NO: 19610 - DNA, 1416 bp, Artificial sequence
  DNA replication origin
tctgacaaaggcaagttgtttctgtcttcttagctcacagtctctgcctcctcagccctgcagcgttaacaagcaaaactgtgcttagcagagctttgtaattatggccttcatgtacataagcctgactctgtagaccacaacagcagaaaaatccaaagcctggtgacgtcatgtgctacctggccccacctcaacctgggctgttccttggaggtgcactcaggagggagccacccgccctgctgggctccgaggtgaccaggctgtctgctgctgctggctggggcccatcctcctctgctctgacagcccagacgccttcactgagcacctcctggctactgacgttgctttaggagcttgagtctgagaagccatggagatcaacagagcctaggctgctggagcttacagccctgggggtaggggaagagggcacgacagacacaaaaggagccaataaacccacaaataattccaaactgtgatggaggatgtggaagagagtggcagaagagatggatgcagggcgatcttccagaagccaccagtaagaaggaaccaggtgcactggttggaggagtcccaggcaggaaggagcttggctctggcactgagagaaaggagccgtgattggagcccagcgggcaggggtgagaggctcagagcagccagggaagtcaggcagagcctcgtgggagtttgggttttaatattcctggaggcttttaagcagggggctagcaggacccggtttacactttgtgaggtgcctgggaccaagtgtgaagaatggatcatctgggagagtgggtcagaagctggggagccactgcaggttttggaggggcgcaggcagtgagatgaaagggcaagatgcatggagaagccagtgggaagtggacttgggccctctgggaggtggacttgaggtgggacacggaggcagggacagggacgactgcagagaaactaagtaagagcaagaggcaggtctgagacagcaggagacagccaggaggagctgagcttggaggagagggccccagagtggtgctgcttagagtcattcccatacggatggtgtttaaagctttggggctagacaaggcccccagggacagaaatgggcagggcagggcagggaggtggagctcaagttctccactggtttcgcagctctccggcccctgtggaggggaagtcccactctgggcaaatcacgtgggggtggcctctgccaggaggcacccattgctctgcagcctttggggtccgtagctctgtctaaacaggccttaagtatgctaagagtcgtcggctggcaatcggtgcaacgtggggtaacacaccgtaagtgccactttctccccatccattcattcattcataagcctaatgagctgggtccct

SEQ ID NO: 19611 - DNA, 888 bp, Artificial sequence
  DNA replication origin
cgcgctcacctcgggggggccggtctggtcgcgcagatcgcgctgcagcggaggctccgcatctcccgggcgcctgcccgccgccctccggggcgcccggctgtcttcgccgggcgcgaagaagggtcgcggggacgcgcagaggccgtgggttcctgaagccgctcgcgccggctcctgccgcccgctgtccgcagcctagcaggaaatttgtccggccggccgcgtcccgccgccgcctcggctccagctccggctgtggctccgcggcgggggcgggggcctgggcgctgcgaggagcgggggcgacgcctggtgcccggcgcggggagcgcatccagggcgcccgccccacctgcgaggcgggtatggccctgaggccctgcggccctgccctgggagcacccagacactgtgggcatccgtttactcaaggctggtgccccttccggggaggcctggtccagccactccgccgggacccaggtgcgtagacagagggtcagggtatggcaggcactcacacctggtggagagcaaaggcaaggccctgcctctccctgccctatccctgtgcaccaggaagtggcctgactagggactcgccctggtcttgcagcaggtgtgggacacgcagggcaccccgtgcgcttctggtgcgaggaagctgggagagctgtgaggtcgctgggcctggtggcctcctctggaaagaggaggggataaggcgcctgtctgggggatgtagaagagggctcgcttgtcccgaaggcagtatctgtcaaagttaaaaacgcacaaagagaaagaagagcgacagagccaggcactgggcctgctgtctagccgacttcttccagggaatttcactcaagctatttagggagc

SEQ ID NO: 19612 - DNA, 1412 bp, Artificial sequence
  DNA replication origin
tccggggctcagagtccggaccccggccccgccgcccccgcggcgcgcccagtaccagcggctggggcccgtacgacccccgaccccggcctgtggcgcgtcccctcacccggagtccccagcccaacttggcgaccacagtggcagtgctcacgctccctctcggtaaacaggaggagggcgcgcgtgtctgcgggtggctacagtgcgcgggggccggcggcagggcggcgtacgtgaaagcgggcgacacagagagggggtgcaggccgcgcgtggggggctgcgcccactcgaggctggaggctggagcctttgaagaaagtggctcgagttgtgccaactctgggaggggccggcgctctgccaggatgctgccccgcagccgggcgggcgcccgcgccttcccagggaggcaggtggagcgggatgcagcagccgccgggggtcggagatgcggcagggagaccctggcaggtggtccaggctggactgccgcgatttgcagggtcgacgacctcacagggctcctgagcacagatgcgagcgcggtgccaattctgagagctcccgggaccatctggggaaggccgggcaacccacaggatggggaggcagagccaagccggatggagaccgcgctggacctgacctaaattccttccaggcatgcaaacctttccagaaagattaggcaattatacttgcagaattatgatattggtttgtcttgagtcgtgaccattccatcagagtttcaatccaggaaactcaaagaaagaatacagctctctgcttgtattttagagtgaatgagcgtataggtgagttgaatgaacaccagcaaagagtgatcacgtgatacagaaattactgtgtccatgtccagtcagctctgcatttggccccaggtaccccttgacccagggcgtctggaggtctttgtgtcccaaagatggatgaagttctgcctctgcacactaacgactcttgtccatttaaactgtgtgtatgtgggtggggagggggggtgtggagggtcgtttccaaaactgggataatggccagaggagggcatgaaatggtgggggccagtggctggggcaagcgtctgaccaccacggtcactcagccagcatggtatgggcagagctctgtggtgtgaacagggttagggtctgtactttccaagcacaggctcttggcatttggggagcaaaaggtcagaggcgaggtggagcaggcccaagaggtgggggctgcgctgtcagtgagagaggcctgacgtaccacccagcccttcccagacaaggctctgcccctgaatctgaccttgggggccaagatttttgttcattgatgttggtgatgcctgtgagtcaccaccgccccctccctgccccaacagaccg

SEQ ID NO: 19613 - DNA, 926 bp, Artificial sequence
  DNA replication origin
aatcattcccgcagttaaagaattcatcttggaatcctctggtttttcatcatgctttacttttaaaacttcccgttctgctgtagcaaacttcccattctgctgtggcaaacacgagtgcatattagttttcatctttggaagatgaatgaagtatgtgacttttcaaacagggatctcacattttaagtctagttattccagaataaaaacaagccagaggcccaaacacaggattcttcactgtcgttagcaatttgggcacaaatctgaagggccagtttggtgcaggtgtgctggaggatacatggagaaaaaaaaacatgttccagtctagttctgatacacagaaattgaaagagcaacccaaggagttgggttgctcttccacatggtcaggatgagccaaggcttccgggtagggcttttagggcaagtgggccccagctgagcccagcaggggcagggccaagatgagcagaaggaagagataggctctggaaggagaggcaggaggaggcaggtgtgggcaggtgcaggcagatgtgggcaggtggaggcaggaggagacaggaagaagcaggtgagggcaggtgcaggcagatgtgggcaggtggaggcaggaggagacaggaggaagcaggtgagggcagatgcaggcagatgtaggcaggtggaggcaggaggagacaggaggaggcaggtgagggcaggcgcaggcagatgtgggcgggtggaggcaggaatagacaggaagaggcaggtgcaggcaggtacagacagatgtgggcagatggaggcaggtagaggcaggaggaggcaagatgaggtaagaggagccaggtgcgggcaggtgcaggcagatgtgagcaggtggaggcaggagacaggaagaggcaagaggatgccagctgcctgaggtggct

SEQ ID NO: 19614 - DNA, 910 bp, Artificial sequence
  DNA replication origin
ggagggagggagtttagaaggatttcaaaggtagggtccctggcagtggtggtcagtgggatgtgggtgataagtggggcaacaaaggtatcggggtttccatcttgggagctggggtgggagggagcatcattcattagctgagacaaggacaatgggggctctagggtggggataaggatgatttttagctggaggcataaggcaataatataagctcccagttactgggctcctatgaagcgggataagctacctgaggttctgagataaatgacctcatcaaccctcaccgaaatcctatgagcaatgtcctgttgttactgaagatgaaaggttgcattagagaggacagtggaacattcctggggagactgtctgtaggagttgcatctggggtctggggccttgtcagaaggggaggtgggctgcaagtgcagcgtgtgggggaggcactccttgtgggggttattggggaggaaggccagggtcaaggtggcgagctgcaggaagtcactgcactagggcccgaggaagggagctcggcaggagactgggaaaaggtggctgggctcgggggagggcagaaggcaggtcgaggtacacacccagggtaggaaagggattttcctgatccccgtccacttcccaacatccctgcctcctcttttggagtggtcccctctctctcctcaccctttacttgaccccaccagattttgaggttgagcgacctgagatggagtccttcctggcatcacactgtctggccctgtgtaaggtgatttgggttttggacgtctcaaccagcccaggagaccccagagtgtaggggctgtcttgtgtccccgtttcccagtccctgactttctctccggcacctcaataattggagctttcagggcatttg

SEQ ID NO: 19615 - DNA, 639 bp, Artificial sequence
  DNA replication origin
tccaggagcccgagcatcacctgggagcatgtgaggaatgcagagtctcaggaccatcccagacctcccaccttttatgaagattcctcggtggttcctctgctcattaatatttgagacgtattggtctaagcaatggattaagaaagaccaagccggaggcaatgggaatggaaaggagggagggagtttagaaggatttcaaaggtagggtccctggcagtggtggtcagtgggatgtgggtgataagtggggcaacaaaggtatcggggtttccatcttgggagctggggtgggagggagcatcattcattagctgagacaaggacaatgggggctctagggtggggataaggatgatttttagctggaggcataaggcaataatataagctcccagttactgggctcctatgaagcgggataagctacctgaggttctgagataaatgacctcatcaaccctcaccgaaatcctatgagcaatgtcctgttgttactgaagatgaaaggttgcattagagaggacagtggaacattcctggggagactgtctgtaggagttgcatctggggtctggggccttgtcagaaggggaggtgggctgcaagtgcagcgtgtgggggaggcactccttg

SEQ ID NO: 19616 - DNA, 1808 bp, Artificial sequence
  DNA replication origin
ctgctgctgctgcttctgcacggctgcgatgaggtcaatcatgcctttgccctcggcgggaatcccgatctcaggccagccgtggaagtgaaactggcgcactactcggacctgctcctcctggcgggcctggggctgcagggaggagagggggtctcagcgtcgcctgcctgccggggaacaggccccagccccatctgccctctcagggattggccaaggctgggagccctccctgagccttctgtgctgccaacatccccaccgaggcagcctgaaggagaaggctgaaacctgcttgtcctaaagaagaaggcaggtggctggctgtgcttccttctgcaagggggagcgagccgtccagaggacatcccctggatccctgtgaggactgcccaacccctacgggatccttggcagctctgctggagagaagggaatcactttctcaagaaaccagggccctgcatttcccttcagagctcaaatgagcagcatctgagtctggtggccagggtggctctgtggctggcatggaggagacagtggcaggtgcattacgtgatactgactgtttggagctcagcatcaagacctgtgtacaagtgagtcatcctacctacagctgaccccgagttctcattctttgccaaggagagaggatgagcagaaccaaggacccagtggaaatggggacagttggggggctctgagaaggcacctggaggagggccccagagaggcccctgtggcttcattagtcccctttgttcttcctcttacagctaatggctaatgtaattctcctgagagataaatgggaggtaggcagctagggagatgggaattgtacaggaggcctgccactgtctctgaaacccattggccattcatagccaatgggactaggtgaaggagcaggacaggtgcagggccacattctggttcaatgacaagcagaacccagagggagggcgtggttcactaaattcacaagcgtttaaagagctacttcaacaatacctgattgagagtgaccagaaagtctcgtatactgatggcttctgaaagggtatcattctttatctcaatcgttatttctccatgagtaactgagccctcggttggccaatactggtagcatttatccttaggggataaaataaaaatttaagtcttgtaataaataatttgctgctggcgattttgagtttataacacagaattgttctcaaaccagttaatgtatttcatctgaccaaaaaaaaaaacatatgaatatgaatataaatgcctgttaatgcttgttgacccagggaacagaacagagtctagaaacagacacatatatatatgaaaccttaacatatggcagaaaggagagattcttcaatatgtggggctggaaaaattggttttctacctggggaaaatgaaattggatccctgactcattccctaccagggttgatgtgagtgcccccagctcttcctagaactgggcagtgtacaccctgcacttccacgtgtcatggccttgaaccttaataaaaatacacccagatggagtaaggtttaaggtaaaaaacaaaactgtgaaactcttggaagaagaaatatcttttcactttgaggtacacaaggattactagacaagagcccaaacagctaaccaatcacgatgcaacaatttgaaacattggattacagtaacattcacttctcttcatcaacaaacatcattaacagagtgaaaagacacgccacagattgcaataagatgtttgcaatacataaaaccaataaag

SEQ ID NO: 19617 - DNA, 956 bp, Artificial sequence
  DNA replication origin
gggcgggaggactcgactcggtgggagccgctagagccgggcgcccggggacgtagcctgtagggccaccgggtccccgtcagaggcggcggcgggagcagcggggactgcaggccggggtgcagcgaacgcgaccccgcgggctgcggcccggtgtgtgcggagcgtggcgggcgcagcttaccgggcggaggtgagcgcggcgccggctcctcctgcggcggactttgggtgcgacttgacgagcggtggttcgacaagtggccttgcgggccggatcgtcccaggtgagctgcggccgggactcctgggagctgtccggggtcgagggctgagccgcggggaccccccgagctctgcggggacgggcaggggacagacgcgcggcctgggcccgactcctcctgggctctggcgagggcgtctcggtggaagctcccaggaggcgcaggcgctggcgacaacaccccagctgccggactttggggcgccgggggctgcggtcggatcgtcctggggtccccgctagctagctgcggtgtgcgcttctgtggccggggataggtgaattgggcacggggcccttcttagctcctttgctatcagagtaactcgcacctcttttgcagtggaagagttgtaaatttgcttctggccttcccctacggattatacctggccttcccctacggattatactcaacttactgtttagaaaatgtggcccacgagacgcctggttactatcaaaaggagcggggtcgacggtccccactttcccctgagcctcagcacctgcttgtttggaaggtgagccccgcgggcgcgcgcggacgttttagctgagaaagaggaaaataccttagtcacagaataaagtccagaaacgcgctctaggattgggtcctgccgtcacttttccttggtgcttctcccattcgttactaagttgacat

SEQ ID NO: 19618 - DNA, 1424 bp, Artificial sequence
  DNA replication origin
cgcgctgtggggggtgcagggtggagtcccttcccctcccccttccgaggacgcaagggcgcgggggccctgatccgccgccaggtggcgctacgggcccagccaccgcgctccagggccgcgtgggctccgctcctgtgaccgacgtgcgggggcgctgcggggcgccggctggtgtcgcgggccggggacacaggctgggggcgctgcaggtggggcgggctgggggcgctgcggggggcgctgcggggggcgctgcgaggaggcgggctgggggcactgcggagggggcgctgcggagggggcactgcgggaacccgggcagggggcgcgggctggggtgcgggcgggaacgcgggctgtgggcgcttcggagggggcgcttcggaaggggcgctgcggggacgcgggctggggccgctgcggaggggccgctgcgcagggggcgcgggcgcccgagcctcctctgtgggctccgtcggcggcagctgacggtggagtctgggcctgcgaaggtgacctgatcctttgctctttcaagagaagccagaaagctagatttttgtttgaaatgttggcaattgatgtactttaaatgttaagggaagttccttttctgagaggggtcggacggctgtcaccggacgcggggtcgtcctgactgtgcgggaagccggcggcgggtgacactacaatgctgaggccgcccagagccagaggccttgaagctgtcgggacccaggaactccccaggacggggtccccagacgtagggcgcgccccggcaccagggcctggcacctctccctgccagctccacccctgtcacggaaccccatgcccgccacgactgacttcctaatgttcttcatggctgaaacacttaattgtaaaaccttgttctcgtgcaaaattttaaccatacacagaagtagaaagaatcacaaactggccgggcgtggtggctcatgcctgtaattcagcactttggaaggcggaggcgggcggtttacttgaggtggaaagttcgagaccagccaacatggtgaaaccctgtctctactaaaaatacaaaaattagctgggcgtggtggcacggtcctgcaatcacagctactggggaggcagaggcaggagaatccttgaacccaggaggcggaggttgccgtgagccgagatcgcgtcactgcactccagcctgggccacagagagagactccatctcaaaaaaagaaaagaaaatacacaaaccccgtgtacccatcacctagcttcagagattgatgttcatagctaggtgtcacctattaatccccacccccaggacacttaaccacactgtaccccacccctgtggggttattttggagcaaatgtgagaaatcatctctctttctccataaatattccagggtgtgtcacta

SEQ ID NO: 19619 - DNA, 827 bp, Artificial sequence
  DNA replication origin
gtccccgctgaacccggtgtggcttccactgccggccctgctgcagtcaagagcaacctcggcagcttcactacctacaaacccaggtttgtgcttggacgtcagataaaacctccacagaaatctgggacctgatcctcaaaggaaccttgctgtccaaatacagttgcaagcatgatgacaatggagtgtagctaacctaatggtaagtacccctggagaaggagggagatgcattcccagctaataagatttacagcacagacggccaaagccctccccagaggcatgctgtggccgcagaagcctccacagtcatccctaatctctgccaacgcctacacttccacccctttcctccatgcccacatcactatgcattctttgttaattactaaagaagagccctttttaagtcacaaatgtatcactgcagaagttttactttcatccaggtctgcctggagtcttctgtcaggtaccaattagaggaggtgaagtcagggtacgtgggtcctaatgaggaggggaaggcaggaggatggggaggaggaggagaagtctagaggggaggatggggaggaggaggagaagtctagaggggaggatggtggaggaggaggagaagtctagaggggaggatggtggaggaggaggagaagtctagaggggaggatggtggaggaggagggaggaggaggagaagtctagagggaaggatggggaggaggaggagaagtctagaggggaggatggtggaggaggaggagaagtctagaggggaggatggtggaggaggaaggtgaggagcccacacgaagaagggg

SEQ ID NO: 19620 - DNA, 1742 bp, Artificial sequence
  DNA replication origin
aggcctcccaaactatggtttgagcctccactcttgcctcttctctttctgcttcctccctcccggtccaacaacaaaatcttgccatttgctcctactggttgattctgcctttctcagctggttctctcaatcctggctccaggcctctcaggcggaagcagaggaatcaagttcatcaaagtcctcaaccctaaggcttgctctaggttggtggtggttgcatttttttctagttagtaaatagttctgcaacgactgcaaagaaaaaatgcaacaaactgagcaaggccctgcatcgcagcatgccaaggcgtgctccatcggagcctcggggcagggaaggcctgaggcagggcagcatctggtggcatctgctgctgccactcccagtcctctgcaggcaccttttggtgggtcctctgctgggcagacagcgctatccccgaagcagaatggtttctcttctccagcaccggtgcataggaggtgctcagatatactcatgagtatttcatgaatgaatgagggtcttacagacagtaggaaagaccttggacaaagccaagctacagccctgcatcggaccctagagagtgctggtggaagagagctgaaggaggacacacctcatggacctcattctcaggaggggagagggcctgcaattcaggccgtgggagcaggaagagcatggacagaggttgggaggggccccctgggcacttggtgggcagcaggccacctcccacgtttccttctatgtgccctgccttagagtctgtccctgctcctccactttgtccctctcctctctcttgccagccctgagtctgatgtctctaaaaattattgtccctatctacagacggcatgatgggggcagcaaagccaggtatggccagagcagtgcggcccccattcagccctggtcagacagctccaaaatcccctctaaaactccagagcttggtgagttcctctggctgaagggaacatttcaggacgaacgtgcacagtctgcatagtccctgtttttagatcccattgcctttgcaaaaagcctgagtctccaccaccaggctgagctcccacagagagtccccaggcctgcaccatcgagggagggtcttgggcactggacaggcttcatgcgtcccatcataacatggagagactccctgcagggcctgtgctctgtagcccaccccgggcaggacgtaggggagtaacttcctcaccctcctcctgcaagccctccctcgaggccgggtgggagaggcagaagtgcggtaggctgggtgggagaggcagggagggagtatcagaccccagatgaaacagcctcccagttccgagtgcccacagcataaagaaaagtaattctctccaggagcttccagaggatttcaagtttgagagagaagggcccagctggccagtagctctgaccacagcctggccccagcctgggacctcaagtggcaactgtccctcctagcgccctgcagccatgtccctggcgacccttgctggggatcctgggccaagttaggttgtgtggggcagctttgtttttgtttcccttccagtgtcagcccaaggcactggcagcctgcgagaatgctttgcatgtttcctgtggtgcacagggcctggcatccctgcccgtcacggcccagggacctctagggtacacactgcccagggtccccccaaaaggccggagctgcccttccagc

SEQ ID NO: 19621 - DNA, 1359 bp, Artificial sequence
  DNA replication origin
atatgcatgtgtgaatacgcatgtgtgcctgtgtgtgcatgtgtgaatacgtgtgtgtgcatatgtatgcgtgtgtgtgcctgtgttcatgtgcatgtgtgcatgtgggttctccaggttgaaaaagtcactggcaagaagggatcaggcatgaggaaggaacccacagagcccccgtatggctggggctgtgtgggaagaagtgctcatggcttgggaaaagcaatacatcatttattggttcaatggggtaagaggcatctgatgggagatgagtcagacacacagaccggggtggcactgcaggacattgcaagttaaactaagtgtaacatgcagaggaagggtgtgtcctggaagggtttaaaggtgcagcaggacaggctcctttctgcatttttgaaacctaatttgaggtgctctgtggaggcagggccggaaggagggaggatggaccatggaggtcctgggagagggaggtgggaggccccggcggctgctaggtgctgcatgctaggtggagagaggagaagacattcagagactttggggagccaattttccaggatgtgtttgcttgagtgaaggcagcagagaagagggggatggtgaggatgaggagagtgtctgagggatgatctgcaggggcaggggtgtggggagagagacaggttctggtggggatgatgagttctgtttgggacatttgagtcttgagatgaagggaaatactgagtagtgttgaatcccatgagttcagaagagcagactgggttggggtcatctgtggcttctaagaccacatgcccaaagtctgcagactggagagttgtgatgagggaggaggaaggagtccaggccgagccctgaggaacccatggtgaggaggacgggccgcccagcaaggaggtgtgaccaggccacattgtgttgggagttcagcggcatcaggctgaaggagtgtgcactggccatcagggcccaaaggttggcggtgacctcagcaatatcagcctcggaagagtggacaccagaagggagtgggccagaaggagtaagaatgtgaagaggcagagaaaggggggtcgaaaagtctcctgaaacccatctgtgaagggcaaaataggaggtgagatcaaatgaagagcccctggcctctgggtccacatgtcttcccgccctaagcactcctcatttcccacagctgcagccacagaaaccaccgcatggaacaaggcagcagctgggaatgcctgtgtggcccaggcctcaggggcttccaggtgcaggagagaagaggtcagctcaacaaaatcatgtgctcattgcacgccttcatcccaacagacgccaaggaca

SEQ ID NO: 19622 - DNA, 1717 bp, Artificial sequence
  DNA replication origin
ctgaaaagaacgtctacccacgcttattatcccattatacggtggttgtcacttaaccatcgtctcactgttggatctttaagtcacgttgttttgagaccccatacgctgcactgaccacacatggggtccccgtgggcgctctggccgtcctgcggtgtctgccccatttattcacagcctgagcgcccctgcatgagacactgggcagtgccgggtgtcgagcctgcagcaaggcacagtcagtcaggcctcggagtccgtggagagtgaggaccgctgcggagcagtcggcagccaccaagtgaaggcaccaagggctgcaaggtcatatttgagaggagctccagaaaccaaagaccgggtgccttaagcaaggatggggagctcaagctggttgacagagcctggaggcttcactgtccactcctggagctgctcatcagcagagcagagaaaagattagcaggaaaaaggagggatgagtgtgggcccgtgtgtgcatgtgtgaatatgtatgtgtgtgcacatctgtgcacatgtgtgaacatgtgtgtgcctgtgtgaacatgtgttcgcctgtgtgactatgtgtgtacctgtgtgaatatgcatgtgtgtgcctgtgtgtgcctgtgtgaatatgtgtgtgcctgtgtgaatatgcatgtgtgtgcctgtgtgaatatgtatgaatatgtgtgcacctgtgtgaatgtgtgtgtgactgtgtgaatatatgtgtgtgtgcctgtgtgaatgtgtgtgcctgtgtgcatatgcatgcatgtgcctgtgtgaatgtgtgtctgagtgactatacctgtgtgtgcctgtgtaaatatgtgtgtgtgcctgtgtaaatatgtgtgtgtgcctgtgtgcatatgtgtgcgtgcctgcatgtccccgtgtccatatgtgtgtgcctgtgtgaacatgtgtctgcatgtgtgtgcctgtgtgaatatgtgtgtgcgcatgtgtgtgcctgtgtgtgcttgtgtgaatatgtgtgtgtgcatgtgtgtgcctgtgtgaatgtgtctgtgtgcatgtgtgtgcctgtgtgaatgtgtgtctgtgtgcatatatgtgtgttcccgtgcatgcatgtatgaatatgtgtgtctgtgtgcatatgcgtgtgtgtgcctgtgtgtgcatatgtgaatgtgtgtctgcatgtgtatgcctgtgtgaatgtgtgtgcctgtctgtgaatgtatgtgcatatgtgtgcctttgtgaatacacctgtgtgtgcctgtttgaatatgcatgtgtgcctgtatcaatatgtgtgtgaatatgcatgtgtgcctgtgtgaatatgtgtgtctgtgtgaatatgcatgtgtgcctgtgtgaatgtgtgaatatgtgtgcatgtgtgaatgagtgtgtgcctgtatgtgcctgtgtgaatttgtgtgtgcctgtatgaatatgcatgtgtgaatacgcatgtgtgcctgtgtgtgcatgtgtgaatacgtgtgtgtgcatatgtatgcgtgtgtgtgcctgtgttcatgtgcatgtgtgcatgtgggttctccaggttgaaaaagtcactggcaagaagggatcaggcatgaggaaggaacccacagagcccccgtatggctggggctgtgtgggaagaagtgctcatggcttgggaaaagcaatacatcatttattggttcaatggggtaagaggcatctgatggga

SEQ ID NO: 19623 - DNA, 1182 bp, Artificial sequence
  DNA replication origin
acaccctgccagaagtgccgaggagacctggagtgagagaattagtgggtgagtgagtgaattagtgggtaggtgaatgagtcagtgaatgagtgagtgggtgaatgagtggataagtgagtgaatgagtgaatggtgagtgggtgagtgagtgggtgactgggtgggtgggtgagtgggtgaatgagtaaataagtggataaatgagtgagtgggtgagtgaatgagtgcgtgaataagtgggtgagtagattagtggccgggtgaatgagtgggtgggtaggcgagtgagtgagtaaataagtgggtgagtgggtgacgatgagcaagtggatgagtgaatgagtgggtgaataagtgggtgagtgagtaggtgagtgaatgagtgaatgagtgggcgggtgaatgagtgactgaataagtgaatgagtgagtggtgagtgagtgggtgagttaattgggtgggtgggtgggtaagtgaatgactggctgggtgggtgagtgtgtgggtgggtaagtgattgggtaaatgagtgacgggtgggtgagtggatgactggctgggtgggtgagtgtgtgggtgggtaagtgattgggtaaatgagtgacgggtgggtgagtgggtgagtgggtgagggagtgagataatgggtggatggttgggtgaatgagtgggtgggtggatgactagatgagtaagtgggcaggtgagtgggcaacttaatggctgagtaggtgggtgggtgactgggtaagtgggtaggtgagtgggtgagttaacgggtggatgggtgggtgagtaggtgggttaatgcgtgggtgggtgggtgacttaatgtgtgggtgactgggtaagtgggtaggtgagtgggtgagttgatgggtgggtaggtgagtgagttaatgggtgggtgggtgagttggtgagttaatggctgtgtaggtgagcgagtaggtgagttaatggctaggtaggtgggtgactgggtaattgggcaggtgatttaatgggtgagtggtgagtgggtgagtaaatgggtggatgggtgggtgtgtgggtgaacgagtggttgggtgggtggatgagtaacatacagcacctgcccctcacctttgagagtcttcactttatggaggaggaaacagagaatgccaaaaagctcagcccacatcacacagctg

SEQ ID NO: 19624 - DNA, 1135 bp, Artificial sequence
  DNA replication origin
ggtgttcccgcccgaccgggtcggcgcatgccctgtgcggcggcgccgggcctgaggcagtctgcgcatcctcgctggacgccggcacgccggccctggtcctccggcagcgccgctgccctgtgcgcctgacccggatggcccttcggccggtacaagccgggcggcgccttcccagcttccgcctgaggctctgtgccttagtttgccaaatggcccgtaccttttcctgtcacagggatagtccgcgggcgtgcaagcgacctgccacgtgcccgagtggtcctgaaagcgcgcgggggtcgtaggacggcgcccgcttagtgagaatcccggtcctgctcggggcggctacgctgagcccggagcgcgagtctctcccctcctggtgccgctcccctagtcagggacccccagaccagcagagaccctgtcagggggccgtgggggcagcctccagggcctgtggtgggcgatgccgtccaggggctgcagtcaccgatggcctagacactgccagagcctgactcagccgctctccagagagcacacagggtgccaggccctgcttggggttgtgtggacgttattaggagttgaattgtgtccaccagagaagctatgttggagtcctaactcccagtacctcacaatgtgaccttatttggagatggggactttacagaagccatcaattagtgggcccctcatccagtatgactcgtgtccttataggcagaaggccgcttggggaggaggattggagggctgcacctgcaagccaccagaagcctaagaggacagacccttccctggagccttcggagggagcagaggacactcttccctggagccttcagagggagcaggatcctaacacacctgggtttcaaacttctggcccccggaagtgtgagacaataggtttctgttgttttaagccactcagtgtgtggcactttattatggcagccccaggcaatgggtacagaaaccattgtctctaacgtggttggcataagcaccccagggagtagtatcatccctggaggcttcggagaggtcacacaccccttggcaggatcccatccaaggcccacatgttctaagccaccatgctacgggccttctaggt

SEQ ID NO: 19625 - DNA, 940 bp, Artificial sequence
  DNA replication origin
agggtagacaggccgccctctgccctgcctggcatctgggttctgaggcgggagatttcccgactgcagccgcgttcaggcgaggatggcagcggtggacccaggctcattaccattgctcccaccccagcctgtccctgttgggggcaacctgtacgtcctgcaggagtcacggaattttaaaaaccaaaccgtcaggtgttagaggtacagtcacatcagaatgcaaattagaaatagtgtgtgctggggccttaaacaccatgacgtgtttcgtgggctggtgcggctgagtgtgcccctgggcagcagagattgacgagggtggctgggcttcctccgggccctgggctcgcagtggccttgtcttcaaggggctccccgtgtggtagggagacgtgcttgtcacacccatacattttgtaggtactggtgagggctggctagactgaatgaggtgaagagcctggcctttgttggggggggtgttggggagcttggtaagtggttgaagatgttgaagaagtcccctctgaggaggtggctttcgagtggagatttgaacagtgagaggtggcaaggtctggggaggaggcttccaggggacgagtgagagctgcaggtgcctagatggctgcaggtcggtgtgttggaagcacagatgggaggtcctatgagggtcacggggtggggtggggagcattgaggccactgttgcaggcctggattcactctaggagtgttaaagccagggtctcagcctcctgcagttgtcatctagttaaagtcatgccagcagggcagggctgtgtgtgtctgggtgatgggggatcagatgagaaagtgcgtgccaccctcagcacagtgcatgagaggcgtgaggcacggcggatgctgcgggtcttataaggcctttaacgctcgaggggaagttcctaga

SEQ ID NO: 19626 - DNA, 879 bp, Artificial sequence
  DNA replication origin
aacaaaatccaggaacagttgagctaattattaccagaatctccaagtcacgataaccataaacaatctgatactgctaaaatgactgtggcttcttgcctatactcataaggaaatgctgaattttatagccgttagtgaaaataaagttaaatttttgtttttcattcaagtttatggaccctaggttaagaacccttgccttggttgaagacacagtaaggaacactgtttctgtgaaaatgtggtttgcaaaagctggggttctggggatgcagcaataatccaagcagaccagcccctgtcctcacggggcttcccttctcatggggagacagtgcagaagttaattaagtcaaacctgaatttcattaaatggtgtaagtgctaaggagaaaaataaaatgaaagggagaggggaaggtatatgtgtggtgtttggggtgggggttagttttagacaggcaggcaaggctgcctccctgggccgggggtgagacgtgagttggggagcacagcaggtgcttttgcagaagagagctccagggagagggaacagcaagcgcagagcctcaagcaggagcttctgcagcagcagagggagggaggtgtggcagggtagtggctgaccctcagtgtccttgtggcccttggaaggtctgtggagggggtatgacaagagtggtattcctttcattttaagggcccctctggttatggtgtcaagacacagagagatagagctgcagggcaagggcaggagtgaggggaccagttaggaggctgccaccatccgccagggacgcactgatgtggctcagagcagggtggcaggggtggcatctgctgagactcctgagatccaactgaaagagacaa

SEQ ID NO: 19627 - DNA, 1078 bp, Artificial sequence
  DNA replication origin
aggacataacccctgcccagcccaccaccccctcctgtctctggctcagagtcatcctgaggggcaggaaggccagtgcatctctctctggggatgatgccaaaggctgagaggacagagcacaggagacaggctgcccaggccccggcttgctgagggatgggagaggcccacgggaagtagggctggcctgtcaggggaccctcggcctgtgtgaggacccaagggctatgcaggggaccctcagctgtgtggggaaccaggggctgtggggggaccctcagctatgtggggaaccaggggctatgggggaccctcggtctgtgtggggaaccaggggttatggcaggggaccctcagctgtggggggaccagaggctgtgtaggggacctgcagcctgtgtggggaactaggagctgtggggggaccctcagctgtgtggggacccagggggctatggggggaccctcagctgtgtggggacccagggggctgtggggggaccctcagctgtgtggggacccaggggactgtgggggctccaaggcagggaagcactgctacaaccaagtcccccacagggaacctcagacacgaacaaatcaaggcaggagggccatgctttggccaagagagttcctaattcaacagaagcttttgcctccttgatgacctgggctccacggatcggacgtgtgagaacaaccctcagtcacccctcccgcgacagtgcatctcctacgtgatgcatgccgagtgccaggcgccagccagcttcattcgggccccaagggctgcagtgaggaggagcccagagaatccccaaaagctggactggctgtctgaaagtgggacagcaatcgtgccgggaacaagatccctgagtctacaactgggatcagatgggtgggacaaccacaggccgtagggggccgggtcgacaagggaaagagcctggggttccggggcgcacagagacccctagtttgagcagagggcaggatgatttagacagcactgcccagctaaaggacagaggctcaggacaccccaaatctagacaagccttccctgggt

SEQ ID NO: 19628 - DNA, 989 bp, Artificial sequence
  DNA replication origin
ggctgggaggcaggggagggagaagccatcgcggcctagcccagctccgagggtgaccccatcgggagggtggccgagggaggggggcgcatcgcctcccctcgagcgtggtgcacctgctgccagccaggcctgcagcgcccggggcgatttggcgccaaagccgcgggcgccgcgtaaccccagcctctgcttgtccctcgcgcaggccatcgtctacgagggccaggacaagaacccggagatgtgccgtgtgctgctgacccacgagatcatgtgcaggtgagcggcgggcggcgggcggcgggggcgcgggctgcctcggcgccagctgcgtctacaaaggacgccgcgtccaggcgccgccaccccgcccagctccgggaagggcatcgattgaaatgtaatcggcccgaggccgcgcgccgggccgcggaggagcccgcgctccttccccccagcgctgacgatcaacgcgacccgctgctcagcagagcggattaatatgtgggccgtgtcgttgcagtgtagtcaaaaatgaaaacaggtctgggtgatgcatccgtccgcggtgccggaggagtcagggatcactcggaatcattttactacttccttctcaggcgctcgcatcctgagatatacaattgtctgttattgataaaaaggaaactcttttgtacttactatagcgcgcgtgtatgtgagaattggattgtgattctgtcagttaacctcttccctagagcagcgatgcagcgttcgtgtcgttgttagatagcgtgcccgttacttgagatctctgtcagaagagcaatttcccacctgttttttctaactaccacaagagtttcacccctacatggcaaataaaaatgcatcattgactttgtatgtgtggcatgtgaaatatagttgcaaggaatagcaaggaaagcgttgcaggcttccaggctacagtagcaggccgcatactctgaggggcatac

SEQ ID NO: 19629 - DNA, 1415 bp, Artificial sequence
  DNA replication origin
cagggccggccggtcccggtctgagccccgccaggtaccccaagcttcctaccccggcggaggccgccgagtgccgggcagggaatcacgtcggaggcagggtctgccagatgctccctctcccccggtggccgcggcagaccccggcccctggcctgttcttacgcacagcgagtgacaaagaaggctccggtctctccgggccgacgggaagcgcgcccggcctctccggcgacccggagccgggtgtctggctgcgcgacctgcgcggtggccagaccgccctggagccaactgctccaaaaaccaagcggacgccgcgggcgctgtggcccggccctcggagccgccggacccgggtgagcgcgcggcgcgcggcttcccgacctggtttctaggaatcgggagggcagccgggcgcgggcagactgtgggccccgcggcccagctcctgtagccgggactccgcgcccaggagcgcggcccgcccaaaggacgtctgcgcgacacggagcagagacccaggggacgaccaggaactgtcctaggcacttccctgccaagagaaatcaggcccttttgattaaaagaaaaaaaaaaaaaagattgcagggcgcaagtgtgttgcagggcagcctcctcccgccgggtctggggcagcactcccttttcccgtgaattggcagcgtgtgtacgttaatattttaattaatcgggaaagtcgaagtccgattcacgttgtctggggacccccacgcctcttggaaggagtgagaaaaaagatgtgttggaaagagatctattttgctggtgttgggggttaatgactattgccaaagataagtgaattatcaaagctgttgcgccagtcccatctcaaaatccattacggtgccggccgtctaattaaatacgtaagtataataaaatcatattttatgactatttgagggtaatgagattagtctttagaagcgatagccacatattaaagatgccactgtctatagaatgttaataaccttaaatcaaagtgtatggaaactgttcatgataaattaaaagaaaatttctgtattcctaataagcccagcgctttccactctcggcagacactggtgtaggagggaacactttcttcgtggagaaacaacgcaaaataaagttggccatcgagggagggtggggttgagaaacgctttgtctctgcgtgtttagctgcttcgggggctcacgcagggcaagcggccaggcaagcgttattgtcagaatatgcaaagtgccttttcgggaaagatgaagttggaaataggaaacaatgcttcctttatagcacacttcctaaaatgtccagcctgtgctagaggtgccccttccttgcgctaacgaaagtatcatgcttaaaatcatttaca

SEQ ID NO: 19630 - DNA, 1475 bp, Artificial sequence
  DNA replication origin
cccgcggctagcatctccgcgccgagagggcgaaggcgccctctctggtcctgagtaacccacccaaacctggccgggctccctttgtgcgcgactgaggttgggatggcccttacttctcggttttccccggcccacggacgagcgtgaccccgtggcgcaagacgaacttggagcgctctcagaggccgcgtcaccacccgtggtgggcaggctttgccagtgcgtgctgtttccaccctatcccgcagttcccgggattttctaggtgcgtctctcctggcccctctgacctccttcccactggggcccagggtcagtttggctctctcttttcctgttctttccccggcccctgcctgtgcttggcgcccgattctgaccccaggcttgagcagggctagaggcccggaggccggcacggtctgagcgtgacccccgggcgcggaggacgttggggcgggccgcgcctgcagctcagcactggcggcgggcacacgaactggcggcttttcgtgcattggctttcaccctttcccgaaggctccaagtgacatggccaggcagcttgggcctgtggccatgggccctccgatggtgcggcgtcgggtcgagcccgcgcaccccctgatactccaggggacttggcctccaggaactctcggcccaggcttctcaacgccggaaatgcagtttattactctttggaaggatgttagggaggtaggcgggtgccctgggctaagcctcgatcaagaagggggcattcgcccggtgccctgggcgctgggccctgggcccgtgcagacaccgcggcaggcctcgcgccctgggattccaacttggccgaagtttctgggtgggggtggcttggagtccggtaccagcccaggtccccgtctctgggccttgcaccaggcaccagtggaggatctgagactgaggaggggtaaggggaaagtttcctctctacgcgcgccgaacagcccccttcacgggtgggtagtgggtaccggcggaggacgctggcacgcgcggtggctcgggcactgagtggctgggcaaggaggccagggtgagcctaggtgcggctcctgggaggttagagcccccgctagacttcagccaggttttttgatggtgccacggatcagtggcccaagcgccgccagggccttctgccctgcgcccggcacgccgctcccagagccgggcgccaggggcggcgggcgctgtctctttaaggtcactgcctgctccggcacgacatggggaggacagctgggcactggccatctgactgactccggcttgacatctgggagcccactggtgtgtggcacgcgaagcgcttgatgccgctatttaaatgcaaatgtgagggggctcattgaagcctctccccgtaaatccgcacaaaaggaatacttcccaccctccgaggaggaggcggcggcggcagctcgagggccacc

SEQ ID NO: 19631 - DNA, 1010 bp, Artificial sequence
  DNA replication origin
gagggcgggaggtgggaacgtgggaaggcgcggggccgcccacctcccggcccgcagccggcgccgccgacacctcgcggccggggcgcccgcgatgtccgtcgagtgagcggcacaggtaagcgcgctctcgatcccgtcgggggctccccgccccagcccgcggcccccaggcggccgcggcgccagcaaagttgaacttcgcgcgtggcgggccggacactgaacgctgggggccgggttgccggggccccggagccgggtgcgctcctctcgcctacgggagcgcgggcggggctgcggcggaggcgcggggtgggactgtggaggcaggagcccctgaccatgagctgcgcccaggcctggcctcgcagtgaacttttgcgccgcgccctggcagcgtcttggttcctggcgagcactgcctgggaggcctccgttggcctctgctcgcggccttcccggcgggcctgcggggaggcgatcgcgtgccagggattctcggcgcgggggaggcgcgtaccggcacgggcgaagatccggggttccgaggatttagctgaaggaccccgcgtttttcactctccgtcttcccccagtacaaacgccagacccttggagagagggatggggaaggtcgaagcgcctagatgcctggacgacaacgcaggaagcaattaaaactcctcctttcggattaacaaccaaaaattgatccatgtgtcaggaataccattgatttatgaaaggtgcttatttctctggtatggagaattttatgttctccaggtgaaaccgagttcacccagctccagcgtagattgatgttttaataaaaataaataaaggggaaaagctcgcctggtctttggggacatcaagtctcaaatcgcagagttagactaacaaatcaaattgcattatctttacatttcatatcttttaatcttgtacctaaaaatcgcaggcaggagagcgccttcatttcgaaagttttaatatagtgctta

SEQ ID NO: 19632 - DNA, 924 bp, Artificial sequence
  DNA replication origin
ggccgcctgggggccgcgggctggggcggggagcccccgacgggatcgagagcgcgcttacctgtgccgctcactcgacggacatcgcgggcgccccggccgcgaggtgtcggcggcgccggctgcgggccgggaggtgggcggccccgcgccttcccacgttcccacctcccgccctcccgggagagcccacgggcccggccgcgagcacgccagtgcgcacgcgccacactgccttccaccgcgggcggcgggctagggccgagcgggggcgcgtggaggtgcccgtaggcggcccagcggcccgcctgccaccgtgccccggggccgcagctgcgcccagcgctagccacctggaggagaggcctcctgggccacgcgcggggctcctccgcggggaggcccccttgcaaggacctgagcccctctctttcgtcgggggcccgagggtattcgtgcgcctccttggccaaaagagtgcgccaggcctggagtggggcaccgctgctgtggacaccacttcgcagggcatctggaaacgggtcccaggccctgggcggcttgaagccgtctgtgtggatgagcgcacactcccgtgggcaggagatggctggggttctcccggtcctttttggtaaagtggatgagaggacatcttcctggatacggataacttaatgcaaagtactctactgggccccgtgacggctaaaatgaaatgggaagaggcaagagatcgcccacgaaaacagagaaagcccggggttctccaataaagccacgctatggaagaaaaaacaaaaacaaaaacaaaaaaacgcctggatggctcctagatgagctttgcgtttagagcaatctcagtgaaggagggcttcggccgcccttcagaggccaggcaagcctgaccactccactcccatt

SEQ ID NO: 19633 - DNA, 907 bp, Artificial sequence
  DNA replication origin
tgtccagggtgagagacaaacgcgtgacgtgcccatgcaccctgtggatagcattaaatggccacgctgatgggcacggggtgcatctcagaagcgttttgtgaaccatcctgtctccaatttgcactttttgtgtacttttagaaggcagcttgtaaactgcttccaatgaaagtaaaagaaaacaaacttccagccatctcttacacctgcgtttcatgaatgtctgctgacctcagcaggagcaagagtttctcaagtgggagtgagttggtcttaggggatgagtgtgcacagcaggctcttgtgaggctgtttccatcatctgcaggagacgggcacaggcagaagatgggcacaggcagaagatgggcacaggcaggagatgggcacaggcaggagatgggtacaggcaggagacaggtacaggcaggagacgggcacaggcaggagacagatacaggcaggagacgggcacaggcaggagatgggcacaggcaggagatgggcacaggcaggagatgggcacaggcaggagacgggcacaggcagcagacaggtacaggcaggagacaggcacaggcaggagacgggtacaggcaggagacgggtacaggcaggagacaggcacaggcaggagacgggcacaggcaggagacgggcacaggcaggagacagatacaggcaggagacgggcacaggcaggagacagatacaggcaggagacaggcacaggcaggagacgggtacaggcaggagacaggcacaggcaggagacaggcacaggcaggagatgggcacgggcaggagacgagtacaggtaggagatgggcacaggcaggagacaggcacaagcagaaggcagctataagtgtgccgggggcagaggcttgaagcggggtgggat

SEQ ID NO: 19634 - DNA, 1573 bp, Artificial sequence
  DNA replication origin
ctgtggaggtgaacaaaacccaccccatggagaaagtttaggacctgacccagcgtgggtctggctttcctgagggcaaggaacagctttgtcccagtactggccacctggcgcctccaaatggctttttcttgcagggcaggcaggctctgggcaggcacctcgccaggcattgcgccctctgcctgcaggtcggcggggcctgctcttcccggctcctgaaatgcatttccttcccgactccgaggtcctgcttccagaacctttggcaacagaaaaggaaacccgcacaggcgtcaaatgtcttcggactgaaactagcaggtgacgaaccatacagccccaactctgctgccccgcccacagtgccccgcagacagtggcagcaacgccccgccccgcagcactgcagctgcacccccaggacgccccccgcgagcgccacgccccaaaaccgcgaggcgcccctgggagctgcctccagaccttcgttccgggaacgtttctgttctctggcattttcgtttgaagcagagatgtcaaaaaataaatgcagccaaggtgtcaataggctgccatggtatgtccagccacaccccacacaactggacctgaagtcacgactcagaaagtcacagccacgtcccgccacgcgggcgggaaaacgtggaagcaaatgcgattgcctcgactcgaggctcagctaaggagcagtcaggtccgtgtcacctgtggcttccactcccaggaagtctgatggctccggtcgtggctgttgtggggaatccgtcgtgtggagaacgtgcctgccacgtgcgggggagaaaggagccaccttccgagtacgcgacctcacctgccgggcgtgaggtgctggactgagaccagggtggggctctgggcatgggaggtggggctgggcgtggggcacgtggcacagagggatgcgcgtggtagggctcagggcagacggaacgtggaacagggagtggctcagggcatggggatggggcggggcgtgggacggggcgtggcgtggggcacaggaaggggcagggcacgaggagtggggcgagaggtgctaagtggggcctgagtggggcgcggggcgtggcgcggagtggggtggagcgggtggggcgaggctcggcgtgggacacgagggacgggacgcgggggcacggcaatgggtggcgcagggcgcactctcgggctccctgcaggtgggcagccccacctgtgcacgccgctcccccgcccagcgcctcccccgggacctgctccagaagcgccagttgcgggaccccacacggaaggcagtcttcggtggttctcactgcaattcctcttaattatgtgtgacataaaaagaccacctacagacgagacaatgctgccgtaagagtctcggggttactgcagggaattcttcataaccgaagtgtgttttccccgaggagttatgctaccatttgatttaatttttaatttttacattttaatcaaaaatagatcaaatggtggtggtctctccggggaaacacacttcagataggaagccggccatgctcct

SEQ ID NO: 19635 - DNA, 1601 bp, Artificial sequence
  DNA replication origin
taggtacagtaaaagtctatgatgacaaggtgagggggtccaaagattcagctgtgtaacctcaagtgtcctatggggctgacgcaggctggggcagcctcctcaaagctggtctgggcgtgagacccagcttgcacctcacgtgtcctggctgtgtcatctgggggcagtaactatcccggggatgcttctgggtgtgggggactgtgcttggtgctcccggctcccatggctaccttctccagagatcgccctggtggttcaagctgcctcacctggaggtacctggagtcaccctccatgattgggtggcccaggggtgaccgctgtcctgtgtggggtacatggacccccacttctttgcctcaaggagctccatagagcagcatgtgacccccatcgggctcccgtccaggttcctaacccagggcaaaagtagagaagctattttatacaggccggaaggatgtatggtggtggcctcctgaggtgggggcgggagagggagatgagactcttaactaggtgggggcgagagagggagatgagactcttaactaggtgggggcgggagagggagatgagactcttaatgaggcaggggtaggagagggagatgagactcttaatgaggcgggggtaggagagggagatgagactcttaactaggtgggggcgggagagggagatgagactcttaactaggtgggggcgggagagggagatgagactcttaatgaggcaggggtaggagagggagatgagactcttaatgaggcgggggtaggagagggagatgagactcttaactaggtgggggcgggagagggagatgagactcttaactaggtgggggcgagagagggagatgagactcttaactaggtgggggcgagagagggagatgagactcttaactaggtgggggcgggagagggagatgagactcttaactaggtgggggcgggagagggagatgagactcttaactaggtgggggcgagagagggagatgagactcttaactaggtgggggcgggagagggagatgagactcttaactaggtgggggcgggagagggagatgagactcttaatgaggcaggggtaggagagggagatgagactcttaatgaggcgggggtaggagagggagatgagactcttaatgaggcgggggcgggagagggagatgagactcttaactaggtgggggcgggagagggagatgagactcttaactaggtgggggcgggagagggagatgagactcttaactaggtgggggcgggagagggagatgagactcttaatgaggcgggggtaggagagggagatgagactcttaatgaggcgggggtaggagagggagatgagactcttaatgaggcgggggtaggagagggagatgagactcaacagccactgaaggaaggtgagcacaacggtcaccgtttgctaagtatcacaaaagcaaaagcaagtatgaccaagtgttaacagttaattctggtgagaacatggatgttcgctatgtattgtagttttccattttttgtgtgtttcaaacatgaaccttgaataaatggcaagttggctta

SEQ ID NO: 19636 - DNA, 1767 bp, Artificial sequence
  DNA replication origin
ggcttttaaacaccacagtagtgctgcccaagaaaattcaagggccacgaatgaaagttgcctatgaaattagacatttctcaggagccaaaggtaaaagagaccaatttaaataatatatttcagaaaaccgaatatatccaaatatcctcatttcaacatgtaatcaatataaaaagtatgaatgatatgctacttttctcgtacgaagtctttgcaatccagtgagcccagtcctctggcagctgttagcatggactgagtacctcctatgtgtctgactctgatccaggcactgagacacagatcagctcctgccctttaagaacacaggccaatggaggacaagcacagttctacaacatgagacaggccacggtagaagcaagcaaaggaggcctgggaacacctggctagtagggaaggctctgtgggggcttggcctcaaagcccagggacagcagggggaccagtcagaaggagccccaagtgtctgggtgggagcgatggtgttccctgagatgggaaccaagaggagaggcactttggagggaaggcccagtgtggtttggggatatccaataaaagatggcccctcctcaaagttagtggatgctaggctctgggatgcaggggagggttctgggcttgctattgaggtttccctggaggttgatgtcactgggggcatggagattactcaggccagaaggtgtgtgggaagcatggggtgtggggtacagagtacaccacatggagagccaacatcagggggattcccaagggagaaagacaagccagggatcatccaaggaggcaagacgggaggagtgcagggatctgtggacccacccagccccttctgttctgaggttacaatgggtgatggctctgtggggctgcaatgagtggcggcacgcgcggagggccaggggaggagggacatgctgtgggctccgggttcaggtcccaggactgaattggaagcaccctgtctgtgttgaagttcaagatctaccacttctgttcccagacctcccagttcttcctcacctttatgcaatttcatttttgataatttcagcttcctaaatgtacacatctgacttcactttcactcacatgtctcacccccacccctccaccggccccttctattacagacccaggagacacaggaagtgcaaggaaggtctggagccccaaaagccaggagcctcaggagtcaggtgtcctgacagccaggaaccctgacacccaggagccctggcacccaggaaccccaacagccagaagcctctaccaccaggagccctgacagcaaggaaccccgacacccaggagcccctactacagccaggaagccaggaaccctaacaccaggagccctgacacccagtcaccccgacagccaggaagccaacagcaagaagcctctaccaccaggagccctgacagcaaggaaccccgacacccaggagcccctgctatagccaggaaccctaacacccaggagcccctacagtcaggaaccccgacacccaggggtcccgacagccaggaaccccgacacccaggggtcccgacagccaggggccattacggccaggagccccgacagccagggacctcgacggccagaatccactacatccagaagcccttataaccgggaacctccatagccaggagcccctacagccaggagccccttcagccagggagccccgaaagccaggagccccgacagccaggaaccataacagc

SEQ ID NO: 19637 - DNA, 1243 bp, Artificial sequence
  DNA replication origin
cggcgagcggtaggagtgaggagccggagcgggagcggccgcgagaccgggccggtgtggggcggcgggtggcccagcctggcttcttggtgcccggctcccttcggcctcgggggaccgggcccggcgccacccgtagactcccccgagcctccgcgtgagtggcccgagccgcaggttccccgccccggaacagcgagcagggcgcgaggctcgcctggaagccccggccccagccctggctccgaccccgacggctgtccaagcccgggggacgcgaccttcccggcctctggcctgggcggccccgccgcgggacggaggcggtggtgactcagccgtgccgcagtggcggggcgggggacggggcggcgccgagaccccggccctccgcgccacggagcgggacccacggctgcgggctccacctttcctgtgcccgccgggagggagcggcaggctcggcgtcggcccattgctcttcagcctcccttcaggaacgcccctgtcgcaggaagagcggcgagggaaggccccgttgcattagctaggcctggctgccttttgaagtcagcctttaaagtttgttggacagcaggtagcctcagtcttcagacttaacctgttgccggagacagagatttcctgttccatgaactggtgtagtgagagtctgttcagatttggcgccggtgtccaggtcttcaatccctgggaagactacaaaaggagatccagaggaatgcatagaaagcgttttctgggtggactagaagctctgaactgcaagcatgcttacgagtaaatgcttactagcgtgcgtgcctgcagggaaaggtctgcacgtggactctccgtgataataccacctcacattgtagactactccaaggactgagttgttctcttagttgtattattagcggttgttatgggaactcttatgtcggattgcctgggatccagtcccaccgcagccactcagtagccatgtaacccctgggcacgtttcatgcccaagcctcagtttcccgacggtgacatagattagcacctgttagtacctcagggttgttgtgagggttaaatgagatgacgtatgtaaaatacaaataatacaatgcctagtatgcaggaagcactcagtagatgttggcacttagtatttcagtaggaagtagaatggttcatggaattcacaggcaaaaagctttgttttgttttgtttttgagacagggtctg

SEQ ID NO: 19638 - DNA, 1245 bp, Artificial sequence
  DNA replication origin
gcccggagcctgagcagcccttcccggcctggacccccgatcccacccctgtgtgccccagggccccggggaagggacagaaacagggtgggaagcaagaggggcaaacgtgagcggggcgatctgtcccctgaagctgccaagacccaggactttctaaattcacaaggcagccttcccggtcactggtaggtgtatttgtcaaggtaagaggacagaacagtttaatgtttgttcgcttgacttaaaacttccagtatttgcggccggacgcggtggctcacgcctgtaatcccagcactttgggaggccgaggcgggcagatctcgaggtcagaaaatcgagaccatcctggctaacagggtgaaacccggtctctactgaaaatacaaaaaattagccgggcgtggtggcgggcgcctgtagtctcagctactcgggaggctgaggcaggagaatggcgtgaacccgggaggcggagcttccggtaagccgagatcgcgccactgcactccagcctgggcgacagagcgagactctgtctcaaaaaaaacaaaacaaaacaaaacaaaaaacttagtgtttgcacacggcatgggaggatttctatctgaactgctgctcccagggtgcccacggcgacctcaccctctggagacccaggtaacggatccgccgtaagaacccagcggggtgggtgctcccgcccgcgtcagacctgccttcagggagaatccgtcccccaccccaggcctaagcacagcgcttgctgtgatccgggagaagcaggatccggagcctggtaatgaaccctggctgagccactcgccccttggataagagctttggcaaattcctgagcttgtttccccaccaacaaaaataacccccaaaacgccatcgtgctggggggccctcgggttctaaataggcaccgcgcttcgggcagggcatggccttcacggtgggctgctcctgtggtgccagcgttctctctccttctggcaaagccggtcctgggcacctcctcaccctctctgcctaccattaggaccaatatgggcccatccacagcccagcactccaccctgcacccagtgctgtccctggacacccagaggaacatgtctccctcccaagccacaggagccaattcactgactcctcacacctcataggggttaagagggcaaactgcagccaggaggcccagagtcaaatcccaggtccaacaggtactatgac

SEQ ID NO: 19639 - DNA, 1333 bp, Artificial sequence
  DNA replication origin
cgggggtctgtctggttggggtccgagcggcctcagggtgggcgctgcatcctggcccggggtgcacggttgtgcgggggacacacttgtcccgtcctgcccgagctgcgacctgggccagagaagggagcggagctggcatagccccagccccagctcactggggcgccttgcccgcctccccaagcctgggccggcttggccgctgcagccaccgggcctgggccccagcactcgagccgcagggcgtcgcaggcctggcctcgcttccccagagtcggccctccccaggaattttttgttccttagccctagtgaaccttctgcgtcccctcgaagaggggagccaagggaccttggggacagttgaggttcgggtttttaaaacaccaataggctttatttttagaacagttctacatttacagaaaaaatgagcagctagtccggagttcttattacaacccctgctgcctccccccgtgaacatcttgcacaggcgacgtgcatttgttctaatgaacgaacaaatagtgacacgttactattagctagagtccatacagctgaggtcccctttctgtcccaggatcccaccgggtcgccgtctgctcacgctccttggcggcagcatttctcagactctccttgtctctggtgatcgtgacggtgtgagagtattttgaaggctctttctcgactggggttttctcatggtcaggttggggcagcggtgttttgggaggaagcccgcagaggcaaggcgccgcccccctcccatcacatcgaggctacacgctgctgacacgccttctggctgcggcgctgaccttggtcacctcgcacgtctccaccccagttctgctttctccctccttctatagggtgtcgttggaagtccctgtgtgcagcctacgctgaatgagtgtccctgagggggaggagcccataaattgctgggttctgcgtggagacttctgcatattcatctcttttctccatttttttttcttttggagacagggtctctctctgtcacccaggctggagtgcagtggtgcgaacacagctcattacagcctcgaccttctgggctcaagcgatcctcccacctcagcctcccaagtagctgggaccacagccatcatcacacctggctaatttctttgtattttttgtacagacggggttttgctatgttgcccaggctggtcttgaactcctgatcctccaactttggcctcacaaaatgctgggattacagacatgagccactgcacacagccttctctgcatttactcatctatttgatcattctgtcagtgtagactc

SEQ ID NO: 19640 - DNA, 1247 bp, Artificial sequence
  DNA replication origin
aggagggaggaaagggcagccagacgtcctagtagcatgaagggacagagagatagtgaggcagagatatatatagacagaaacagtgtgatacagagacagagacactgaggcagagatatagacagacagagagacacagaaagagactgagagagagaaagagacagagacagagagaggggcagcgaggctcctgagaaactcttcccttagtcagagggagagcatagggggaaggcgggcgggggagggggaggagtgtgagggaggcagtggaaggggtgggctaggcagcatccaggcaggggtgaggaggtcctgagacagccgggcagggcaagtgcacctgctgtcactcaggggccacttctgccgccatggtgaggagtcctgcggacccagcctgggaaggcctgggaaggcctgggagatgccactgcaggctacaggaggcgtgacctgcggtgtggtttaaaaagacccacccgccgacccgggagagctgggtgggagggaaggtggctgtgggtgaaagggcaggagggagccttcggtgatggctgttctgcatctggctgtgggtgcttgtggtggaattgtctagaattcaacgtgcccacacacacagaccagtgcacaaaaaactgaagccagaacaaggctcgtggtgtattggtgggatgtcccggctgtgctactgcactccaattttgcaagattctcctgctgtggggaacagggcagggtacacagggtctctctgtaccatccctcgccattgcctgtgagcccataactctctcaaaatgtattttaagcatcccatcactggcacatggagaagaggatgtaacagtctacgtggatgcctggagatgaggcagctctgcaggagaccaggacctgggcgggaagggcatgtggaaaaggggtcaagggtaacactgggacccatggggactgtgggcagatgggcagagagagtggggctttggagaagcagggacagggtggctgccaggggctttcacaggcaagaagagagagggaaacaggtttccacccagggtgcccagtcccagggctgtgtcgccccagactccagctgaattcccccaaaatagcaaggttttgtgtggaaattaaccgaacttataactttgacaggtcatttgagtgtgggaacaaggctagtttgccaaaatgattcttccctctttaattaaaatcttttatgaactgcc

SEQ ID NO: 19641 - DNA, 888 bp, Artificial sequence
  DNA replication origin
acatcttgtggagagccaggatctgagcccagatgggcgccagggcaggagctctaagcttggagtctccagcctccaacagagcgtggactgtcccggctgcctaggagagactccaaggatgctcacacagcacctcagctgcagaaggttgcagggagcatgtttgtgcagcctctgctctggaatggctgtcctccactacaggatcctgtgggcatccatggacacagcaggccacagtgtggcaccaaggcctgagctcgcctgccacggcccgtggtgggcatccagcctggcccctgccaccccatgacctgcggggcatccctgctctcctggtagcagcagtacagtgtgggctgagcaccagtcaggtctgacaggctgcccctctccaggtggagggggtattccctgtaccccatattccctgtctgccccaaatcctctgggtcagcgggaatcaggggtttgatggagcattcttctctaggcagggcctcatcgcagtgtgagcagagagaatctttcctttattaggatacaaactgggagctgatttcttctactgcttgtggctgagtcccttgacgtaaaaattattctgttgaagggggatgatgctgctaccagcgtcaacactgacaaccataacggggaatgattttccagctcaattgagtaggtattctgcagagtagaagccacagaggagcatggcctggtaggggcatcacctggtggaggagcatcgcccggtggaggaacattggctggtgagggagcatcatctgaggggggagcagcacctggcaggggagtatcatgtagtggaggagcatcacctggtggaggaacatcacctgggggggagcataacctggc

SEQ ID NO: 19642 - DNA, 825 bp, Artificial sequence
  DNA replication origin
gcctagtggggagcagcacctggggggagcagcacctgctaggggagcctcacctggtgggggagcatcatgtggtgggggagcatcacctggggggtagcataaccttggggggagcatcgcctgggggggagcatcacctggtgggggagcatcacttggggggagcatcacttgtgggggagcatcacctggggggtagcataaccttggggggagcatcgcctgggggggagcatcacctggtggaggagcatcacctggggggagcatcacttgtgggggagcatcgcctggggggtagcataaccttggggggagcatcgcctgggggggagcatcacctggggggggagcatcacctgggggggagcatcacctgggggggagcatcacttgtgggggagcatcacctgggggggagcatcgcctgggggggagcatcacctggtggaggagcatcacctggggggagcatcacttgtgggggagcatcacctggtggggaagcatcacctggtggaggagcatcaactgggggggagcatcacctggccaaggtgccagattctgtggctgtcctttaaatccaagtgtagtggcatatccttccccctaagcacaaaagtcaacaacatagtgacaagttgctcattaagaattttgttgcaggttgggcgtggtcgctcacacctgtaatcccagcactttggaaggttgaggtgggcagatcacctgaggtcaggagttcgagaccagcctcgtcaacatagtgaaaaactgtctctactaaagtacaaaaattagccaggtgaggtggcatgc

SEQ ID NO: 19643 - DNA, 2395 bp, Artificial sequence
  DNA replication origin
tccatttaaagctagcactccccttgcttgaaaaccacacgtggacgcgcagcctgcagggcagcgcagcctccctcagagtttggcctcccctcccctcctgagcccccaggggcccggtaccctgtgggcactgcaggaccagccagcttgtgctgccaggagctgggagaggccacatgggactggaacttgggggtggcatataggaaggtgggagaggagaatctgttgccatgggagcttcggggtatgaggttcatgccctggcaggccccagtgctcggaaggctcctgcaggctcaggggcgatggcctggctgagggaagaagcgccagagggtccagagaagagggggccagaggctcagagacatggatgtccacaggaggtcacgtgtatgctctgcggggagcctgctggtgagggctccagcgcccctggggagcccagcgctggcctcttctgcaggccaaagcagtgccatcatagagcagggctcaccatttggggtgggcggggcaggatgtcactgtgataggtacacagagaaaggacacggttttgcaatgggtggcagcgaggccctgacccggggggcactgtggggagatttgaaagggggacatgtggccgcaggagagagcgggccgcccgctgggcattgctcagtctctatggccacgagaaatgaggaggctgggggtcaccagcaggacacggtcacagtcgtgggccacgtttctgggcctgagccagttttccagctggaacccactgtctgaggaggcctgttctgcaggaggggagaggtcccgcttggcttacacccctagcctgggcttagagaacaggggggcctggcccaggacagaaccttggggagcccctgggctgagctgggagtttgcatagcagccccatggatgtccgcggaggcctcaaggtccttcatgagatggctctggtcagtggacggggcacatggtgagtacccggagggaaggaggcagggcctccatggctggggagactcaggttgtcttttcttatctgggaacaccaataccagggggagaggagggcagagcctccagagggaggccgaatgtgagccaagggcagtggctgtgatacggactgcagcgggttgctgcctcaggcctgggggacacatggagaggagtccatggggtgatgaccagttctgaggaaaaagacccagtgaatagagggacccactgtcccagtgtgccgagaccgaggaagtgcctgagacatgggaatgttcgtcctcaagccaggaaagtcctgggtaagacaggcccagtgggtcacctagttggggaagagggggacatggaggtgaggagggacctgaggaggtgaggagggatctgaggaagtgaggggagatctggggagctgaggggggatgtggggaggtgaggagagatctgaggaggtcaggaaagatctgaggaggttaggagggatcttaggacgtgaggagagatcaggggagctgaggggggatctgaggaggtgaggagaaatcttaggaggtgagggggaatctgaggaggtgagggggatctgaggaggtgaggggggatcttaggaggtttgggaagatctggggaggtgagggtgaatttgaggaggagagggtggatctgaggagatgggggggatctgaggaggtgaggggggatctggggaggtgagggtgaatttgaggaggagagggtggatctgagggggtgagggggtatctgaggaggtgaggggggatctgaggaggtgaggggggatctgaggaggtgaggggggatctggggaggtgagggtgaatttgaggaggagagggtggatctgaggaggtgaggagggatctgaggaggtgaggggggatcttaggaggtttgggaagatctggggaggtgagggtgattttgaggagatgacaggggaactggcgaggtgaagggagatagtgaggctcagcttgactgtggctgcttccagatctttttaagctgggtgtaattgctcatgactgtaatcccagcactttgggaggccaaggtgagtgaatcacttgagcccaggagtttgagagcagtctggacaacataacgagatcccgtctctacaaaaaacaaacaaaaattagctgggtgtggtcccagctcctcaggaggctgaggtgggaggatggcttgagtctgggaggttggggctgcagtgagctgtgattgcaccactgcactccagcctgggagacacagtgagaccctgtctcaaaaaaaccgccaaacccagcaataaaaccaagtcttttttgttttgttttgttttgtttttgagccagagtcttgttctgttgcccag

SEQ ID NO: 19644 - DNA, 1314 bp, Artificial sequence
  DNA replication origin
tgaggcaggggcatggtctgtgagaccagggccatcagctgtgaagatgcctggctacaggcatgctggtccctgtcaccctccccagcactgtcagggctggcaagggcctggggtaggcagagcctaagaacgcccatcctggcagccagggccggcgggatcgggcgggggcgggcgggggcgggcgggggcgggcgggcagtgtagagaaggtgggcagggatggacggagggcaaccagggctggtgagaatggacaggggcaggtggaggcgggaggggcaggtggaggcgggaggggcaggtggaggcgggaggggcaggtggaggcgggaggggcaggcgggcctttcttgagccgatcttctggagcttaaagaaaaaaaaactgcattcatctgctgaatatttttgtgcaattcatacaataagagcattaaaaataaccagtgggaattattttgactttcaagaagccctcttaaaaggcgactgagatgagcgcgtcctcgtgggaggttaacagtaagatcttccatgcattaaaccctgattaagcattaggaatgaatggtaattctcagttctctattggaaacaggttaactgtgcagagtttgaagaaatcagaggtggtcaggtgtttcttccctgcaatcattagcaaccggccacagccaccagcagcctgcgacagtttgtcagtgatgacaaaacagagtggcagcggcttcccaagggacctcagggcactgcacagcagcaagaggacacctggcaccaccgcaccgtgtgtgctgtgcgggcaccgtgcgggctgtgagggcaccgtgcgggctgtgtgtgctgtgcaggcaccgtgcgggctgtgtgggcaccatgtgtgctgtgtgtgctgtgtgggcactgtgcgggctgtgtgggcaccgtgctgtgtgtgctgtgcgggcaccgtgcgggctgtgagggcaccgtgtgtgctgtgtgtgctgtgtgggcaccgtgcgggctgtgagggcaccgtgtgggctgtgcgggcaccgtgtgtgctgtgtgggctgtgcgggcaccgtgtgtgctgtgtgtgctgtgcgggcaccgtgtgtgctgtgcaggctgtgagggtaaaggatgagggcaatttcatgttaagtgtattttaccaccacttaactgatttttgaaaaaaaaaaaagatttggggccgggcgcggtggctctcttagcacttcgggaggccgaggtggggggactgcctgagctcaggagttccagaccagcctgggcaacacagtgaaaccccgtctctaa

SEQ ID NO: 19645 - DNA, 1013 bp, Artificial sequence
  DNA replication origin
tttttttttctttaagctccagaagatcggctcaagaaaggcccgcctgcccctcccgcctccacctgcccctcccgcctccacctgcccctcccgcctccacctgcccctcccgcctccacctgcccctgtccattctcaccagccctggttgccctccgtccatccctgcccaccttctctacactgcccgcccgcccccgcccgcccccgcccgcccccgcccgatcccgccggccctggctgccaggatgggcgttcttaggctctgcctaccccaggcccttgccagccctgacagtgctggggagggtgacagggaccagcatgcctgtagccaggcatcttcacagctgatggccctggtctcacagaccatgcccctgcctcaggttccccgaggacttcccctgggcctgggcctgggcccctgccttgctgctggcaccctgataaaattctgtgtcataaacacaaagtgtttatgaaggcagcatacaagggcacttgttgtgaacacaaacttgggatatttttctgtttcttgtggaggttcactactcagtgtgcaatgagatttatctcatgcgtttgtcctcattttcctgcaaagataattgcgtgtgatgttctctggcatgccgtgtttccctttctgtgttccttgactttgaaaatgcgaaggttttataaataagtacaataaagctgattctgtatagaatgaaaccaaagcctctctttctaattgcatctgttgatcttgtgcacatcttcattaggggttttaggatattggaaagatgcatcaaagttagcaattagagtctcctcatcaaatatgggttgcttggcctttctttgtcaacagctgagggtctggatgcttccagcagacaaatccaggtgctgaccctgcctcctccgggcactcaggtgcgacacgtgtctgcttttcagggtgcactgatttagtctggggccatttcacggcctgggtgttctgggaccca

SEQ ID NO: 19646 - DNA, 1133 bp, Artificial sequence
  DNA replication origin
tcggaactcgaggacgtacagcgggcagccccggcaggccggccctgcaggctgagccagctgagcctcccagcagggcctgcaggcaggagagcgggcaatcccggaaggcagccccggcaggcgggcactgtaggcagcttagagggcaaccccggaaggtgggccttgcaggctgcacagcgggcagccccggcaggcgggccctgcaggcaggacagcgggcagctcagcctggtggtccatgcaggcaggacagcaggcaggccccggggccagctgagcctcccagcagcgcctgcaggcaggagagcgggcaatcccggcaggcggcccctgcagacaggaccgcgggcagcccaggctggcgagccctgaaggcaggacagtggacaggcccggcatgcgggccccggggccagctgagcctcccagccaggcctgaaggacgtacagcgggcagccccggcaggcaggccctctaggcagcatagagggcaaccccggcctgttttccagggacgagttccacgaggaagatggggtgctgggtgatggcccagttgtctttgcaataaattaggcgttccacacttggaagcagaaaataggactcccctctgaaagagcacccttctggcctgaaccttctcactggagcttcagagcagaatcacagaaaggcatagatcctagttttgcatgacccaagcagttattgatcctactccctagaatgcacggtatttgattgataatagctcattcaatagctattaacaactggtgcttttggaaggtttaggccaactttcagaaaggagaggtgagtttgagaagactaggcaggggcctaggaaatgttgcttataggagggagcttgaaggtgtcatctggggtgtaggaatgacctgtcctaccgtagacagtgctccctaaacagtcgtcccattccttcaatctcccctaattgtcccgtgtctgagctgtcttaaacatagtctagcacgaaatttggtatctacagatatgttgatgctccctctgtcctaatagttcttcctggtagttcaggaagtttgccgaggtatttctacgttagatggagcaattggatttgagaagttattta

SEQ ID NO: 19647 - DNA, 957 bp, Artificial sequence
  DNA replication origin
tatcaccctcattcccttataatcatggaagggtatggggaggcctcccaaaaggcatcccattttagcagacctggttatgtacttcttcttctcagagctctcgcagagcattctgccagcctccagtttctctaaattgtccactttcctgtcccctccagctctccccgctgccctggccatttccaatttcagtcgttacgagagtctgagagggcccggctatggtcatgggccggaacacagctgcgtttctgcaagtctgtttctaaaatcccctgaactggactcattttgctgcaattttggatttgggtcccatttgctctgatggtttggcttctgggatggtcagaagcaatcatttcgcccatttctttcactctctctaattttcttctgattcccgatatcttctctgatttgtactcagggctgctctgctcttggactgcagtgcctgatgggggaagggggcgggcaggtggggaaggaggcgggcaggtggggaaggaggcgggcaggtgaggaaggaggcgggcaggtgaggaaggaggcgggcaggtggggaaggaggcgggcaggtggggaaggcctgcagggctggagtttagtgctctaaggtctcagctcctcggaaacccatgggtctgggaattctttcttttattgtaccatgaagttctgcaaggacccagggctgaaaatagacacagtagtttttccttgaaagaggaggctgagtcttcaacggcaattctgggtggatgcaccctgtgggctcagtgtcaggcccagaggaggcagaggctggggatgcaggatggggatgaagacgtaagacgtggcaggggaagtttaaagaccacaggatctgcaatctccctcgctcggcccatgagtccttcaagcaagttccttcagagccaggacacctcacctgggcagagctct

SEQ ID NO: 19648 - DNA, 823 bp, Artificial sequence
  DNA replication origin
agcccaggactccgccatggggcagggcaggcagggagccacagcaggaaagctccaggacttctgttgatccgtatatgagatacagaggtattgttagggcagagatagagaggtgctcatatttgtgatggagtggagggcaggtgacagtctaaaggaaggggcaggcagaggggtcagctgcacaggactaggacatacctgcagcacaggtgcagactgcagcaccaggggcggggaccacagcacaggtggggatctcagaacaggtggggaactcaggacaggcggggatctcaggacaggtggagagctcagaacagctgggggcttcagggcaggtggggagctcagggcaggtggagagctcagagcaggtggggacctcaggacaggtggggatctcagaacaggtggagagctcagaacaggtgggggcttcagggcaggtggggagctcagaacaagtgggggcctcagggcaggtggggagctcagagcaggtggggacctcaggccaggtggggatctcaggacaagtggggagctcagcgcaggtggggagcttagggtacgtggagagctcagaaaaagtggggacctcaggacaggtggggagctcagcttgttggggagctcagggcaggtggagagctcaggataggtgaagtcaggacaggttggggaccacagcacaggtggggattttaggacaggtggggaccttagcacaggtgaaccacttattcagacctgcctccaacaaaccctggcctcctcccttgccttttcttcccacaggccccatttccagcactgt

SEQ ID NO: 19649 - DNA, 1104 bp, Artificial sequence
  DNA replication origin
tgttaggggtttgggattcaggatgcacagttgataggggatgggaatttgggatacacagttgataggggatgggatttcaggatgcacagatgttaggggttcaggattcaggatgcacagttgttagggatttaggattcaggatgcagagttgataggggatgagaattcgggatgcacagttgataggggatgggaactcgggatgcacagttgataggggatgagaattcgggatgcacagttgataggggatgggaactcgggatgcacagttgataggggatgagaattcgggatgcacagttgataggggatgggaactcgggatgcacagttgataggggatgagaattcgggatgcacagttgataggggatgggaactcgggatgcacagttgataggggatgagaattcgggatgcacagttgataggggatgggaacttgggatgcacagttgataggggatgggaatttgggatgcacagttgatagggattggggatttcagatgcacagttgttagggattggggatttgggatgcacagatgttaggggtttgggattcaggatgcacagttgataggggatgggaatttgggatacacagttgataggggatgggatttcaggatgcacagatgttaggggttcaggattcaggatgcacagttgatagggattggcgattctggatgcacagttgttaggggtttgagattcaggatgcacagttgttaggggatgggaattcaggatgtacagttgataggggttccggatttgggatgcacagctgtgaaaatctttggcttttgttgctgagaacaaaggtgtgaaaatggaagtgcctcctctgcagggctgaggatgatcctgggagggtggggcctctgggaatgacgggaaagtgacccatctgggagttgtggccaagagcggggagaaagagttcagacatgggttcagggccaggcgaggtgtgtgcaggtggaaggtacccagggcccttggtctgggagtgcaaaggcccctctaggcagtgacaaggagcccctgatgcagggtcttggcccccgacaactgtgcctgcag

SEQ ID NO: 19650 - DNA, 1069 bp, Artificial sequence
  DNA replication origin
aaagatcccagagctttttttcaaacctgacagcaactttaagaatttccatggcattgcacctgaaagaaaagaaagacccttttctgaataacaaagttaaaaataattataaaagataatagaggaaaatttgaatcatctttctatatatcctatttatgagggaaagaaagataacataaagctcccttttgtcttaggcaacccaggctgccaccgcaaaataccacggactgggggcttacccagcagacccttttctcacagttctggggctgggactcaaggtgtggccgggctagtttctgggtgggggggggggctctccttggcatgcagactcagacggtgtcactcactgtgtccccatgtcacctttcctgggtgagaggatctgaagcttgagtcagaggtgactgggcagtcatcagtggtgttgactcaacagagtgaggacaggcttgggcttccagtgaggtgccctggtcggctgagggctggcagggcagacctacaggaaggggtccctgaggggttccaaggcacagcccgaggacatcacaggaggtgaggagtgggtgttggtgtgaagggacctgtggagagtgatcagtgaggctgtgccggccctgctgatattttcaggactgcagtggggaggggctgctgaggctgaggctaggagatttcgggggcaagtggggtcctccaggcatgaggcaggcactgggcagggacagatgatgagacaggcagagggcagagttgggaagctgcagagctgggggtgacaggagctcggcccctgatttggaggggcctgaggtttgaagtcacagtttctgtccttacctgggaggatggtgctgtggtttgaatgtctgttttttctcgaaagttcttgctaaaactgaatccccagtgcaacagtattaagagggggtctttaggaggtgattaggccatggagactgcaccctcagggatgggaatggtgcttaccaaagggctggagggaactggctggtcctcttactcctctgcccttcctgaggacacagaattt

SEQ ID NO: 19651 - DNA, 1395 bp, Artificial sequence
  DNA replication origin
ctccagagacaatagggatgcaccacctaccagggattctccaggttggagggtccctctgcttgcacctgtgtttctgctttctctcttagggagtcccgggtcgtactccctctgagcccaggtgccttcttggctgagccactgtctgtacctgtgccgttactgagacaaaaggaaaagtgaaaacagcgatgatgttttcagaccttttgagcatcacaagccttgcagcgctcaatctgtgtggggagaagtctcagtctgtatgtggggagaagtctcagtctacatgtgggggagaagtctctgtatgtggggagggctcagtttgtatgtggggaggagtctcagtctgtatgtggggaggagtctcagtctgtatgtggggaggagtctcagtctgtatgtggggaggagtctcagtctgtatgtggggaggagtctcagtctgtatgtggggaggagtctcagtctgtatgtaggggagaagtctcaggccccctgagctgacagtgatggtcccttctgactggtaggactttgactcagtccaaattcctccacgctgggttccactgggagatgtgtcaaagacctatccctggtacctgtgaatacaacctggtttagatgggaggtctttgcagagggaatgaagttaagatgcggccacaacggattaggggttggtgtccttacgaggagagagacacacaggagagaagccaggagacgaggaggcagagactggggtgatgcagctgcaagctaaggaatgctgaagattgccgggagcaggcgagcaggggagcaggcgagcaggggagcaggggaagcaggggagcaggggagcaggggaagcaggggagcaggggagcaggggagcaggggagcaggggagcaggggagcaggaggagcaggggagcagggggagcaggggagcaggggagcaggggagcaggggagcaggggagcaggggagcaggggagcattctctggtggggccttcagaggatgcaccgccccactgttgcctcgatttcagactcctggcctcctgaatgggagcggatctctttctgctgtcctgggccccccagttcgtggtactctcccacagcagccccagggcactcacggccaagctctgtttccaccctcggagaaggtttcagagcagccaagttcctccgatgagccacgtccagaccctaccctgacttttccgaaccttaggctcctggacaggagggatgaggaggaagctgcccatcccagcaagggcccagtgtggaaactgtccacactgcacggatatccacactgcccgctggaagccagaataacccatgaacctgaagctctcaaggcctcccaggtccctagccac

SEQ ID NO: 19652 - DNA, 2297 bp, Artificial sequence
  DNA replication origin
catgtggagacactggccagctggatgaggggtgcagggcaggcagggagggaagaagggagggaggctgctgccgagggtgacaggaactgaggcctggggccagcccaggggaagggaggacttgagattgtccttggaaacacaggggctctgggagggggtgggccaagcctcattggagccctaggttcctggggttgttccagcatccacctcccccggccacctaggcagggactgaagcagccatggtctacagaccccactggccttctggcccctgaactgggtgatgggggctcggggccctgggagcacagcgaataaggcagccaggggagcagaggacagcggagggcaggaggggctgacgggcgggcggggtacgcaggacagaagtgcacacatgtgtgggtgcagcatgcacatacgagtgtgagtgtgtttgtaatgtgtgtgccttatgagtacaggacatagggagtatttatgtgtatgtatatatgcatatgcaggtgtgtacgcctgacatacatgaggcatatggagatgtatatgggtgtgtgtgtgagtgtgactgtgtggggattgtgtggtgggggtgtgtagtgtgtgtgagtgtgtgaatgtgtatatttttgaggtgggtgtgtatctgtatgtgtggggtgtgtgtggtgggggtgtacgtgcttgtgtggtgtggtgggggaatgtgtgataggtgtgtatgtttgtgtgttgtgtgaagtgggagtgtgtgttatgtgttgggaggagtgtgtggtgcatatgtacatgtggtgtgtggtgggtgtgtatgtttttggtgtgtgtggggagcgtgtggtaggtttgtaggtttgtgtgtgtggtatgtgaggggagtgtgtggtgaatgtgggtgagtgtgtggtgggtgtttgtgtgtggtttgtgtgtgtggtgtatgtgactgtgtatgtgtggtatatgtggtgggggtctatacgtgtggtgtgggggggatgtgtggtgtgagtggggtggaatttgtggtgggtgtgtagtgtgtggtgtgtgtggggtgtgtgagtgtgtgtgtatatgtgggttttgtgatgggggagattctgtgtgtgagtgtgtgtgtatgtgtggctagtgtgttgggagtgtgtgtgtgaatgtgtaagtgtgggtagagtgtggtgggagtgtctgagtgtggggtgtgtgtattgggtgtgtatgtttgtgttgtgtgggggtggtgtgtatgtggtgtgtgtgtgtgggtagagtgtgttgggattgtctgtgagtgtgtgtggggagtgtgtggtggttgtgtatgtgtcgtgcatgtgctgtgtatgtggtctgtgagtgtgtatgcatgggttgtgtgtggtgggggagtcttgtgtgtgtgtgggtagagcgtggtaagagtgtctgtgtgtgtatgtgtgggttgagtgtggtgggagtgtctgtgagtgtgtggagtgtgtatgtgtgggtagagtgtggtgggactgtctgtgtgggggggagtgtgtggtgcgtgtgtgtctgttgtgtgtgtgtggtgtgtatgcggtgtgtgtgtgtggattcagtgtggtgggagtgtctgtgtgtgggggaagtgtgtattggatgtgtatgtttgtgttgtgtgtgggtgtgtatgtggtgtatgagtgtgtgtgtgggtagagtgtggtgggagtgtctgtgtgtgtgggggtgagtgtggtgggtgtgtatgtttgtggtgtgtgctgtgtatgtggtctatgagtgtttatgcatgggttgtgtgtggtgggagtgtctgtgtgtgtatgtgtgggtagtgtgagtgtgagtgtgtatgtgtgggttgagggtggtgggagtgtctgtgtgtgagtgtgtgagtttgtatgtgtgggttgagggtgatgggagtgtctgtgtgtgagtgtgtgagtttgtatgtgtgggttgagggtggtgggagtgtctgtgtgtgagtgtgtgagtttgtatgtgtgggttgagggtggtgggagtgtctgtgtgtgagtgtgtgagtttgtatgtgtgggttgagtgtggtgggagtgtctgtgagtgtgcctgtgtgtgtgagggggtgtgtggtcggcgtgtatgtttgtgttgtgatgtgtgtctgtgtgtatgtggtgtgtgggttgagtgtggtgggagtgtctgtgtgtgagtgtgtgagtgtgtatgtatgggttgagtgtggtgggggtgtctgtgtgtggagtgtgcgttctgtaattgcacactgg

SEQ ID NO: 19653 - DNA, 1731 bp, Artificial sequence
  DNA replication origin
ccaggctgtagtggcccctggcctgaccggcctcactccccactcccccagttgttctaagggtcctttctctaatgaaccacatacatgcaccgtgcctcagggtccatgtccaagaagccctgaggcgatggacctgaggagctaagatgccatgcaggatcttgcagatggacggtggacacaggggcaccctcaggatcaggcggaatggccattgagcagaggaaacagcaacaaagaggctggggggttgggagtgggactgggctgtcctggaggtgggagtggaaggtgtaattaggaagattctgtgtgtggggtcaggaggagtcagaccaccatgggccaggcatgggccaggggatgagtcttgtcctgcatcccaaaggtggccaggcatgtgacgtgcccagcaccctgcaggtgggatgatccctgcaggtagggtactccctgtgggtggggtgctctctgtgggtggggtactccctgtgggtggggtgctccctgtgggtggggtgctcctgcagatggattactctctgcaggtgggctactctctgctggtggggtgctctctgcaggtggggtgctccctgctggtggggtgctccctgaaggtgggttactccctgcgggtggggtactacctgcgggtggggtgctttctgtgggtggggtgttcctgcaggtggattactctctgcaggtgggctactctctgctggtggggtgctctctgcgggtggggtactccctgtgggtggggcgcttcctgtgggtggggtgctccctgtgggtggggcgcttcctgtgggtggggtgctccgtgcgagtgggttactccctgtgggtggggtactacctgtgggtggggtgcaccctgtgggaggggtgctccctgtgggtggggtgcaccctgtgggaggggtgctccctgtgggtggggtgctcctgcaggtggattactctctgaaggtgggctactctctgctggtggggtgctctctgcgggtggggtgctccctgtgggtggggtactccctgtgagtggggtactccctgtgggtggggtgctccctatgggtggggtactatctgctggtggggtgcaccctgtgggtgggttactccctgcgggtggggtgctccctgagggtggggtactccctgcaggtgggctactgtctgttggtgagatgctctctgcaggtgagatgctctctgcgggtgggatgctcccatggcacacctggcacaacggtcacagcaggcaggccacactggccgctactttgacagccttccttctctctctgcctgcttcccttctatgatcagtgggatattggaaggaaccactcatcaatcaaacctttgtattatatttaaggaaaaacatggggatacagagggtttcgcagacaaattttgcacgtgagtcactcttccctcaaggtgtggctggatttgcttcaaactcccctggggacagtgccgtttgttcctctcagtctgcctggtgcccatgtcactgggaacagccacagagccctctccgccgacttctacccagagggtgcaggcagcgctctgaggacgtcctgacttacatacggcgagactgtgattgcgcggctgcagctctgatccttctcgggttcaatttgaagacgccaggaggcctgaacagccattcccagcagggcggtgaggagagcggtgcac

SEQ ID NO: 19654 - DNA, 1893 bp, Artificial sequence
  DNA replication origin
agtgtgtatgagtgtgagcctgcatgaggtgtctgtgtgtcattatgtgagtgtgagtgtgaagtgagtgagcatgtctatgagtgtgagtgtgtgagatctctgtgtgtgattgtgtgagcgtgtgtatgagtgtgagtatgtttgtgtgtgattgtgtatgcgtgtgtatgagtgtgattgtgaggtgtctgtgtgtgtggttgtgtgagcatgtgaatgagttagcaggttggaggtgcctgtgtatgattgtgtgagcatgtgtgtgagtgtgagcatgtttgaggtgtttgtgattgtataagcatgtgtatgagtgtgattgtgaggtgtctgtgtgtgtgagagcatgtgtgaagtgtctgtgtgtgattgtgagtgtgtatgagtgtgagtgtgtgaggtgtctctgtgtgattgttaccatgtctatgagtgtgaatgtgtgtgaggtttctgtgtgatagtgtgtgtgtatgagtgagtgtgtgtttgtgtgattgtgtgaacgtgtgtatgagtgtgattgttacatgtctgtgtgagtgtgtgaacatgtgaggtgtctgtgtgtggttgtgtgtgtgtatgagtgtgagcatgtgtgaggtgcctgtgccattgtgtgagtgcaagcatgtgtgaggtgttcttgtgtgattgtatgagcgtgtgtatgagtgtgattgtgaggtgtctgcatgagtgtgagcatgtgtgtgagggtgtgaggtgtctgtgtgtggttgtgagcatgtgtatgagtgtgagcgtgtgtgatgtgtctgcgtgtgattgtgtgagtgtgtgtgagtctgtgaggtgcctgtgtgtgattgtgtgggtgtatgtgtgtgtgaggtgcctgtgtgtatttgtgtgggcatgtgtattaggtgtatgagtttgggcatatgtgacctgtctgtgtgtgattgtgtgagcatgtgtgtatgtgtgagatgtctgtgtgtgtgagagtgtgtgtgaggtgtctgtgtttgatcttgtgggtgtgtgtgtgtgtgaagtgtctatgtgccattgtgtgatcatgtatgtatgagtgtgtgtgaggtgtctgtgtgtgattgagggagcatgtgtgtgtgtgagagatgtctgtgtgtgatcgtgggagcatgtatgagatgtctgtgtgtgactgtgagagtgtgtgcatatatgaatgggtgtgagtgtggttgtgtatatgtgactatgactgggtgagtgtgtgtgaggtatctgtgattgtgggagcgtgtatgacgtgtatgtgtgtgactgtgtgagtgtgtgcatgtgtgaatgggtgtgtggttgtgtatagatgagtgtgtgtatgtgactgggtgtgtatgagttgtcttgtgtgattgcgggaatgtgtgaggtgtattgtgtgactgtgtgagagtgtgtgcatatgtgaatgggtgtgagtgtggttgtgtatatgtgagtgtgtgaatgtgactgtgtgactgtgtgtgaggtgtctgtgtgattgtggaagcatgtatgaggtgtatgtgtgtgaaaggtgtgcatgtgtgagtgggtgtgagagtggttgtatatatgtgaatgtgactatctgggtcagtgtgtgtaaggtgtctgtgtgattgtgggagtctgaggtgaatgtgtgagactgtgagagtgtgtgcctgtgtgaatgggtgagtgtggttgtgtgggtgtgtgttaatgtgactgtgtgggtgtgtgtgaggtgtctgtgtgattctgggagcgtgtgtgaggtgaatgtgtgagactctgtgagagtgtgtgcatgtgtgaatgggtgtgagtgtggttgtgtatgtgtgtttgtgtgtgaatgtgactgtgtgggtgagtgtatgtttatgtgtatgt

SEQ ID NO: 19655 - DNA, 1486 bp, Artificial sequence
  DNA replication origin
ggaaaagacgcagctgtgcaatttggagaagggtctagcttgggaaacctgcccgctggccgccagtgaggccaagagatggtgagtcagggagtgagcgcccagtatggcagaagaggctgggtttggtgatgggaaaaaatgctgctgtgtaatatgttaattatttttatagtataataccaacgtaaatcaaaaaaatcaaatgcaagaagatccttagaaaaagtataaatggcagcaaatgtcaggtataattccgtctaagggcccccaaataccatctcacaagtaaccacaataaaccaactcttcttccagaggactcttttctggccaggcaggcaagatctgctctctgccaccctgggaactgggttgctctgcacccatcagaccagccccttcctggggaatttacccagcaccacataagagtcacagagtcacctgggtggtgggcctgagccccgggaaagaaaagtctctcagggtgagccctggagggatgcggaatgtgagccctgtagggatgcggggtgtgggccctggagggatgcggggtgtgggccctggagggatgcggggtgtgggccctggagggatgcggggtatgggccctggagggatgtgaggtgtgggccctggagggatgtggggtgtgagccctggagggatgtggggtgtgagccctggagggatgtggggtgtgggccctgggaaagaaagtctcccagtgtgagccctggagggatgtggggtgttagccctggagggatgcggggtgtggaccctggagggatgcggggtgtgggccctggagggatgcggggtgtgggccctggagggatgcggggtgtgggccctggagggatgcggggtgtgggccctggagggatgcggggtgtgggccctggagggatgcggggtgtgggccctggagggatgcggggtgtgggccctggagggatgcggggtgtgggccctggagggatgcggggtgtgggccctggagggatgcggggtgtgggccctggagggatgtggggtgtgggccctggagggatgtggggtgtgggccctggagggatgtggggtgtgagccctggagggatgtggggtgtgagccctggagggatgtggggtgtgggccctggagggatgtggggtgtgagccctgcaggggtgtggggtgtgagccctgcaagggtgtgggatgtgagccctgcagggatgcagggtgtggccctgtagggatgaggaatacaaacagaggcagccaacagaccaggagacctcatgccatcacaggacctccctcagggcaatctgcccagtttctcaataggtctccttgccctcactctgggctccccactcggaagaaggtggaacggggcacagacatgctgcttgccctcttcccatctgtcctgggttcccgacctcacgccaccactctaagatttgctgccttctcctgctg

SEQ ID NO: 19656 - DNA, 1725 bp, Artificial sequence
  DNA replication origin
atgcagaagagcacctgagctctgccacggggtgggagtgagtcggactactggttctgtgggtcttgggaacctctttgttcccatctgcaaaacgagacaatactcaggcctttctcagtcaacacatccacggcactcatgagcctcagtgcccaggccagtgctcagcacacggcaggtccacactgcgggccgatggtcatgattacaaactacattattacctccactagtaaagagagacattctacttattattccattcagagttcctaacgtccaggtacgctaattagagtataaagtgtgttttcatcaaaatgagatcttgccagaggttgttatttttcatttccacagattgtcagtgttttcccacatgttttatctgggagagtagggggtggggtttgggggacgaggggccacaggagcctgcgatgggccgtgcacttcccaggcctggcctgtgccatcctcccaggggtccagtgagggaggacgtgacttcggtcttgaagttggagagttcaggtaactccccaggccgcacagcttagtccagccctgaggacatgccatcagttgtgactgacttagccacagacatctcgctgtcaatcagacaacagacactgggatacccaccaaggatccctggtgaattagataaaacccctgactccctgggtcctagagcctaggggaagggaagcgtacaaagctactttagtgggtaaatctgaatcagggatgtggctcgttgctcaggggactcaagaggccagagtgcaggaggcagcagacccaggaggatgggacagtggggccaggctggctcgggagggcactcccaatgggacgtgcagcgacctcagggtcagcacacttcggctggaaaggcgtgtggggcaggagcatgtaggggcatcatccgaggcttggagaggagccccagggaataatggggtgagagtttccagagttcaggtctcagctgggaagaagggggataactggaaagagagggagaggatgggtcagggggaaaggagacaggaagggttccagaattcctaatcgactggaattcaggccctaaaaggaaacggttggaagtgacagtgaggcctccagggtggagctctggtgggatggagcggctgcttctcaccacggggaatgcagtgaagagagagaagtgggaggggagaaggtggggatgtggcctggggaggggacagggctcagcaggtcaagctgggatctattagtgagctgcgtcctgaagatgtccatgtacagtgggcagggggagggccaggggagggttcgtgggtgcgtggggggctgcttgccaaaggagacttcagggagtgaccttgagctggaaggagatgtgcagtgatggaccccagaggcttctggggtgtgagcatgtctgtgtgtgagcatgtgtgtgtgtctgtatgcgtgagggtgagcatgtgtgtgtgcatgtctgagcatgtgtgtgagcatgagtgtgtgtgagcatgtcagtgtgtgtgagcatgtgggtgagtgtgcacacatgtgctttgttttatttttgtagctgttggttttgaagttaaaaggcacagaagtatgtttataatgtaagggaaaagagccaacaaatagaaacggcagatataggaaagggtggacccaaaacagtatctgaatcatcaggatggg

SEQ ID NO: 19657 - DNA, 1181 bp, Artificial sequence
  DNA replication origin
ctccggctcagcgcgggggtcgtggttcccccggtgctgctcgcctcggccccgccgcccgcggccccgctgctccccggtctccccggctggccggccccgagcgagccggtgctcccgctgctgccgctgccctctgcgccagactccgccgccgccgccgccgcgcaccccttccccgcgctccacgggcaggtaacgtgtccccgtcccgcctcggcccgggtcgccgtctcccctgctcctgggcgcgccctgcccggcccggctctggcctccggctcgcgcgccctcctccccggcggtcctcgccgccccaaaccctcaggacggagcccggcagccgtgcctcggcgagaaagttcgtgcttggacgcccggtcgtccacctccgcagctttggcaggtgcctccgggtgtctggacggagccgtggagggacccgccgcccaggcccgcgtggggaccgcagggaactcgcgccacgccgggggtcactgtccatcgcgaggtgctgaagtggctccgtgaccgccgcgggccgtggctgacatcgcggagaagttaggactttcacagtctctgccagacttgaaagcaagctggaaatcgatagctgtttcagctgtttcagattctaatctggtttgggtttttccccctttcatttgaaaatagactcagggcaatgcttaagagaattccaaccgacggaagtggccgggaaatcctgccttcggtactgagggatgttaccggagattcccctgccccaggcctgccggagtccaccacattcgctaatgccacactgcactttagaactagagtttggcttttaagacatgggattaaaaagaaaaagtgactgaacctttgataaatggtgcagcagagctaggcgggctggtttgggcaagattcattgtcagctaactatgcagatgcatttaaatcagggaatagcgtgcattttattccaaggattgacctcattagcatattcaaacgggtgttatgttagaatacaccatttgattaatttaattccaatattatcttgtgagcttttctaaaagatgttgttaaactcctgctaaattggtctttagacttaatgatacatcacatatgcagcactggatattgtatttttatgtgtgatgcagtttattttggat

SEQ ID NO: 19658 - DNA, 1005 bp, Artificial sequence
  DNA replication origin
aggcgcgggcggatttctgttgcacaaatgggccaaacaggttcgtaaggcccccgcgggtcccctggcccggaagttgagccgcgggtgcctggtctgaagttccgcgccccacagtggcccgcgggcctcggcggctcctgccctacgccctccaaggcaccaggcaggtggccccagggcctttgcccacgacaccccctgggtggggcaggaccacccctctgtgaattcgtcctggatgcccccaggcacagtctgtactcctccctcccccagcacacgcggcctctgacgctgcacgccgagcttcctgggacccaggacgaaccgggctccaaggaccctcgctccgcccggaccacacgcaggcagcgccggccgagccgagcctgggtccgcactggccacgcgcagccaccgccagacggcgctagccctcccccgctgtagaccctgcttcggaggccgccagcctcctccccatcccgggtccacagcttcagtgcagcccctggcgacgcgcgctgacagctgggcagagacttccgtgcgctgtaaaccccttaggtcgctaaacccaggaaacccaagcacagctaatgccagcgcgagaccagtgttgttagaggcatttgaagggtctttctggatgcaaaaggcagcattatgatccatgcatttaagaacttgcatgaaaaaccctccctgacctgggtgggagagcaggcacccacccacccagcggcactgacacgcctggtactccaaacccgtgttcgcatcacctcccacctgtccactgccaacctcctgagatggcctaaagcacccgagtgcttttaatttgcgtctagggttgtttcctcattatcctgatttgcttaatttcctcttggcctggcctgatttcttttagatctgggcatatgctgatttacatagctggcgcctccatattttcctccacgaaaaccagttttcaattagcaagtttatctctct

SEQ ID NO: 19659 - DNA, 1247 bp, Artificial sequence
  DNA replication origin
gaaaaaacaaaattcaaaaaaatggttttcagttgtatcgccatcacctgcctgctaggtttgtcatctgcattcttgtgagttccttgacttgggcctggtccccgggctggagaaaatgaggtgttgcaggaaggaaagaaggaaggaaagaaggaaggaagggaagaggagagaaggagaaatgaaggatagaagggaagaaggaaagaatgagagaaggaggaaggaaggaaggaaggagataaggaagaaggaagaaggaagggaggaaggagagagggaggggaggcaggaaggaaggaaggaataaattaaggaaagaagggaagaagaaaggaatgagagaaagaggaaggaaggaagaaaggaaggaagaaaggaaggaagggaggggagaaggaagaagaaagggaggaaggagtgagggaaggaaggaaggagagaaggaagaaggaaggaatgaagggagggagggaggaaggaaggagagaaggaagaaggaaggaatgaagggagggaggaaggaaggaaggagggaaggaagaaggaaggaatgaagggagggaggaaggaaggaaggagggaaggaagaaggaaggaatgaagggagggaggaaggaaggaaggagagaaaaagaagggatgttcactgcctgtcagctcttcaaagcccacttgtcactcttgaagatctaagaatctgacctagattctgatgcccagtaggtgtttaatgagcagctggtgctgaacagacaagcttgatgtccggcaaatatttgttaacagacgtctttctgcttagctctgtgcctggtgccaggaggtgagtctaaacaaaaccagcagaacccggtctgggaggctggcccagtgcccctgacatctacctggaggtgctctttcccatgagaaaacatcagccttgcaggcgtctggggtggggattttgtcaccccatccccatgcctggttgagccccatgtgacattcctgcagaagctcctgaggcccggcaggcaacttgggaaggggctgtccaggctgaggcccaggtgcaggatgtcccatcgctgtaagcggcgtgtctgcttggaacatctctggaccagcattgtggttacacaacaccaaagaaaatacaaacaccaaggctgaggaagcgtgtccatcccaggctactggaggacactgtgagtttggaggttacagtaacatgctattaatattttatttgctctatg

SEQ ID NO: 19660 - DNA, 2201 bp, Artificial sequence
  DNA replication origin
taaacatatgcacacatacacatatgcacacacacacaatctgttttcaagtgtataagtcccagtaaacatacacatatacgaacacacactgaaacatatgcacatgtacacgtatgcacacacacacacacaatctgttctcaagtgtataagtcccagtaaaacaaattacttcatgtcaaatatgatttttgacccataaataaaaataaatccttatcttattcttgtcttttttattctcccaatgattactttaaactccccttttttttaatatcctatttggcttgacttaaggaattctgaaaagcttgctgctgagggattccagaagagtcacagatggttgatgtaatcaacttcacccgttctttcatcgttggttgtattgtgtggttttccttccactctgcatgtctgtggagcagacagaactcatggcctggaaaagtcaccagaatttgtttttacaccagcaaagcacagagggaggggcaaagggagaggccaaaggaggagcagagagaaaagcagagggaggaacagagggaggagtggagggagaagcagagggaggagcaaagggaggagcagagggaggagcgaagggaggagcagaggaaaaagtggagggaggagcagagagagaaaaagagggagaagcggagggtggatcggagggaggagcagagagagggatagagggaggagtagagggaggagcagagggatgagcggagggaggagcagagagaggagtggagggaagagtggagagtaaggcagagggaggagcagagggaggagtggagaaaggagctaagggaggactagagggaggagcaaagggaggagcagagggaggagcgaagggaggagcagaggaaaaagtggagggaggagcagagagagaaaaagagggagaagccgagggtggatcggagggaggagcagagacagggatagagggaggaacagagggaggagcagagggatgagtggagggaggagcagagagaggagtggagggaagagtggagagtaaggcagagggaggagcagagggaggagtggagaaaggagctaaggaaggactagaggaaggagcaaagggagaagcagagggaggagcaaagggaggagcaaagggagaagcagagggaggagcaaagggaggagtgaagaggagctgagaaaggaccagaggaaggagcggagggagaagcagagagagggatagatgggggaacagagggaggagcagaggaataaccagagggaggagctgaaggaggagcagagagagaggcagagggagaggcagagggagaaccagagggaggagtggagagaagagttgagggaggaccagagggaggagcaaggtaggaggtagggaggagcagaggtaggagagaaggaaggaacagagggaggagcggagggaggaatggagggagaagtggagggagcagcggacgaagaagcagagggaaggacagagggaggagcagaggaagaagcagagggaggagtggagggaggagcagagagggggcagagggaggatcagagggaggagcagagggaggagcagagggaggagcagggagagggactgagggtggagcagagggaggagaagagagatgaatggaggaatgagcagagggaggagcagagagaggggcagagggaggataagagggaggagctgaggtaggaccagagggaggaacagagggaggagcagagggagaagcggagggaggagcagggagagggattcagggaggagcagagggagaagaagagagatgaatggaggaatgagcggagggaggagcggagagaggggcagagggaagacaagagggaggagtggagagaggatccgagagaggaccagagggaggagcagagggaggagcagagaaaggagaggagcagaggcatgagtgaagggaggagtggagagaggggcagagggaggagcggagggaggagtggaaagaaaagctgagggaggaccagaggcaggagcagagggaggcgcagagggaggagcagagggaggagtgctggtgaaggagcttcaaggcaaagctggcccagcacccacccagcgttagcccacctgcagctccctgggcttcctcagtcgtctctctttgccctcaccttttcaagtctcc

SEQ ID NO: 19661 - DNA, 938 bp, Artificial sequence
  DNA replication origin
cctgcagagctgccctctgcgccccagccccctgtgtgaggagcagagacggctgtgcacccgggaggccagtgacgctcctggacgcagcatggggaggctggatgcatagggtccagggcgtatgcatcctgctcctggccctgttcctggccaggctggctgaccctcactagccgctccacctggatgctctgggggcaccagacccagcctctcagagggaagcagggccaggaagaggcaggcactggccaggggctcttggagaagcggccctgagagtaggggccagcccatgccaggctggggctgagggtgttcagctctgccctggagtccttgacctttgtgggggcagcccctagaccccaaatgtccacagcgtctgcccctccccagggtgccaaggatggctcaacccaaggacagcaactgacctaaggctgctggtgcccagtggactctgacgtgggctgtatgcatcagtgagtgtatgtgagggtgtgtgagtgtgtgtgtgtgcaggagggcagtgcgtgtctgctgcttccttgtgtgtgcatgtgtgagtggtgccgtgcatgtctgctgcctccatgtcagtgtgcgtgtgcctgtgagagttgcctctgtgtgtgtttgtgtgtgtttgagtggtgccatgtgtgtctggtgcctttgtgtgtgtgtgtgtatgtgggttaccatgtgtgtctgctgcctccttgtgtgtgcatgtgtgtgtgtatgtgagtgtgagagtggtactgtgtctgtggcctctgtgtgagtgggagtgtgcgtgtgtgtgtttgcatgtgtgtgtgtgcttatgagtgctgccatgtgtctgctgcctctgtgtgagtgggggtgtgcatgtgtgtgtttgcgtgtgtgtgtgcttgtgagtgctgctgtgtgtctgctgcctc

SEQ ID NO: 19662 - DNA, 2088 bp, Artificial sequence
  DNA replication origin
cccactggctacagccgagaaggagacggacggtgctcgtgcagaggcgcgggctgttggggagtccagcggtggggtgaggaaatcgccaggttccaggtgtcttccggcaggagtccgtggggcctggtgcctatttagatagtttgctaatggggacatcagggatgacctgggttttctagttggccagctgagcgaggacatcgtcactgaaggaagagtgggcagcacgaaacacatgtgtagagaggacgccaggtgtgctggggccatgctgggcccgagaccatctgagcacagatgtccaccaggctgtcggacccagggctttggtgctcaggaaagcagctgctgctggagaagctcgggccttctgcggatggacgttgaagccgtaggtgcctgggagcctctgtgggctcctggtggcgctggggagccacgctgatgggtggcaggcaggcctcggaggtgggaacgccttgtgaataggcactttgcctgggaggtgggggcaggtgggcagagccctgctggagaatgagggtgagggccagtgggccctgccaggggcagagagcaccacgctgagaactgtgggggccacggggacgtgtgtcaaagcccaatgtgcatgggggaggcagagcttgagctgaggcggggggtggacagggacgctgaaatggggcagggatgggttcgcaggcatgtggggtgtgggtgggagctggaggcacgacccgcaggatgtggtggggtgggggtgggggattagcaaatgcagggcttcctagtccagctcagtgcatggaataagcctctttcaaaagggaaggaagtgtctttattgggtgtgtggagaaagtaggaacaggacaccgcggactcatcccctcatcacaggaggcttctcacaggctctgcccctgtccttacaacagaagggctgtgtgtgcacatgatgtgtgtcagtggggtgtgtgcatggatgtatgtgtgcatgtttgtatagatgtgtgacagtatgtgtgtgttcacgtgtgtatatgtgtgagtgtgcattggtgtcagtaggaatgtgtgtatacatatgtgtacatgtgtggcatgtatgtgtacatatgtggtgcatgtgttcatgtgtatttgtgccagtaggaatgtgtgtatacatatgtgtacatgtgtgatgtgtatgtgtatatatgtggtgcatgtgtgcatgtgtgtttgtctatgtgtgtggtcaatggggtgtggatgtgtgtgtgtttgtatatttgtgcatgagtggtgtgtgtgcatgcatgtgtttttgtgtaggtgtgtggttaatggggttgcatgtgtgtgtgcatgcatgtgtgtgttttgtgtgtgagtggtgtgtgcactgtatatttgtgcatgagtggtgtgtgcatgtatgtgtgtgtttgtgtatgtgtgaggttaatgggattgcatgtgtttgcatgcatgcacgcatgtgtgtttttgtgtgtgtgtttgtgagtggcatgtacgtgtgtgtatttttgtgtgcatatttgtgcaggagtaagtggtgtgtgtgcatgcatgtgtgtttttgtgtatgtgtgaggtcaatgaggttgcctgtatgtgtgcatgcgtgcatgtgtgtttttgtgtgtatgtgagtggcgtgtgcatgtgtgagcgtgtatttttgtgtgcatatttgtgcatgagtgagtggtgtgtgtgcatgtgtgtgtgtttttgtgtgtgaggttaatggggttgcgtgtgtgtgcatgcatgcaagtgtttttgtgtgtatgtttgtgtgtgagtggtgtgtgcaggtgtgagtgtatttttgtgtgcatatttgcgtgtgagtgtgtgaatctttgtgtgggtggtgtgtgtgtatgtgtatgcatttgtgtgtatgcgtgtgcctgtgtgtggcatgcgcatgtgtgggtgtgtgtttttgtgtgcgtatttgtgtgtgcatatctttgtgtgtgagtgctgtgtgtgttagtgtaggcattcgtgtgtatgtgagtgtgcacctgtgtgtgctggcggggaggtgttatgtgt

SEQ ID NO: 19663 - DNA, 1493 bp, Artificial sequence
  DNA replication origin
ggttcacagaggatgccttcagtacgggagaagctccagcaagtttgcttgtgaacggaaaagagccgtgagctacggggtgatgaaaacacagaatcagcagagagttttgggctcctgaggtcctcggagctaaggagaggggctcaggacaggacggaaggtcagctttggccagggagcagactctgccctcccgaggagcagggacaggggtggcccaggcatgtggaagtgcaggtcgcggtggaggagaggaaagtaatacggaaggagctcttgtccagaggccgctgttggccatttgtagttttggggtaatttttgcagaggagggggagtgggtcgtgcaggagctggagagagtggtgtgactggaagcagccccagcaggtgcaggagacacacccgcagggtgtggcccaggggggtctgcagaggggcagctgccggggcagcaacctggggggaacagttctctcaacctgggctgggtcccgggagcaggggttgggggggggcatctgcagggcggggccaccatggagataggggagggtggcaggaaagtaccccagtggtgagctggcggtctcggtgtgctaggaaggaggagggggagggaggggccgtggatgctggaagatggagggaggggcagagaagctggggcgcagaggctgcagtgtggcagtgagtgaagaagaggggctcacggacagagggtggtgcaggcttaccacatccgaaggtgcccttcctggcatcctaggcagtagacagcactgctcaggcccactgcacatcagcatcatccaggaggtttggaaaatcgcatgctggagcctgttctgaaccaattaaattaaattagagcctcgtgtgcccaggcattggcatcattaaagctccccaggtaatttcagtgggtgcccaaggccctggtccactgcccggtaagaatgctgggcctcaggggagagcgagtgaggacatttgagatgaggagtcaagcaactgagagacgagggcaggggttctcaaattctggcatcagaatcacctgaagggcagacgcagggccccacccccagggcaccctcagtggggcgtgggatcctgcatttctggagggctctgggtgaggcaggttctgccgctctggggactccatatggagaacggtccctggcctgggttgttgcttctcttgtccacatggatgtttgagtgcgcacgaggggacagacctggatcgtggcaccccagtccccagtgagtgaggtggcatgatgaggtcagcattggcagcagagagcggggcccaggacacggctgggtggcaggcactgatgggggtctcagggagaggaaagcagaccccgcctacagcctccgggccctcatggtcggctgtcggagtccggctgtccctgctggctagccctcatctggcaggattcgcccatgaatctgcagccaacttaacaact

SEQ ID NO: 19664 - DNA, 2249 bp, Artificial sequence
  DNA replication origin
ccggccggacacagcttcggccctcattgttagactacacgacctcacctcctcccagagcaaagcaccggaacacggaaaaaagggaaggaaggaaggaaggaagcctgattttcaatctgtaaggtatatacccagcagtggggttggggtcataggttgcttcgatgtttcattttttgaggattctcggtcctctcttccatagcagctgcgtcattttaccttctagagatctgtgagcaacatggtacccatagctaacaacgctgcagtgtacactgaaaagctctcagacaggagatctcaaaacttgttttcaccacaaaaaaagggacaagagagcaagaagaacctttcggaggcgataagtgggtttattacctggattgtagggatggggacggcttcacaggtgagtgcgtttattacctgattgtagggaggggtacggcttcacaggtgagtgtgtttactacctggattgtggggaatgggtacggcttcacaggtgagtgcgtttattacctggattgtagggagggggacggcttcacaggtgagtgcatttattacctggattgtaggggtgggggacggcttcacaggtgagtgcgtttattacctggattgtaggggtgggggacggcttcacaggtgagtgcgtttattacctggattgtaggggtggaggacggcttcacaggtgagtgcgtttattacctggattgtaggggtgggggacggcttcacaggtgagtgcgtttattacctggattgtagggagggggacggcttcacaggtgagtgcatttattacctggattgtaggggtgggggacggcttcacaggtgagtgcgtttattacctggattgtaggggtgggggatggcttcacaggtgagtgcgtttattacctggattgtagggatgggggacggcttcacaggtgagtgcgtttattacctggattgtaggggtggaggatggcttcacaggtgagtgcgtttattacctggattgtaggggtgggggacggcttcacaggtgagtgcgtttattacctggattgtaggggtgggggacggcttcacaggtgagtgcgtttattacctggattgtaggggtgggggatggcttcacaggtgagtgcgtttattacctggattgtaggggtgggggacggcttcacaggtgagtgcgtttattacctggattgtaggggtgggggacggcttcacaggtgactgcgtttattacctggattgtaggggtgggggatggcttcacaggtgagtgcgtttattacctggattgtagggagggggacggcttcacaggtgtgtacacatgtttaaacccatcacattatatacattaaatacacacagtttttgtatatcgtttactactaaaactgtttaaaaataaaataaatctccaccttttcttattgtcagaccataatttctgccagtcacgtgggtaggagacggtttcccatgattgttttccgcgatgtttcttggcgtccggagaggctgagcaccctgcgtgtgccagtggtcacgtgacctctcccttgcaggatttctagtcttgccgcgggtggctttatcgtatgctagacactaatttattttcagttacgtgcattgcatcacacatacattctcctagacttcacgacatcctttgttatacagaaggtggcctgattcctggtttgttttattcattataatcaaattcctgtcactgcagtcagaagcggagtgtccgcagccacacaggctgggaaccaggctctcctcctgaccagctgctcctcagccaagtcaccgtccctcagtttccacctctgcaaaggggtcccaccactgcctcgaccacatggggctgttgagaagattcaaccaatgtgtttgtaaagtgctttcaacagtgcctggcatgaaggaagccctgaataaatgttcgttcatttcactattatcacttcatcgttgttttccttttcagtttctgccgtttctgcctgatttaaaaagcccttccatatcctaatgttaaccattgttttcttccagaagttttcaagtttggcttttcacagttcagcctttcaagcgtttctgggttgtgttctcttgtgactggcttctgtttctatctgtattcctacgtgcctatgcggcaggttccccttctctccaggcagccccatcatagccccagcccctgtgtg

SEQ ID NO: 19665 - DNA, 997 bp, Artificial sequence
  DNA replication origin
gctgcgtgggggctgaagaagggaacggggagtgactgtcgcctcgtgggggctgaggaagggaacggggagtgactgttgctgcgtgggggctgaggaagggaacggggagtgactgaggagggtatcgggtatctttgggggtgatgaagatgttctaaaattagacagtcgtgatgattttgcaactccatgattacactcaaaaccactgaactgtacacttttaaaaagtgaattttatggtatgtgaattatgtctcaataaagctgttaaaagaaaaaaaaattaaaaaaacaggccagacgctgatgcgagaaatcaagaaggtggttacctggtggggtgggggtggggcaggagcgcggggtggggcaggagcgcggggtgggtggggtggggcgtgagcctgggtttgcaggggtggggcgtgagcctgggtttgcaggggtggggagcgagcgtggggtgggtggggagggagcatggggtgggcagggtgggatatgagcctaggtttgcaggggtggggcaggagcgtggggtgttgggagtgggcaggggcgtgggttttgtgggggtgcctggttaggttccatctcttggtgtaggtgctggttacatggatgatttggtttgtgaaaatccaatgatctgctcacttatgataaatgcacattctattccagtagagagttttaaaaggaaataaaagtaaacgagcatggccaggctcacgtggcagcatggggtgggggtcatggctgcagagggacactgtgcaccagaaagtgaggtgagagctggatcgttccccatccgggtgtggcactcgcagtgagcttgcgtgttgagggtgggctatgatggtgggggaggtacctccagccagattaacttgtgcatttccctcaaggctcgctcaaggtcgcctcctccttccagctgcgttctggggctcccagagcagcccaggtcccttcctcagccctaggg

SEQ ID NO: 19666 - DNA, 1000 bp, Artificial sequence
  DNA replication origin
acacaggcccatgaaagtttccgagtgattgttattttaaagaatatggctcctctttcttgcccacattcagatagcagtttccatgggaacagaattgaaactgccagatgagagggatccccattttggccatgtccctggctgtctgtggaggggaggctgtggaggaagggagggcaagggtggggccgtggtgggggagcccagcaccccttggctccttcctggacatggttctgccacttcgggaggaaggggctccaggatgagccccgatcattggtgattctccttcactgtggtggctttcagtctttggggagggtccatgatgccagaaaagggcgagaaaattttcaaagaagttttatcccaaagtgcactgggtgctggtccccagaccctcccacaaggacctgccaggcccacaggggccccagacgtgcccccagcccagaggccgtgtcctcacagggaaagccaggtggggggagcacagtgttcgccaggcctggaggggccccagacgcgtgcccagcccagatgccgtgtcctcgcagggaaagccaggtgtggggagcacagtgttcctctgggcacagccatcatcaacccagcttggaggagacgtcctgaggccctggaggttaagctgctcgtcggggtctcagtctcacagctgcgaagtgtccctcggcctccgatcctcagtgccgagggtcactcagtgccgagggtcactcagtgccgaggatccctgtgcctgtgcgatgctgcaggtgggaggtgctggggcccaggatctgggagagaggcttcctcatgggcgcctgagacttttccaggcactgggggtagagacatgagaagcagcctggcgaggacaggggtagagcctcacacttcccagagccccacacccacacactcctgggtgtttgtgcgtttagctcacatgccctccttgcccgaaaccccctgaccccagatatgccca

SEQ ID NO: 19667 - DNA, 1122 bp, Artificial sequence
  DNA replication origin
ccaccatcatcacatttgaaagatgctggagtcatgagcctgtgaactctcgtgacacacccactcgggtgctggagtcatgagctggtgaacccctgggacacgtccacatggatgcttctcagctctcaccccttcagtgccagatctgtgctgggccctcttctgcagggcctcagactctgcgtggtccagagaggatgccgtcatagccaagctcaggcggaggcctggggtccgtcccagctgcatcccccactggaaggagacaggtgggaaacaggctcggcaccagcctgcccgactgcagagcaggaatgcttttccctgcggagaacactcctcagacctccactctttcactaaaatttgaagtaaacatctgtatttaactcatcaagcctcgtcacagacgcttcaccttcagtctcccaggaagatacatttttggggtaataggatgggaagcacaggaggacaggagcatgggaggacgggaggatgggagcctggggggacaggagtacgggggcacgggaggacaggagcatgagaggacaggagtttgggaggacaggagcctgggaagatgggagcacaggggccacgggaggacactaaatgggacaggagcacgagaggatgggagcacaggaagacgggaggataggagcatgggaggacaggaggataggagcacagggggcatgggaggatgagagaatgggaggatgggagcacagggggcatgggaggacactaaatgggaggacaggagcatgagaagacaggagcacaggaggatgggagcacaggaagaagggaggataggagcacagggggcattggaggatgggagcatgggaggacaggagcatggggaatgggagcacaggaggaatggtagaacgggaggatgggaacacaagaggacaggagcactgcaggacggaagcacaggaggatgggctcatgggaggacaggagcccgggagattgggagcacaggggcatgggaggacgggagcacaggaggctgcctgcagtgattttgttattcccttaacttaaaacccaggacgtgggaccagatgtttgagagacacattaaaaccagtgaga

SEQ ID NO: 19668 - DNA, 1168 bp, Artificial sequence
  DNA replication origin
tttctgaaatcctgcttgaatggaaaactcacatttaccttagtgccaggtcccctggagaggaaggtgggaccagggactcaggagaaatggagggagaggggtcaccggggacctggggagaccccgtcaccctgctcacgggagaggggtcaccggggacctggggagaccccgtcaccctgctcacgggacaggggtcaccggggacctggggagaccctcccatcctgctgacagtgtctgttcttggacaggggtgggagggacaggacatgatcgtggtgagtgagctcactggagggctgctgctgtggggaggccacgggagccagggccacggcctctgcagccaccgcctgggtctccacctgcctcagcctcttggggtctggggtgggtgggggaccctgggggtttgaggtgcagatgagggaagggggctccccgggcctttgggcccacgggctgggcagctcctttgctggctgtggaaacagaggtgcctttcactccgtgggcgacagagggccctgtcccaacgcaaatggcaggcgggccccgtgcctcccctgtgttgggagttccacgggcagaggcagagcagggtgggcttctgttccagaacagtcttcgggagggggtggtgatggtcctggggtcctcccgcactttgggagtggtgtgctgcaggccacctttgggaaggctggggtggcacttgtgagtgacaggaagggcagaagtgtcagagcaacttttctcggctttcccgaggaccaggctgggcagctgcaaggtctccctggagggcacaggggtgattaccagcctggcgtcggggtcctaaggggtggtggcacctcatggtgggacactgtctgaaagatgtaaattgaacactgtcttggacatagcttttgggtgcaagagtcatacattatacttctcaaaaaaaaaaatcagaaaaccgtcaagggggcagtaaagttcacccaggagttcaccctggagataagcacccctgctctcgtgacgcacatccttccagattcagaaaaactgacacaaaggatcacacggtaatactcttggataaggcttggcccacgtagcagtatgttgtgcacattaaacaaatcagcaaacacagatttgcataaccgct

SEQ ID NO: 19669 - DNA, 953 bp, Artificial sequence
  DNA replication origin
ggtgaggctggaccccctggaaatgcaggtgcgggcatctccaccggggaaatcaagagctgtgaccggctgtgcccaccctggcggagcgtgtgactggcagtgtctttgggcacatctttgggtgtctgtaaccccagagggacactctgaatgtcaccgacccccaacattcctgccctggaaagtcaggagcgggcgaggtgtcgccctcacaggctggagcaggagggcccatggtcacagctgtgcccaggtcggggtggtgcctcctgaggagggaaaggagcaaaggcttcccgggagtgtgaggaacagcctccagaaccccagggactttccaggcagggagcaggtgcgaaggccctggggccctacaacgtgcaggctacagaaggctgggcagccagcctgggggaggagggagcagagaggggagggaaatcaatcagaggagcggggtgggcgggggaggctgggcagggccctgtgggccttcaaagctttggctttaggccgagtctgagatgggagcctcaggagggtgttgagccccggagtgacctgaactctgccccgcgggcagctgcgtggagatggcctgggtgggggcccatgctgcgtattgttcagttaatgacccttaaaccacactcacagccccaatactggtggggtaggcagagcacagctatggtggccccagagtaagctccatggcagaagaatccagaaggaaaagctcagattcccagaggcaagcaggcggaagacactccagagacgcctcagaacttagagaggccagtggagattggccagtagaggtctgtgagccagaaacccgtcagggcaggcgtgagctcagatcaatgcctcgggcagccacagggagagagaagccagcagaacacgtggagatgggcagcaggagtgcagcggccccaggtgcg

SEQ ID NO: 19670 - DNA, 1654 bp, Artificial sequence
  DNA replication origin
agtaccaggctcaccaagtaccacactcaccaagtaccatgcatgccaagtaccaggctcaccaagtactatgcacaccaagtaccatgctcaccaaataccacactcaccaagcaccatgcacaccaagtaccacacgggctacatctgtctggtctgatgacaggaaaaacgagggctccctgcagaccacttcttggagcattccctgaggctggagggcagtgagttggccatgcccggcatggtgagtggcccaaaacctgtagccacgccacatggaccctgctagaaatggccaagatggcctgaaaagtcagtggggggctggagggcccagccaggatcctgctccccattcccccgccagcccctggcagccccaaacactgtgcagagtcgcaggggtgcccacccatatctccctgaccgcctccttccagggcacactcatcccagggggcaggcacctgtggggttggcacattggcaccagcccacgcctttgagtgttgtggtgtatgtgagtgtgtgtgtgtgcacacgtgcagtgtgtggtggggagtgtgatgtgtgccgtgtgtgtgtagtgtgtgtgtgtgtatagttttcagtatgtgtggtgtgtgtatgtgggagggctgtgatgtgtggggtgtgtatgtgctatgtgatgtgtggtgtgcatctgtgtgtgtggtgcatgtgtagtgtgtatggtgggttttgtgtgtgtggttttatggtgtatgtgtgtttgtgttttctgtgtggttttgtggtgtgcatggcgtgtgaaatgtgggtgtgtgtggcatatgtaatgtgtgtgtggtgtgtgtggagtgtggtgcatgtgatgtgtgcttgtgtggtgtgtgtgtgatgtatggtgggaatgtggtatgtgtgtgtttgtgttttgtgtgtggttttgtgtgtgtgtgtgccgtgtgtgtagtatgtggtatgtgtgtggtgtgtggtgcatgtggtgtgtgctttggtgtgtgtgtggtgtatgcggtgatgtgtgtgtggtgagtgtatgtggttgtgtttttgtgtgtgaggttttgtggtgtatgtgtggttgtgttttgcgtgtggtctttgtggtgtgtggtgtgtgatgtgtgtggtcgtgtggtgtatgtggcgtgtgtgtgtgtgtttgtggtgtgtgtgtggttttgtggtgtgtgtggcgtgtgtgtgtgtgtgttgtgtgtgtggttttgtggtgtgtgttgtgtggtgtgtgtgtggttttgtggtgtgtgtggcgtgtgtgtgttgtgtggtgtgtgtgtgtggttttgtggtgtgtgtggcgtgtgtgtgtgttgtgtgggggtgtgtgtgttgtgtggggtgtgtgtgtgtggttttgtggtgtgtgtggcgtgtgtgtgtgttgtgtggggtgtgtgtgtggttttgtggtgtgtgtggcatgtgtgtgtgttgtgtggggtgtgtgtgtggttttgtggtgtgtgtggcatgtgtgtgtgttgtgtggggtgtgtgtgtggttttgtggtgtgtgtggcgtgttgtgtgttgtgtggggtgtctatgttgttttgtggtgtgtgtagtgtgaccatgctcacccggctgtgatgtacctgctgggttccctgtccct

SEQ ID NO: 19671 - DNA, 1573 bp, Artificial sequence
  DNA replication origin
aaggggtgaggaagtgtgtggcaaacactgggctcctggaccaggggcacccaccccaggagcattcacctcagaagcgttgacccaaggagaactcatcccaggaatgctcaccccagaggcacctacgctaggagatctcaccccagaaaaactcaccccagggcactcaccttaggaaacagtggtactggcagaaaagaggtcaggcagtgccactggcttcctacggagaagctcaaagggacagaagaattcctggtgaggcctgccaggaaaggcactggccacttgctctggggtcacagacacctgccttgggagggagtcacagacacctgctgggggggcacagacacctgctggggagggacagacacctgctgggggggcacagacacctgctggagagggacagacacctgccttgggagggaggcacagacacctgctgggggggcacagacacctgctggggagggacagacacctgctggggagggacagacacctgctgggggggcacagacacctgctggggagggacagacacctgctggggggacacagacacctgctggggagggacggacacctgctgggggggggacacagacacctgctggagagggacagacacctgctggggagggacagacacctgctggggagggacggacacctgctgggggggacacagacacctgctggggagggacagacacctgctggagagggacagacacctgctggggagggacggacacctgctggggagggacggacacctgctggggggacacggacacctgctggggagggacagacacctgctggggagggacggacacctgctggagagggacggacacctcctggggagggacggacacctgctggagagggacggacacctgctggggagggacggacacctgctggggagggacggacacctgctggggggacacggacacctgctggagagggacagacacctgctggggagggacagacacctgctggggagggacggacacctgctggggggacacagatacctgctggggagggacagacacctgctggagagggacagacacctgctggggagggacagacacctgctagggagggacggacacctgctgggggggacacagacacctgctggagagggacagacacctgctggggagggacagacacctgctggggagggacggacacctgctggggggacacagacacctgctggggagggacagacacctgctggagagggacagacacctgctggggagggacggacacctgctgggggaacacagacacctgctggggagggacagacacctgctggggagggacagacacctgctggggagggatggacacctgctggggagggacggacacctgctggggagggacggacacctgctggggggacacagacacctgctggggagggacagacacctgctgaggagggacagacacctgctggggagggacggacacctgctgggggggacacagacacctgctgcggcccacgccagagccaggg

SEQ ID NO: 19672 - DNA, 993 bp, Artificial sequence
  DNA replication origin
ggcatgggcaggaggcagccagaagctgcgtgggtgcagagtgagtggaggggaggccaggggttggagtcaaggcagggaggtaagtggaggaggatggacagtgggcaggccatttaggggacttggactctgaatgagatgggctcatgaacagaagacgatcgtgatggacttgggcttttggatgctctgctgagaatagcttgtggggacccaaagaggggaagcagggagaccaatcaggtggccagctgggctgaccaggcatggggatgaggatagagtggtgaacatggggtggggtggtgagaaccagtcagatttcagagaaaagtgcttcgacagcagagcccctgggatttgctgatggaaaagatgcggtgtgagagaaagcagggacttaggaatgcctgctctcgggtggtctgagcacctggaaggatggagtttctgcagcagaaggcacagctgggtgggggcggtgcagcccgaccagaggttcgctgtcaacacatagtgctgttgcacagacaggctgggagcacacagggaagtcagagccagagcatcaaggtgagagcatttagaggtcatttcaagtcaggaaactgggtgaggtcacctcaggagggaggacagatgggggacaggaccaaggacagagccctgaaggggtgaggacgtggaggatgagtgagcagcctgcgaggtgggctcctggagaacccatctccaggatccactgaagacaggagggagtggctgctctgtgatgctatgtgatgagtatacaggagtgaccatttggttgtagggactgggaggccattactgacttggacggagcggtggctatggaatggactcagatcacaagtttgcagagggctctggggacagtggcaggagaggaactagaggcagtgaatacctacttctctgttgaggagaagaagagcagaaaaatggggctgtaatcttgtttttaaa

SEQ ID NO: 19673 - DNA, 1856 bp, Artificial sequence
  DNA replication origin
ccgtcgccccgctcgatgacgtcatcgccctccgcctcctcggacgggcagcggacggggcgggccgcgggggctgccgggggcgcccaatgcgcctgcgcccggcgccgctcggctgtaggggggaagggacgcctgggcgactgcggagggaagccggggtcgccgggcgcaggccagctcctcggccctcggccctaggcctcccgcagtggtccggtgtgcacccggcgctccccagaagactagcgccgccggccgcccctactctccggggactcccggagagcctaagctgcggccggacacgccttcagggcgccgcttggccggacacgcccccatcccgcatcggccaatggaaacgtgggttctccgtggaaccgccaatggaggacgcgcttggcggcggtgggcgggcatgtgggccggcctcacctgagcgcgccgtacctgagcgctgcctcccgcccactgcccccgacgcggagtctcgctctgttccccgggctggagtgcgggggcgcgatctcgactccctaaaagcctcgacctcctgggctcaatccatcctactgcttcagcctcggaagtagctgcgagcacaggcacgcgccgccaggctcgctgatttttaaattttttgtagagacgggggtctatgttgctcaggctggtctcgaactcctgggctcgagccatctgccggcctcggtctcccaatcctgtccacctccctttcggagcgcaccgttgctcaccagatggctaccttaggggttcttggagctcccagtgcagtcttagggaaacagggccgatcgtttcatttgcgggtggttttctctggcatactgagcgatcatgggtgctcctcgacttacagtggggctaccctccccgcaaataagcccttcctaagtcaaaaatgcatctaatacccaatctacccgtcgtaaagttgaaaaatctgaagtcgagctatcatcagggggactgtccctatgggattgatgtccggaatcagaacttctttcagggtagctgcggtgggcactgatggtattgcaccactaaaagacagtcgctgcaaatcaggaacattcgtccactccattaatattatttattgacagctcctgccacgtgcggcacactccacagccctgggggtgagaggttaacagagcagagaaatctcagccctggtagagcttacctttcagtgggggagacagacaataaggaaataaatacataataagtcggagctggagagaaaaatcagggaagaaggaaatgtgtatggggagagttggagtcttgcacggggtgactggagaagactcaaggataaagagcaaaccatgcagacgtctaggaaagcttggccaggaaggggagaccaccaagtgccaggacaggaaggagggccatgcctggcatgggcaggaggcagccagaagctgcgtgggtgcagagtgagtggaggggaggccaggggttggagtcaaggcagggaggtaagtggaggaggatggacagtgggcaggccatttaggggacttggactctgaatgagatgggctcatgaacagaagacgatcgtgatggacttgggcttttggatgctctgctgagaatagcttgtggggacccaaagaggggaagcagggagaccaatcaggtggccagctgggctgaccaggcatggggatgaggatagagtggtgaacatggggtggggtggtgagaaccagtcagatttcagagaaaagtgcttcgacagcagagcccctgggatttgctgatggaaaagatgcggtgtgagagaaagcagggacttaggaatgcct

SEQ ID NO: 19674 - DNA, 4255 bp, Artificial sequence
  DNA replication origin
gctgctgggttatttaaaaagtagatggaacctttctctggccacgcgccctgataacctccgtgttccccgcaggacaggctgtggtggaggcgcacacacagcacccagaggcgggctctgtggagttcgcatctatatgtcagcaacttagggtggtttgggccatgtttcacttgacctacagagagaaatgtgacacccaggttggcatagattgggattttttttttttttttgaggtctaggaattttttttaattgtggtaaaatatacatggcataatatttatcattttagccgttcataagtgtacagttgcgtggtggtaaatgcacttacagtgttgtgtagctatcaccactacctgttcccaaaacaacttcctcattaccaacacaactttgtcctattaaacaataactccccttctccccttccccggcccctggcgaccaccattctactttctgtctctgaatttgcccagtctagggacctcaggcgggtggaatgacacagcgtttgtagggacctcaggcgggtggaatgacacagtgtttgtagggacctcaggcaggtggaatgacatagtgtttgtagggacctcaggcaggcggaatgacacagtgtagggacctcaggcgggtggaatgacacagtgtagggacctcacgcaggtggaatgacacagtgtttgtagggacctcagtcgggtggaatgacagtgtttgtagggacctcaggcgggtggaatgacagtgtttgtagggacctcacgcaggtggaatgacacaacgtttgtagggacctcaggcgggtggaatgacacagcgtttgtagggacctcaggtgggtggaatgacacagtgtagggacctcaggtgggtggaatgacacagtgtagggacctcacgtgggtggaatgacacagtgtagggacctcaggcgggtggaatgacacagtgtttgtagggacctcacacgggtggaatgacacagtgtttgcagggacctcacgtgggtggaatgacacagtgtagggacctcaggcgggtggaatgacacagcgtttgtagggacctcaggtgggtggaatgacacagtgtagggacctcaggcgggtggaatgacacagtgtttgtagggacctcaggcgggtggaatgacacagtgtttgtagggacctcaggcaggtggaatgacacagtgtagggacctcaggcgggtgggatgacacagtgtagggacctcacgcaggtggaatgacacagtgtagggacctcagtcgggtggaatgacagtgtttgtagggacctcagtcgggtggaatgacagtgtttgtagggacctcaggcgggtggaatgacagtgtttgtagggacctcacacggatggaatgacacagtgtttgtagggacctcaggcgggtggaatgacacagtgtttgtagggacctcaggcgggtggaatgacagtgtttgtagggacctcacgtgggtggaatgacacagtgtagggacctcaggcgggtggaatgacacagtgtagggacctcatgtgggtggaatgacagtgtagggacctcaggcgggtggaatgacacagtgtagggacctcacgtgggtggaatgacacagtatagggacctcaggcgggtggaatgacacagtgtagggacctcacgtgggtggaatgacacagtgtagggacctcaggcgggtggaatgacacagtgtttgtagggacctcacacgggtggaatgacacagtgtttgcagggacctcacgtgggtggaatgacacagtgtagggacctcaggcgggtggaatgacacagtgtttgtagggacctcacacgggtggaatgacacagtgtttgcagggacctcacgtgggtggaatgacacagtgtagggacctcaggcgggtgggatgacacagtgtttgtagggacctcaggcgggtggagtgacacagtgtttgtagggacctcaggcgggtggaatgtcagtgtttgtagggacctcaggcggatggaatgacacagtgtagggacctcacgtgggtggaatggcacagcgtttgtagggacctcaggcaggtggaatgacacagtgtttgtagggacctcaggcaggtggaatgacacagtgtttgtagggacctcaggcgggtggaatgacacggtgtagggatctcacgtgggtggaatgacacagtgtttgtagggacctcaggcgggtggaatgacacagtgtttgtagggacctcaggcgggtggaatgacacaatgtagggatctcacatgggtggaatgacacagtgtttttagggacctcacacgggtggagtgacacagtgtttgtagggacctcaggcgggtggaatgacagtgtttgtagggacctcaggccggtggaatgacacagtgtagggatctcacgtgggtggaatgacacagtgtttgtagggacctaacgcgggtggagtgacagtgtttgtagggacctcaggcaggtggaatgacacagtgtttgtagggacctcaggcgggtaggatgacacagtgtagggacctcacgcgggtggaatgacagtgtttgtagggacctcaggcgggtggaatgacacagtgtttgtagggacctcacacgggtggaatgacacagtgtttgtagggacctcacgcgggtggaatgacacagtgtggggacctcacgggggtggaatgacacagtgtagggacctcaggcgggtggaatgacacagtgtagggacctcacatgggtggaatggcacagcgtttgtagggacctcaggcggatggaatgacacagtgtagggacctcaggcgggtggaatgacacagtgtttgtagggacctcaggcgggtggaatgacacagtgtttgtagggacctcaggcgagcgggatgacacagtgtagggacctcaggcgggtggagtgacacagtgtttgtagggacgtcaggcggctggaatgacagtgtagggacctcaggcgggtggaatgacacagtgtagggatctcacgtgggtggaatgacacagtgcttgtagcgacctcaggcgggcggaatgacacagtgtagggacctcaggcgggtggaatgacagtgtagggacctcacgtgggtggaatggcacagcgtttgtagggacctcaggcaggtggaatgacacagtctttgtagggacctcaggcgggtggaatgacagtgtagggacctcacgtgggtggaatggcacagcgtttgtagggacctcaggcaggtggaatgacacagtctttgtagggacctcaggcgggtggaatgacacagtgtagggatctcgcgtgggtggaatgacacagtgtttgtacggacctcaggtgggtggaatgacacagtgtttgtagggacctcaggcgggtggaatgacacaatgtagggatctcacgtgggtggaatgacagtgtttgtagggacctcaggcgggtggaatgacacagtgtttgtagggacctcaggcgggtaggatgacacagtgtagggacctcacgcgggtggaatgacagtgtttatagggacctcaggccggtggaatgacacagtgttcgtagggacctcacgtgggtggaatgacagagtgtagggacctcacgtgggtggaatgacacagtgtagggacctcaggcgggtggagtgacagtgtttgtagggacctcaggtgggtggaatgacacagtgtttgtagggacctcattcaggtgggatgacgcagtgtagggacctcaggcgggtggaatgacacagtgtttgtagggacctcacacgggtggaatgacacagtgtttgtagggtcctcaggcgggtggaatgacacagtgtttgtagggacctcagtcgggtgggatgacacagtgtagggacctcaggcgggtggaatgacacagtgtttgtagggatctcacacgggtggaatgacagtgtttgtagggacctcacgcgggtggaattacacagtgtagggacctcacgtgggtggaatgacacagtgtttgtagggacctgacgtgggtggaatgacacagtatagggacctcacgcgggtggaatgacacagtgtttgtagggacctgacgtgggtggaatgacacagtgtagggacctcacacaggtggaatgacacagtgtagggacctcacgcgggtggagtgacacagtgtagggacctcaggcaggtggaa

SEQ ID NO: 19675 - DNA, 2363 bp, Artificial sequence
  DNA replication origin
gcgcagtggctcacacctgtaatcccagcactttgggaggctgaggagggcggatcacgaggtcaggagttcgagagcagcctgaccaacatagtgaaaccccatctctactagaaatacaaaaattagccggacatggtggtgcatgcctttaatcccaccactcaggaggctgaggcaggagaatcgcttgaaccttggaggtggaggttgcagtaagctgagattgtgccactgcactccagcctgggcgatagagtgagactctgtctcaaaaaaaaacaaaaaaaatctgtatacaaaatataaatgtgtgtggggatgacacatatgtactctagcaagtgaggaccccaactggggatgggataggagaccatctttctttccagagtggcaacacagtgcaggggggtccctgtcttagcagtgacttgctggtgtgcagaggggtcactctcttagcagtgacttgcgggtgtgcagggggttcaccaccttaccagtgacttgcagggggtccctgtcttaacagtgacttgcgggtgtgcaggggggttcgctgtcttagcagtgacttgcgggtgtgcgggggggttcactgtcttagcagtgacttgcgggtgtgcagggggtttcactgtcttagcagtgacttgcgggtgtgcgggggggttcactgtcttagcagtgacttggggggtccctgtcttagcagtgacttgcgggtgtgcgggggttcactgtcttagtgacttgcgggtgtgcggggggttcactgtcttagtgatttgcatgtgtggggggggttcactgtcttagtgacttgcgggtgtgcgggggttcactgtcttagtgacttgcgggtgtgcgggggttcactgtcttagcagtgacttgtgggtgtgcgggggttcactgtcttagtgacttggtgtgcgggggggttcactgtcttagtgacttgtgggtgtgcgggtggttcactgtcttagtgacttgcgggtgtgcggggggttcactagtgacttgcgggtgtgcggggggttcactgtcttagtgacttgcgggtgtgcggggggttcactgtcttagtgacttgcgggtgtgcgggggggttcacttagtgactttcgggtgtgtgggggttcactgtcttagtgacttgcgggtgtgcggggttcactgtcttagtgacttgcgggtgtgcggggggttcactgtcttagtgacttgcgggtgtgcagggggttcacttagcagtgacttgcgggtgtgtgtgtggggttcactgtcttagcagtgacttgcggggggggtccctgtcttatcagtgacttgcgggtgtgtgtggggggttcactgtcttagcagtgacttgcggggggggtccctgtcttatcagtgacttgcgagtgtgcgggggttcactgtcttagtgacttgcgggtgtgcagggggttcactgtcttagtgacttgcgggtgtgcagggggtttcactgtcttagcagtgacttgcgggtgtgtgtgggaggttcactgtcttagcagtgacttgcgggggttccctgtcttagcagtgacttgcaggtttgcgggggttcactgtcttagtgacttgcgggtgtgcggggggtttcactgtcttagcagtgacttgcggttgtgtgtgggggggttcactgtcttagcagtgacttgcgggggggtccctgtcttagcagtgacttgcaggtatgcgggggttcactgtcttagtgacttgcaggtgtgcgggggttcactgtcttagtgacttccagttgtgcggggggttcacttagcagtgacttgcaggtgtgtggggggttcactgtcttagcagtgacttgcggggggtccctgtcttagcagtgacttgcaggtgtgcgggggttcactgtcttagtgacttgtgggtgtgcggggggttcacttagtgacttgcaggtgtgcagggggtttcactgtcttagcagtgacttgtggttgtgtgtgtgggggtcactgtcttagcagtgacttgcgggtatgcgggggttcattgtcttagtgacttgcgggtgtgcaggggttcactgtcttagtgacttccaagtgtgcggggggttcactgtcttagcagtgacttgcgggtgtgtgggggggtcactgtcttagtgacttgctggtgtgcgggggttcactgtcttagtgacttgcgagtgtgcggggggttcactgtcttagcagtgacttgcgggtacatggatagtcactgtattttttattcctcttgatatatttcaaatattgcaaaatacccttagattacatatccccaagaacatctaaaagcgttcc

SEQ ID NO: 19676 - DNA, 2649 bp, Artificial sequence
  DNA replication origin
ccaaatacgcagtgaaaatccagttaaacatttaaaatttattgaactttttggtcaaaatagttgaacaaatatatacaatcccattttactagaactgtcttaaggaccagggttgactaatgcttaaataactgttccacacctcagactttgtaaattgtgtcacaatcaatatacagtatataaattattttttagttaaaataaaggtacctttagattctcaatttctaacttaatgtgaactcaagtggcactgtgttagcattgattcagggtaatgacggacatcctgttcttgcccatgtggattagtaatcagcacacaccttcacctccacagggggatgggggatcaacacacaccttcatctccacagggggaccggggatcagcacacgccttcatctccacagggggatgggggatcagcacacaccttcatctccacagtgggatggcggatcagcacacgccttcatctccacagggggatgggggatgagcacacgccttcatctccacagggggatggcggatcagcacacgccttcatctccacagggggacggcggatcagcacacgccttcatctccacagggggacgggggatcagcacacgccttcatctccacaggaggacgggggatcagcacacaccttcatctccacagggggaccggggatcagcacacaccttcatctccacagggggatgggggatcagcacacaccttcatctccacagtgggatggcggatcagcacacgccttcatctccacagggggatgggggatgagcacacgccttcatctccacagggggatgggggatcagcacacgccttcatctccacagtgggatggcggatcagcacacgccttcatctccacagggggatgggggatcagcacacacctttatctccacagggggatgggggatcagcacacgccttcatctccacagtgggatggcggatcagcacacgccttcatctccacagggggatgggggatcagcacacgcctccatctccacagggggacgggggatcagcacacacctccatctccacagggggacgggggaccagcacacacctccatctccacaggggcacgaggaagcagcacacaccttcatctccacaggaggacgggggatcagcacacatcttcatctccacagggggatgggggatcagcacacacctccatctccacagggggacaagagatcagcacacaccttcatccccacagggggacaggggatcagcataccccttcatctccacagggggatgggggatcagcacacaccttcatctccacagggggacgggggatcagcataccccttcatctccacagggggatgggggatcagcacacaccttcatccccacagggggatgggggatcagcacacacctccatctccacaggggcatgaggaatcagcacacaccttcatctccacaggaagacgggggatcagcacaccccttcatctccacagggggatgggggatcagcacacaccttcatctccacagggggacgggggatcagcagtacacaccttcatctagataggggaacaggggatcagtacacacctctatctccacaggggcacgagggatcagcacacacctccatctccacagggcatgggggatcagcacaccccttcatctccacagggggacggggatcagcacacaccttcatctccacagggggacgggggatcaacacaccccttcatctccacatggggatgggggatcagcacacaccttcatctccacagggggacgggggatcagcacacgcctccatgtccacaggggcacgggggatcagcacaccccttcatcttcacagggagatgggggatcagcacacaccttcatctccacagggggacggggatcagcacacaccatctccacagggggacaggggatcaacacaccccttcatctccacatggggatgggggatcagcacacaccttcatctccacagggggatggggatcagcacacgcctccatctccacaggggcgcgggggattggcacaccccttcatctccacagggagatgggggatcagcacacaccttcatctccacagggggacgggggatcagcacaccccttcatctccacagtgggacaggggatcagcatatcccttcatctccacagggggatggggatcagcacacaccttcatctccacagggagatgggggatcagcacgcaccttcatctccacaggggcacgggggatcagcacacaccttcatctccacagggggacgggggatcagcacacaccttcatccagacaggggcatgaggaatcagcacacaccttcatctagacagggggatgggatgggggatcagcacacacctccatctccacaggggcacgagggagcagcacacacctccatctccacagggcacaggggatcagcacacacctccttctccacaggggcacaggcaatcagcacataccttcatctagacagggtgacgggcgatcagcacacacctccatctccacagcagcaggaggaatcaacacacaccttcatctccacaggcggacgggg

SEQ ID NO: 19677 - DNA, 1464 bp, Artificial sequence
  DNA replication origin
tgtggaacagttatttaagcattagtcaaccctggtccttaagacagttctagtaaaatgggattgtatatatttgttcaactattttgaccaaaaagttcaataaattttaaatgtttaactggattttcactgcgtatttggacacccttttccatcttcctctagaatgtatttcccactaaatagcccacctcctccacccccagggcagagcagaaggtgcagcccaggcgggtcccgtgtgtagaggttccacgtggcactgctgctcccgtggaactgccactgccttgaggtctgcggcgcacgttccctggaggtgtcgtcacctagctctggggcgcctgcgggggaagccacctggccagcagtcctgtccgtttctgtgggttctccccagtgcagtcttgatgttctgagaggcgctggcaattccacgcacctatgtccgcaaaaagcaggatccattcactttagagaagtgccctcaacaggcgcggaggaagacgtgccctcaacaggtgcggagaaaacttctctttcctgcttaaagtagaacagtgtcatcagcttctgaaggttaatgctgagcacagttttcattgatgaggattctgggcccgtggttcaggtggaggtttgctgctctctgggctgatgacccggattccatgaacacactttcttcgtaagtggatttaacgtgccttttttgaaagaaaaatggagctcctatgaaccagtttatgatgccctcgtggacagactcagtctgattttggaggccacacgactggcaggtgtggctggagactgcagcatgtgcgtgtctgtctgtcctgtgtggagccaaatcatcaccatcagtgccagaagcctcccaaagcccagtgccatgggattggtgtgtgtcctgctcccggccggaagaagctggccctggatccgcctggcccggctgctctgcatcacccctttgcttgcttgggaggaagagtgggtctggggctgcggaggctctccgggtggccttaagcttgctttctcctaaacctgtgctgtgcgtccttggccagcggctttggcatcagccagggagtgggggagtgaggtcagagccagcaggagtccgggctgtgctgggtagcagaggtcgcatcttcccagagctgcaggcaaagggacaggatgggcttgctgtatgagggcgtggctctgctcgtcctgggctgggccaggggtgctgagtggggctgtagccgcatcttctgtggcgagctgtcctgtcgttgctgtgctgggatcgccaagggagagggacggaagctgtccgtgagctggtgagacagcaagccaggaatccagccacaggtggggagacaatgcagctcaaactggtggagctgcaagggcccacagaccaccttcagacgctgcccgcggccgacgcttccccaaccc

SEQ ID NO: 19678 - DNA, 978 bp, Artificial sequence
  DNA replication origin
ggccccaagtcgcggccaatgggcgacgcggccgcagatccgcccggccccgccctgccctgtgagttcctccggccgggctgcggggctccgctcagtccgggagcgcagctgggccgcggcgctccgacctccgctttcccaccgcccgcagctgaagcacatcccgcagcccggcgcggactccgatcgccgcagttgccctctggcgccatgtcgcagaacggagcgcccgggatgcaggaggagagcctgcagggtgaggcggaggaggcggcgcgggagccgagggggcgcgggggggaagcctggggaaggccaagagggcgccaaggggaggttgccggggaggcctagggggcatcgcgggccgggcgaggctgcgccatcctccccttccgtacccacccctcctgcgggcatgcggagcccggggcgtggggaccccgcgtactgcccggggttcgcggcctcgccactcgggcgggggttggcttggacccgggtcggaccgcacgggaaagccccgattctccagctccgcgcgagctagaattccacctggaggtgaatctgcgtctcgcagttggaccgaacagcctcaaagtccacgttgccctccgcggtctgtagttcagaccagtattggttttaatgaccaaacaccaaggcgtggcaagtggcctgttatgagctttaattttgttattaatgtttatatccatggtgactgttaggatttcctcaagggtgaacgcggagatgggagggggttacagcgtttttaaaatatggcattaaatgggcatgttccaatttcactagagggtcgttccaaaacaaagctttaaatgacttacgggttaagaaaacacaagcaaaaggacgctgcccgtgcagcactcagtcgttacagcctgcctaatgcccgagtagaggctcgctgtgtgcccttggctagattcgcaagaccatccg

SEQ ID NO: 19679 - DNA, 1092 bp, Artificial sequence
  DNA replication origin
tctttccatcctgctagtggggaaactgaggcgcggggctggcggcgtccgtgcggggggcgtgaggacgtgcagggaagcggccgctgcggctccgagacggcccgtggggtcgggacctgcgcccggggcgggagctgcgagcggtgggccggagctgagcgtctcgggacgggaccgcgtccccgggtctttgcccgccccgccggggcgcccctgcgtgaacagcggggcccgttgtgtccggggcgtccgcccgcaggaagaagcggaggctcgagcagagtcgaaagagtctgcccgagggaggcgcggaccccaggggcccgggagaggcgcgccgtccgcctctgcggcaaggggcctccggggtgcaaacgcggtgtggggcgggcgtccccggggtgggacgccccgtccacggggcggagtggcgcttggtcgggccgggtgggtgcccggcttccgtgggagccagcctggcgtgggggcctcgcagcctcgggactgggaggcacttttcagaggaaagtcgctttctcatttcccgcttttgatcaaaagtctttcttcttgaaagcattgttgatccaaatccaagtgtcaaggtgcgccccagaaacgctgcttcccagacagtcgtgtctggtcttgcgggaaaggaggaggcgtcccgccaaggaaccaggcgctcagaagctgaaccggggtcacagagccgcgaagccagacctcagtcgctgcgtgcatttcatccctgctcttgcctgttgaatcgtctctagtctttggagtgccatgattttagttttctcaggagtaacaaacatccagaggccagtgtggggcgcatgtctttcatctcagcactttgggaggccgaggcaggaggatcgctggagcccaggagttggagaccagtctgggcaatatggcgaaacgctttctctcccctaaaaaaatacaaaaaacttagctgggtatggtggcacctgctgtgggaggattccttgagcccaggaggtaggggctacagtgagccatgatcaggccactaccctccagcctgggcaacagtgtgagaccctgtct

SEQ ID NO: 19680 - DNA, 1234 bp, Artificial sequence
  DNA replication origin
gccaaggaaccaggcgctcagaagctgaaccggggtcacagagccgcgaagccagacctcagtcgctgcgtgcatttcatccctgctcttgcctgttgaatcgtctctagtctttggagtgccatgattttagttttctcaggagtaacaaacatccagaggccagtgtggggcgcatgtctttcatctcagcactttgggaggccgaggcaggaggatcgctggagcccaggagttggagaccagtctgggcaatatggcgaaacgctttctctcccctaaaaaaatacaaaaaacttagctgggtatggtggcacctgctgtgggaggattccttgagcccaggaggtaggggctacagtgagccatgatcaggccactaccctccagcctgggcaacagtgtgagaccctgtctcaaaaaaaaaaaaaaaaaaaccgccagagatacatagcatagcattaataatttcgatagtagaactgtagtgctggccaggcagtggttcttgtgtgtaatcccagcatttggggagcccaaggcaggagggtcacttgagcctgatagttcaagaccaacctggcaacacagaaagactccatctctattaaaacaaaaatgttaccaagtacggtgcacataaggattacaatgaaaaagagaatgtgtatgccagaatgaaaaacggaacctattcgagggagtcaactaaaagtattacgaagaaaatcaaatggagaattgttcagaatagtgtagcctagtggcttgtactttttcccatatgagtttctacttcgtggaaagggtttatgcacatcaagaggtatttgccaccatacatagacttgcttgctcagctaataatcgaaagcaatgcagtcgtccagtgcagccttagccagtgagtcagtagctttttgttgggctgtgatggaggcagcagtttcatcagcaatatttcctgataggccagatatgctcgcagtcatcccaagtaaaagcaaacaaatactgactctaggtccactggaatactaaagaaggcactacataaatgagtcacagtgtctcacttccagctgccgaaagaggatggggctttggtactaccagatgtctggggatcacagtgttgatgacggttctcaaatcttgtacagaataccagctcttcccattcggcttccttacaagaaggattggagtattacatgctggcgcaaggaataat

SEQ ID NO: 19681 - DNA, 1675 bp, Artificial sequence
  DNA replication origin
tctgaggagtgtgagaatgtcatatggagggccaggcacatggggctcacacctgtagtcccagcacttcgggaggctgcggcacgtcgatcacttgagtgcagggagttcaagaccagcctgggcaatatagtaagacctcatctcttaaaagaatgttgtgtggagcctgtggcaaaccttgacagaacaaccacaatcatggttattgatgagtattgttgagtgatcgcctcatcaacaggtcaccattcccttttgagaaacagctgctggcttgctcatgggttgagtagacagcacatttcactgcaattcactaaaagatcatgcaacataagctgtcaatcagtacctggtgttgtctgatccaccaagccatagagatgggcctgtccaacaaaactatcataaacatggaggcagtacatgtgaggtttgttatggactgaatagtgttcccccaaaattcatattttgaaggcctagaccccgtttgcagacaggacctttaaggaagtgaggtaaccatcaaggttaagtgaggtcatcagggtgggtcctgacccaatgggactggtgtccataagaaaaggtgtgacaccagacatgagcacacacaggagagaccacctgaggacctgcagagaaggcggctctctgtgaggcaaggagagagtcctcggcagaaaccaaccccatcagcaccttgatcttggacttctagcctctagagccgtgagaaatacacttccattatgacagcccgaacagactgacacgaggttgtcctcaagcatatccgagacaccctgagacaccacatgagcaggaggctcgccctccaaaggcacccactccctctgcaatccttgctcctccacctgcatttttggttttatggggagttccctaaaacaagctgaggaatgaaaaatggagcctggtgtacagatggttctgcatactaggctggtgcggcgggcccgggctcagcatcacagccctactccagctggccctgatggacgtggtggaaaggaattccatgcagctggccaaacttcaagcctcacacctgattatcctctcctttacctggagggacagttgatgatcaggggcttagaaggcacaggtttggaggattggagttgaggaggtatgtggaccgacagaccgtgtggaggggtctggaggtgagggggcttttgtgctccacgtgcgtgctccccaggactcctcctgcacctgcaagctcggtgggggtgggggtgggggtggggggcgtggttcaggggattcccagctctgcagaggtcgccagctctgctgctctatcccagcctttcacaaagcgcgcatccgtgtggccgtggtggcgtggatggagattatacgtgggctgaacaccaacaagtgggtgcggaccttcctcccgctttaccctgaagtcccagcccggagcacgcggccgtggtgagctgcgatcccaggccccggcgcagcgctgagactgtggctctcaatccgcagcagctgcttcatctgctcaatgccagactccaaaaagcatttctctcgcaacaggccaggggaggcagcgttcggggatgggacgccaagagttaagggtgaggccgcacgcgtgcagctcccccgtgctgcgcatggc

SEQ ID NO: 19682 - DNA, 1305 bp, Artificial sequence
  DNA replication origin
accgggactgcgtgggggaggatcgcggcgggggccgtcgccgagcaaggagcgcggccgcggggaccgcccgggagtgggggcggcggggcgggccgggttcggggctcctgcccgcggtgacggtgacgcgcgcccccgcccgccgcctctgccatggccgatccggtccgtcggacgccgcccagagtcgctcgcggggagcctcggtgagcagcggccggggtggggccgcgaccgggggccgggcctctgcgctgcgtctggcacggtgcgtccgggacgcgggcgccctggcggccgtggggcgggcggggggcgacgtcccgagggagggggtcccgcggcagagacgcccctgtctggggcggggtcctccttgcctctcccggcggtccccccgtgggcgggtcctctccacggcaccccctgccctgcacaggcctcggcgctggcgtgacgcggccgctgggtggggcccgcgcaggtgctgggccagggctggggacccgcatctccgtgtctccgactgtgcctcccgcggaaaggggcgccgtgcgattatttttatgttggtgtctggtttttaaatttcacagcccccatttcagggatggccagcgtggccgtgggatgctgacgatacgggaagccagagaataaaggctttggtggaggtcgggaggaggcgccggcctggacagttttcctagaaaatattctctgcgtgtacccgcgaccttgcctctcgtggaaagccgctgggagttggagcggctccctcctgcccccgtctgaggtctggctggctgttttcttggtgaggtgctggaatgcacaggaggctctcctaggcaagctgtctgcaaatgtaagaaatggggtggtgacgcgcagacctgggattcgcttgcagaacctaggaaatccgttgtcatggagggagccagggagctcttaggtgttggggaagcctccctccacctgcgggtgggtggcaggaggagaaagtgccaggccgtgtgtctgcaggggctgaggattaaacgcaggggtcaaaagacccctgctggatttggtggtgaatcagtgctggctttggcagctggggcaggattccctccctcaagtaaagggcaagtcgggctgctctgctgaccccttagtaaactggagtggggagggcggagtgtctccaggaggctcagcggaaggcgggcaggcaccctgcagccctttcaggaggaagagcctggccaagcgcatatctggtttgggcttcagttgcctgggccgcagcgcagg

SEQ ID NO: 19683 - DNA, 1037 bp, Artificial sequence
  DNA replication origin
agcattaccggcaaaaggctggcgtttggatgaggttccctaagagtcccacagagtagatcaatatgatcaatatgtgcttggagaagacaagacgcctggcacattcacattccttctccaaggctgagggtggggggagggcattggcattcctgctattcccgaggtttccctgcctctcctgtgagttgagggcacccctgtgaaacctaagggcacgctgtggcagagaacatgcacggagctcctgcttctctcccgacagccctgggaaggccttactactttaggtcctaactaacaatatccaaacgaccaggtggtggtcccacagcaagggagctgtcagtcagagctgtgcctctgcccccgtattttggatcgagctcctccaagagaagtaagtgtcctatacatgttcttggaaggttgatcttgactgtggacttccgtgtggactgtgggcttccgtgtgtactgtgggcttccgtgtggactctgggcttccgtgtggactggactgtgggcttccatgtggactgtgggcttccgtgtggactgtgggcttccgtgtggactctgggcttccatgtggactggactgtgggcttccgtgtggactctgggcttccgtgtggactgtgggcttccgtgtggactgtgggcttccgtgtggactggactgtgggcttctgtgtggactgtgggcttacgtgtggactgtgggcttccgtgtggactggactgtgggcttctgtgtggactctgggcttctgtgtggactgtgggcttccgtgtggactctgggtttctgtgtggtctggactgtgagcttccgtgtggactgtgggcttctgtgtggactggactatgggcttccgtgtggactgtgggcttccgtgtggactgtgggcttccgtgtggactgtgggtttctgtgtggactgtgggtttctgtgtggtctggactgtgggcttccgtgtggactggactgtgggtttctgtgtggactgtgggtttctgcgtggtctgg

SEQ ID NO: 19684 - DNA, 2005 bp, Artificial sequence
  DNA replication origin
cgtctgcagtggcatcctgagggcaccttcctccctctgtaccccatgacagctcccagctttgccatctgcccgagcctggtccctccagtccccgtctcacacgtgcagagctgacatccaccctgccgggcccttctccccatccaggtggaggccggcggccctgcagggtgagacgtgcccagcctcttcccagttcacctgtcagccccgcaggctcctcgtggttcctgggtgtctgcatcgcctcccaggtgacgggtcacctccgaccctcctttcaccctccctctgtgaggccatcttcactcacccgtggaagtctacttggctgccctgtggccctcccacctgcccgtcctgccacctccgctggtctctgagccccacacccacacagcttggccttcatcaaactgcagggcccatgtccaagtctccctcccatggtcctgtggactgataaatagggggctggagacagatgcaggagtagggggggagggctgtgttcaccaggccggagaggagatgcaggagtgatgggggcctgtgttcaccaggagaggagacgcgggcatggggtggggggaagtgttcaccgggagaggagatgggggcgtggggtgggcctgtgttcatcaggaaatgggagcaggagttgtgggggtgggggctgtgttcaccgggaaagttcccatgtgtgatctgcctgcttgtcccttctatcctggctgccttcactgccctgtaacaggtgacaggagcagaaggtaaacaaggacaagagggaaaggtgcttttttccctctgtcggggaaagctggtcatggtggggatggaaggaggccccaggagcaggagggccacagaggagcccaatggacctgttaggagcaccgggggtccttgaccctctgggcagccaagaggagcatctgacataggagctggggtagagaagcagctgctggagaggaacatcagggggagagaggaacatcagagacggggaggagcacctgggggagaggagcagctggaggggaggagcacctgggggagaggagcagctgggggggggaggagcagctggaggggaagagcacctgggggagaggagtagcttggtggggggagcctctgagggaaaggaacagctaggggaggtgcctggcagcacagaaggaaagtgtgaggatctcaccagcctcgtctaatcacctcttcttagacaatgagcagcttccctggggttgaacctggaggacttgctgtgaccagtggagatcactgattgcctacaccaggtccctagtgcctgaccatggattggtgcctgtccgtggcctgttagaagctgggccatacagcaggaggcaagcagtgggcgagggagggaagcttcctgtgtatttacggccactccccttgagggacacagagccagaccctatctccaaaaaaagaaagaaaatccatctccattaaacagtagctcccattgcctctcctgccagcccctggcacccaccattctacttagttcctgggtttgccgactgtagatcctgaatatatacgtgaaatcatgcggcatttgtccttctgtgaccggctcatttcacccagcctaatgtcttcagggatcctcctgtcatagcgtgtgtccgaatctccctcctggttacagctggataatattctgctacgtggatattctgcattttgtgtagccactcatccatcgatggatgcaggttgcctccactggcagctacctggattgtgctgctgtgagctgggcgtgcgcttctgttccagtccctgctttccgcacttctgggcatttcctgggtgcagcttgtgggtctctgtggaggagcccggtcacggggtccctctgccgtctgagagctcgtggtttatatgtgccattgccgccatgtggcctcacagccatgtacagaattctgagttcgaagttgggtgcccactccct

SEQ ID NO: 19685 - DNA, 1274 bp, Artificial sequence
  DNA replication origin
tcgaatccaaccaagacaaatgaaagggtcgtgtggcactgggcagaggcagccacctgtccctcccaccttcccgggacagtggcaacgcttccttccttccccgcacagaaaagcaagcatcgtgtcacgcgaagaaagcacccggttcttatgagtgctggtttgggccgggtccttgggttgctaaggtgacatcgatatgtggcttgggacagggcgaagaggtgtaggggaggttggaacagggaccactttggaaaggaagggaatcacccgggttaggcacgtttgggggcacccacgtgtacactgtggcgaggtcatatttactccacaatggctggttctcccttcctggctgtgggtgtggagagcggctgcccctctctgggagttccacatgctggcccagcctggaggccatccctggagaccggaggccccgggaagcaggcagagggaggctgccccaggtgcacagccacgccccgtggaaagaccactgcatcccacccaaggtgcccggggctccgggtcctgaagaggcacagggctggggcacgcacctctaagacagagctccatttcccccaaaatcacaggacagtctcctctccaaaggacaaggggcatcgggtggaatcagtcccttgcaatccctggacattctcgtcagctgaaccctgggcctttgagaacatcgactctcctggtgcctgccatgggtgcccaggtctctggagctattaggctgcaccagatgccaacgttagacctcattgatccacaaaaccggcagctcatctggtccagcccaagtgcaacggttctgcagagacagggacctcagggcagctgggggccatcccaccccccggggcctcctgatctcgcctctctggatcctgtgagttcaactggagaatcactggagaattccctctgagtccccccgtgaggatgtgtgggactcctgctgcgaaacactgagccctgcctggtgtcaggtgtgacccgggacactaagaagagatgtccgtgaaccctgcggtgtggatgggcagtgccgatttctaggtttcttgctgtggcccaagttaagaaaggaagtagagctggtgtttgtggaaaaggggaggtgagagtctggcctgccccgtgcgggcctgactgtgggtctgaaccttttctagtggtctcgtgactctagggtcctcaaaaccaacaggggtggcatgaggagcctgtgctaagaatgtcatggggggtga

SEQ ID NO: 19686 - DNA, 1072 bp, Artificial sequence
  DNA replication origin
aggttactctttaaggtgaacaaagcaggagaacgtgctactccagaaatgaagcctttttataaagctagaataattactacaaagtagggcggaggagggactgacaatgagacaccagaaagtccactcttgtaagaacaggtgcaatctggcagagaggagctgtgagaaagggggagacggtttttgaagtaagggctgctacagacataagtatgcaagacgaaactataacatttttaaaagatgaagattcctgactctgggatcgaaagatttcctaaacaagacaaagtgagtaccaatcctaaagggaaagataagcaaattagactgttttactttgaaatttaagaccttagatcataacacgatgctgttgagcacaggaaaagataacccacagaacggggaacacacctgcacttcggtgtaagttttaggaccagcttgcccgtagctgcaaaaaaaaagcctgtacggaggggagagatctggcgaggatggagagtgaagacacaggttggagcatgcttttgaaaatttgaaataaaatccagaagaatcagccagaggaactgtgaatagctgcctctgggggttcagatcgggggtgagaggggatggcagggaactgctggtttctgttacgagcctttacttaagaaaaaagctgccttcctctactgagagcatcgaatccaaccaagacaaatgaaagggtcgtgtggcactgggcagaggcagccacctgtccctcccaccttcccgggacagtggcaacgcttccttccttccccgcacagaaaagcaagcatcgtgtcacgcgaagaaagcacccggttcttatgagtgctggtttgggccgggtccttgggttgctaaggtgacatcgatatgtggcttgggacagggcgaagaggtgtaggggaggttggaacagggaccactttggaaaggaagggaatcacccgggttaggcacgtttgggggcacccacgtgtacactgtggcgaggtcatatttactccacaatggctggttctcccttcctggctgtgggtgtgga

SEQ ID NO: 19687 - DNA, 1736 bp, Artificial sequence
  DNA replication origin
gagcccagctcagtccgcacagctgctgggatgcacttccttcctccacccctgaccacagctgcccaggcctcatcagggacacagctcccatcagttcaccctcagccccattcccagagcccagctatctatctgtctatatcctggttttgtgcaatttaaataaaataatgaaaaacccagggagtacttggctccatgcccatatcacaagaggtgccctgagggcatcagctgtggtgagaggtgccctgagggtgtcagctgtggtgatggagcttctggtggcatcaggaatccagccaccgggaccctttcttcctggggaccctgtcccaatggggcccccttgcctaactgacaagggtcccaggacctcagatcttctcttttaaggccgtcatttatgagagaacaccccggcctctaaaatcccgtggtgacggacagggctgctccccaggcccagctgtgagggagtgtctggagttaaatctacgcgtgaggtggaggggctgggagagccaggcaggtgtgtggccgctcgagctgcgggggcagcggcacagcgtggtgtccagcctgggcatgagaggcagcttcatgaggatggggaagtctgggatggaagctgctcagagagggactcggaacagggctgggacagaaaagtgggaggaaggtggactggggacaggggactgggggcagtcagagaagaggcaggctggggtgagggtggggtccagaggcagggccctgccccaagtgtcagcagagtcagtagagctgggggtgctgctggacctttaagcccagggcaggacagtggcctcccgggcctggcaggagctgcaggcgggaggaacatcattcccaggttccaggacagccgccaacccagctcatggggctccagcaaggctaggtgggcgacggaggcctcgggttctcccaacgagagacagctactattacagctgaaaatatcacataaccttggttccttacatcaggcaaacattttgctgtttctgtggccatagcacgggccggcacctgagtcctagaacattctggtgtgggacgctcggcctcaccgggccctgggtgaggacgtagcgggtcagggatgggtctctgctgcagggagcgccagcctctgggaggaatcgatctttgctcacggtcagacattgctccctcgagagctgtcccatgatggcctccacccccaggtgtgggcacattgccgtggccctgggagggtggtatctgagtctggggacgggcaggcctggggatagagcactgtggacgaggctggcctgactgggacactgtgggagctgggggtttccgtgcctcccttgctacttagcgccacacgcatggccacaaccccagcaaggatgtgctctctgagggcgctgcttctatggggtggaacctgtcccaccaaggtccaccctgaggacagtcgcgtctggcagggctggtgaaggagggggagggtctgagggagtcctgggtgttcagcacacactcagaaccatcatcttctcttcccaaaatggaccccgtgattcaaggttctgcctccctaactctggccagcaaagcctcctgtctttactttgggtctgttttgttcactactcagtccccagcacctacggtaggtgttcaataaatttttgttgaatggatttcaacaagaggtggcccattgg

SEQ ID NO: 19688 - DNA, 1111 bp, Artificial sequence
  DNA replication origin
cctaactctggccagcaaagcctcctgtctttactttgggtctgttttgttcactactcagtccccagcacctacggtaggtgttcaataaatttttgttgaatggatttcaacaagaggtggcccattggtaaagagcacagcacccctgtccccgcaaaggcccagagtcagaggcctccccagcccccctggtcggctccccggctgtcggggccctgactgccccccggtcggctccccggctgttggggccctgactgccccccggtcggctccccggctgttggggccctgactgccccccggtcggctccccggctgtcggggccctgactgccacctgccccagcaccccagccttggcccagacaccagcctgactgtgggtcttctgggccgaggctcctgggtgccaacgggaggctgttgccatctcaggagcccactgggcacctcagttagccctggatggggagagactggaggggccacacagcagggcagggactgggcaggggcagaagcccagccgggcagggccacacctgctctcagagcatggaggctttaacaggcaagccctctgtcttgtcctgggaccctaagtgcaggcctggaagtgtggcacctggtgagggctcagggtctcagagaggaagccagatggagggaagacaggagaggcctgcagggtggggatgtgggagccaacagacaccccagacaagcacggtcgctgctgccagggcagggctgggcacagcagggctgcaaggctgcactcagggctgggctgctggagaagctgggttatccagtgggtcagggacgccctctccctgcccagaaggttgtggtgggtggcactggggttagagctgctgctttgccctgtacgtgtcagaatgccttggctagggaactcaggaatcacccactggcccagggcccatcatcttcaggccccagtgattccactgtgcagaccccttgattttacagcagaggaacctggagcctcggaaggctccggagccaaatcctcgtctgcgcatggcccactctgtgctcctggagaagctgggctcccagcggctttcttggccaa

SEQ ID NO: 19689 - DNA, 1306 bp, Artificial sequence
  DNA replication origin
agaggtggtgtgagtgacgcctgccagacgtgagggctccctgcacaggcccagtgtttggaaggatcctggctccatgggccctgggtcaggagacctgctcgggggttgcaggtactctgccaacaccttaggcagtcacctgtctgtggcactgaggcgtggtcagcccaggttgggagcagccacagctgccagtgaccatgctgggggtgatgacgtggcctgtgtagtgagcatgcttcatggctgtggcgagacgcatgtgtgcaggggcctcagcactgtggggcagtggtgagatcatgtccgtgggcttcacagcagggaggcttatgaaatgcagcttcccaggctccaccctagaggttctacatgctcatcttggggggctcagggttctgcctatggacagccgtcacaggtggctgtgatgctgcatgtcggggccccatgcagagagacactgtgcggggcatgcttgggggcaggcaagtcgggggcgggcagagtggaggggcatcttctctcctccagcctcagcgtcggcctgcacaccccctgtcctggagagtaccgtctcaaggggcttctctccagtttccaggcatcctctgcagctgggagtgaggaggtcctggtgggtggggaaggcaacagagggagctcatggggtgagggagtatgggggcgttgtggggagacgggagttcaggggatgaagagtatggggaagagtcggggggcagggagatgggagcttatgaggtaagggtgtggggggctggggagataggagcttatggggtgagtgtgtgggggcttgagagacacaggacttaacgagtgagggtgtgggagatgggagctctggggtgcaggtgtgaggcccaggggagatgggagcttatggggtgagggtatgggggcctgagagacagggtacctaaggggtgagggtgtcgggcccggggagatgggagctctggggcacccgggggctccagcaagtgttgtggatcctgttcttagtgccggggtaggatgttttatgacagcctctgactcttgtttgtggagctgactctagggttgtgagtggagcagcttgggtaggcacaggagaggacacagggcggccgtttggaagccatagcattcgtcccagtggaagatgctggcagtggggtgatgcttgcagcctggtgcaccaggacgcctgtttcagctttgaacgtcccgtgtcctgggagccctctcagtccggaacccgctgggagggctcttcccccgggtgtctgtgtgg

SEQ ID NO: 19690 - DNA, 1116 bp, Artificial sequence
  DNA replication origin
cccggtgctgggagttggcccaggtgggagggactggcccagagcggtgccaggcacaggtgtgagtaagggtcctgggggaggcggggtggtagtggtggcaggggcccacagcgcccagggtgggcctccttccagaccacctcttccactcttggcagcatggcgatggcccgtggcagcatcgagctcggtgttgaaacttgtggaggtcattcatcctcaaaggctgagctcacacaggctgtgcctgccccggccccggccccggcccctctcccccggcctccccactgggcagcaccccagcagccgtgtccctccgcccacttccctggctcaccttagcgtcgtcccccaggaaaggcctcagtgtggctggcgggtgccctctgcgggccgtggagggcagtgcaggcaccaggcctcgtggggagagcgtgggccatgggtcgggggtcctcttgccgccccaccctcccttactgaggctcggaggggaagccgctggaggacctgcacctggtacccctcacagcgagacgggctgctttccgggggagctgaggggttctccagagcaggcagctgtggggtgtggggttcccgttggcctccccaccccaaaaccaccctgcagggccagagatgccagtgtctggcaattctgcaacttagggtggctgagctgggtgggggacggacctcttggggcgaggggagagtgtccacagagcatccccagcgtggtccacgctagtgccccagggagccgccagcctcatcctctgtccacccagaccgccctggtgacgtggctggtttccctcctgccttcctggcacctcattggggacgtctgttgtgaaaactaagagagagctccacccctctgtgccctcctcctgtcctgagtcggggtggggggggctggccttggagggggcgtcccctcctcaggctcggagagatttgtctccgtaactggggactttaaatatcgcctctttcactttgacttaatttttgcatgacccttggagaaaggaaaaagtcaaggcctcggttcagagcatcataaagcacagcagccccgagacatcccagagcctcatg

SEQ ID NO: 19691 - DNA, 1137 bp, Artificial sequence
  DNA replication origin
ctcaaaaaaaaacaaaacagttctccctctcttagaaagcatctcttccaaaggaagggcgaacagtcacttctcaatgaactgaaccaaaagacagacccttctgacgtcccacgagtgtgtgtgctgtctgtcccagcttttagagaaaatttgatgtatctttcctcccgtcctacagacccgtgagcagctacaagccgaagtgcagagggcacaggcgcggatagaggacctggagaaggccctggcggagcaggggcaggtgagcctgcagccatctgcacgggcgtgggggcacacgtgggtgggaggtatttggctgtacctaaagacaagcttcagtggtgcgatcataactttctacagccttgacctcctgggctcaagccatcctcccacctcagcctcctgagtagctgggaccacaggcatgtgccaccacgcccggctaatttttgtattttttgtagagacggggctttgccacgctggccagactggtctttggtgttctgccacatcacgatttaaacgttggtttatgagttcctccctcagtgtctttatttctttcaattccatttgcaaggatatgaagtggattgaagagaagcaggcactgtaccggagaaatcaagagcttgtggaaaaggtgagccccgaacccctggaggccctggcaggactcgctctatgctcctgggggttgcagtggtccctgcggggctgaaggatggagcgagggctgaggcttctgaatggctgtcccaggccccttctgctctgctccctcctgcgggaccccatcaggagccctggggaggaggatggcctggacagagggagctggggcctgttctcctgggtcctgttctcctgggtccgggcaggcccctatctgcagcagcatctccattcgtgtcccgttgtgctgatggttctgtgggtgggctggttagagcatcgtgacagaggagctttattgagaccactagaatcatccccctgggaagcctggctgggtcagggaagtctccttccagcaacgcttgtggggaagctgaagtcctcggggaagagcccatggaccagcctggctgagcaagtgcgtgtttgagacttcggcaaggcgtc

SEQ ID NO: 19692 - DNA, 1268 bp, Artificial sequence
  DNA replication origin
ggcagaatctgcactggacctggacctgcccacaaggactgcccctgtatattcgctgaccccagatgtgccgggcagagttcatcacactctggccacgtggcctgggcagtcccaccctgagcccacgggcacatccctcagtgaatcccaggggctatggggaggatcaggggaggggctgcaggttgcatccccttcaggtctgaccagaggagcctctggagaacacaggctggcagtgctgccactgtccccacaggcaggcccacgtggccgaggtcgtccacacatggagtgaccacacagctgccctgtcctccggcagtggacgggcagactcttaagaggcggctccagctggactgtgaggctccaggtgctggcctgagacggaggcctcggggctgtgtgtggtgctcggcaggggcggcccctgtgtgggccacttcctcccagccccacaggtggaccacccttgccgtgaaacaatcacagcgacgtggctgcccacacccagcctgagctgcccgtgggattcccctcctccctcctcctgtgcaggtcatggcagaggacacagggccagggatggcagggcacaggcaaagggctcccagtcaccgcgtggcccccactgtcctcactcaggggcaagaaacaaacgtctgccgacggcggaggcctggacagagccccacaccagctgcagcagggccacgggggcggatggaggacgggcggatggaggacggacgtgccggctccttgggggtggatggaggacgggcggatggaggacgggcagatggaggacggacgtgccagctcctcaccccacaggtctggagcagatgctgcactgtcacccgtcgtgcttttgttttgttttccctgcatgacactgagcgccacgggccatttcccccatatttacacgtgctttgggcggctggcctcatccttcgtatgaagaggtggtccctgcctgacactgagctccatggcccatgttccccattggatgtttggacggccggtatgaagaggtggcggtttacggccatttgcctctttcctccctgacgcagccttttgggttcatgttcatgttcatgttcatgttcagggctttgtgtgggttaggaaggctgaggactagatccctgacacagccacaggccacagtgctggccatccactcagctacctcaagctccaggatcctgaactccagcagctcgttttggtctctggcgtcctgcacc

SEQ ID NO: 19693 - DNA, 863 bp, Artificial sequence
  DNA replication origin
acggggtgggcagagggggtggggaaggacagggcagggaagggcggaggggaggtggtgggggtgggggagggggaggggaggggcaggggtgaggtagggcagggtgggggcaggggtgaggtagggcggggtgggggcaggggtgaggtagggtggggtgggggcaggggtgaggtagggcggggtgggggcaggggtgaggtggggcaggggtgaggtgggggggtaggggtagggtgggggcagggagggggtgaggtggggcagggagggggtggggcgggggtggagagggtggggcgggggcggagggggtggggcgggggcggaggggggtggggcgggggcggaggggggtggggcgggggcggagagggggtggggcgggggatgggtgaggtgggggcggagtgggcaggaggggcgggactcaccgtcacaccttcggcctcgcagtacacctggagggggctcttcccgtccacgaagggcgtgtggtggaagctgatggcgggtgacttcctctccctctcctaggacagagggacagaagggtgagccgctcccctcccatcccttccctctaagaggactgtgctggggcctgaggaacacgggccaagaccatggaaccagggatcaacacagcatttatgaaaaccaaaccgcagcggcagcagtggtggcagaatctgcactggacctggacctgcccacaaggactgcccctgtatattcgctgaccccagatgtgccgggcagagttcatcacactctggccacgtggcctgggcagtcccaccctgagcccacgggcacatccctcagtgaatcccaggggctatggggaggatcagggg

SEQ ID NO: 19694 - DNA, 1704 bp, Artificial sequence
  DNA replication origin
gctgagcaggtggcttcagggtgactgagggaatctacccagatgtgattaaaccacaagttgcatgtgaagtcaacactgattgcacagccaggcttgaagggccactgtcagcccactgtcaagagctccccagcatctccacaggtcccctgagcttaagcctggccatgagccctccagtatccaacctcctctgtccctgggctctgtgacaatggcctcagaggctgcatgatgactgcagggctgtcacactcagtggcactcttggtggacagctatggggctgggcaggaaccctgaaataggcctgggtggggctgggtacccccaactctgccactacatcagctctgtgaccctgggcagtgcctttggggactcagcttctccaactgtgaatcagagttgcccaatacagttcccaagacctcatgatggggctgatacccaggactggaccccagagatgtcaggtccacggccaccctgctgtggctcttcggccacctatgaccacagtggagcccccagctctgagagaagcagacccacacccagagcctccctgctgaaagtacccctgccctgtgcctcactgctccccaggggctgggcaggcaaggggagaagggagtcctcggatgcagagcactggatggaggaagtggaaggtcaatgaaggtaggatgagggatggatagatggatggatggagggaggggatgtggataggtggaaggataaaggatgaaggatggaaagatggataaatagcttatggaggatggatgaatgaatgaatgatggaggatgcatagataaattatggagggtggatggattgatggattttggagaatggatgaatgaatggaggatgaaggaaggatggatggagaatgaatagatggattatggaggatgaatgggagatggatggatgggtgaaaggttaatgggtagaggatggtagatggagaaggaatggatggaggatggtggatagaggacagatggaggatggagaatgaatggattagggatgatggatgatagatagatggaggatggatggacagattgtggatgatggataaatggatggattaaggatgatggatgaaggatagatgaaggatgaaggatggatagatggattatggaggacggataaatgaattgtggaggacagatagatggattatggaggatggataaatgaattgtggaggacggatacatggattatggaggacggatacatggattatggaggacggatagatggattatggaggacggatagatggattatggaggacggataaatgaattgtggaggatggatacatggattatggaggatggatggatggattacacaggatagatagatggatggatataagacagagcatgaatgaagggctaggtagatggtgcattgatggggaataaatggatggagagcagaggattagtaatgggcggatgaaaattgggatgaagaggtgcattattttgcccactcagtaattaacattctttcaaggagtttgctatagaaattggaactctgccccaaatgaaatttaggagttatctatagagtctgcttttcccccaagccaaggaagtggaacccctaagggtcttggtttgtctaagagcaacagccccctatcctcatggcaagta

SEQ ID NO: 19695 - DNA, 1638 bp, Artificial sequence
  DNA replication origin
atgctggggagcctcttcctgtgtgatgctgggggggtctcttcctgtgtgatgctgggggacctctccctgtgtgatgctgggggggcctctccctgtgtgatgctgggggggcctctccctgtgtgatgctgggggggtctcttcctgtgtgatgctggggggtctcttcctgtgtgatgctggggggggggtctccctgtgtgatgctggggggggcctcttcctgtgtgatgctggtgggggtctacttctatgtcttactggggggggcctctccctgtgtgatgctgggggggcctctccctgtgtgatgctgggggggtctcttcctgtgtgatgctggggggtctcttcctgtgtgatgctggggggggggtctccctgtgtgatgctggggggggcctcttcctgtgtgatgctggtgggggtctacttctatgtcttactggggggggcctctccctgtgtgatgcaggcggtggcctcttcctgtgtgatgctagggggtctcttcctgtgtgatgctgggtgggcctctccctgtgtgatgctgggtgggcctctccctgtgtgatgctggggggggcctctcactgtgtgatgctgggggggcctcttcctgtgtgatgctgggggcgtgtctttctgtgtgatgctgggggggcctcttcctgtgtgatgctggggggggtctattcctgtgtcttattgagggggcctctccctgtgtgatgctggggagcctcttcctgtgtgatgctggggggtctcttcctgtgtgatgctgggggacctctccctgtgtgatgctgggggggcctctccctgtgtgatgctgggggggcctctccctgtgtgatgctggggtggtctctccctgtgtgatgctggggtggtctctccctgtgtgatgttgggggggcggtctccctgtgtgatgctgggggggcctcttcctgtgtgatgctggggggggtctattcctgtgtcttactggggggggcctctccctgtgtgatgctggggagcctcttcctgtgtgatgcaggcggtggcctcttcctgtgtgatgctgggggggtctcttcctgtgtgatgctggggggcctctccctgtgtgatgctggggggggtctctccctgtgtgatgctggggggtatctctccctgtgtgatgctggggggtgtctctccctgtgtgatgctggggggtgtctctccctgtgtgatgctggggggtatctctccctgtgtgatgctggggggtatctctccctgtgtgatgctggggggtatctctccctgtgtgatgctggggggtatctctccctgtgtgatgctggggggtgtctctccctgtgtgatgctggggggtgtctctccctgtgtgatgctggggggggcctcttcttgggtgaagctagggggtcttttcttgggtgatgctgggggggcctcttcctgtgtgatattgggggggccacttcctgtttgatgtgtgggcctctctctccacttccaacaggaaggcccccttgtttgggatgctccgagttttctgagttcactgttgatttccttccctttccctgcacactcgcccggttctctcctatgtcgttcatggtgtggctc

SEQ ID NO: 19696 - DNA, 1103 bp, Artificial sequence
  DNA replication origin
gggcaggtggaccatccaggccatgctaagccccgagcaggttcccacaacaggtcacagaggggacgccgggtcaggagatgggggcctggggagcaaggccccccacagctgccctcggtgacatctgggacttggacatccatggacggcatccctggatggagccatttcctgggtactggacctggaggtgactcggagcttctcctgctcccagcgtgtgtccatgggggcggtcagggtagacaggccacaccgtcatcagggaggggcagccggccgccaacgtgcagactgtgtctcaggcctgtcggcatggcggggacagaggtgggtgggcgccgctccgctcgggggctgacaagccacaggctcattgtggacaaggcgtctgtacagctccgcacagaagacttctcagccagtcccgtcagcctcccgggatcagggagtgagcctcgaatgctagatcagaaaggaaaacgtgtgagtcaattggccccaagcgtcacgttgcaccaggcagagctgtcagccccagatgctcgtggagggctgtcacccaaccctgcagctaacccaggggtggggaaacctgtgagcagaaacctgtccccgctggagcaccagaagcaatgccttcttgagcatgttcagtcaagtgaggagaggagagcgatgcctttgcaggctcccttgggggaggttacggagcggggactttgggccgaggccgccagctcacagggctcctctgaagcgaggcggctgtcatcctctcgggatcctctcccaccgcgtctgctccgagtgtgcagtctccagcgtgagtttgaagggtgtcaggaaagagctactacctaaacttgcagccagcaaggggcttttgtgccctagtccccactcccagccctggaccaccaaccccacacccatgggaagcagagggcccctcacccacagcccggcaggtgcactgtgcgccctgctctgtggtagaggaattgcgacaatgtccgtccgagtgtatttttgcccagtaaatgagacgcgagacgttactgtgctgtcccagtgagcatctcccttctctccaatta

SEQ ID NO: 19697 - DNA, 1242 bp, Artificial sequence
  DNA replication origin
catccaaactggagccatgtcaggcacaggacaggtgggaggcagccatccatgggtctggccttggtctctgtggctccatggggctcctcaatgcccccaagcaagctctggcaccccagggtcctcactcaagagtgtctctgtggacaggcctgaggctgctagctgcagaagtgcctgcttgcaacggtggccattggctggcgtctgggaacttggcttcgaagcattcctttagtgaggaggttcctgcctagactgtgcaaacaatgtgattcatggcaaacaccagccttccttttgagggcctggcatgttagtgggtggggggcgcacaactgagtagcccccaaatcaaaaccatgaattttgggtcttagctggaatttcccgagcagaaacactgcatatatggggctgtgttttgctgctggagggagtgtgtgccccgtgtgcacctcacagggggaagagcatgggaggggagagagcacaggaagtctgctcacaggcctctccaggctgtgcctgtgaactcttcccttgcagatccagccatgcctcccgattatagggctgcgataatggtgtggctgtgccatggtgtggctgttgtggtgtgaccctgccgtggcgtgaccctgctgtggtgcgaccctgccgtggtgtggccctgctgtggtgtgactgtgtgctgagtcctgtgaatcctagcgagtccccagagatgcaggtggtctcggggacccccagaacatctgctttcactgttgcctggaagtgtggggggtggggggaacatggggctgcgaattgccttcagggagcgcattcttttacgtacttggccattcacgtggcaaatgtttatgtgagtgtatcagtgccacagtaagggttccgcgggagaaacccagataatcctcatcccaagagctcccagttctcagggagggggcaggaaagtgctgctcaggtggctgagcttcgagtgacaggagagaggtaggatgtggggagctcaggcatagtgcaggtggagccccaaccagctcagagcccggggagcccaaaagtcccgtcaacaaatacagccccgtgaccgtgcatgatgctgggggaggatgagcactgagggcccctgcccttcacgctggaggggaaagcctgggtaattttatcttgggctgcaacgaggatagctgatgaagtgtaggaacaagttgacaaccacaatca

SEQ ID NO: 19698 - DNA, 1370 bp, Artificial sequence
  DNA replication origin
cgccccccacccactaacatgccaggccctcaaaaggaaggctggtgtttgccatgaatcacattgtttgcacagtctaggcaggaacctcctcactaaaggaatgcttcgaagccaagttcccagacgccagccaatggccaccgttgcaagcaggcacttctgcagctagcagcctcaggcctgtccacagagacactcttgagtgaggaccctggggtgccagagcttgcttgggggcattgaggagccccatggagccacagagaccaaggccagacccatggatggctgcctcccacctgtcctgtgcctgacatggctccagtttggatgaggtcctcagctgactgtgagggacagtgcccagaaaggggagggtgggtgggagggagaagatcacgttccctagaagagacggaacagatggggtagggcgggagggatttgggaagactgcaaacctggaagcagaactgtgtgtgtgtgtgtgtgtgtgcgtgcgtgcatgcgtgtgtgtgcgtgtgtgtgtgcgtgcgcgtgtgtgtgtgcgtgcgcgtgtgtgtgtgcgtgtgtgtgcgtgtgtgcgtgcgtgtgtgcgtgtgcgtgtgcgtgtgtgcgtgtgtgtgcgcgcgcgtgtgtgtgcgtgcgtgtgtgtgtgcgcgtgtgtgtgcgtgtgtgtgcgtgtgtgcgtgcgtgcgcgcgcgtgtgtgcgtgtgtgtgcgtgtgtgtgtgtgcgcgtatgcatgtgctgtgagtggtgtgttgtgtatgcatgtgtgtatatatcgtgtgcatgtgtgtgctgtgtgtgagtggtgtctttgggcatgtgcatgtatgtgtatgtgttgtgcattgcatgtgcctgtatgtgtattttgcattgtgtgtacacatgtacagtgcatttgtgcgtattgtgtgggcatgtgtgtgtagtgtattgtgtgtacatgcatgtgcagtgtgtatgtgctgtttgcacatgtgcaggtatgtgtattgtgcattgtgtgtacgtgcacatgtagtgtgtgtgtgtgagtggtatgttgcggccatggatggggcagaaagtctcctgttctggaaatagggcagtgagtggagtgtgctgacaatggagagcagcagctggctctggagagggatcaagtgaccacaggaaaccaaatgctctggtcttgttcctttaatttggggagtgagtttttaaaattcagcatcatattttcaacaagacctctgttctctatttgcatgtgcctagttcatactccaggcagttgatcacataattcagagaggcattgacagggtgggagtgtttctgggtaggtgtccagatccccggcccttctcagcct

SEQ ID NO: 19699 - DNA, 1031 bp, Artificial sequence
  DNA replication origin
cgggctgccctcggggacttgctgcggccgttgaggggtctccgcgcgccgcgcagactcgcctcccaacccgagggcccgggcggccgccgcccagagcgtccagcggcagcgtcttgctctcgaaggcgtcctccacgcagcggaacacgcagccaagcttgggccgggccagaggcctcgcgggctcctgaggctgccgcgcggtcacggcaggagcgggcgacagaatccggtctcggagcctcctgtagcgaggtctgcgcggcaggtgcactgggcggacctggaggccgcgccctccccccccgcctcctgccgcccggcagcgctgcgcggagctggctctgtccacgtagcgggtgctgaacgccccattctggcccctgggtgctcgcttagtcccggccacgcgtggctgctcgccctcgggacacactgggcgctgggaaggccgggcggggagcgcgcaccggagaaaccgctgtgggaatcccggccacatttccaggccccttgggccgtcccacgccagacaagaaagccctgactccgaaaccctgggcgagtgtggagggcgcgcgggggtggggtgtacccgcccacgcaaactgctgctgatctcccttaaagccgagttagaggcttggggcgagacaggagtgacgggcgatgctgtcactccatctgtcattctacccagcctgcagcagctgaattcgaacccagagacttcaggcctttgcgttgttaccgcagtccgcatttcaaagccagagtttggccactgagtcaccatgacctcgagtactggcggggcccgagccagcagagctaggtccagcagcttcccaccccttcgtcctcctctgggctccccctcccctaaatgattaatgcaatgtctgttactcacctgtgtgggaccgtccacggcaaatatcaccaactgttcttatgcacgtgcagaagttccgtccctttcctaactgtctgatctcttccatggttcacatttgaccaacagccac

SEQ ID NO: 19700 - DNA, 1912 bp, Artificial sequence
  DNA replication origin
ggggcctggacgccgggcggaccctcctggtcttgtgcgtgggtggggggtccctgcctttgcgtctggtccctgtcctggcgcccgcccttccctgctcggctccttcgcgccccagggtccgagagtccccgctagcgccgcgcagacccccttaaggagcggggcgcccaggcccggcccggcccggccctgcccggccctgccgggccctgccgggccctgcccggccttgcccggccttgccggcttccgggagcctcggctgcgcccggggagaacccggggccgggcggcctgtccctcggagcgctagcggctcctttctcccacggcggtcgggtggcgaggcgggcggacgcggccctttgttggcccgggctggtccggggcgcggggagatgccgttcccggcgcagcccgtgggtcgcccgccccttggacgcactggcgctgcgtcgggagctctttgtccgagacaaagcgatttagccccggccgctctggccggagtccctggtggccccgaacccttccagtaacctgggttcagcgactccaaggaaagcgagcggtcaagggccactggccgggaaccctggcagcccctgaaccttcgagagcagagacccctccccaacacccacacgcaccggcgcgggaggtcccgctctgccagaaacaaagcctccccgctcgggcggggggagatgggggtgggaggaaggaggcttcgggacccggcaggacctgggcgggggagtccatggggtcccagacccgactctggacttggcctcggcgggagggccgtggggtctgacctctggcattagctcgagccgtgggctgtgggctccactcccccagactctgagcgaggaaggagccctcccctctccagatgggaggggctgctgcctccagagggttctgcccggctgggtctggtcttgatgcaggaggtcttgccagtcagctggcatgtgggggtcgagtttgggggtggcaggaggaccccttcccaggggaggtcaggcaaccatgtcagtgcggaggggcagctgcttcccgggaactttcacctccatccggatgagtgcagtaagaagagcacagccccacaccccagctgcgtctcctctgggttccaaacccagtctcagtgcgggtgcctgaacacttgggcgcctatgagcagagagcccagaccacacgtctcctcaagcctccttctgcccggttgcgttttctagggcttccttgaaaatgcgtgggtcccctgggaggggtggaaagtgaagaagagggacagcaccgggaaggcagccagggcctgatgcggccacagaggctctgcaaatgcatggtggtgccgggtcagggctgagcctggcgctcagctgggactgggcaggaggaggagaggtgcagcggctgggaacagacagctctgtagaccaagggtctaaaacttcttccacaaccagcccgagagtaaatgttgtcagctttgcggaccacgctgttcctgtctcagctgcttggccctgccaggaaagcagtcctggacatttaggaagtcgatgggcaccactgtgttccaacaaaacttcatctgtggatgctgcagtgtgaacttcatagaatttttgagtcatgacatactcttgttattgttttcagtgaatatacaagaacgattcttagcctagggctgtatgaagagaggtagagggttgggtctggcctgtggcatagtctgccaaccgtttgtagactatggggtagaggttgacaagtcactgggatcctgaaaatacagccccacagttagatgtcagcagtgaatcctgtaatggagttcctagataatgaactccttctcattctgagagttttaccaattgtg

SEQ ID NO: 19701 - DNA, 838 bp, Artificial sequence
  DNA replication origin
cgcccacagccgctccccagacggcgtgccccggccaggcctgtgctcaccacacatttctcccagaccatcgacatgcgctcctcaatgccgttggtgccctcggggatcagcgcgaagttgtccttgcccacagccttctgggcagtggtgaaggtgcagtgggcgctgcctgtcacctggaggtccccgctggaaacaagccagggtcagagggtcctggccttcctgagccggcagaggccaggtcagctccagcccccttggccagcacagccgcaggggctagaggtcatctgagtggctctcgctgggcagagctggtgcctctgtgcaggggagcggggactggttcctgccaggggagcccccgctgggaccaaagggctcagacttccccacccgccactgtccgggctgccctatgggagccgtgggagaggcctggggtgtcggggccacagccttggcagggtgtgcagcgggcggccaacctggggccacctggagaggctgcttacctggacagcaagcaggtgaggtggtccgccgtggtggggtctgggttgacagggggtgatgtgacgaaggctgcggccttggcccagttcttgctccagtagtgtgaaccgtcggtgcccaggctggcggtgatgggctccccaaacacgaccacccctgcagcacgaggcccatgagaggtgccccaccgaccacctgcaccccctggggccccgagaactgctgctgctgacacccacgactgcccctcactttccttgcctgggacagcttgtgcccagtctagagtccctggccctgggcaggaagtggggca

SEQ ID NO: 19702 - DNA, 1212 bp, Artificial sequence
  DNA replication origin
cctcccaggcctgcgatgggcacaggcctctgaggagcggctgcgggagtgtagggctctgcgaggcagtgactggtggtggggaggcggcggcaaatgcccaccaggcgggactcggcccctcgccggttcaccaagaagcctggtgtccagctgctcccacactgtgagcccggcaggttccctgtccccaggctgggcccagcgggcactggggtgcctgggctcaggctgccggcattgtccctgccatgtggctccacctcaccctggcagtgacatctccccaggttcagcccttctcttgaggggctcttggcagcaggacctgggaccccacaaggagagcctgtggggagggggaaggcaagaccgccaagcaccttcgagaaacttctacaaaagaaaatgctaaggaggggggcgagtgccctggggcccccgcggcctcgggtggggccagcacggctcacagggccggtcctgggcgtctaggagagagaggtgatgttggagcggccgccaggtggtgccatgatcttctgtgctgtgcgtcgggcgatgtggtcatcagcctgagaccctgaagaaagggcacagatgggcaggggagaatgaggcaggggcaggggcccttctattcaaggcgtgaggcagagtcagtggctgcgtcagtggggccaggactgcagagcccccgcacacctgccaccaccagaaggccaagcagaccaggtgcccggcaggactcccatccctgaggcccggggtgcaggtgaggctgcccaggagatcatgaaacctgcggggactgtgggctgcaggaagcccttcctgtcccgagaggaacccgggccagtcctgcctcgtccctgctctgggttccgggtgatgaaaggctgcccctggcctcccagacagtgccgggttctcagggacctgcccccaggcctgagtccccaggaggtgagcagggctttgctatcaccttcctgggtccggagaatgcaccagaagcgacgccagaggccggaccctggcagcctgagccctcccaggcattctcgtgtatccctccaggccccgggacacagctcagaccctcccttgtgcctcacgcttggttctggggcctgctgggtggggacctggattccacatgatcctgagatcctcgtcaaggcctcccacctcccctgaggctggatccat

SEQ ID NO: 19703 - DNA, 1055 bp, Artificial sequence
  DNA replication origin
gaaaggcccggcaagggagtggtttccagcaaagtcccgcagagaacagcttctgcctggtcctgcaggccccacggagcaagtccaagccatccacccagaggcaagggagctgggccttggcatcctcgggcttgggtgagtcacccgcagagatgcgagctcccgggcagtctggctgctggagggccggggcacttcaatagcccagaggccgtcatccaaagccacaggtggaggcccgatggggatgcccagacactcacttgaggggacatgggcggaacctggacagcgtcccccacgctcacgtgtgcctttccatccacaggagaatgactatcttcaagactgcctcgatgccatccagcaagacttcgtgatttttaacagagaaaagtgagtgtgttgggggtgggtgggcgtggtggcagagaggaggaaaatggggctaaggttaaggttttcttggccacgtgagcgggcacctgtgggcctggggtgcgtggccctgctctctttggggactctgagcagcagctatggaggggagcggcgggaggcccctgccaggctctggcatgtttgtgctccacgcggggcccgtggctggaatcttctggggagagacacatcatttgcccagatgaggggtggtgacttcctaggaggccccatcagagccacgtcaactcccccacccaggcacgccctcagtctctcagcagacctttcctgaatgtcaggccccaggggacagaaagggcacagatgactggcagcaggcaaggcaggccagaaatagcagcagctgccacggtggggcccaagggaggatggatgctccctctgcccgcacggggcaaggagggcctcctggaggaggtgggtctgagctcttatggacaggacgtgcagggcagcacgtgcagacggctgagggcactgactggcaccctggggatcagatgaccgggtgaagaatgaggcttagccgagcctcattcccaagtcactgacctatggcacctgcacagtcaggcctttcggcttct

SEQ ID NO: 19704 - DNA, 1501 bp, Artificial sequence
  DNA replication origin
cagcaaggccccaccccagagcagctcccccacctcaacatcccccaccccgacactgcccagggcccctcatcctagaagagggtcgccgtggggcgggccaaactctcgctcctgtgcgaggcaggagggggctgagccccggtcagtgaagacatgggccttgggtcttgcacgtcctactcccaggattgctatgggattaggcatgtgctcagccacagcatggatggggcaagaatgaaccacacacacctgagtcccagactcgactgggctgtcttcccaggcaccagccacccccactgaaagctgctccatccagtgaagacccccagacaggcaggcctggggttttgggggaagccatgcacacatgagcagctgttcctggttcccctccaccctgctccgcgtctccagaggacaggggtgtcagccctgctggcactcactgggcaagcctgggggagtctgcaaacggccccaagatgaacaacgagaggcggctcagggctgtggctatgtccaccatgacctgtgtagcctgggagagcctgcgcccagcatgagagccgttccgcaagcctgtgcgaagctgcagaaggcaccatttcccacacctgcaagtccctccgggagaaggacggctcccctaattgtcactcgtgagacctgtccgtgtgccctattcacaccaaggaaagggattctgatgggctttccagaccgtctgcacttgcctttcaaacccaggacattctccgtacacataagacgggggtcccacaatgtcaccccctggcctccaggacgagcccctccagatgactcccaggccagcagctgcctccacttgtgtccccaggcctgtgtccccaattctgcacccctaagtccgtgtccccaggtctgcacccctcagtgtgctgtatccatgaagggccagcactgtgccctgaagccaggtttaggacacccgctggttcatgacatttcacctatttacccacttttaccccagcctcatgttcacttattctctggggaattcgacagctggaacaaccccctacacacatggttattctaaaggcagggaagacacagccaaggccagaggcagacccggggagacagcagggtaggtactgacccctcctgggaggcacggcctagagtctcatctccactgctccctggcggtaccctgtgccgtctggtggggcaagtgctttaggcactcagtgtgtggaggaggagacagaacagtttctagacgaaaggtttctttgcattttcctctgaactggaaaatgcccactcccttcccagggcaccccaggatagccccaggtttcagcatagacgcagcaggcaaagtgtccatcctcatgggccctggggacagagtcacacacccagaattctttcagcctgagctacgggtgccgtgacaaggacccacggaggcttcagggctccgagcacagggcagagc

SEQ ID NO: 19705 - DNA, 1459 bp, Artificial sequence
  DNA replication origin
gaacaaccccctacacacatggttattctaaaggcagggaagacacagccaaggccagaggcagacccggggagacagcagggtaggtactgacccctcctgggaggcacggcctagagtctcatctccactgctccctggcggtaccctgtgccgtctggtggggcaagtgctttaggcactcagtgtgtggaggaggagacagaacagtttctagacgaaaggtttctttgcattttcctctgaactggaaaatgcccactcccttcccagggcaccccaggatagccccaggtttcagcatagacgcagcaggcaaagtgtccatcctcatgggccctggggacagagtcacacacccagaattctttcagcctgagctacgggtgccgtgacaaggacccacggaggcttcagggctccgagcacagggcagagctggcctgaaggcgcagggtggcatcctggggagaggacgcctgtgctgggccctccaggacaagtaggcatcagctgggggaagggagggggtgcctaggtgaggggccagcctgggcacaggcaggaaaaggaccccaagggtatggacagacccacaagctggtcctgggtgaagtgggagggcagtcagcagagcacctgggggtgaggaaggggctgtgacctgtggccttggtctcctctgcacaagacggtagtggggcttgactcgcagaggtggggagagcggtttgatttaagcgccttagaaaggcactccccactgcaagtgaccagaggggcactgactggcacaggaggttgggaccaagttgacggagggggtggggcttcaaggggtgagagaagaggctgccaggcatcagagctgggcactgggcagaaaggccgcagaggacgggccgtgctgcacagacaagacccgtggccgacacccacaagctgacacagcctccacgagcccccgttccaggcggcagctgccccaccctgcatcctagcctccttcctcaagaaaacctatgcacgcccagagattatgtcatcgaggcagaggctgctccagcaccagcaaagccactccaaggcagcccgggccgcggccgcacaggcagggagcagctgccgccatgtggcgtcacccaacgtcaccagatgttaaaggaaagtcagctgtgaaccagcacgtgggacagatgggctgaactagtggagggaggagagtgagagggcagctgggccgtggcaggggagatggggacaccaatgccatccagcagcaaccccaacaggacagacctcggagtctgcggggcctgccctgcagtggggaggggacagggtgtcagggcgaggcccagggctgagctggccgcctacagcttggggagatgaactccgctgggcggctctgggtccaaggaccctctgtccacctaggctccacccaggcccaggt

SEQ ID NO: 19706 - DNA, 1371 bp, Artificial sequence
  DNA replication origin
acttggcacatgggtacctggagtccagtcctgcactgccctgggaaacgaagccagcatcttcctgtccatgggcacgtgctctggcggcctcccccaggaccccaagcagcccgcacagcacagagccctaagcctctggcccccgagctgtgaaccagcaagggagtccagccaccatcacctccactttagagaataagcacaagttcccaaggttagtccctcccggagaggaaaaggatgggaaacaaaatctattaaataacaagtcagaagcataagggagtcacggcaattgggtcacctgcgccctgcacacctgcaaagcctcccgactgtgcgacggaggcggcggctccggcagaggctcccagctgggaggcagcagcaaggcgcatgcgtgccggggcggggctgtggcgtcagggcgtgcagggggcggggcgtgcagggggcggggctatgggggtcagggcgtgtcaggggcggggccgtggggttgcgggagtgctgggagtggggctgagggtggggctgtggggttaggggcatgcggcccccactctgcagtgcctgtgatttgaacacaactgtccctgcttcctaagactgacaaggagggcagccacagggacaccaagggacaccaagtccaagacagccatgcagatgctgctcagggaaggtgcaggcagggcaggaatcctggatgtggctccaggatgccgtgcaagcagcagagtggacacctgtgggcctgggcagggctcaccgcaccagcgcccctgagaagccccgagccaagtggtccctgccggccatgtccacagggatccctgctcaaggacctgttggcccagaccccgcaaggtgagtcaggggcactggcagggggctgaccggcatcgtggctgtcctctggatgaccgtggctccaccctgatgcccagctcctgctgcccccaggtgcccacctggccttgccactgtgcacagcggccctcatgccctcccgaccccagccccaaaggctccaaaccagtggaactggagacccagtggctgtttcaggctcctgtccccagctcctgccatcagcaacccatgagggtctccgcactgccccaggctgggccaggacctcccatgaccaccggccctgccccacgcaagcccaggctcagccccattcctggctcccaaaggagaggtgagctctcattccagcactcagcggaggagataaggaaaaggaagtccaccagccggaatctgtcaaaacagcttcctgtgggctttgaggggagcaatatgtaatcagcctggtgtcccaagagtggtcctgcaaccaccacagtcaccaggagc

SEQ ID NO: 19707 - DNA, 1396 bp, Artificial sequence
  DNA replication origin
gccccaaaggctccaaaccagtggaactggagacccagtggctgtttcaggctcctgtccccagctcctgccatcagcaacccatgagggtctccgcactgccccaggctgggccaggacctcccatgaccaccggccctgccccacgcaagcccaggctcagccccattcctggctcccaaaggagaggtgagctctcattccagcactcagcggaggagataaggaaaaggaagtccaccagccggaatctgtcaaaacagcttcctgtgggctttgaggggagcaatatgtaatcagcctggtgtcccaagagtggtcctgcaaccaccacagtcaccaggagccggtgtctacggagtccatcaaactcctctcatgagagttcccagagctccctgcacgctggctccgcaccgggggagggaaggggctgaggccgcagagcccagggtggcactggcagaggggacagcaccctgaggacaggtgtgtgtgaggcgcccgggacaggtcactgcagagaggagccccaccccgagggcaggtgtgtgtgaggcgcacaggacaggtcactgcagagagagggcaggtgtgtgtgaggcgcacgggacaggtcactgcagagaggagagggcaggtgtgtgtgaggcgcacgggacaggtcactgcagagaggagagggcaggtgtgtgtgaggcgcacgggacaggtcactgcagagaggagagggcaggtgtgtgtgaggcgcacgggacaggtcactgcagagaggagagggcaggtgtgtgtgaggcgcacgggacaggtcactgcagagaggagagggcaggtgtgtgtgaggcgcacgggacaggtcactgcagagaggggctccgccccgaggcaggtgggtgtgaggtgcccgggacaggtcactgcagagaggggccccgccccgagtgcaggtgtgtgtgaggtgcccgggacaggtcattgcagagaggagacccgggcaagtgttcctgaaccttccacgtctccgcctggctttccatcggcagcacggaagtcggagaccgttctaggcaaaggtcaacgtctggtccccagagaggaggaaggttccaagctgggcaagaggccaacgctgcactcagagcccccaaaaccaatccctgcctcatggtgggctccatgcaggccacctccacgcccacctccttggggcctcagtttcctcctctgccagtgggagggtacagtggcggtctgcatagcagaggcctgggtggggcctatggagcattaggggagccagggatgtcccagcaggaccccaccatccctggggtcacccccaaggagccctgagccccaggccccacacatctgcctcctatctgccacaggaccg

SEQ ID NO: 19708 - DNA, 1049 bp, Artificial sequence
  DNA replication origin
catgcccacacttctttgccaaatgtccccttcagaaatgtctcccgacggccttgtaggatggcagccccctccccctttcctgctttagccccctccctggcacctggtgccacactgtgggcttgttgagtgtttcccccacactgaagagttcactccaggaggttgtctccctccttcctgggtctggaatgggcctggccagcggttcatgtggtgacctctgaccttggctggttagcaggccgccatgtccctagcgggttcttggccagagacttctgatcagacagtgccaaagtccagccctgaggggcccagcaggatgagatggggatgtgagggggaggcgtgggtcggaggccccaggaggcatagggcattgacctgcctgtggtgagtagtggagggtctgaggccccaggaggcgtagggcattgacctgcctgtggtgggtagtggagggtctgaggccccaggaggcgtagggcatcgacctgcctgtggtgagtagtggagggtctgaggccccaggaggcgtagggcattgacctgcctgtggtgggtagtggagggtctgaggccccaggaggcgtagggcattgacctgcctgtggtgggtagtggagggtcggaggccccaggaggtgtagggtgttgacctgcctgtggtgggtagtggagggtcggaggccccaggaggcatagggtgttgacctgcctgtggtgggtagtggagggtttgcattcagggctcaacccccagaagccagagtcgatctgaggtgggcacccaccaccctcttggggtgctcacccaagtcctgaggggctgagtgtggggcgaggtggggtaaagagatggtgtgggggctcctatgcccccccttcccagggccacagggctcctcggccgttcacagtaggctctgtgtataaggaagggaccatgcccactcccctctgaggcccagatcaagtgacatgaccccaaccctttgcacacccactccttctgggagcctgtccggcttcctcggtgacca

SEQ ID NO: 19709 - DNA, 1112 bp, Artificial sequence
  DNA replication origin
ccaggatccacagtgctggcctgggaagctgccactgagcctgttttatgggtggaagctttcactgcaattaaggtgggggagggagatggcaagaatgctgccgccaacagggtcctgctggaggtgtaggcaccaggaccccgggctctgggtgtgtacctgggcaggagaagccacaattgtttcggagcccaggggccccacaggactcagctgtgggctgctgccacatcctggctgtgtctgtttcacagaaaagacagggtgagggcatcgctgccaagatggagcctggggcacagggtatgttcccagagtaagaccccagttggctccccgaggctggaagggtggtggtgccagctgaggacagagccctgtcccggagctgcccagggatgccgggaagccgccaagccacccgggcgagtccaagctggacaccagggctccagggtgtgcagaggctgcaggctgctggtcatgggggtctgcccctgggtgaggggacggtggagaaggagaaggtggccagctgggccctcggagatgcgtgggcagcgcacgtaatgctgggccatggtgctggcacccaggcatgacctcgaggctccaggccccctctggactgaggagtccagggtcagaggccggcacccacaccctcatcccctctcctgatctctgaccttcctgccctggggtttcaacacatcctcagtggtgcaggaaaccgcgtggggctcagcaagggttgagggacctgcttcctgcagggccccctgctcctctcctgggtgctgctgtggctggacgcttctgctctatgttctccgctgtaactcgggagcctcctcacccctgcccagcggctctcatgcctgtctctagcccccacctgtcttgtccccatctgcgtcaaccctgcccgtcagcgtggtgggtctttgttcccgcaggccatggcaagagggtgaggggtctgtgaggtgatgtctggtgactcctgtggttcctgttgacctagcgggccagggcacctgaggagtgggagtggggggcacccattgccaggaggagctatcgggccggttccaactcttccacct

SEQ ID NO: 19710 - DNA, 817 bp, Artificial sequence
  DNA replication origin
aaaggctgagtggattggaactgatttgtgtgaagctaagtaaatgtataggatgttaacaaacaaatactgttgaggggggcagcaaggaaaaaaatgatgtgggcaattgcagtcttcattggggtgaaatcttggtgaaaacgacacactaaatagggatatggtgagcccagggtgcaaagcgtgcggctctggggaagagggctccgggcagagggagctgttggtgcacaggccgcatggtgggctcactgggctgcttcagagagcgcagcagagtcaggcacagggagggtggaggagccgaggccagaggggtctggggctgggtcctggacggcttgctggcagccggaaggacatgggctattacttgagagaaatgggagtgtggagcctttgagcagagcggggcttgacatgtttgtttcaaaaggacgacgcctgcagctttgttgagaatagattctagggcgagggtggaggcggggagaccaggctgttgcaggaatccaggcgggagtggacggtggccagaagcagaggaggggcaagatgcggtcggagtctgggaacgcttgaaggaagagcctgcaggatttcccgacagacgggctggggtgtgagacagagaggagtcgagcccatgccaaggcttcaggccgagcatccggatgagctgttggtaactggggctgtggcagtgtgagctagggagctgggttgagggcacgttagatttgggttgtgggtttcagacattgtattcatttgctcgggttgttcgtgggtggcgtaaacaacagccgcttgc

SEQ ID NO: 19711 - DNA, 1653 bp, Artificial sequence
  DNA replication origin
gtcacaggatgcaggggcgtggtcacggagtgcaggggcgtggtcacggcatggaggcctcagtgtgatcacggagtgcagggacatggtcatggagcgcaggtggtgtgatcacggggtgcagtggcgtgatcacagagtggaggcctcagtgatcatggaatgcaagggtgtgatcaccgagtgcaggggtgtgatcagggagtggaggttcatgatcacggagtggaggtgcgtgatcacggagtggagtgtggtgatcatggagtggagtgtcgtgatcacggagtgcaggggcgtggtcacagagtggagtggcgtgatcacagggtgcaggggcgtggtcacggggtgcaggggcgtggtcacggtgtggaggcctcagcgtgatcacggagtgcagggacatggtcatggagcacaggtggcatgatcacggagtgcaggggcgtgatcatggggtgcagtggcgtgatcacggagtgcagtggtgtgatcagggggtggaggtgcgtgatcacggggtggagtgtcgtgatcacggagtgcaggggcatggtcacggagtggaggcctcagcatagtcagggagtgcagtggcatgatcatggagtgcaggggcgtggtcacggggtgcaggggcgtggtcacggggtgcaggggcgtggtcacggtgtggaggcctcagcgtgatcacagagtgcagggacatggtcatggagcgcaggtggcgtggtcacggagtgcaggggcgtgatcacagagtgcaggggcgtgatcacagagtggaggcctcagagtgatcacggaatgcaggggtgtgatcaccgagtgcaggggcatgatcatggagtgcagtggtgtgatcagggagtggagtgtcctgatcatggagtgcaggggcgtggtcacagagtgcaggggcgtggtcacggggtgcaggggcgtggtcacggggtgcaggggcgtggtcacggtgtggaggcctcagcgtgatcacggagtgtaggggcatggtcatggagcacaggtggcgtgatcacagagtgcaggggcgtgatgatggggtgcagtggcgtgatcacagagtggaggcctcagagtgatcatggaatgcaggggtgtgatcaccgagtacaggggcgtgatcacggagtgcagtggtgtgatcacggagtgcagtggtgtgatcagggagtggagtgtcgtgatcacggagtggagtgtcgtgatcacggagtgcagtggcttgatcatggaggagtggcatgatcagggagtggagtggcatgattacagagtgcaggggcgtgaacatggagtgcgggtgggcatgatcatggctcattgcagccttgacctcctgtgctctggccatccccctgccacagccccccaaagtgctgggatgacaggtgtgagccactgcacctggtcacatgtgtatgtctttacacacatgcatgtacttgtcacgtagagtctgtcatttacatgaagaggagtgttgtgtgcagagtgttctggactcctgcaaaggctttatgttgtctctttgggatatgttcttatcagcacgccgctccacctagtttgtaacgtctgcacgagagtccgtgttatggccgtaacatggtcatgtcacctcgcctg

SEQ ID NO: 19712 - DNA, 1395 bp, Artificial sequence
  DNA replication origin
tgtccagggtggcagtctgcctccaatgtccttgctcttcttgactttagagagtagctgaagtgttgaggcccagtgctgactggggtctgaggccagtcctgggaggtgctcagtccctgtaggagccttgggcccctgcaggggaagcctccaggtctagagaggtcagtgcaacggtgggaagtgaaggctgggccgtatgtggacctcactgcaatgctcttcttccccgctccccactggtgtctgagaggggagacacaccacctctcgctgtcagcatcaggcttgccagggcaggaggttaggaatggccatcttgtgcacacaggtggacatggaggccatgtggtctgtgtccttcagctctgcagcctgagggtcttcagtgcaggacggcaggcaggtcagagctagggtgggggggatggggtctctgggacctgaaggttctctctcgaggcctgtttcatgagccccatggctctgcttgaagcctggcatagctcagcctcagcgttcatacaggagtctggatgcgtgaaggatggtacctggtgtgattctaaactcagacttgcagaggggcactctggaaggctccaggcccaactccattgggcgggctggcatctcgtgggcacagcccttcttcccactaggtggcctgggctctgcaggtgaccgtgcctctaggctttctttggcacagcttgaccatggacttctttcttccaaggccacgaggaggtgtccacagggctcctgggtcctcagaaagcagagcctcatcctcacaaggatgacatacatctcagatcgagaacatccaaggggacagggtcacccacagccagtggagcctgtccttcctgtggacctgtgtggcctgtccaggggcccagtgcagtggatcgcaggaaacctgtgccaaaatgaactcacattcctttaattaagaaacggcaatgctccagagagcgcaagccagctcagccaccgccgagctaattggaaggttcagaaaatttccattaattacatttgccctccggtggtttcttctcttctatgtgcagtggctgtgttgattttgtgttttcaacatacaaacagtgaggtcccacagccatgagggctgttatcgaatgcaggagagagccggaagggaggcaggggagagccaaggcagcggaagccggtggaagactggctgtgcctctcctgccgtgtttcccttgggttgccctggatgtggccctgggtgtggtgggtctggatgggtatccctggacatggtggccctgggcttggtgggtctgggtgtggtggccctggttgggtgccctcgagcatggtagccctgggcatgatggccctggatgtggtggc

SEQ ID NO: 19713 - DNA, 1181 bp, Artificial sequence
  DNA replication origin
cccttggactcatggggacacagggcaggcggcagaatgaaggccctgtcatccttagccactggcttggggtgggcgttactgcagagcgtctgccacccagactgggccaggggagcaaggcagccggccaggcacacggagggtgccgtgggcagagctcttttaagaagcagcagtcaggccggctacagcagagggaacgcagggcaggcagggccagagtgggggtggggagatcacacagccaggcacgtggtgagcctcggcctgaagaacagagccaggagcccagcaggtgggaggtccagcagactgggccacaccagccactgcctggggaatgggggtggggacagccccgaggaagccctaccagagctggggcagagcctgctccggggacgcagaaggagccagggcacagggggcccttcagagggtagagccaagagaacacctgacggtcacaggcacgagggaaggggcccccgagggagctcagaggtgggcacaggcaggggccttcaggcggggccagcatgggggcatcaggactcgcatttgaacctgcggaactgagacactcgagtggcaatgtcgagtcggagggtggacggaaaagcctggaatgtgggaaacaggtcccagctggagacaggaattgggagtcgctgccatataggtggtatttgaaccatgagatcaccagcgtgtgggtggagcgggaggtgaaagagccccagcacggcagagtcagagtcagagacgaggaggatccgccaaggaggccatggagcaggcacggggaagggggttggggatcaggagtgtcagaccctgccataggtcgaggccaaggaaggctgggaacagagcacagccacagggaggggcccgccccaaggcatctttggggcaggtggggcagattccagctccagcgggttttgggagaactggaggggaggcctgcagacggcagggagtgagtgagtttgagttttgctgaaaatggagggctgagaaatagggctgtgggctgacactttcgtagcacaggaaataaagcatgttgcttattcactcaacagccacacaccaaacgccatctgatgcctggcgcccttctccactctcgggacacgaacatgcatggctcactcttagcccctcgggag

SEQ ID NO: 19714 - DNA, 1095 bp, Artificial sequence
  DNA replication origin
atgacatttgtcttgttttgaccacgatgctgggatgtgagcaggagtccgcgggggttttggtgccgcctactccatgcacctctgcctctccctgtgccagcgccctgggtcccgtcctcagtcactttgtgacgtctgacctcagagcctctgttcgctgtgggaaagctgttcctggcggctcttgtgcccaataacagggctcggggtcctggcaccgcgtttctcaaaccgggtcctgttcgtgcccaggggacacattgttccacttttctgttgctgctagtaaactaccctacactagtgacttatcagcctccttgtggtttctcacgatgctgtgggctaggaatttggacagggcctagtggggacgggtgtctctgctctgcatgacgtctgtgggaccagaatgtccaccgtggctccctcatccatgtacacggcacctcggccagagcggctcagagagctgcgggctggtgcaaacctccccaggggtcttgtcctgaggtctcagttagtttgctgttggctggtggatcagctgtccatgctgctgggtctcgtcctggggtctcagttcgctgttggctggtggatcagctgtccatgctgctaggtcttgtcctggggtctcagtccactgttggctggtggattagctgtctgtgctgctgggtcttgtcttggggtctcagtttgctgttggctggtggatcagctatccatgctgctggggtctcagtccactgttggctggtggattagctgtctgtgctgctgggtcttgtcctggggtctcagttctgctggtggactagctgtctgtgctgctgggtcttgtcttggggtctcagttcgctgttggctggtggatcagctatccatgctgctggggtctcagtccactgttggctggtggatcagctatccatgctgctggggtctcagttccactcttggctggtggattagctgtctgtgctgctgggtcttgttctggggtctcagttctgctagtagattagctatccatgctgcttaatgaatttcctcatagcctagtggcccacagtgagctccatctta

SEQ ID NO: 19715 - DNA, 1547 bp, Artificial sequence
  DNA replication origin
agccgtggctggacagtacaagagttgcacctggacagtacaagagttgtgccctgagcccacaggcccctccagggctgatctgcactggccaaatcttaggacccggcattcttttgggagctgctgtttccctacagatccttcctgtttcctgactgagaggcaggtgcctggcttggtgtttgaggctcacagcaagggtgaggttggagggtctcctagttaagtgtgcagatgtccccatgaacccctctgcccccctgcactcttgtcttctgcaggacttggtatccctaggtcaagagcccctttggaccctcagaccagaggactgtccatccccaactgcccgggccggggaggcgtcctgggctctggctgtattcacattctcccgccttttggggtcctggttacctgcaggtcctcagcctctccaatcttcagagtcagctttctacctgctgtctgaagtctattaacatgtcttcccttctcctgttccctcttaggtggtggtggggacgttatatcttttattccttttctgccacttttaggggtcagagggagaggaggagaggcgatgatgtaagttcagaggctgcgtgttttgggaggagccctggggagtctgatgtgtgcaccgggtacgcagggttccaggcactgccctgccttggtacctccccttccaaacgctccttcaccactcctgctgggatgggcaccgagggcttcctctgaggcaggtgctgaacccactgccttctgcgtgcctgctggagaatggcaactttgagggagagcagggaacagagcttcgcagctgcaagggctgaaaactcggctctgtgcactggaagttagagaccgatgcgtttgtgctagccaggcagggagagctgcggtggctggttggtcaggtaacctaggttatgctgccataaaaataccctctaaatctcagtagtgaaatgcatgccatgtgtcctaagcgggtgcatgtccaggtgggtgcatgtcctaggcgggtgcatgtccaggcgggtgcatgtccaggcgggtgcatgtcctaggtagatgggcatggttccattccttatagtccccaagggatgggggctcctgttggcccagaagccacacagacttcccgtgctcacatttcatgcatcaggcggttagggcgggcggccacactgaatgtcaaaggccgtggggaggcagggctcacagtggctgaatgacagggtagacagttgtgtgcggtgggagggacgggagcgggagacactggccttggagccatgttggggatccgctcatcgtccgggcgggcagcaggaaatcccatctaggatttcaccgaggaggaagagaccccgtctttgtgtcctggttacagggcagaacttaaggaggtaaaggcttcctaaagtcaaacagcccggtagcaaaaactgattcttcagtgacaagcgccaggggcaggcggcgaggctccatgcagagccgcgccttctccagggcactccaaggcg

SEQ ID NO: 19716 - DNA, 1075 bp, Artificial sequence
  DNA replication origin
gccgcccgcctcgagggctcagcgagctggccgtacccgccccgtctcacctgccgcgtccccgcccactgaagcgctggcgagccccgccgctgagagcagcagcccgacaatggaggccacccagccaacgcggtcgccatggagacgccggtacggaatcccgcaggcgccacgctgagcgcgagtgtgtctgtgatgcgcctgcgcgaggggtgtggtgcgcctgcgcgcgggggtgtgcgtgttgtgggggtttgtgcctgcgtgcgggggcggggtgtgggtgcccctgcgcggcagggggtcgggtgtggtgcgcctgcccgggagggggcggggtgtggtgcgcctgcgctggggcggggggttgcgcttgcggtgggggggttgtggtgcgcctgcgcgggggtggcagggggtggtgcgcctgcgcacgcacgcggccaacggtagcatccgtttttccgcgcccgcggccttgaaggggtggtggtcgacgggcaagtagagaccgcgagggtctggaggggcgaccggcctggcacagaggggaaggaagagagcgggatgctaagtgccgtctggggagccggagggcccggggcgggcggggctgctcgaggacagccgagcagaaaagaattgctgctgaggcaccacctttggagcggtcctcgctgcctgtccttcccgctgggctcactccccgcgtctctcctggggcttcctggagccacttcccacaggagctgcttgtccccaaatcttgcctcaggacttgctgccaggggaacgcagactcagagcgtcctctttggagaagtaaggctgcctctggacggaggagtgaggggggcgaggaaacgcagtgagtgtcctgaggaagggttttgagaatttggaagaagatgaaatgacaccgggcgggaggggaggtgctcgcgtggtcctgtggaaccctggagtcccgtgcaccttcattccaggatccaactgataatgaaaagtagcaccctctgtcccacccagaaacactctggaaacccggacagtttagctggagtctgccatg

SEQ ID NO: 19717 - DNA, 1756 bp, Artificial sequence
  DNA replication origin
tatgtaaaaatcataggtaaataatggtctggtcctgaaatcccaaaattatattgggagggaatcaaagcattctgaagtcatcaaacatggagctggagtacgacggagcatcactgccccagcctgattctgacgtccagcaggccttcctctggggcagctcctccatacccctcaggaccctgagaccacaaggggaagcctggtgttccatagagcctgggccacctgcccttccaaaagcagcaggttaaaggccagtgcccagcacgcaccccaggtgacccctgtcccagagcacaggccatgcctgccctctctgctctactgagacagtcactgctgttcccgtgcagatggggaagacgagggacagtcactgctgttcccgtgcagacggggaagatgagggtggaaggtcatgcagcgtgggggggcgggccagcctcctgggacgtggccaccgggcatgctgcttggctgtggcctcccaagatgtgctgctggtgtgaggctttgcacagggcaggccgtggaatgggatgggcctttctcctctgggcgaagtgtttggtttcagagggaagaccaggcagggcttccagttgtgtttcttaaactgctttgatgcaagggtcatggtgaggagttgtcatgttctggaacctggctggctctcagtcctgggctcagagcccctatctccagcctggttttccccaggtgttttcactgggaggaaacaccaggcacacctgtcagctccctctcatgggcagggagagggagtccccagcaccgtgcgaccccaccatgttactggctatcccctctgctgtcctgcgggcttccctcaagggggacccagtatctgaccctgcctgaatgtgtctgtggaggccaggcgccttctgatggccttgcctgccccgccccctgctcccacatcacccagcgatgggattccgacctgctgcagcaccaccccatgcacctgaactccaggcacgtcacatcgtccagcccgggcgagctgctggccaggccccctgcttccgcgggcatctctgtccaggtcagacaagggtgcggcattggtctcaagcaggtcgggtgcagctgccgaggctgcacgtccttcaggtgcatttcccaagccgactgtcaagcgtcccgggaaagtagctggctggcagtgggcgcgttgggacagtgtcctgctgccatccacacatcttcattacgtgtcctgaaatcaacagtcaagactggactctggggtgactgcagcttctagtcgtgctaattgttcagatgagcggatgatccacaggccctccttttacatttcacatgttgtatgaattaccgtcacagggttttgttaaacattcagctaaaaacactctgtaattttagaaggaagacagcctcctccaggagcatcttacccgacctcttgtcaccgtaccaaatggcgatccgagcaaaaagactggaagagagccgagcggcggcgctccgagagctccaggagaagcaggctctgatggagcagcagagacggtgagtccacacagggtgggggtccgcacagcccgcccagtgcacccggaactgggactgggctgtgattttatggcaggcctcgtggaagtgtttagttagttctcccctcactgatgctgatccaggatccgtctcttcctcacctggaagccgagctgcacgtgccccttgtggtctgtagcgc

SEQ ID NO: 19718 - DNA, 1292 bp, Artificial sequence
  DNA replication origin
gcaggtgcagcgctcgtggtctgcagggcgttgcgtgcatgggctcccttgtttgtagccccgaggcctccgggtggggcaggcgcaggtgcagcgctccgtgtggggcaggcgctgaggcctccgtgtggggcaggtgcagcgctcgtggtctgcagggcgttgcgtgcatgggctcccttgtttgtagccccgaggcctccgtgtggggcaggcgcaggtgcagcgctccgtgtggggcaggcgctgaggcctccgtgtggggcaggcgctgaggcctccgtgtggggcaggcgcaggtgcagcgctccgtgtggggcagatgctgaggcctccgtgtggggcaggcgctgaggcctccgtgtggggcaggcgctgaggcctccgtgtggggcaggcgcaggtgcagcgctccgtgtggggcaggcgctgaggcctccgtgtggggcaggcgctgaggcctccatgtggggcaggtgcagcgctcgtggtctgcagggcgttgcgtgcatgggctcccttgtttgcagccccgaggcctccctgtgggacaggccggttgcagtgctcgcggtcgcccccttgtgtccgtctttgccctggcttcctcacgacacctgcctgctttcttgttcttttccctcatttcttgttcttcctcagtcctttcctcctcattttccctagagtattccaggccctgacacggtcatcagggaggttcattcttgtgttgctgtgactgccgccagtgccaccaccttgcgaggtgtgttggccgatggactcggtgtcctcagtgtcttctctgtcctccagctccactgaccacctggcttcacccctccctgggccccaggagtccggctggcatggaccacagccacagcacccccgtgcccctcacttggtggttggctttggccagcgggggcccccagcaggaggtcgaggaggaagggagagcgagggcctcgtctttactttcccggcttctttgtgagctgcctggagctggccgagtccagcctctccctccttctgggttccgacaatctctccttccctggtctgtcctgtgggcggctgcagcccggccctgactggcacagggctcttgcaccgcccctgtggctcacctgctccctccccaacatgaataaaccctcctgaagccaccccgttgtgtgtgtgctgttttctctcgggaccatgtgataggggctgtgtccagcacacagattctgtgattgtccacagctgtcacccaatgtccagagagacattgtagt

SEQ ID NO: 19719 - DNA, 1707 bp, Artificial sequence
  DNA replication origin
tgtaagttaaagcagcacaagttgtaggacagtgcacaaaaactctcattggtctggaagaacgtacagcaacccagtgactttgcggggagggctgtggctctggggaggggggcgcagaggaggggtcgatgctgccacagttgtgcttctgagtcctgtgagaccatcacagtgagagtgtacgcagtttcttaaaaaagaaaaacataggttttctagaaactcatctatcatgagatagagcagttcagtcagcgagtattgatggcctgctctgagcagggaggggaccaggcacaggccctgcccacgggagcgcgcacctagtgcagaggcagaccctcggctgtggcagcaggcagggctccgtggtagctggctgctgttctgcgcaccccacaggccctgggtgaggcagctgaacgcatggagaggcctgctgcttccctgtgccaccctctgggcctgcgctggcccaggcactggtgagatactttgtatggcccagagtgctgtagtcagagtccaagggaaaatctttgtgcctaaatgttcatatctaatatacaaagaatggctactaattgattttaaaaatctgagaatccagtagaagaaatgggcaaaaagtatggcaggcagtccacagaagaggaaatccaagccaccgtaaatacatgaaaagatgctcagcctgtgagggacacgtagggtggacgtgaggcgcctgtgtggtcggcaggaaggagccgaggtggtggagcgtggggaggagccgaggtgatggagcagcgtggggaggagccgaggtggtggagcagcgtggggaggagccgaggtgatggagcagcgtggggaggagccgaggtggtggagcagcgtggggaggagccgaggtgatggagcagcgtggggaggagccgaggtgatggagcagcgtggggaggagccgaggtggtggagcagcgtggggaggagccgaggtggtggagcagtgtggggaggagccgaggtggtggagcagtgtggggaggagccgaggtggtggagcagcgtagggaggagccgaggtggtggagcgtggggaggagccgaggtggtggagcagtgtggggaggagccgaggtggtggagcagtgtggggaggagccgaggtggtagagcagtgtggggaggagccaaggtggtggagcagcgtggggaggagccgaggtgatggagcagtgtggggaggagccgaggtggtggagtgtggggaggagccgaggtggtggagcgtgggaaggagccgagctggtggagcagcgtagggaggagccgaggtggtggagcagtgtggggaggagccgaggtggtggagcagtgtggggaggagccgaggtggtagagcagtgtggggaggagccaaggtggtggagtgtggggaggagccgaggtggtggagcgtgggaaggagccgaggtggtggagcagcgtggggaggagccgaggtgatggagcagtgtggggaggagccgaggtggtggagcagcgtggggaggagccgaggtgatggagcagtgtggggaggagccgaggtggtggagcgtgggaaggagccgaggtggtggagcagcgtggggaggtgctgaggtggtggagcgtgggatagagcatggaggctgctgccaccagctgctcggaaggcatccttccaagttaaga

SEQ ID NO: 19720 - DNA, 1116 bp, Artificial sequence
  DNA replication origin
aactcccgccataaccagggagaaagcatgtgcctttcttcccagaccaaacagcggtcctgaggctcccgcacagctgtgccagttactgtggcgctgccctgggcctccccggcacccactctcctccagactcacgccggggggcctgggctgcctctcccatcccttcttcagtagttcagaagctgccagaacacacactattcttatttaaaaacctcaaattgatttaagatatgacacatttaggacactgcacactgcaccacatgaagggaaaagcaggtttctgttcccacatggaatacacggttttcctaaatccttaaacagacaaacagaaaagtgtattcaattatgattttaaacatattttctgttagcactggggctcaggggtttggggttcctttaattttaaagacaatgactcagggtggtagaaagagctggggatctgctgcaggtgagctgtggggtggcggggtccactccagtctgcgtgagtgtggggccccagggtgtgggcgtggaggtagatgtaagggtgggtgtaagtgtgggtgggtgtgagtgtgggcgtggaggtagatgtaagcatgagtgtaagtgtgggcgtggaggtagatgtaagtgtggacgcggactgcatgagtgtggggccccacggtgtggacgtgggtgtaagcgtgggtgtgcaggtagatgtaagtgtgggtgggtgttaagtgtgggcgtggaggtagatgtaagcgtggacgcggactgcctgagtgtggggccccagggtgtggacgtgggtgtaagtgtgggtgtggaggtagatttaagtgtgggtgtaagtgcgagtgtggaggtagatgtaagggtgggtgtaagtgtgggtgggtgtaagtgtgggtgggtgtgagtgtgggtgtggaggtagatgtaagcgtgggtgtaagcgcgggtgtggaggtagatgtaagggtgggtgtaagtgtgggtgggtgtaagcgcgggtgtggaggtagattaagtgtgggtgtggtcatgggtgtggtgtgggtgttggtgcgggcgtgggtgcatgcgccactgtgaatacaatggcacacagtctcactcagc

SEQ ID NO: 19721 - DNA, 919 bp, Artificial sequence
  DNA replication origin
acaataagacgttttcagatacgcaaagactcaaaatgctgcttcccatctagagagtctttctccagaagctactgtagaatttgttctatcaaaacaagggagtagatgctgagagaggaaggtaagagttccagaagaaagggagctgacccagaagcccccggccgccccctactgtgagaggagcctggcggggtctccacagggagaccaggtcagtctgaggacttggccagtggaggaggatgtcgagagaggtttacagtttgagaggatgtaatgacagatgtagaaaacaaacattttaaaaggaggcagttatgaatcccacagggaatacaggtttctatgggaagcaaaattcgttatcaatgactacttactgggtcagtaacaagtaacattgaccaagtcgcagagctgagccgtgagtgctgctctagcccacagttacgatatgggggcgggggaggctgcaggggtctccggggacctgttgtgatatggctgcatggtgagggggtgcagtggctccagggacctgctgtgattatggctgcatggtgagggggtgcagtggctccagggacctgctgtgatatggctgcatggtgagggggtgcagtggctccagggacctgctgtgattatgtctgtatggggcggggaggctgcaggggtctcctgggacctgcactggaggtagtgtccaacctgtgcccccagcaaggcaagccggggagggagacgggagccgggtggcccagggctcctgtgcttggagtgggggaggttgggactctgcagagggcctgaggggcaggaacgggaagatcccctcctcagtttatccacctgagggccccccgcagtgccctcctcagcctcactttgttctgcccaggggattggccgt

SEQ ID NO: 19722 - DNA, 1816 bp, Artificial sequence
  DNA replication origin
gaggcagcagctggaaggcggggtggaggcagggatgagctggccacttgttctccgggagggcccgccatgggaatccatgtcctcctgcctgtcttccggaggccaccttcatgccctcattttccacatcacccttcccgtggtcatctgccctctctcaccctctaaaccccgacctcactctgtgagaggccccatttcaaggggagcgggagagcctgcctcccggatggcagtggcgggtaattgctgctgggcagggtagaggagctggcacagaagccaccacccagacccctgcttggaaggtgcttacaggctggtggggaaacggtgctggaggccctggcacccaccctccaccctgtgactcagcccatcttctgaacgtggccctgctcctgatggggccctgcagccagcaagtccctgcggcctctctggatcctgtaacctcttatagatttcaggtgtctgggcaggaggcgcccctctccctggtggatttgggatgtctgggcaggaagccctcactccctggtggatttgaggtgtctgggcaggaggcaaccctctccctggtggatttgtggtgtctgggcaggaagcccccctccctggtggattgggggtgtctgggcaggaagcccccactccctggtggatttgaggtatctgggcaggaggccccccctccctggtggacttggggtatctgggcaggaagcctcccctctctggtggatttggggtgtctgggtgggaggtgcccctctccctggtggatttggggtgtctgggtgggaggtacccctctatctggtggatttggggtgtctgggtgggaggtgcccctctccctggtggatttgaggtgtctgggcaggaggcaaccctctccctggtggatttgtggtgtctgggcggaagcccccctccctggtggctttggggtgtctgggtgggaagtgcccctctccctggtggatttggggtgtctgggtgggaggtacccctctatctggtggatctggggtgtctgggttggaggtgcccctcttcctggtgaacttggggtgtctgggtgggaggtgcccctctatctggtggatctggggtgtctgggttggaggtgtccctctccctggtggatttggggtgtctgggtgggacatacccctctctctggtggatttggggcgtctgggtgacaggtacccctctctctggtggatttggggtgtctgggttggaggtgcccctctctctggtggatttggggtgtctgggtggaacgtacccctctccttggtggatttggagtgtctgggtgggaggtactcctctatctggtgtatttggggtctctgggtgggatccccctcccctggtggatttgggatgtctgggtggagtccccctcccctggttcctgctctgctgttctctttgcctcccttagctactgagtgagtaccgtctatgttgacttccagctcagggcgtcctgagcttctgggacttctcatttttctgccgagctgccttgggaagggaaaagggaggcgacagcccagagccaggcctgagaacccccaggggcaggaactgtgctgcagaaggcagatggtctggggtggtcgcaggcccacggcttggagagagcagcagccgcagcagggagccagtgcgtgagaaacgtgaatgtggttggcggatgctctcagggggtcacaggcggtgtcccaggagtgctgatgggcgtcaccagccctggggccccaggacgcaggccccgcctcccgtgaaccga

SEQ ID NO: 19723 - DNA, 1086 bp, Artificial sequence
  DNA replication origin
ggcttcttccgcatcacgggcctcagccagataccagcaggggcagattgcacacagagcatgtgggcacagggtttgcatctcctacctggccctgagcatagcacaaggcctcaggtgtacccgaggatcccactgagggcccagctatacaagtatcatgagagtggtggtggtggtgatcattttgctggtgataatggtgatggtgatatggtgatggcggtggtggtgatgatgctgatagtagtggtgatggtaggtgtgatggtggtgatggtggtggtgatagtcatggtggtgatggtgacaatggtggggatggtggtggtggtgtgatggtgatgatagtggagatggtggtggcagtgacagtgataatggtgatggtggtgtgatggtggttgcaatggtgatggtgatagtgatggtggtggggtgatactgatgatagtcatggtggtcatgatggtgatggtgatggtggtagtagtgatgggggaggtgggatggtgatcatgatgatgatggcagtagtggtgatggtgatggtggaggtggtggtggtgataatggtgatggtgatgatggtgatgtgataatggtgatggtgatggtagtggtgatgggggtggtggtaatggtgatgatggtgatggtgatgatggtgatggtggtgatgatggtgatggtgatggtgatgatggtgacggtggtgacaatggtgatggtgatggtggtggtagtgatgggggaggtgggatggtaatgctcatggtgatgatggctgtagcggtgatggtggagactgtggtggtgatggtgatgctgataatgacaaaagtgttgatgatggtgatggcagctaactcatggaagctttactggggcttgtgctgtactaagtatctcatttaatattaactcatttaatattcagtacgaggctacacggtaggtaccatcatatttcccactttacagatgaggacactgaggcacaagggaggtggcagtctccccaaggtcacatggcaggactctagcagtttggcctcagagtttatgtgcctgcccagctctctg

SEQ ID NO: 19724 - DNA, 2390 bp, Artificial sequence
  DNA replication origin
cactggggaccgtcgggtcgctggcgcctgtcgacctcgccctccggcggccgcgcggcagtgggagcctcagagaggagccagggcggagtgagggagcccgcggggcctgggacacctgaccgtccggctagaacaggggtagggaccgaggccgaatgagccagagttctggccggggacagtcccagaggaggcctggaagcccagtgagtgtctgtcctcctctgtgtggcctggggctcccgccaacactaagcccttcctggggcctcaggcacctcaaggcgccccgttctccagggtcagccagcccctgcccactggttgccaggcttgcagtggagcctgcctgctgtcctgcccacaggcctctgcagctgccccctccaggggtggggctgactttggaggaaaaatgccaggcagcagggaccccctcgccaccctgctccaggttgggctgagcggccatcctgaggctgcccacttgcttggctcttcttcctgcctgctggagaggcctgctgggcactgccctttctgagcattggggactgccagggtgaatcagcattcaggctggtggggccagcatggggtggggctaatgcacagggggctgtatgtgggtggagggatccagaaagagtgtccaggggagcaccagcattcaccagggccccaccaggtgggcaaaagcaagggcttccgaggtgggggtgggggtgggcaggatcctctgcaaggtgtctgcgtgcgcctggggctcctggtgacttcccacgccagcaggaggaacagtttggggtgtgctgagggacccacctgtggacttgctgggctttgagaggaaccaaggctgggtggcggcgggcaggacaggggaagagggttccggggcacagagggccagacagatgcacccagcagctggcagctctggctggagaggggaagagggcagtgagaagcacggctggcccatggtacctcctgcccctctgccctgcccgccttccctctgccctgcccaccttccctctgccctgcccgccttccctctgcctcttcccctctggcccgtgctatttactgtgtattgttaagtgaacttggaagccgtttttaaaacctgctctccactaggtaaggtataaaaaagaccatctgcagacagggagaccatttttgcaacttaaacggtggctgttcagggcctcccccagcagccctgcccccgcacctgctcccacttgcttcccgccccgctccaacctgcttgttgaagaagaggccatgggagtttccagagtccccgattaaagtgcaggtgtccttggggacctcatcagcccaggtatcccctcctgtctgaccctgtattcgggggttgggaggctgtcctaggcttgctgctctgagcatctccccagaggccaccctgctcatgccagtcagtgaggtctgcccagttctgggaagcaccctgggtactggggctggtgctgcccacagtgagaggaccctgagctgcctggctgggctggagaggagcctcgggagtacgcccctggctggggtgaaaaggccaagagtgggaagagacacctccgaggtctttagactttgtcttcaagagacttgatccaaacaaaaggtcctaaagcctttggtcctctggctgtaggcacagccgcagcaaggcctaggacatgcccagctcgggacggcccagccagtcagatggggtaagccaaggggacaggagagtgtccggaacttccaccggggctgggggtgggtgaccagcagttggcaggatgggtggcctgaaggggtacagttgagggagggacaggtggctggaggaggaagcaggggctggcctctatgtcccctgagacagcaggggaggaaggcaggaaccccgcaggccacctcccctcagggtctgcctcccctgcggtccttggaggaactccaggatttgtcctccctggcagcctggctcacttgcatcaccagctccatgcccgcccctcgtctttcagggtcgctcccccaggtccgagcttagagggccctcctgactgctggacctggacctgcccagcactgtcctaccgcactacatcatcactgagacttgggaagggcagtggtgagcaggttctcagcctttgttggtctcttccacgagatgaggcttacagcggcctccccatgactgaggtgcagccacagcctggcctgtgtccagcctgctccagaatcacctggtatccccccaacccccaacacacctgggcttgcttgatcttactggagctcaccagggcctggctgtgtgcaagtctcatgcagcatagtgaggtgctcctgagatg

SEQ ID NO: 19725 - DNA, 791 bp, Artificial sequence
  DNA replication origin
cggggggttaactccctccggaggtctcgggcgtgtctcttcgggttgccgggcccaggggccaggcgcgcctccgccagtttacaaaggaaacagcctccttcccccgcggcaggggctccccgacccgcgggcgaggagtgggaggtgacggcgccggacccccttcccccaggcgcccggctcccgcgccttcaggcgtcaaagcccccgacttccccgagcaccagcacgtccgcacccggctcagaacgcaggggcccggcctgctgcggtgaccttggccccgggccgggcttctgagccggacttgcagcgcctgacgaggcctggaggcggggcgggggaccgcgtagttgtcctggcgacccagcgccgccgggcagggctcctcccagcctgggaattgaggaccaccgcccctggtgccactggggaccgtcgggtcgctggcgcctgtcgacctcgccctccggcggccgcgcggcagtgggagcctcagagaggagccagggcggagtgagggagcccgcggggcctgggacacctgaccgtccggctagaacaggggtagggaccgaggccgaatgagccagagttctggccggggacagtcccagaggaggcctggaagcccagtgagtgtctgtcctcctctgtgtggcctggggctcccgccaacactaagcccttcctggggcctcaggcacctcaaggcgccccgttctccagggtcagccagcccctgcccactggttgccaggcttgcagtggagcctgcctgctgtcct

SEQ ID NO: 19726 - DNA, 1628 bp, Artificial sequence
  DNA replication origin
ggctgtggcggccgccccagcggagctttgtgacgtcaggcggccgcggggcggcgtcacgcgcggggctgacccggcggcggcggcggcggcggcggcggcggcggggcgggggcggcctgggacgcggcgggagcatggagccgcgcgccggctgccggctgccggtgcgggtggagcaggtcgtcaacggcgcgctggtggtcacggtgagctgcggcgagcggagcttcgcggggatcctgctggactgcacgaaaaagtgagcgggggcgcgggccgggacacccccggggtccccacgcgacacccgcctccgccgcccggagacccgggacccgcctccgggttgggggtggcgtggccccggcgcccgctttcggtttctgccgagcctgagtttcggggcgcgcgagcgcggccgccactcgggggggcaaaagtggttctcaaagtcgtcgcgacttttcggggcgggcgccgggccggggcgggccggggcggggggcgcggggccggggtcccggaactccacacatctgccataattaatgcacttttctttgttcagagccactgttgaattcgactgttggcagaattgtcgttaaagcaggggagggtcagatgcgccgtggccttgccctggcagttcctcacaggtgggggtgccctgtcgaaggccacgggcccctggctgctgggagtgactccgcggctgaggtttggattcggggagagcagttgcgcccagctgtgcgatttaagaacagtttcaggccagggagccctgagtcatgggggcgtgaagaggtacaagctgtgggagccgtgggcacatcccccgggagccctggcttcctgggtggggggcgcagggcagggcggggcggttcctcctgagaggcacctgtgcacgggctgcagggacccatgcggtgcagatgagcctcctggacaccgcgtcacatggcagggagctgtcgctgccagatcaatgattaggcatgaatcaggctgtggcctcgctgcgctcctgcagggctttcttttgaaactgggagcagggaaaggctcctcttgtaaaggcccaactttttccatccgtggagcccagatttttgcctggtgacatgaattagcagagaggaccgtgttccttccacaattatttcgcagacgttatctcttcattagatgtgccagaagccatttatccacaagtcacgtgatttaacatatggctcccgtgtggttcctgcccgctccgtgtgggctaccgctgggagtgcacgggcaggatggagggacactcggggggtgagaatcgccacctgggagctgccatcccctccaccatcggcctcagcttcctctggcgggcagggttgggcttggtcctggtcagcagggccgcacccctgccagacctgcaccaccttgcctggcctttcctccctgaagaggggcacgagcggcagtgggttgccccatttcccaggttccttgactcgggacaagggaggctgagaatatctgcagtggcctcgggctctcctccctgaggcccatggctaacctggtttgcaaatctacaccaccgcctccccttcatggaaaaaaccagg

SEQ ID NO: 19727 - DNA, 2439 bp, Artificial sequence
  DNA replication origin
agtttcaacttggggatggaggccgagggcgcgcaggacggccggtcccgggactctctgtccagcacctcggggtcctggctgccgtcgtcctgcggggcctgctggggacggaagggctccagagagccgtgcacgcgggaggggatcttgaccacctctcccttgccctggggcgtgctgtaggagatcttgatgaccgggctccgcgggacctgctctgccggggccctgtcctcctcgcgcctctccctcttgctcctcctggcggtggccgcagccgtgggctcgccgttctccggctcctccggcttgcggagctccctgtccgggccgctgcccagcctcctgcgggccctgggcgcggctgggggtccggggctggcctccggggggctcagcgtgctcttgcacttctcacagagcacctggcgcggccgcaggcggatggtgctgaggatgaggcgccccgggtcgcggttgcgggacagacgccgccgcgtgcgcttgatggtcctgggcggcggctggggcacccacagcttgtacgtgtcccggagccacagcgggtgagggaagggggcgccttcgaagtagggagggtacgggggcaggcttccggcgggcagcggcggcacgaggggcgggggtggctcggggcgggtggtctcggggggctgaaccccgcgggcaggagggggggagctggaccccagctgcatcacctctgcatccccctcctcgggagcccggccatggctgtcgttgacaggggactcatcgacctggggcagcggagccaacgggggtaggccaaagaggccggacctggcaatggagagagagaaaccacagtgagaagggaccctggcacatctgccacccgcaccagcccccagagccaaggcccccgacccatgctccggcaggtctgggcagcgagccatgccctgagtccagggctgtatttcaggacggtaaaccaatgcccatgctccctacgtatgtcctgggttggacacagcagggcaagacatgtgccttccaaagccaagcagcatatggccgggaggtcagctgcttccctggccagagacaggcccagaggctccgaatctcagtccatggccccaggggacatgtggaccccagcaggaatgctcccaggaggcctgacctggcccggggaggggtctggctgcttgtgacccatggccctggaccccaaaactcaggctccttgctcacaggctcagccgttccctcctctccgaggggctgggggactcagggaagacaacccctagggccaggcaacgcttcaacccccaaagcaagcccctggagaaagctccctgcaggagcccagaagaatgccgtcctgcaggagccctggagaatgccgtcctgcaggagccctggagaatgccgtcctgcaggagccctggagaatgccgtcctacgggagcagggttccaggtgcatgacgtgtgtctggggtggggctgcgcgtggcccggggctgagccctctggagatggcccagatgctttcagtggccccgagagagccctcatccccatctgcccacctggcaccctcaggtcctgccctgctgggccacacgagctgcaggggaaggggcacagggggcaggagcagccactgctgggggagccacaattaaggccccgcggctgccacagccgggacaccaatcccagttgtaaaggccttctcatcctgggactcgctgggccgggcagcctgcgcttaacggctagtgcccagcactgtgcgtggctttgggggatttgtcctcagaagcagctcacgtcctagagtgcaggccacctcgctgcacgggcacctggctgccccatcattctcgaggcccaagtgcagccaatgtccccgagccctgtcccctgttggcctcatcccgcccaacaagctgctgtgagcgcgtcaggaaaacagttctgcgaacgctgatgttaccacagaccatggaaaacgggtccacagaatccacgtttccacagggaacacgcgtaactggtaacaaaccagatgcaattttcaagaccgctctagctaaaccagagaaaaaagagagggagatggagagaaagagacagaaaagcaacacagcattgcgactcgccggggagggcacagcagtggccttggggcctgtgaggggatgaacacggggcggggggttctgctctgtggtgggtgggggtggtcagagtgagcgccacccgccccattctcctctggccaggcaccgctgtggggcctgcagccacgggctagcaacggcaggagcatctctggagtgcgggctgggccccctgtgcaaatggtctcactgagccctgcagcagccgtgggaagcgggctgccttcaactctgatgggctaagactttcg

SEQ ID NO: 19728 - DNA, 1232 bp, Artificial sequence
  DNA replication origin
ggcccggacagggagctccgcaagccggaggagccggagaacggcgagcccacggctgcggccaccgccaggaggagcaagagggagaggcgcgaggaggacagggccccggcagagcaggtcccgcggagcccggtcatcaagatctcctacagcacgccccagggcaagggagaggtggtcaagatcccctcccgcgtgcacggctctctggagcccttccgtccccagcaggccccgcaggacgacggcagccaggaccccgaggtgctggacagagagtcccgggaccggccgtcctgcgcgccctcggcctccatccccaagttgaaactgacacggcctgtgccggccggcgcggacctgccgccccctaagatccgcctgaagccccaccgtctgggggacagcgagcacgagcccgtgtaccgggccgagctggtgggggagctgaacgggtacctgcgggacagctcgccggcgccctgtgcggacggccctgccggtgggctggcggacttgtcttctggaagttcgggtgaggacgatgacttcaagagctgtccccagggtccacagggacgcgagggcttggcttttctcgtcagctgccctgaggggagagcggactgtgccagtgagtcggcgtgcagcagcgacagcctggacgaggccagatcgtccggctcggaagggacgccggcagacacgggtgacctctcgcctggccacggcgcgtcagcgccctcggtgtccagagaggctcgccaaacggtgccgcccctgacggtcaggctgcacacacagagcgtgtcggagtgcatcacggaggacggcaggactgtggccgtgggggacatcgtctggggtaagatccatggttttccttggtggccggcgcgtgttcttgacatcagtctcggccagaaggaggacggagagccgtcttggcgagaagcgaaggtctcgtggtttggttctccgactacgtcgttcttgtctatttcaaaactctcccctttctctgaatttttcaaactgagatttaatcgtaagaagaaggggatgtatcggaaagctataaccgaggctgcaaatgccgcaagacacgtggccccggaaatcagggagctcttaacccagtttgaaacgtaactggttccctgaccaggtgagtgtgccagcggcagcctccttccccccagcggcccaagctcacacctgtgtccagg

SEQ ID NO: 19729 - DNA, 1127 bp, Artificial sequence
  DNA replication origin
actgtgtcctcccgtcctccctcccggctgggcactccctgccagccaaggcctcaggcctcacttggagacgtcctgcgtggggggatgtcatgcctcgcaaatgcctgagtccagaactcggggagggccccccaggacagcagacgggagtcctctgaccctcctcctacccctcagaagatggtgccctggcttgagacactccccagactcaagctgagagacggcacccacacccactcgccaacaaggcacctgccccacgcctgccccaaggccccagaactgatcagaaaagggcctggttcctggggcggggggagcagccaggtttgtgcctggcctcaggagagcaaggcagatgcagccgggtggctggagggagggggtgaggccaggccagagcctgggcagccaggcagcctggggaccctggggaccctggctcaaccacagtggtctctcatcactgcttccgccggaaccccaatacgcagggtgcagcagtggaggggcaccaggcgctccagtccccgcccccaacaaaggcccgaggacggtcacctgggaaactctaaggcctctgggcaggtggccagggaagacaaggtcaccagacgtcaccaaggcctaggcggagccctgcccctgccctctgcgtacagcccctggccctggaatctctgcatccatggggtggttaggccatggagccaggaagaagagcacagagggccaccagctgcccccacccagaaaggactgctccctggcctgccttctcctgctgggaagacaagaggggcatctaggaggtgctgagaaggcctctggagctgggagagtggccttcaggagctcagggcagaaaacagcccctcggcaggctccggatgccccacgtggtgattacaggggcatgggtggtgcccccagccccacaaggtgacacccccacacctccacacagcgtagtgccccccaggcacagagaatccacacaaggcctggctggagattctagaaagtgctcgtagtagaggccgacagtgagacgccgtccccgggaacaggcccccacaccatgtcccaggtcccgggcgcctggccacgcacacagcctg

SEQ ID NO: 19730 - DNA, 1310 bp, Artificial sequence
  DNA replication origin
gcccttggaggtgaccactgtgccctctcaggctggcaggagaggccgttccctgggacttctcctacacccacagggaccccatgggattagagctgaggtccggggcgggggcaggtggtggagaccaggctctggggttactgtgcctgggagcagcctcctgcttcaggtgcaggcaccggacatgcagggtcaggggcccagcaggagctgcctggccaggcttgtcctgcagctgggaatggggacccagagaaggcaatgccacccacacccccaccaccgcctgggcccaccgagcctgagaggggaaggcagctcctccccagggtgagccccagggcctcgggctggggtcctgcccctgtccaggctcaaggtcctctctctgctcccctggtctctccctcaccacccacccacccacccacccacccacacctctactgagggccaagcactccactgggcccaggctagaagggggccaaatggggagggctgtgaatcaccagttcccaaattagtgcataatcacacacaggaactgctgagaaggaagggaagaggggcttgaagcagagcatccagcgagaaacctggcctggactgggatccgggaaggcttcctggaggaggtggcaggagccaggatctgaatggtgagctaatcaggagctgatggggtgagggtgggggcaagtgttctaggcaggaggagggcagggcatgttccaggggttgcggaggtggtcagggggcccggtgggccaaggcacagactctgggtgctgttggagaattacagacagaggagtgagatggtcttgttattatttgtcagttaaaaataaaatgaaactttaaaaaaatctgatagctttacaaataaaagcagtgacctccagctgtgaggacagggagagtgacgggggacggggaggctgggcggtgtgcaggtgtcgctcctggaactaggggagccacggtctgtgccccgcatcctcaggggtggctccagttctcgggaggtgcctgaggcctggctggaggcatctcaggggaaagctcagaggcgggtcaggcagagggctgggggcaaggatccgtattcatcgggggggacctgggccaggacaatgcttggcggggagctccacagactggctgcttgaggcagaggctttggagcagcagaggcaggtggagatgacaggtgactggatgtgtgcactgtgcgggagcaggaaggagggtggcggagagtgggtggcactggccagccgtgtggggaggacctgaggggc

SEQ ID NO: 19731 - DNA, 1297 bp, Artificial sequence
  DNA replication origin
cgatcccgtcagccccgcaacccagggccaaccctgggccctgaagagagcagccccctaaatccaacaaacagagagacagacactgtcagccccagttctccaccagccggtgggtggagagcacagggacggggaaggcagcggagcctgcagagccgagggtgcacggggccacgccagccccgccactcctcctgtcaggacaaaggcgccccatgggccctgcctgaccacagcagggcaggagggacctgcccctgtcgcagccccgccgagaagtcactggagggacctgcccctgtcccggccccgcggagaggccactgccacttccagtgctgccctcgtggaagccctgggctgccatgggagaaactgcaaccgccctgagaccaccatgccgtgaggaagcccagcggcacgcggggaggcctggagggcacctgcaggcgtgtgccgtgtgagagtgtgagggtggatgtgtgtgtgagcatgaatgtaagaggggattctttctcctcacgctgggcattcctgagtgacaacactgtaaacaatttgaagaccaagcaccaagccgggatcaatgctacagagaagaaagggccggcaacatctataatcctctacatggatgggctaaaatcattaacataaacaccaagtcttgagttagccaaacattgtgtgtgtgtggatgtgtgtgagtggatgtgtgtgtgagtggatgtgtgtgagagtgcatgtgtgtgtggatatgtgtgtgtgagtgtgtgagtgcatgtgtgtgtgagtgggtgtgtgagtggatgtgtgattggatgtgtgtgagtaaatgtgagtgggtgtgtgtgagtggatgtgtgtgtatgtgtgtttgtgtgaatgtgtgtgagagtgcgtgtgtgtgacagtggatgtctggatgtgagtggatgtgtgtgagtgggtgtgtttgagtgaatgtgagagtgcgtgtgtgagtggatgtgagtgtgagagtgcatgtgtgcgtgtgtaaatgagtgtgagtggatgtgtgtgagtaaatgagtgtgagtgacgtgtgtgacagtgagtggatgtgtgtgagtggatatgtgtgtgggggggtgtgtgtggatgtgtgtgagtgtgagtggatatgtgtgtgagagtggatgtgaatgtgtgagcgggtgtgtgtgtgagtggatgtgtgtgagtgtgagtgggtgtgtgtgtgagagtggatgtggatgtgtggcagtgaacaggagagatctcagcctcttcatcttccatagaaaaagcc

SEQ ID NO: 19732 - DNA, 1253 bp, Artificial sequence
  DNA replication origin
agcggaggcccagggaggtgggttccccagctgccagtacccactggtcaggctgggctggaccaggtcctgaatccccgcccttccacccatgggctccccaggaaggctaaactgagggaagaattcctgctgggaaagccctgttctgggaccagggtttcgtccctctattagagggggtcagggggacacctgggagcggaacacctgagggaggagcacctggcggggagccttgggggaggaggcacctgggggaggaagtctggaggaggggtctcctggtggggggcctggaggaggggtctcctgggggaggggcctggaggaggggtctcctgggggaggggcctggaggaggggtctcctgggggaggggcctggaggaggggtctcctgggggggggcctggaggaggggtctcctgggggaggggcctggaggaggggtctcctgggggaggggcccttggggagccaaccctagtcagtacgaggtcctgggtgcaaagtgggttgtgcggcagggggcttggggcctcagcggggctgcccggagctggtcctgggcctctcttgctctgggtctcccctgctctgggtccagcctcccaagcaccccacctggcaagacttcctcgctcagaacagagccaaccctggctgtcttcccagggtttgtcgtggagagggctctggccctttagccttccaaggagctttcggggttggggtacgtttgtgaccccagtagccgctgtgctgggggcccagggcaactcctccgggagcagggaaggcactgctggcaccaccagccccgcagggtcaccagcatcccgtctccaccagggctgctgctgtccctcctctgctgaggccagctgttaccgtgttcgacatggaccaggccgtgtgggaggacacggggtggcaggtgcagggagcacggtctgttttctgtcactctctggtcccagcctgagccccaatccctacctctgagggtcacacttccaacccaccccagacagagctggaagcaggggctggcatgggcgctggggtagacgcaggggttgtcgtggcctggcgtggaagagctgggctggacgcagtgggtggcgtggcctggggtgctgctctccagccttctttctcttcttcctcttcctcttgttcttcatcttcctcctcttgctgcagatcctcccccaggtggctccatttctgctggtcccatctcccgga

SEQ ID NO: 19733 - DNA, 1691 bp, Artificial sequence
  DNA replication origin
ctgcggccccggccccagccccacccccagccatgggaagggtgcactccggagaggccgacgcagatggggccctgcccctggcctgagcgtggccgtcatctgctcaggagggttaagctcctttgtgccccaaggagcttcaagccgatcaatacccggctggaagtagggggctgcagctgggggggccccaccgccctgaccccagatggacttcctgctccctgcccagcttctctgcggggggaggtcaggtcagtgggcctcctgcttggcctttggggccaccgcccctgggctccagctgaggctgtcccagggccggtctcccttcccgcccccaccctacagaggcggcctcaccagccagcctctgccccagcagagttatttttagccccagccccgcctgctgctaccacgggccttttctccgcagagagaggcgggtgaggcctgagggcctcacccagggcagccagttccccaaccacgaagggaggcaggagagcttccctgtgcgggcaggcgtcgctgaccctccaaggggcagagcagtgggggcttccttccttcctgggtgtggctggggggagggggctgaaggcctggagccggaggggcttgccctagagccccatagccaggcaggggtcagtgtccacagctggaggggctggagaggtgagagagatggtcccaagggagctgggaggcccaggagtgggcccagtgctcaacccgctgccaggcagggacaagacctgagagatgagagggcggcgggggtgaccctcggagggcagagggcgccaggacggagagatgaacggggcagtggggtgacccatggagacccacagagagcagaggggcaccaggatggggagacggaggccagtgggggctgaggggtcccgggggaggactgtaaggagccacatagtggctgcggtcggcgtggctgggagacaggggtccaggaagcccactggaagctgccgccccggctgtagctgcagggctctctgtgggagccgggagctgggtgcagagctgcgtcgaggctgcctgaggcctggcagcccagcaggaggggacttacccccacccccccacggaggagaaggctctggggcctgctgggtgcagacgcagctgggatctgctttggggaagaaaacctaggcaggtcaccgaggctctgcccaagccaacgcctgtcacctgtcaccgaggtgtgggtgtctgtcctcctcccagccgtccatccccctccctcctggccccgctccagcccgcagcccccatgggagcccgagagaggacagtctcagcaggtggcacagacagatgcggactcctcactgcaggtcacaaggcatgttttcagagaccagctgcggtgaagatcatccagcccttgggcccctgatccgtttggatacagtttcaagcatgaatttctcctttggtggtttgctacaaagagaagagttctcatgatttctttggggtgttcatcctatgattttggggtgaggattcgtgacagagacaagcaacaggagtccaggaagccctcgggggagacgggaaacaagtctttttgaaaaaacagctttctttgagacgtagctcacatatcatatgatccctccccttccagtggacacgtccatggcttt

SEQ ID NO: 19734 - DNA, 1136 bp, Artificial sequence
  DNA replication origin
tcctgagccccctgctctcctggagacagcatgggccacaggaggaaggaaggagctggggagaaggtggggcctgcagcctggcttgccagggaggaggggtggatggggaccaagagccaggaatcccggcacagccgggaggagccgatgagccagggcaaggggtcaacactggagcctgatctcccaggaagggtgctgttctgggccccggctgggccagatgaggcaccacgttcccaggccctgtgttggcagcaggcctacctctgccctcccaggcactctggggtgtggtcccagggcctccccacttgaatggaggccagccaggtccggcaggtgggagcacccaggcatgcgctgggtgtgcagagggagggcccatgctgccccacggttaccaagctgcagggacagagcacgggggctgcctctgtggctcttggtggggcacggggctgtgctgggaggcccagacatcagggagggaggatgggcttggaatggggactataaaaggtcacggtggggagggccgctgacccctgtccttctcacggggggtctccagcacaccctgctgccactggcccctcggcctggagccaggctccattgtggagtgggtagtggccactgtggaagggttggggacacttagaggctgagctgctggatgcaggttgacatttgaagcctggcctgatggagctgggctttccctggagcgctggacaggccacccagccttctggctctgcttccctcctgcatctcatgctgggattgatgggtggtcagggtgcctgctctgagctaaggcctgactggccccaaattctgggacccatgcagagggaaggggacatctgtggtccttggaggaaggagtcaaaacaattggggcagaaaatgggatgagtgggcaagggcgggagagcacagctgagaatgcccggggatgaggagtgagcagggacactgcgcagctgctctggcctggactgaagcccaccagggtacaccctgaggcctggtagagtgccagggccacactgctgaggctccctgtcctcgaagtccgcttggagccctcctacctctccaaaggcggcattctcccctccacc

SEQ ID NO: 19735 - DNA, 1444 bp, Artificial sequence
  DNA replication origin
ctcccggctgtgccgggattcctggctcttggtccccatccacccctcctccctggcaagccaggctgcaggccccaccttctccccagctccttccttcctcctgtggcccatgctgtctccaggagagcagggggctcaggaagggattctgcccgtgggcactgctgacctgggcaggcaggggcagggtgggctgcacttcctcccatctcaggacctggcaggggtggcacagcccagctgcagggactctggcgggagtgagctgccctgcccccactgtgcctctcagggcctgtccccctcccacctgagccctccactgggcgtctcttctgaatccagtccatgcccactggctgcctgtgccccaggttgggctttgcgctggagctgcaccccaggctctgcaaagccaccatggtgacagtgtttccagggaaaccacagcaggctgccaggcaagtgcaggcggaggacacccaggtgggaggtgtgtgtctgtgtgtgtgagggagagcaggaaggtgtggcgcgtgttcgtgggttgtgtgtccatgaggtggtgtgtatgtgggggtacccttgagagcttgtgtgtttgtaggtcattgtggggcacatgcctgagggtcctgggtgtgtgtgtctgaggcagctaagtgtgtatgtatatgtgcatgtgtgagcacatgcgtgtcagtgtgtgtgagtgtgggggtccatgtgcatcggtgtgatgtgtgcacatgtgccagtgtgtgtgttgggatgcatgtttgcatgtgtgtgtcagtctgtgttggggtgtctgtgtctatgtgtgcatgtgttggggtatctatgtatctgtgtatgtgtgtgcgtgtgtgtatatgctgaggtgttgtgtctgtgtgcatgtgtgtgcacacgtgtgtcagtgtgttggggtgtgtctatatgtgcatgtgttggggtgtctgtgtatctgcatatgtgtgcacacatgtgtctgcatgtgcctgtgtggtgtcgttgtgtctctccgtgcatgtgtgtgcacatgtgtgtcagcgtgtgtgcatgttggggtgtcacgtatgtgtcctgagtgtgtttctgtgggcctgagggtccctggtgggcaaccttgtctacccagcaccaaggatctgtgtccccagcaacactgccgctcccctcagcccatcccccagggtccctgagccttcaggtaaactcaccttagccaatgacagcaggcttgtaggggccacgcgggctgcgcttggacctgtcccagagcgtgagggtgctgtgatcctctgagggcccggcaggcctggtggggcagggtcccgagaaggaagatggtgccttcagatcatggggtgttccttgaagcttcctgtccacctcacccccgcaccccacccctgctcaccctcctcctggggct

SEQ ID NO: 19736 - DNA, 1257 bp, Artificial sequence
  DNA replication origin
tgggcgagccccagggggtcctattggccctgggctctgctattgctgagcagttgactctgtccctaagaataggaggagatgggtgcctggggaccaagcacagctggtcaccccagagtgcaaggccagtgggtcccatttcctgcccagtgagtctggctgtcccggtggcctcttcctgcctcagaagccctggactgaaagcagcacgtgatcagctggacgtgggggagggaccttccctggagcagaagcctctcgaaggccctgtgttcagctgagagtgggttccagaaagtcatggaatcttccagaaaagatgccacctacatccccgggatggctttggtgaacgtgaacgtggtgggctcctgcgtcaacagcatgggccttggccaatctgagctccaaggcatgcccagaagacctcccccaggtgcccacagctatccttgaagttgcagagacagaccccagaatgagccgtgacgccgtgctcaaagtgaccaaaatccacccagagcacatgcgacgtgcatgtgtgcctgcgtgcgtgcatgtgtgtgcctgtgtgaggatgtgtgtgtgcctgtgtgcctgcatgtggggtgtgggggtgtgtgtgcctgcatgtggatacgtgtgtgcctgtctgcctgtgtgtggatgcatgtctgtgtgtgcctgcgtgtggatgcatgtgtgcctgtgtgcatgcatgtggatgcatgtgtatgcctgtgtggatgcatgtagatgtgtgtgtgcctgcatgtggatacttgtgtgggtgtgtatgcccatgtgagtgtatgcctgcatgtgtgtgtgtctgtggatgtgtgtagatgtgcatgttcctgtgtgcctgtgggtggatgtgtgtgtgcatgtgtgtgcctgcatgtggatgtgtgtgttcatgtgtgcgtgtgtgcctgcgtgtggacgcatgtgtgcgtgtgtgcgcctgtgtgtggatgcatgtgtgcatgtgcggatgtctgtctgtggatttgtgtgcatctgtgtgtggactcgtgtgtgtgtgcatgtgtgcctgcatgagggggcctttcccccaccccaccacaggctggcactcccaaaacagctggagtgctgccctcatctcccactaccctcacccccagcacacaggatctgggcccactgtctcccccccagcacacgggatctggacccactgtctcccctgcccagcacacgggatctgggcccactgtctccccc

SEQ ID NO: 19737 - DNA, 1030 bp, Artificial sequence
  DNA replication origin
tgggaggggccgggcaggactggggcaagggtgggaggggccgggcaggactggggcaagggttggcggtgacacgaagggttgggacgagtgggaggggccaagcaggggctgggcaagggtgggaggggccaggccggactggggcaagggtgggaggggccaggccggactggggcaagggtgggaggggccaggccggactggggcaagggtgggaggggccgggcaggactggggcaagggtgggaggggccgggcaggactggggcaagggtgggaggggccgggcaggactggggcaagggtgggaggggccgggcaggactggggcaagggtgggaggggccgggcagggctggggcaagggtgggaggggccgggcaggactggggcaagggtgggaggggccgggcaggactggggcaagggtgggaggggccgggccggactggggcaagggtgggaggggccaggcagggctggggcaagggtgggaggggccgggccggactggggcaagggttggcggtgacacgaagggttgggacgagtgggaggggccaagcaggggctgggcaagggtgggaggggccgggcagggctgaggcaagggtgggcggggccagccagggttggggtgaggtgggcgggtcaggcagggctggtgtgagatgggtggggccaggcagagctgggctccctcaggcctgggaggggccgaggtcccagtggttagggcagcctcatctgggaaagggaccctccttctccttcttaggcggtcttctcttttcctcctttgtggttagaattaatactgttaacgttcttctcgggctgtaattaaccgtcttgttagccctggctgtcggggctgattttcccttattctctcagtgtccggtgtttcagcctggagccatcacttacttagtattttaattaggaattttgacaggagatttgtttcctgcctctgccctctgccttctcccggagataagggattgtgcctctggagaccccc

SEQ ID NO: 19738 - DNA, 1297 bp, Artificial sequence
  DNA replication origin
agggtccatggtgggggctgggatggcaggacctcggcggggaagagtgggagtggggtgcctctgagcacgggagggccttctcagggcagcagccatggcccaggagcctcctcagtcaggctggggaggggaccggggtgggggatggggtcggggctggggtgggggttggagtaggggttggggtggaggctagggtggggcctggagtggatgttggggtgggggttggggtggatgttgtggtgggggctggggttggggtggggattggggtgggggttggggtgggggttggggtgagggctggggtgaggttggggtgaggactggggtgggggctggggtgagggttgcggggctggggtgggggctggggtgagggttgggggctggggtgggggttgaagtaggggctggggtgggggttgaggttgggtgggggttggggtgggggctggggtgggggctgggatgcctccagtctgccagggcttcgaagtggccatcatgaggatcgggcattggggagccggtgcccacccacccactcatgagctccccagcagaggaggcaggccccaaggctgccagtggggagatccctggctcccgggtgagatccacctgccagggggctccaccgactccccgagcaccccccaccccagcagccctacttcctcccattacctgggaaaggccagcccgtcgccacagacctgcatgggcatactggctccgtgtcaaagtcagacatgaatatttcacgagcggcatcataaataatgcaattatttagaaagacactgaatattttatagaccgaagtgcagcccagtttaaagaggggatccacatcatgaggggctggttttctcgtccacgtgctgaaggccagagtggcacgggggggcacacctggtaccggctccagagtggcatgggggggcacacctggtaccggctccggctgcagcccccacccccgctgaccccacgtgtcctcatcagggtccctttgggccccacacctgccttcccagagcatccctctgctttaggggagtaaatggaagctgggttcctggagaacagacagaaccttccagggcccagggccttccacctccttcctccacctcctgggctccgttctccatttctcctcccaaatggaagtttcttttcggatttttacatcttccgtaatgaatagcttttctagtactttattttattaaaacttataatttattttgaaaaccaaaagcccgagacaaaggcgtgagtc

SEQ ID NO: 19739 - DNA, 1822 bp, Artificial sequence
  DNA replication origin
tcccctgtccttcccaggccccgccccccccaatccctggtggactggcccctaggtgggctgtgggcactgggagatgttccttgcggggctcagtcctggggcctcctgcacggtgctgggtggatctgcctagccgggactgccagggctgaggtgctggaaacactcaggttcctaggtagggctcagcccccaggggcaggaggtgaggggtcatccttcagccttaatggccaggcctgactggggcctggcaggtgcagcaggacgggctacttggatccctcagacctccagtccctccctcccagctccatggcctcccagaggtccccagccaggacacaggcctttccagagctgcctggggagatcagggtcagggtgcccctccctggtggatcctgccgcacatggagagggtggtctgcctgagtggcgccggcacctcgtgcagtgtgaggtcccaggcgcagcgtgggcgtctaggcacagtgcgggctcccaggtgcagcgtgggtgacaaggcacagtgtaagctgccgggtacagcgtgggcacccagtgcctgggggagctgcatgctgggtggcagctgtgtccttctgtatgggaccagcagagggtgtcacgcccctctagggcagcgctgaccacccagagactgcagggtcgggtccctgggcagcagagggccctagggctaggcagggccatgctgggtgcctctggtgctggagccctgtggcacctttggctggaccctgacatgggctccccaccccaccctcaggcccaggcggctccagtggccactcaagggccacgccccaggtacagtgcatggctttacctggagggtatgcggggccacccccaacacacatatcgctgtcccctttccccaacacacggacggctgtccccttgggctcagctcctgcaggcggctgcagcgtgctccctgccagactgtggcagccagcgcaggggtcccggcaccccagcatgccccacccagcaccctgctcttccacagggagatgctcccctcttgccttccgtgccaccttcccctctggccctgaacatcctgatttcttcctccacagccaaagtgtcagccaggggctgcctgcaggtcctcacccactaactcactcattcagcaaccgcaggtgaggcaagcctctgtgctgacccgccgggcgccgcccctctgttgcgcatggtctcctgggagaaggttcctggaggcaggagctgctcccctgcccaggatggggccagcagggaggcaaggggtggccacgaggtggtcacccattcccctggaatgctgtgttttggggggcccttgtcaagtgaaggtaatggctcagctgttttgggacaagcccatctgagcctggagcatggtttggaacagccagagcctggaaggtgctgggggaagctgcctttgcatctgagccctgtccaggtcccagccagctcccagccctgcgtgctccaggccaggtgggctcaaaatgtaccctgagctctgagagggcaagagaggggctgacatagacctggcatagagtggggcgcagtgcttggcgggcccacccctcgccctgcctgtttccaggattcagttcccctatctgcgaactgtagaaccaaagcggacatccccaggaattctaagacgctcagactccaaggaccctcccccattcagccaggggccgccccttcatttcctcgggccaggccttgtaaagggtgggcccctctgaggacctccagaaagctgatcctcctgactggg

SEQ ID NO: 19740 - DNA, 1103 bp, Artificial sequence
  DNA replication origin
gcggcacctgccacgggccgtcccgccctggtcttcgctgtgtcttctccacctgggaaagctccagcttcaaccctggggctcaaagccagaaggctcctgcccctacaccctcctatgagcctcctccgggccctatttagcaaatggttatgcaggtacattcatgcataaagactcggttctctaagtccctgctctagaaagaagtcatcgtgtccccctctcgcagccgccgcgtctgtttgtaagccctgcaggggccactccggaacgaccccccgggccccgccccgcggccacgcggggacgcgatgctaggaggtgtcggcagggggcgccgctacaccgtccagcccctttccggttcctgcggggccggcggggggtggagccagcgcccgccctgccccgcgaccccgcccctgggaagtccccgcgcacgggactcgcggggccttccggagccgccttggacaggtgcccggggctctgctgtttgcagaagcgtcaccacctgcaattttctgcacattctgcagaacagtgttggggggtgggtaatgtgatcctggggtacagaaggggaaaccgaggcacaagagatttatcctaacctggccttaaatctggctgctgggaagtggccacgcagggcctagtggttcactcttcccctgtccttcccaggccccgccccccccaatccctggtggactggcccctaggtgggctgtgggcactgggagatgttccttgcggggctcagtcctggggcctcctgcacggtgctgggtggatctgcctagccgggactgccagggctgaggtgctggaaacactcaggttcctaggtagggctcagcccccaggggcaggaggtgaggggtcatccttcagccttaatggccaggcctgactggggcctggcaggtgcagcaggacgggctacttggatccctcagacctccagtccctccctcccagctccatggcctcccagaggtccccagccaggacacaggcctttccagagctgcctggggagatcagggtcagggtgcccctccctggtggatcctgccgcacatggagagggtggt

SEQ ID NO: 19741 - DNA, 1720 bp, Artificial sequence
  DNA replication origin
gacttttccacgtggggtcaccatggctgaggactcaggctactcagaggagcttggcgcatgggcctgaccccagcgtggatggatgcccatctgggtctctgtgctgctggaactggagtggagttggaagagaggcgcttcagagctgctggagacaagcacaccccaggcccatgggaaacctggtcaaggctggccacagctcaagcttgccatcccagatctttgggaggccgaggcaggaggatcacttgaggccaggagttcaagaccagcttggtcaactgagagaaacctcatctctacaaaaataagtttagaaattagctgggcatggtggcgcatgcctgtagtcccagctactagggagaccgaggtgggaggatctctggagcctggaaggttgaggctgcccagcctgggcaacagagtgagaccctatgtcaaaaagaaaagaaaagaaaacccgttgggggctgctgcctggaaaaaccacacccaggcagaattcagtactgccacgccccttctgaagtttggtttgaaaatatggccattgcacctcagataatcatgtttacacttcttgacagtggaaattctttacccggaatcatgctggggtctcgaggcccacagcgggacgcccagggctgctctggttctgaggtggctggggtggtggctctgaccccttggccctacccttctggactcacgctggtcaccgggtcctgcagcctgtgccctctcccctgagaggactgggatgaccttagaattcgtccaagagtgactgcagccctggagtctcggacgttcgttttgaggtgtgtgcagctgggctccagtctagggcctatctctgagctgagaataaccgcacgcggtcccgtggttcacgagggatcggtgcaggctgcggggagatagacgtttgtgtgccgtgggggaaggggggccctgggctccctgcgcacctctccctggagactcagaactagagacctcgccactagacccacagacgctgcccattgctcctgggatggctccgcagacgtagcctcctgatgcggcctcaccctggcagcctgcgaagaagccacatctttaccttacggagacggcttctttccttaaacctcatgaaccaacctctgtggacttcagacttttcttctgcagcttcctcaccctctccacctttgtggagttggagagagttagggccttgctctggtcgaggctctggcttaagggagggtcatggctggtttgatcttctgtccggaccactcgaactttctccacatcagcaaggaggcagtttcacttgttggcaactgtgtgtccactggagtagcattttaacttccttcaaggacatttcctgggtattcataacttggctcactggtgcaagaggcctagctatcgaccttggccttcacctgcctgcctcactcagcttagccatgtccagcttgtgatttaaagcgagagaccagcaactcttccctccacttacacttagaggccatcgtggggctctgctgtgacgtgtcatgaaaggggcacacctgtgggggacaacacagcctctgcacagtctcttctgagtccaaactcgggaccacgccctggtgcctcggagaggggccagggagccggggcttggccacccacctctgtgcctggggtcctgacctgtccc

SEQ ID NO: 19742 - DNA, 1850 bp, Artificial sequence
  DNA replication origin
ctgtggccagccttgaccaggtttcccatgggcctggggtgtgcttgtctccagcagctctgaagcgcctctcttccaactccactccagttccagcagcacagagacccagatgggcatccatccacgctggggtcaggcccatgcgccaagctcctctgagtagcctgagtcctcagccatggtgaccccacgtggaaaagtcttgaaactgacgtctcaaagaggatgatgtgtgagcgaccgtgacagcagcacaaatcccaggtggacaggacactccggctgccccgagtggccgaggacgggtcggcatctcctggcatttttgtccgttttggtggcaggtgagcccagcacgtagggagggatgggcagcccacagccgggactggacgactcagaagttccggctaaggtaggataacttgggcaggcttcccgagtccctcccagctgcggtcccctggcccccacttgctcagtggccaggtgtgggaggagccagcggccctgtgccaagggagcacgagttggggcgtgtggggatgggaggccgggtcgaaggccgcctttcagtgcagggaaggacctgataccacagtccagcagcagagggaaagccaggccaggggtttgaggccagagatctcagaaccttgggagccagctgctagtctgcatttcagggtgccaggagtccctggagacggggatggagccctgtgggtggagacagcaggacttcaggtcaccaatgaggccagggtgctggtgctcagggtcccagctgtgggggtctcagttctcccagccctgctcccaggctgaccctccaggccagcccctctctgtaggtctgaggagggtccttatggagcacaggtggggctggggaaatggcacatgtctccgcaaagctcctgtgcctcctttgctccggagagcctgctccttcacagagggcgtctgatacagcctgagaggggcactgtgggggtgacagtcatggggggcggtccacagggggtgcatcctaccagcagccacagtctgaggggtatagtccatgatgggcacagtcctggggggacacagtcctgggtgtgcattctggtgcctgctctgctgcacaccctgcactgaagctgattgctcccgctgagaccccatgtcaggcacatcatcatgttgcataggaagtcctgtgaccagggcccaaggaccacagaggctgagccaggcggccaccttggccacggcctccccaagacacgacatgctttgaggtgtgagttggtgctggccctgccatgtggctgccaccacaccgcttccagaccatgaggcccctcacacacgtgtggccagagtgtccgcacggcccagggacaggagcgtgtgccctccaggaggctgttctgaggctgcgtggcagggcatggtgtcccctccacaggggcaccctgcctgggctgcgaggatgcagggtgttgtgggtggagcctggatggagcaaggaccatgctctgtcctccgtgcagggagcttgggtcctgggagaggagcaaggttcaggccatgctgtcactgggagatgacaacttcattccccagcaaccgcaatgcttggcagatgatggcaatgctgggagccaatgggacatgcatggacaaaccatgcagaaagccacgtgtgctcaggtgagagccaggaggccatcgtttcctgagcgcgaccctgcgtgaaggaagctgccttggggtctgggctgtccagcccatctccctgtgggctctccagcacttccagacctttgcactcactccagcggggcagcaggtgggca

SEQ ID NO: 19743 - DNA, 2052 bp, Artificial sequence
  DNA replication origin
ctgccctggtgctcagctcagggtgcagactcctggagggatgacgatgacaaggatgacgatgatgccggtgcacacaggacgcagggaccgcggcggccatcacagcactgcaccttggaggtgggaaacctggcagggcctgcacattccacgacgggggcagtgaagcccagtgactggggaaatcacagtgggaaccgcctggaggacgcgccacaagctgatggcaaggcagacgcttggcctgtgaaccccatgtcctctgtaactgtgctagtggttttgtggtcagaggtctttttggagaagcatttggtgctgttggctccagggtggtttccagggggaatgggaatgcgtgcggagaggcaggctcccatggggcgtggggctcagggcacagggctgtggtacagggcgcggggcgtcgggcacctgctcacgtgggcggggtgccctctgctggtggaggtgggcacggcagcgggctgggcgctgcgggctgggcggagggggctgcgctgtggcccacaggagttggggagcatggggggcagtgttctggccacactgttcagggccgtctccagcttccgtctccagtcccaggagccacttccacctgccggctctgggggactcgctcttttgggggcccttgatatctgaggatgggagtcctaggaaaagtgccaccgtggccaccttggtctctttcctgagagacagacttggcattgatgatgctccctggggaacgccattgcccagagcagccaatcaagccactcgggtggacagcgttgctcaggcgctcctggcgtcaaggaggttttcaggcccctgatcatgctgggtcccgggaacaccccctgggctgaggctctggaatctgggtgggatggtctctcctagaccccctcagcgggtgcctgtcatccacacaaggctcagcctcataggctccacgccagcagggaccatcaccgcctccatcagggtccacatttcccccacgtcgcggggcctctgctggcacccagccttctatgctcctgccacgagcacggcctccttggaggatgggagccacagacagggccagatgacgaggagagaaggtgccccaagacctccgtgtgcccacgcccctcccttcggggacggccgggtgcgttcctccatgccagccagtcagtgcagagcctgcagcccacagccgcaaggaggtaaaggctgaggttggctgggccctgtgggatccgcctcacatccactctcgggtgcaggcgggaaggaggggtccggatggtgccacctggtgatctggcacaggcaggtccctcattggggtgatggcttcccggggccctccaggcccctcctggcggtgggtattggtacctcctgtgcttggtggctgcccgcgaagctgtccctcccctgccctccctccccaggcacctgctacccacctgcttaccgcgggggtgagtactttctgaggacatgaaaaggagccagaggctggcaagaggcaggtgttggggtccaaacccacggtgctccgggctctgaggaggctgcatccggctgctgaggtgggttgggggctggggtggtcctgacttaggcggcagcagggaagcacatcccaaaagggaggctggctgggaatgtggggctggctggggaattcaggcggcacctggggcaagccaccctgcctcagtttccccttcaatcaatcatcttgcctttacacccacccaatgtcagcctctaacatccggtgtgggcagagagttggcacacctgcctgtactgagatcctgcagagatcactgtccacactctgaggccagggcttggcagagatgctgaccccctccaggcacctccaaggggctgcagagactgacagcccagccaggccacaggtgaagagggcttgagctagaccaggccgtccgcaggggcagaggatgagggccctgacccagcaacactgcacagaggctctgggctcctgcaggggccacgatcacc

SEQ ID NO: 19744 - DNA, 1142 bp, Artificial sequence
  DNA replication origin
agaagctggaaaaggcaagaaaacgaattctctccgagtccccaaagaacacacagctctgcccacaccctggtttcagcctagtgagatctgagttggactttgacctccacactgtgggctcacaggtggacttttcaagctgttcagtttgtggccatcagttagagcagccacaggagactcctccaccacctttccgaagcctgcagcccggcagagaaaggagcacgtggcctgtgcaccgccagactgcacgcaacacagctcccaccatcaccaggcacctgcggcgggtctgagttgttctgtagacagaagtgtgtgggggtcccaaggctgagtgtggcagagccacctgctgaggtcctggtctacgggggtctccacccagcctcctgacccccatcagagctggcagacagcctgggaggcctcagaggctgcggggccaggcctcacctgacgggagggttgccagggcctgaggcaggagcacggccggtctgcggtggtgcggggagccatgccgggggccgagatcaatgggagacccctgtgtcctcgctcactgcggcacaccctccagtcacaccctgccctgtgtcctctcccactgcggcacaccctccagtcacaccttgcccagtttaaaagttcacagcccaggctcttccaggaacagggagggccagactcccagactgtgtgcaaagcggctgccctgccctggtgctcagctcagggtgcagactcctggagggatgacgatgacaaggatgacgatgatgccggtgcacacaggacgcagggaccgcggcggccatcacagcactgcaccttggaggtgggaaacctggcagggcctgcacattccacgacgggggcagtgaagcccagtgactggggaaatcacagtgggaaccgcctggaggacgcgccacaagctgatggcaaggcagacgcttggcctgtgaaccccatgtcctctgtaactgtgctagtggttttgtggtcagaggtctttttggagaagcatttggtgctgttggctccagggtggtttccagggggaatgggaatgcgtgcggagaggcaggctcccatggggcgtggggctcagggcacagggctgtggtaca

SEQ ID NO: 19745 - DNA, 896 bp, Artificial sequence
  DNA replication origin
aagaaaactcagtgggcccacttgatgcttgttttccctgaaaataataatataataataataataatggctcctgacttatttaataataaaattgtagaacatttataaaatagaagaaaaccacaacctcaccccaaaacccggagcgggaaggcctgatggcaagcgtctgctcggcccttccagcctgtccctggcacgctgaccctgcttgggactctccttgcccgatcgagcctgccccggggcaccagaggacaataaacccgtgaaagctaggctcggtgaccagggctgccccagcgagggtgaaacagggctcagccaggagggctggggcagcggcaggtgtccagccacggggtggggctggttccctggggcctgtcccaggaggggcattagggtaaaagatctgactgtaaggcctcaggcaagcacaggtgggaaacctctgcaggtcccagaggccaggccaggggggcagtttggggcaggcagggggctggaggggaagagcaggggcttggtaatggccttgactttcaccagcctggagaccagccgcagagtggggcgagctttgctttctgggttctgactttgagcggcgggctctgtgctctggtgggctgccaagtcccagtgagtctgtctccaggggaaactgcctatttgtttaggaaaatatgttaatggccttttgggtagtgggaggaaaatctcagggcaccgtctgaaatcaacagagtcaaagtggctcacagcacaggaggggtgtcccacggggcgcagggctgcctcaaaggcggaactgttaggggccctcagattggacccaaggggcaggggagaggggatttgatacaggataaattgtacgtagttttaat

SEQ ID NO: 19746 - DNA, 938 bp, Artificial sequence
  DNA replication origin
ggggagtgggtggggcactgccctcagtggtcttggcccaggctgcctctggctagcgagggagtgcgctcctgggtggcctggctgcacggccgtcctgcatggcccagcttttgtctgtgtccctgtgcagcctcataggccccgcagccccctgggatcccatatctgcacaggtggcctctgctgggagggaagtgggtggctctgattcctctctggctcctgttctctcctggggcccctggaggtgggcgggcggcctcgaagcctgcctatgtggaagaagctcggacggcaccagcaggatggtcgcaggactcaggggcccgggctgcacctgttgtctggcctgcctgtgctcgggtttctccctccctcctggagcccccaaccaatgggggaagcaggcaaacagtgggggccccgcctggcccagggaaggctttatggaagaggcgaggcctgagaccccaggaaggaggagcagcctctgggtcaggggagggcaggggccagagctggcaggaggcgcagctgtgagctggggtctgggggccctgactggagtctgcggagggccctgggatgagtgatcagatgctgtgttatcaggaggaagtttttggggaggctggcggtggggacccacttgtcagagacgcgtgtggaagtgggtgagactcaggagaccctggagcagggatgagggaaggagggacgagctggagaaaggaacaacgtgggcatccaggagggcctcactccctgtctcctggggtccccacgcccacatccctggcaccaccagctcctccccaggctgtcggggaccctgcaccatgagtcctgcaactgctcctgtgaccgctgcagagtgggtaacaggagggagttgatagaagccctcaacccaagtgcccccagctgatgagcac

SEQ ID NO: 19747 - DNA, 1539 bp, Artificial sequence
  DNA replication origin
atcctcctgtttcctttgaaaatctttgtcttcctttaccttccttgacccacacccaatttacgatggcacacatattctattgcaatgaatgttcccgagtaaatctcattttcttttagagagcctctctctgttatttagggtgacagtgggaaaatcccagactgcaaatccttcctcaacaaagggcaaacgtttcctccagggagcgtagttggtggttagagaaggggaaggctgcagtggcctcttggagtggtggagtgcacatgcgcagagccaggaggcctagtgctcaacgtgggtgtgcctgagacctgggagatgccaggggcatggaaataaggtgttgtctagtttttcccccaatttagttttctctaatttgggcgcaggttcactgtaagcaagtaaatcagtcctgggggccagctgggtgagtgctggggggcagggagaggggagggagtgggtacacaaagtgattctaccctcagagagaagcagagtaaggcaggaagaagaggtgtgcacatgcgtggtcatgtgtgcacgtgtgcatgttcgtgcatgcgcatgtgcagatgtgtgtgcgtgcaagtgcatgcgtgtgcatgtgtttctgtgtgggtgtgcacgtgtggcggtggctaacgaaggcatgggagcagcatgggctgtaggtttccatgaggtcccacggaagtgaaaccaaaggagaggaggtggtggggagggcaaggtgcctggattcggccttggtgtggtcattggtgatgagaacatccaggctatgcccagggccgtggatgcagaagtgggaggtccaggccgcacccccttgggttctggaggttctggtaatgagcacggaatataggaggcaggagaactgtgaggggctgaacctgtggtgggtgaggggtgcatgggaaagaggaggtggctgcctggaggaagggcagaggccaacgtccaggcatggcaggagctggctggcgaggagaggaggaggggggagcagggagggcacaaggggtgggggacgctgcctcagccgggtgtgagggcacagcctgcggggagaagtgaggaggcaatgtcccttctcagaaagcacgttccagggatcagtgacacccccacatttggtttctactaagggtacccttagcatgtgctgattttgttaaaaagaaaaataagcgactacatcagtcagcttcagctgctgtagcgaaatatcacaggctgggaggctgaaacaagacttttacttctcacagttctgggggctggaaatccaagatcaagttccagcagcgttggatttctggtgcagggtttgtggctggctggggtgaagcttcccactgtgcactcacactgccacttcttttgcacatgtaagggtggggacagcactgagccctttctattaaacactagccctattgcacgacttaacattaaacaccagccctactgcacgacttaacattaattacccccgctagcccacctccgaatacagtc

SEQ ID NO: 19748 - DNA, 1532 bp, Artificial sequence
  DNA replication origin
tcacctagggagggagggagggagggagggagcgtccgtggctccacggcctccatctgggccacttggagcctcactctgctttatttgggttggcagcaggagtaccaacagcagggtggcaccgtggctgaaacgccaaactaggtcagaccggcctgcctctggggagctcccagtgcgccctgggcctcagctccctggtctctccagagatgggggcaccctgggatcctgggtgggaatgaggcttgggtgggaggggccctagaaggtaaaggccataggcagtcagcatcccctttctggccctgaagagcttctcagcatctttttcttcaataaacaagaaatataaagtcctacagtgctttacagacttcccttatttacgaactaaagagatactaagtggcagggttaaatgggggcaccctaccctctggccctgcagggacagacagacagtgaggccggcacccaggcatccaggagctggggctgacagccagagtggagggcctaggctcagaggacaggggccaggggtgggagtcaagggttagggtttgggaattctgcaggctcaaggcccaggctttaagaccaggattcaggattcaggattcaggggcaggagcttgttggaggaaggggccaaggatgggatctaggaaccagagttaggggcagggtccagaattgggtttggggcctgattctggaaccagggttccaggttcaggggtcaaggacaagtgttcagggccataagctggggcctgaggttgaaattcagggttcagagtcaggctagattggctttagaggcaaagggccacagtatgaaggctgggattctagggctagaattcagtgattggggaacagggacaggaggttggggccacagccctgtgtcagaagttcctgggttagggtttgtggttatgtttcagggtttggggtccagggctcagggaccagagacagacgtttgagagcaggttctgtaaccagagttctgcagtcaggatttgtggttccagtgaccatggacctggggttcagggccagggttggggatgggcattccagggccagggttctgaggattcggaaatcagggctggggctgggtttggtgcgcacagacccggtttctggggtttgggttccaggaactgttaacaggggttctgacagggttttaatattggagtttcgaggtcaggatttgcagacaggagttcagaggcagggtcccagggtcaacggtcagctgctggagtctggaggatggggttcggggattcagggcccaggtcttcaggtctcgggcttggggatcaagacaggggtctgggctcccagacttgggaatcaggacaggagtctggggtcccgggtacagggatcagagtctggggcctctgggtctggaggttcacggtccagggtccaaggcttgcagttcgggaccccggggtcagggtcgggggttccgggcttggggcctgccgccggcacgg

SEQ ID NO: 19749 - DNA, 2421 bp, Artificial sequence
  DNA replication origin
tccctcgctgctgcagtgggcagtgtgtgcgtcgtacacaggtggaaggtggaggcctgggcccaggctggagggacgtggggtgggaatgggcctgaccagctagggaacagaggcaggacccagggggacagaggcaggactgaccaagactgtcagaagagccagccggggtcttctctgaatagtcggctgcacgattaaactgggttctgctcggggagtccctggggtttggagctctgcctgccttgcggcccaacctggcagtaccccccacacaggggtccaggtgtcctctgattctgctgtgctgagtctgttggtggagcaggaggcccaaggaccaggagagcttctgtgtgaggctgtgtcctcctgcatccttgtctcccattcactcgggagcatttatgggcgcattctcagagccttggtgaagttggagtgggatagggagggaggattggtggcgccttctcagagccttggtggcatattgagtgggatagggagggaggattggtgaatgccttctcagagccttggtggcatattgagtgggatagggagggaggattggtgaatgccttctcagagccttggtggcatattgagtgggatagggagggaggattggtgaacgccttctcagagccttggtggcatattgagtgggatagggagggaggactggtgaacacctcctcagagccttggtggcatattgagtgggatagggagggaggattggtgaacgccttctcagagccttggtggcatattgagtaggatagggagggaggattggtgaatgccttctcagagccttggtggcatattgagtgggatagggagggaggattggtgaacgccttctcagagccttggtggaatattgagtaggatagggagggaggattggtgaatgccttctcagagccttggtggcatattgagtgggataggaagggaggattggtgaacaccttctcagagccttggtggaatattgagtaggatagggagggaggattggtgaacgccttctcagagccttggtggcatattgggtaggatagggagggaggattggtgaacgccttctcagagccttgggggaatattgggtaggatagggagggaggactggtgaacgccttctcagagccttggtggcatattgagtaggacagggagggaggactggtgaacgccttctcagagccttggtggcatattgggtaggatagggagggaggattggtgaacgccttctcagagccttggtggaatattgggtaggatagggagggaggattggtgaacgccttctcagagccttggtgtggaatattgggtaggatagggagggaggattggtgaacgccttctcagagccttggtggaatattgagtaggacagggagggaggactggtgaacgccttctcagagccttggtggaatattgggtaggatagggagggaggattggtgaacgccttctcagagccttggtggcatattgggtaggatagggagggaggattggtgaacgccttctcagagccttggtggaatattgggtaggatagggagggaggattggtgaacgccttctcagagccttggtggaatattgggtaggatagggagggaggattggtgaacgccttctcagagccttggtggcatattgagtgggatagggagggaggactggtgaacgccttctcagagccttggtggaatattgagtaggatagggagggaggactggtgaacgccttctcagagccttggtggaatattgagtaggatagggagggaggactggtgaacaccttctcagagccttggtgtggaatattgagtgggatagggagggaggattggtgaacgccttctcagagccttgatgtggaatattgagtgggatagggagggaggattggtgaatgccttctcagagccttggtgtggaatattgagtaggatagggagggaggattggtgaatgccttctcagagccttggtgtggaatattgagtgggatagggagggaggattggtgaacgccttctcagagccttggtgtggaatattgagtaggatagggagggaggattggtgaacgccttctcagagccttggtggaatattgggtaggatagggagggaggattggtgaatgccttctcagagccttggtggcatattgggtaggatagggagggaggattggtgaacgccttctcagagccttggtggaatattgggtaggatagggagggaggattggtgaacaccttctcagagccttggtggaatattgagtgggatagggagagaggattggtgaacgccttctcagagccttggtggcatattgagtaggacagggagggaggactggtg

SEQ ID NO: 19750 - DNA, 1296 bp, Artificial sequence
  DNA replication origin
ggatagggagggaggattggtgaacgccttctcagagccttggtggaatattgggtaggatagggagggaggattggtgaacaccttctcagagccttggtggaatattgagtgggatagggagagaggattggtgaacgccttctcagagccttggtggcatattgagtaggacagggagggaggactggtgaacaccttctcagagccttggtggaatattgagtgggatagggagggaggattcgagggcgcctcctcagagccttggttaaatatttattcagataggaagtatttggaatatctgttgtcactttcagggcctcactagcctgttgtgctcacagggcaaaggggtagtgtactgtgctgcctggctccacggctgtggtcaccggcttccctggcttctgagctccagcaggagatgagggatttgtccagtggctggagggtggcttagggcacgcagagtccacagtgcaggtggacaccgcagagggtctcctgggcaagtggcggggctgggttctgagggcttcagaggatcagagccaactggagaataaggaaggggcagctgttcaggctactgagaggcgggaaataggtgctgagcctgcctgggaagctgcgtggttggtgcggttgatgtgggtggcatgggtgttgtgggttgtggttggcgtggttggtgtgggtggcatgggtagcatggtccatgtgggtggcatgattagcactgatgtgggtagcgtggttggtccatgtgggtagtataggtggcgtggtattgtgtgtggcatgattgctgtggttggtgtgatcaatgtgggtggcgtggtattgtgtgtggcatgattggtgtgggtggcgtcgttggcactgatgtgggtagcgtggttggtccctgtgggtagtatgggtggcgtggtattgtgtgtggcatgatcggtgtgggtggtgtgatcaatgtgggtggtgtggttggcattgatgtgggtagcatgggtggtatgggtggcatggtgtgggtggcatggttggtgtgggtggcatgggtagcatggtccatgtgggtggcatgattggcactgatgtgggtagcgtggttggtccctgtgggtagtatgggtggcatggtattgtgtgtggcatgattggtatgggtggcgtggttggcattgatgtgggtagcatgggcagtgtgggtggcatggctgctgtgggtgacataggtggtgtggctggcgtggttagtgggtggcatagatggcatggtggggtgggggg

SEQ ID NO: 19751 - DNA, 1989 bp, Artificial sequence
  DNA replication origin
gagggggatgctgagcacgcccgcccggggctgctttccctgggagggatgctgaggctgcccagggctgctttccctgtgaagcagcgtgacccagggctcttggtggggatgtgccgtttgctctttttcatgtgtctagcccttgggaagtgtttttggtactgctggttctcatgctctagtcctggtaatgggctagtgtgcttgttctggctttactcggtagcgtttataacaggacaggattcagaggacactgttgctgagggaaagtttgtgccacttaacctggtgttgcttctggccctgcctctgctgggcgtctgtctgcagcgtgccttggagtgtttcccttgctctgctgattgctgaaatgcaagacctgggcctctggaatcccattgaaagaacttgtttaaagaaacatcagctcggtttatttcatacacagctactttttgtagatactgaggttttgttgagatgttggggtgtacgtgccgtgtgaggttttgttgagatgttggggtgtgcgtgccgtgtgaggttttgttgcgatgttggggtgtacgtgccgtgtgaggttttgttgagatgttggggtgtgtgtgctgtgtgaggttttgttgatgttgaggtgtgtgtgccgtgtgaggttttgttgagatgttggggtgtgtgtgccgtgtgaggttttgttgcgatgttggggtgtacgtgccgtgtgaggttttattgagatgttggggtgtgtgtgctgtgtgaggttttgttgatgttgaggtgtgtgtgctgtgtgaggttttgttgatgttggggtgtgtgtgctgtgtgaggttttgttgagatgttggggtgtgtgtgctgtgtgaggttttgttgatgttgaggtgtgtgtgccgtgtgaggttttgttgagatgttggggtgtgcgtgccgtgtgaggttttgttgagatgttggggtgtacgtgccgtgtgaggttttgttgagatgttggggtgtacgtgccgtgtgaggttttgttgagatgttggggtgtgtgtgctgtgtgaggttttgttgatgttgggttgtgtgtgctgtgggaggttttgttgagatgttggggtgtgtgtgccgtgtgaggttttgttgagatgttggggtgtgcgtgccgtgtgaggttttgttgagatgttggggtgtgcgtgccgtgtgaggttttgttgagatgttggggtgtacgtgccgtgtgaggttttgttgagatgttggggtgtgcgtgccgtgtgaggttttgttgagatgttggggtgtgtgtgccgtgtgaggttttgttgatgttgaggtgtgtgtgccgtgtgaggttttgttgagatgttggggtgtgtgtgctgtgtgaggttttgttgagatgttggggtgtgtgtgccgtgtgaggttttgttgatgttgaggtgtgtgtgctgtgtgaggttttgttgatgttgaggtgtgtgtgccgtgtgaggttttgttgagatgttggggtgtacgtgccgtgggaggttttgttgagatgttggggtgtacgtgccgtgggaggttttgttgagatgttggggtgtgcgtgccgtgggaggttttgttgagatgttggggtgtgcgtgccgtgggaggttttgttgagatgttggggtgtgcgtgccgtgggaggttttgttgagatgttggggtgtgcgtgccgtgggaggttttgttgagatgttggggtgtgcgtgccgtgggaggttttgttgagatgttggggtgtgcgtgccgtgggaggttttgttgagatgttggggtgtgcgtgccgtgggaggttttgttgagattttgggttgtacgtgccgtgggaggttttgttgagatgttgggatgtgcgtgccgtgtgaggttttgttgagatgttggggtgtgtgtcctgtgtgaggttttgttgagatgttggggtgtgtgtgccgtgtgaggttttgttgcgat

SEQ ID NO: 19752 - DNA, 862 bp, Artificial sequence
  DNA replication origin
ttatcaaagaccctggttctctccactgggtgcatgtggagcacctcggccggcattcagtgcccactctgcatgccgcccccgtgccagtccccggcaggtgaaggtgagcaagaccttgcactggagcagctctgtcaggagagtgtgcgggggctggaggggctctgtcaggagagtgtgcggggagtctcatccaggagagtgtgcggggactggaggggctctgtcaggagagtgtgcgggggctggaggggctctgtcaggagagtgtgtggggcgtctcacccaggagagtgtgcgggggctgggtctgggcttcaggggaggagagtatgtgggggctgggtccgagctccaggacacccagaagagtatgtggaggctgggtccaggctccaggacaccaggagagtgtgcaggggctgggtctgggctccaggagaggagaggagactctcgacggtgggcagccccagggaatggcatggtggctggagggggtgccagcagaggggctgcggccgtagtcttagggagggtggcaggcactgcagaggtgctcagtccgcctgccttctgtggtgcagggtagaggtcgggcctcacaggctctgggtttaagtgctggagctgcctctcattggccctagggaagctgctcgtcctcttgtgcctcggtttccacacctgtatggttgaacttgttgcggtgatgtaggaaggggcctgatgcccctttgtgtggctcaaggctggtgcgtgccgggcagctgtgaaatgagctgggcttctgagtggcagggaggcagagccgcgccggttgcgggctccaagctgggctagctggaggcgggggaag

SEQ ID NO: 19753 - DNA, 1066 bp, Artificial sequence
  DNA replication origin
tgggctccaggagaggagaggagactctcgacggtgggcagccccagggaatggcatggtggctggagggggtgccagcagaggggctgcggccgtagtcttagggagggtggcaggcactgcagaggtgctcagtccgcctgccttctgtggtgcagggtagaggtcgggcctcacaggctctgggtttaagtgctggagctgcctctcattggccctagggaagctgctcgtcctcttgtgcctcggtttccacacctgtatggttgaacttgttgcggtgatgtaggaaggggcctgatgcccctttgtgtggctcaaggctggtgcgtgccgggcagctgtgaaatgagctgggcttctgagtggcagggaggcagagccgcgccggttgcgggctccaagctgggctagctggaggcgggggaaggagagtgtggggggaggtggagcctgtgggccggtgacggaggggaccgcggggcggggtggcgagtggggctcctggtgtctggggctgcagctgtgggtggctgtcgtgcccctgagtgaggcgtacctgttgggaagtgagggcatgaactccgttttcctccttttgagtccccccgccccagtactgtggtgaaagcagctgcaccggtggctctggtgggagcagtaggggtgtgggattgtgcagggcagggaaggggcagagagggggccggagccaaggagtggactctgggcatcccaatggtctgtgtgaggatgaactgggctgatgcttgctgtgggccagggacactagaagggtgagctccattctccagaagctctgtgcttctgcggctggctccagccttgccctgcggtggtggggcctgcttccccggccatcctgccctgtccctttgctgtaggtggggcctcagtgaggctgggagatgatactctggtgctgcccagggctggcctcccatagcgattgatggggtgaaggagaggagaagcccggaagattgagcaggtttttaattcacagggccctattttcgtctgacccctgcttcgtcatccacct

SEQ ID NO: 19754 - DNA, 1040 bp, Artificial sequence
  DNA replication origin
ggatggggaagaagtggatcccccaggagggagtgggggaggggctggggatggggagtgggtggatcccccaggagtgagggggaagcagctggggatggggaggggatggggagggcattgatcccccaggagtgagggggaagcggctgggggatggggaagggacagggagggagtggatccccaggagggatgggaaaggggctggggatggggaggggatggggagggtgtggatcccttggagggatggggaaggggctggggatggggaggggacagggagggcgtggatcccctgggggatgtcctggaagtgacacagtggcactgaggccaagggaggctggtgggatggtgggatggtgggatggggcccaggaggccctgggagcttccaagctggggtcagccaggcagacgcagcagcgccacgcgggccagaaagtggcccctgggcagggccccatggtcaccgtggccgtcacagtggccccgactagtgttggggtgtgtgccaaaggcaagaactgaaggccttgagggccttgtctttttttcacgtttcttctcttccttctttggagtgtttttgctctcatctttcatttagacttttggtctaattatttcacagcctttgagtgcctcctcataaacagtcagcaaacacggatgtctttgtttagagcaccgtgttaggactgtctgggcttattaaccttagtggatccacagtcaatgttgggggaagtcatatccacggtttaaatgaggtcatgacccatgaattgggctggagcgcgtgttactggggcgaggtgcacacagtgaacggtgtgtccaggtgtccgctgtcacatttgtgcgtttggtgtttagggtggctcctgggcagggctgctgggcacgcagctgcagctggatgtggggctgggaccctcgatggggacttgctggtaggagctggggccaagggaggctgtccacgtgggctgagggtcctcagtggcgggacagcggcgtgggtcagtcgc

SEQ ID NO: 19755 - DNA, 2337 bp, Artificial sequence
  DNA replication origin
gggtcccctctgcccctgcagctctgtggagcccagtgatgggggtggggggtggggggcggttcgtgaacaggaagtaggggttgccccgggcctagctccgggcctgcacacctggtgggctctcttcaggctggaccatgtgctggacttcccaagcgaggtgctggccctgggacatgtgacctgagcacagagagctgcaaaaaacccagagggcctgccagtggacgttggcgtgtggccccagccagctcgctgcagggcgcaggtgtggtggggagacctggggctgctccagggtctgcagcctatgctggccagcgtggggaccacccagtgctgggtcggctgggcccagccatccacatcccactgatgctcaggcacccacaggctgggccgtggcagcttctctgctctgctcctcaccatccagacagctgcatctgctgcagggtttggagctggtgtctttgctcactaactgaagaagctcttgttctccagggtttatggttgggtttgggatgaggatgtaggcagatcgcttggagaacagctgaggcctgaacaggaaaaaacatctggaaaggggtcttttgagattgggacaaggagaggtcagcatcaggaggatctcaggagatgaggagtgcaggggagagaggccctgtcagaggaggggagggaggtgacgtgggcagaggagaggccctgtcagaggaggatgagggaggtgagttgggcagggcagaggccctgtcagaggaggatgtggggtgggaggtgaggtgggcaggggagaggccctgtctgaggatggtgagggaggttaggagttcatgggagaggccctgtcaggggagagtgagggaggtgaggagttcatgggagaggcctgtcagaggaggatgagggaggtgaggtgggcaggggagaggccctgtcagaggaggatgagggaggtgaggtgggcaggggagaggccctgtcagaggagaatgagggaggtgaggtgggcagggcagaggccctatcagaggagggtgagggaggtgaggtgggcagaggagaggcctgtcagaggagggtgtgggaggtgaggagttcatgggagaggccctgtctgaggagggtggaggaagtgaggtgggcatgggagaggccctgtccggggagggtgacggaggtgaggtgggaaggggcgaggccctgtcaggggagggtgagggaggtgaggtgggaaggggagaggccctgtcaggggagggtgagggaggtgaggtaggcaggggagaggccctgtcaggggagggtgagggaggtgaggtgggcaggggagaggccctgtcaggggagggtgagggaggtgaggtgggcaggggagaggccctgtccagggagggtgagggaggtgaggagttcatgggagaggccctgtcagaggagggtgagggaggtcaggtgggcaggggaaaggctccatcagaggagggtgcgggaggtgaggagggcaggggagaggccccgtcagaggagggtgtgggaggtgaagtgggcaggggagaggccccatcagaggagggtgtgggaggtgaggggggcaggggagaggccctgtcagaggagggtgtgggaggtgaggagggcaggggagaggccctgtcagaggaaggtgtgggaggtgaggagggtaggggagaggccctgtcaagaggagggtgtgggaggtgaggtgggcaggggagaggccctgtcagagaggggagagggaagtgaggtgggcaggggagaggccccatcagaggagggtgagggaggttatgagttcgtgggagaggccctgtcagagaggggagaggcgctgtctgaagagggtggaggaagtgaggtgggcaggggagaggccctgtcgggagggtgtgggaggtgaggtgggcaggggagaggccttgtcagaggagggtgagggaggtgaggagttcatgggacagctcctgtcagacaagacctgtggtagagaaatggtgtcttatcacatggtgagcctctctttcccattttctgtcctgttgagttagaattgtgatgttgtgttttgtggggtttggggaggctgtgaaggtgccctgttttgggggttcggggaggctgtgcaggtgccctgttttgggggttcggggaggctgtgcagggggcctgttttgggagtttggggaggctgtgcagggggcctggcactcctagggctgctccaagctggctgatggtggtttgggctgaggcccggttcccctgctggttttgctgatctgggacagtggcgctggctgg

SEQ ID NO: 19756 - DNA, 1002 bp, Artificial sequence
  DNA replication origin
aggtgaggtgggcaggggagaggccttgtcagaggagggtgagggaggtgaggagttcatgggacagctcctgtcagacaagacctgtggtagagaaatggtgtcttatcacatggtgagcctctctttcccattttctgtcctgttgagttagaattgtgatgttgtgttttgtggggtttggggaggctgtgaaggtgccctgttttgggggttcggggaggctgtgcaggtgccctgttttgggggttcggggaggctgtgcagggggcctgttttgggagtttggggaggctgtgcagggggcctggcactcctagggctgctccaagctggctgatggtggtttgggctgaggcccggttcccctgctggttttgctgatctgggacagtggcgctggctggaggggcccttgccccttgcctggccgtgtgcgtggccctcggctgtgaggggctgggctgtggctggagcccatgtccgctctctaggcttcctggtttgtgttacattttggcagcaacagctgtgtgttaagctcaagcttttgtttgttttcttttaagatggaggccttggggcagtggggtgggggttggaattctttttgggttttgggcgcatccaggaggggccggcagtggggatgggtcctggctgctctgtcccatggagcagggacagttcccgcgcattcgggtctctgcagcctgttcagtgtgggaccgtctgcaccagaggccatgggggagggcagtcttggggagcaggcggcaagaccccaacttgacagacctcagatccaaggctcaggccgcccagaatccccacgtacatgtcccatttctttcatttctttcccttttacctttttttcttttacttatggcttaaacagttactgtgagcgttgatagtagagttcgccagtggtgctggaagtgagttctgagcgaggtggttcctcctgtgacctgcagcccctggaacgccacggcc

SEQ ID NO: 19757 - DNA, 1063 bp, Artificial sequence
  DNA replication origin
ctgggataaacaaagctgtgcagctgagcctctcagctgagaggctgcgaccttcatggcctggtgggcctggcacctgaggccctgggcctggggaacaggggcctcccctcttagtggtgatgggcttcaccctctgtagctgccggttccgggtcctgtggggagcggtgagggatggtcgtgtgcgtcgttttaggagcatgtgtgtgagcgtgaggatgcccatggccagtggacatgccttcctcctgtccttgcagccactggaggggaagcttcttgtccttaagtcagaccgggaggcagacgggccctgaaagaaccacagggtggcgtgggaggcagctgcagtgggaggtgcctgtgctttgttggttgtgaacaagcatccaagggaggaccacagtggcagatgtgcagtgtggggcatgtggcgtgcagggacgccgtgggcgtggtgtggggcacgtggcgtgcggggacgccgtgggcgtggtgtgaggtatgtggcgtgcggggacgccgtgggcgtggtgtgggatatgtggtattgggaacatggtggtgacgcaggatgtggtggtggtgtagaatgtggtgctgatggatgtggtgtgtgtgggatgctgtggtcacatgggacatggtgtatgggacgtggtggtgacatagtgtgtgttggtgataggggatggggtggtgacatgggatgtggttttggggttgcagtggtgacatgggacatggtagtgacatgggacatggtgacagggtagggtgtggtggtgatggaggtggtgtggtaatgtggcgtggaggatgcagtgtgggggacatggtgacatggcgatgtgtcatgtggtgatgggggacgtggcgtgggggatatggggtcctggatctcctgtagctctggccagtggcgagtggcaccatgcagcagggaggaaggccagcttcacgctgcaggagctcctgggcagtctgttctgggagtgaggatgtttgggggttgtggagccatcgtgctggccagttgctttgctgcgctggtggggag

SEQ ID NO: 19758 - DNA, 1272 bp, Artificial sequence
  DNA replication origin
tcatctacccactccccagctggtttttcctgcacctcccagctcaactgctttcactggaatcctgcctggggtgtgttttgggagacctcaaaccaagacatgaatatttattgactgcctccctccctagcccaggcattgactcagaagctgggaaatcatacagtaattcagaaagacacagggccacagaaaaagatcctgctgagaaaggggtgtggggtgggatgacaggagcggagtagggaaagccttgggttgagccacgtgagggggaaggacagggacaggcagggagcagaggtgccgtcagagggagcggtggcctgtgcgaggtcctgagatggcagagcaaggccagctggagggagggaaggaaggaaggagggagggggaggggggagggagagagggaaggggcggggcctccaaggctcagcctgtgagaaaactgaggcaggagcaggaggccctgcaaccaaccaaggagagtggactgtggcgtgggcagggtggcagcagggacagtgaccaatgccagatgccagggagcctctgagggtggcggggcagcacctgctgacaggtgcgatgccacatgggagaagaggcagatgccacggtgtgggccctggcaccggcggcatggagctgtgtcagccaggagggtgacactgtggggcaggccagggcgggggtggggtgtggagcagaggacggagaagcccctctggacattctaagtccggcaggccacagggcatccaggcagctggaaccaagagtctggaaggaaaggaggggtttgggtttgaacagaaaggtggggagtcctgagcatgtatggaggtgctgaacgggcagagaccacggcctacatgccaggcaccaaacaggtgggaatgggaggaaccgcacagaagacaggagctgccaaagggaaatgcacattccccaagtgcagacacgccagtgggaagtgcagacacgccggtggaagtgcagacacgccggtgggaagtgcagacacgccggtgggaagtgcagacacgctggtgggaagtgcacgtgccggtgtgaggtgcaggtgtgctggtgagggcgcgccggtgtgaagcacgggcatgccggtgtgcaagtggcaccacagccaaaacagcgagctcacacttcaaactccttcaaagaccccaggcctctgtaagaaccgctcatctctgtgcccacagctcccccgcttccatgtgacccagaaatggaaccacgcag

SEQ ID NO: 19759 - DNA, 957 bp, Artificial sequence
  DNA replication origin
tctgtgagccaggaaggaccctcaccaggaaccaaaccggccggcttcttggcctcagactgacagctccagaactgggagaaatacgtgtctcgtttaggctctctggtctgtggcattttgtgatggagcctctgccgaccgagggaggggctgagggtggacaggctgggaatacctcaccttgggtgctcccaggaggcttcacggggagaccggggccgggagctgctgctggctccacacctgtcctgagagggtctgtcctggccgctgagcaggtgggtctggagggcggtggggctggcggtgctgggcgcggctcccaagatgcgtgcagctgtccgcggtggctgcctcgtccagcagcgtccctgccagaagtgggtgctttgagggccagtgcctggtctgtcccgactccctctgtgtccccagctgccagcaacgtgcagcggatgacaagtgaaatgaacgagggagtgagagccgaaaaagacaccttccaggaatcgtggtgaaagcagcgagcacagtgtggtccggggctgggggtgtgagatggctgggattatagtgagaggcgagacaggggatgcagacgggtagatgccacagggcctcctcttccccgtgaaaagcttcagactttcttcatcctcagggtaacggcagccacggacagatttgtgaggacctttggttggagtattggaaaccgggaggggtgaggccgtggagagagccgtgtgggggaggtgcccaggctggagtggcggcgtcgggtgtggagagaaactggagataagggacgcgaatctgactcggtgactttgttgttgatgttgatgtcttcactggttgccattgcccaggagggtgtttacagcacagcgctctgatcagcagctgcggatctactcttggtgaagagcaaccattagattaggctcaagt

SEQ ID NO: 19760 - DNA, 969 bp, Artificial sequence
  DNA replication origin
cctccggggaagctgtcctccagggaaggcatccatgagggagggtccatgagtggagggtatccatgagggaggggtgtccacaagggcagggtgtcctccaggggaagctgccctccagggaaagacaatcataaggggaaagtgtccataaggggaaggcatccaagaagggtgggcgtccttgaggggagagtgttcttgagggcaaagcgttcttgagggaacgtcatcctcgagggaaaagcatcctccaggggaaggtggcatccatgagggaaaggtgttcatggaggagggcgtcctcgaggatagggtaccctctagggaaagacatccttcagaaaggcatctatgaggggatgatgtcctccaggaaaaggcgtctatgagggaaagccatccatgaagaaaaggcgtccatgagggtaaggtgtccatgaggggaaggcgtccatgagggaaagctgtccatgaggggaagacgtccatgaggggaaggcgtccatgaggggaaggcatccttgaggggaaggcatcctccagggatatgtgtctgtgaggggagggtgtcctctagggaaaggcctccatgagggaaagacgtccttgaggggaggtgtccttgaggaaaagatgtctatgaggagatggtgtccataagggaaaggtgcccatgaggggagggtgtccttgaggggaaggcaagctctagggaaaggcatacatgaagagaggccatccttgaggaaaaggcatccatgagggaaaggctttcatgagggaaagatgtccatgaggggaagacatccatgagaggaagacgtccatgaggggaagacgtccatgaggggaagacatccatgaggggaagacatccatgaggggaagacatccatgaggggaagacatccatgaggggaaggcatcagtgaagtgaaagtgtccatgagggtggggggcgggtgg

SEQ ID NO: 19761 - DNA, 1066 bp, Artificial sequence
  DNA replication origin
gagcacagcccaaagggacagctggcccttgggaaccacgttgggccgtctgttagggagaagtgcactgcctgggcctgaaggcagtgggctgtctggcctcctgagtgcccggggagcccacgcccacgcccaggagggaggggcccactcggtgcatccacgcagaggcggctgcgaactcaggcacggccgcccttgtctcctgctgccgctgccacctgcagcacagacggagcctgtgcacggggcctggtcagagctgtttctgtctccccagcctgagccccgtcttcacctgcagcacagacagggcctgtccgccgggcttggttggaaccatttctgtctccccagcctgagcccgtcgtcccttgctggctgcccacttgctcagctgcgccctggaccgtggccgctgggctcctgggaggtgggccatgcccacagctccacctggctcacagtgagtgccgtgtcgtcgtgagcacctccaggctcccaagcccagcacagacagcaccggccccttctctccccgcctttccgctcctccaaggaagctcgtccttttgggccctcagtggctgttgtagcaccaccaccccggcaccagacagagagccctgtcggggcttgctccttggaagcgctgcgcatcctgtgttccaggggagcggggtcaatcagtgcctcacccctcatcctgctcaagtgaaatggggctccccgactgcctcacatgtgtcccacccagggtttcctgccaggtgagatggttcgtgtcctggcctgtcaggactcccatgagtggcgaggtgtgcggtgtggggcagtggctggactgacagtgggagatagacggggacctggaaggaggggaggccatgtcgatactgcatccgctctctgaattctctgcccgcgcgtcctctcagagcctcatggtggaagccgccaggtcacacaggaagccgcactgacaaggatatttgttgcactgctctttagctgtaaaagtttgggacagattcagcacgctgcagcggtgattgcttgagtcaga

SEQ ID NO: 19762 - DNA, 1841 bp, Artificial sequence
  DNA replication origin
gcaggtcttgtttgatgtcaccatcaacagaaggagtctcttcctcctaagaagtttcctggaattttgttttttaaaagctagtaacacacacacacacgagttctgcaaggcacactatgaaaacagtagctcctgtccacttcagtcttctagttcccagaggcaattattttcttttgattgttttcttttggtatttatctccatacctctaaagcttatattgccacttcttgattttccagttttcaacattgatttttcaatttttccatgctggaagaagaggatttaactactttctactatctttccccgtcactcaatatcacacacacactccatctctcacccccaccctctcaatattttcacttaaatcaataatcaatatttacatcattataatgtgccgtgtgtcacgcattggcagacgtcagaacgtgccgtgggccacgcgtcggcggagcgcgggaacgtgccgtgggtcacgcgtcggcggagcatgagaatgtgttgtgtcacgtgtcatgtgccatgtcacagggagtatgccgcgtgtcatgtgttgtatgtcacatgtcatgtgtcaggagctgcaggctgcatgtcctcaggtttctggagcccagctgacagcactggatcctgttgtgggcatctggctctgtgatgaggcactggccttctccatgctccacctcccagggcaggcagccatgaagccgtgcagacctgactcgggacagtgctggggaggaggccctggtgagtgccaggcaaggttgccgcctgccaagtgggttgttctcctgatccggcccttgctgtgggcctgcgtgcagaggtctcctctgcaggggacggtgggtgtgcatcagccacggcgctcagcacagaatacccatggctgtgcagcagctggaccagggcatgttgaatgaatggactgccatgggagctgctcgctgagaaggaacactggataacctgggcacggtcatccttcaaaagcctcagcttagacagcagcgcctccagacccgcgtccgtggatgcaccccacagggacctcatggccagcactgcccaccactcccgcctcacccagagctagggaaccctctgcccatggtcccatggctagatggccaggaccagccccagagctacgggccaatggcagctctccatctttccagttctggacccttccaaggctgctctcagcaaggtgcctttctcagtgctccagctcctgacaggacttcctgcttcctcagccccaggcctcaatctgaacccctgtgcctctgagtctgcctgacacctacaggagcacagacaggtctccccggaagtttggagaacactggcgtggggagtggcacctgcagagctggggacccacctaggcatcttcgcctcctgggctgctcatccccagggcccaggtcggtagccttggtggctggcagcttccactgtggacggcagctgactccaggtgatggcagaaggagcttcccaggcagcctgttgagcacccacgaggaagcgcagatgctggcggcacctatcttttcaaactgccccaggcccgacgccttccactctcctgccgggtgcatggagccaccgggagcagccggcggccttggtggtcttggcagtctcggcggtcttggtggctttggcggtctcagcagtctcggtggtcttggtggcctttcgaaaggaaagcttctcaagagacatacaacccagcctccttggagcccagagggcctagagcatccgtgcccagagaccacccagctgcgggcagcttgcagaca

SEQ ID NO: 19763 - DNA, 1506 bp, Artificial sequence
  DNA replication origin
tcctgaccacatgaatatccatcattttccttaaaaaaaaaaaaaaaaaaaaaagaaagaaagacactgccaagaaatcagtttctataggacaaggagctggggagatacggggtcaagggaggcttcttccctaagagggaaatgcctgcctgtttgctcacaggggtgacccggcacaaagggagactgggtgttctggggagaagacaggctccccactgggacctcccagaaggccacagggatgcgcgcaggcagggtgaagacttagctgtgctgtgggcagcagaggggcaggggacaggtgtgccccaaccactctccccccagcaaggaggggctgacagtgtcctcctgcttctgggccagggctgtgctgagaagcaagccagccaggggctggggactacagcagaggagaggctgaagatgggggctgtggggtggtgtcagggggtgtgggggtcaggtgcgggttctgggagtgcgcactcagaggatgtagggtcagggggtgtgaggtcgggggggtggggtcaggtgcaggttctgggagtgcacagaggatgtagggtctggggtgtggggtcaggtgtgggttctgggagtatgcagaggatgtggggtcaggggtgtggggtcagggggtgtggggtcagggggtgtagggtcagggggtgtggggtcgggggggtggggtcagggggtgtggggtcaggtgcaggttctgggagtgcgcagtcagagggtgtagggtcttgggggtggaggctgagggtgtgggtttcaggacgtggggtttagggattggaagctgaggacatgggggctgagaacgtgtgcagtgagggcatgggggctgggggtgtggggtcagtggctgcagagggattttctgcaaagaggttggtgaccctggggacccaagagaagataagagtttggacaaaagaaagacctgagagggctagaagggctgtgcagggctgcaccctgaggacagagagggagcagtcaccagcgggtcctggctccctgggggctcagcaaggccacagtggggacagggacacgggaacaatgcccttccagaaacccaggtccacgctcacgccaaaatcccaatggcatctacccacatctcacttggagctgcacatctagagtccagcacgaaccgcgcccgccctctctgcccatggggcacgcacaggcaggccccacatcctccaagcttgaccaagtcactgtcagactaaggacacatgaatggtgtctgcaagcacgtaagagaagcagaaccactttcaaggacgcagctaagccaggctgaaatgtcaccgacggtcccccaggagaacacggggcctcctcgagcagctgtttctgccctgtcacttgccactcctccaccacacccccagctccctctcgttctgtggtcccgtgaggacgtgctacatagaaagccttgaggttaagaataggagcctgcattgtgcc

SEQ ID NO: 19764 - DNA, 905 bp, Artificial sequence
  DNA replication origin
ccctttctgggctggccaaggccagagccgactccctcagtttgtagggaggtgtggagggagaggcgctagcgggaaccggggctgcgcgtggcgcttgcgggccagctggatttccgggtgggcgtgggcttggcgggccccgcactccgagcagccggccggccctgtgcaatgaggggcttagcacccgggccagcagctgcggagggtgtactgggtcccccagcagtgcccacccaccggcgctgcactcaatttctcgctgggccttagctgccttcccgaggggcagggctcgggacctgcagcccgccatgcctgagcctcccacccgctccgtgggctcctgtgcggccggagcctccccgacgagctccgccccctgctccagggcgcccagtcccatcgaccacccaagggcttgaggagtgcgggcgcacagcgcgggactggcaggcagctccacctgcagccccagtgcgggatccaccgtgtgaagccagctgggctcctgagtctggtggggacgtgcagaacctttgtatctagctcagggattgtaaacgcaccaatcagcgccctgtcaaaacagaccactcggctctaccaatcagcaggacgtgggtggggccagataagagactaaaagcaagctgcccgagccagcagtggcaacccactcgggtccccttccacactgtggaagctttgttctttcgctctttgcaataaatcttgctactgctcactctctggatccacactgcctttatgagctgtaacactcaccgcgaagatctgcagcttcactcctgagccagcgagaccacgaacccaccagaaggaagaaactccgaacacatctgaacatcagaaggaacaaaccccggacacgccgcctt

SEQ ID NO: 19765 - DNA, 1365 bp, Artificial sequence
  DNA replication origin
tacaaggaggggaggacagagcccatgttgccggcgggctgcgaggggtggctctgcgcaccagcagccgccgcgggctggcgtccaacacacaggcacacacccaaccctcgggccgaccagaaagggaaactgaggctcacaggttaagaactgcacctatggtcccttggtggctttaggccacagtcactgggcccaaggctgggttctcacccatgggggctgtcatgggagaaggctggacgtgtgactggtgacaaatctacagtaactgggtgaggcccctctactagtgacagtgggaggcaggcgtctttccaggagaaaaggtaccgtccctgcaggccaaggcgcctcaatacacgactcccctagagcaccagcagctcatcttccgtgcctcgacacctcctgtctggggggactggggggcctgacatgctttgggaaccagatgctgcagcagagatcaggccaagccttcagaacccatgcgggtgaagctgcgtgtgtgtgggggtgaagccacgcgtgtgtgggggggtgaagccgtgcgtgtgtgtgtgggtgaagcttgcgtgtgtgtggcatgtgtgtgtgaagccgcgtgtgtgtgggggtgaagcttgcgtgtgtgtgtgggggtgaagccacgtgtgtgtgtggggggtgaagccgtgcgtgtgtgtgtgggtgaagcttgtgtgtgtgggggggggtgaagccacgtgtgtgtgtgggagtgaagccaagcgtgtgtgtgggggtgaagctgtgtgtgtgtgtggggggggtgaagccgtacgtgtatgtgtgtgcaggtgaagccgtgagtgtgtggggggggtgaagccgcatgtgtctgcgggggtgaagctgcacgtgtgtgtgtgtgggggtgtgcggggatgaaggtgcgcgtgtgttggggggcagaagctgtgcgtgtgtgtgtgaagccatgtgtgtgcaggggtgaagccacgtgtgtgtgtgggtgaagccacgtgtgtgtatgggtaaatgtgagtgtgtgtgtgtgtgtgtgggtgaagacactgtgtggggggtgaagccacgtgtgtctgtgggtgaagcatgtgtgtgggggtgaagctgtgtgtatgtgggggggtgaagccgcttgtgtgtgaagatggccgagggccagttccccagaaaccaactccatcaggggcctgcggctggcgggtgagaaacctgcggtcaacatggatgggaagacaggcaccgcgggcacagggttgtgcaggaggcacgtatgacaacgaccgcaagagcccagatccatgtcctcgccagctgatgacaatcacaagagcccggatctgtcctcgctga

SEQ ID NO: 19766 - DNA, 1379 bp, Artificial sequence
  DNA replication origin
gagactgcaaaccaagaacgtctatgagacgagcagacaccagaatacagactcaccccaaataaagttgatttcttgggaaaagctgacagactttaagtatgtttaaattgctcaaagagataagtgaaagatagggttcattaaaaatgttattcaactaaaacagaaataaaacaagaaaagggaatatgaagaggagcctgtagaaacattaaacattctgcattagaaattacagaacagattctagactagatgtggtcaaagagagaatcagagaattagacaatgtcattaaggagttcatctaaacatagtcaagacggacaaagatttgtgtttgtttggttgtttgtatgttttttatttttatagaaaggagcagttaaaagacataaagactattaagaggctcaaataaactcaaaataaattccagaaagaagcagtggagcagtgttggaagtgataaggggaaattcttaaaaatttaattcccgagcacaatttggatacagagcaggatatataaaaataaacccatacctggatggcagtgaagcttcagaatattgatgacaaagagaaaaactttaaaacagccagagagaggaaaacatacattcagaggattcacagttcgtgtgccggggtgcttcttacagcagtggtggatccagagtgcaggggaagaatgcagtgtgtacgggaagggttggctggcttcagcatcacccccaccagtgtgtggggcttggaatttcccttcttgagcatgagtgggagcacttagggagggggcagggagcacttgtggtgggggcaggcaaagaagggcctcatgcctgggaatccacagccctagagccttgcccaggagggagctgtgggggccactgtcctggagggagacagggagaaggagacggggctgcaggggccactgtgctggatggggaccaggagaaggagacagggctgcaggagccactgtgctgccaggtgccgccaacaggccaggcgagatgaagggcgagtgtctgtaggagtttgcctgtggaggctgtggtgaccttgcagagagcatttgggcagctgttgtctggcacgtgcgcatactggaggagccaaaggggacggtggccagtggcaaggtggggtcaaagggagagcctctgatcactgcgctctccgtgttagatagagggagcacgccacgctggaccctttcttcacgggtgtttcgtccacagttaactccagattcccatctgctttcatctcctcagcagaccttagggtgtggtggaggagacagggtcttccctgtcctgctttccttctctgccagcccatgagcaccaagaacagcagcc

SEQ ID NO: 19767 - DNA, 922 bp, Artificial sequence
  DNA replication origin
ttcattttcttttcatggattttccaaaacttggctgcttgattatctgctgccatgtaacagaccgccctaaacttagcagctttaaaaacacatacgaggtcatagctgtgagtgtctcaggacccaggagtggcttttctggggctctggccctggtcaccttggggcttccagaggactcatctccgagctcactggggctgtgggcaggggtttctgcccctccccctcgggcctctccctggggctgctcagggcaggacatccccaggaggagcaagagtccagaaagtgagggggatggagggagggaggggggaggagggggaggaggaggggatgggggaaggagggggagggggaaaagaaggaggtgggggaagagtgagagagaagggtaggagaggagaatggggagggggaagagaggaggagggaggaaggagggggagagaaagaggaagaagagggagggggaggacagagggagctgagaaggagccgcggtcccgtgcccaccccaggcagtgcaggctgcaggctgccctttgctgttggtcacagggaacagccttggcatggtgtgggggcacatggggcacgttcaccaggcagcgtcatcggggtcattgtggcagctgggccacaggctggaggagggcaagaccgcctgcacgcactcattcctggcgcctcctggtagggagacggccaggtcttggagcctgtggaggacacgcaggcagtgagggctttgtgggacagtgtccagactgtgccaagccctgcactgacctcccctggtgagagggcacgtccttgccagctgaaggtgctgagggtcccctgcagtgtgacagaggctcaggccttgatcaggccttgccgagtccatgtgcctgcaggcccacagccggcc

SEQ ID NO: 19768 - DNA, 1117 bp, Artificial sequence
  DNA replication origin
ccctggtgagagggcacgtccttgccagctgaaggtgctgagggtcccctgcagtgtgacagaggctcaggccttgatcaggccttgccgagtccatgtgcctgcaggcccacagccggcccacggggcttcccaagggtcttccctttgggagtgaaatgaagcactcttcttgcctgtccctgtgcccccaaccctgccttacagggtccccgatgggtgcagccggcagccctgagcagcatcagctgaggctgaggggtggcccttcctcttagcttagccatcagggagagtttccatagtcacctgtaagtttttctctttaaagaaaagtagctcactttttagttgcccagagtaactgcatttgtaaagacatattcagacttcactggaggtttcctgacctctggccttgtcggaagacaggtgggtggacaggtgccccgcctcgggtggctccgcacggcggaggccagtgcaggtcttatcttcccggggactccttgggagaacgaagtgtgacccggaggctccggcccttggtgacgtgtccttttctcttttggttgcagtgcctttgacttggtgaatatccatcttttccatgatgcttccaatctggtcgcctgggaaacaagcccttccgtgtactcgggaatccggcacaaggcactgggctacgtgctggacaggtaggtgtgggcgggcaggtaggcgtgggccgggcaagtaggtgtgctgggcaggcaggtgtgagtggagaggtaggtgtgggcggacaagtaggtatgctgggcaggtcggtgtgggtggacaggtaggtggggtggacaggtcagtgtggatggagaggtaggtatggatggcaggtaggtgtgctgggcaggtaggtgtgagtggacaggtcggtgtggatggagaggtaggtgtggatggcaggtaggtgtgctgggcaggtaggtgtgagtggagaggtaggtgtgctgggcaggtaggtgtgagtggagaggtaggtgtgctgggcaggtataggtatgggtggagaggtaggtgtgctgggcaggtataggtatgggtggagaggtaggtgtgggcgggcgggtaggtgggt

SEQ ID NO: 19769 - DNA, 1847 bp, Artificial sequence
  DNA replication origin
cttgtgcagagcagaataactgagtcattcccaggccaccactgtccctggggcagtcacaactgcctggggctgcacaggcagaggcagggattggcaggcactgaggtctggacccagagagggaggaggctgggcagggcctggtaccctctgagcctctgggaggcttcctggggaagacagtgggaggagcagtccatgtggaggggtccgtgggtggggcccctgccccagagtcatgtgtggtatgtgaccagcgccgtcagatgctcaagagcaggagtgggagagtcctatgagaggcacccctggggactgtgtggagcacatttctacccaagacccacgtcctgaggggtccctaaggcaggtggggttatgaaggagaacagcagccagcaggtccctgcctcctaatagtgccttgtaaggatagtgttcagtgtgcatgtgtgtgcctgtgcgtgtgtgcatgcctgagtgtgcacaccttgtgtgcatgcaattatgtatgtaattgtgtgtgtgcacacatgcacatgcatgtgagtgtatgcacagttgcttgtggggtttgtgtgggggtgggtgtgcgcacatctgcgtgtgtgtgttcgtgtgtgcatgtgtgtggatgcttgtgtgtgcatgtgtgggtgcacgagtgcatacatatgtgtgtgcacgcgtgtgtgggtgtgtgtgggtgcatgtgtggtgtggatgtgtgtgggtacatgtctatttgggtgtgtgcacacttgcaggggtgtgggggttgcattgtgtgtgcacacgtggacacatgtgagtgcacttgtgtggctgcatgtgagtgcgggtgtatgtgtgcgcgggtgtgtgggtgcatgtgtgtgtgggtatatgcatgtgtgggtgcatgtgagtgggtatatgcatgtgtgggtgcatgtgagtgggtatatgcatgtgtgggtgcatgtgagtgcaggtgtatgcatgtgtaggtgtgtgtgtaggtgcatgtgtctgtgtatttgggtgtgtgcatgtgtgcaggggtgcactgatgcatgtgtgcatgtgtgtggggcctcgtgtgggtgcatatgtgtaggcttgtgtgggggtacgtgtcgatgtgtaggcctgtgtgggtgtgcatgtgcctgtaggtgtgtgcatgtgtgtgggtgtgtgcatgcatgggtgtgggcgtgtgggtgtgtgggtgcatgtggatctgtgtggatgcatgtgtgctaaggtgtatgcatgtgtgctggggtgtatgtatgtatgtgtgcgtgtgtgtgggtgtgtgtgcatatgtggggagagcatatgcacgtgggttggatatgtgtgcaggtacatgtgggtatgtgtgcatgcaggttgtgggtgtgtggagtgcatgtgtatgtgtgtgtgcgggtgtgtgtgcatttgtgggtatgtgcacatgtatgtgtgtaggtatgggtgtgcacacgtgtgtgtaggtgtacaggtgtgggtgcatgtgcacataagtgtgtacctgtcatagctcagcactgtgcatcctgaggaaggggtggaaggctgcattctccagtaggtgtggctccagggggagttggagctgatggggcccctcctgaatgctggctccgtctgctgctgtggtgagtgtggcctgcgtggctccttgcctgccgccttcacgatcctcccgggttccccacagggctctgcacaaggagtctgggctgggctcccatccctgtgctgttattagcgggtatatggccttggctctcctctgcatctggcccttgctgagggccctgaggcgtggccccttatcccctctgacc

SEQ ID NO: 19770 - DNA, 718 bp, Artificial sequence
  DNA replication origin
cgccgtgcaccctttagaggcagctgctgttattaatgggctcaagctgttctgtcagcagagcagggcgaggaagtgtgatccagtttagggtttcatgatgatcctgcaggattccagacaggacgatgacgcggcgtctccagggcgttgcaggcccacctggtgcgtcgcctggcggctttctcgggaagaaggagcagccaggcctgggcagggcctcctgtgaggcggcaccccagagtattgagagaggaaactcggtcagtggagtgagggccagccgggaggccgcatttcctctctctccgcactggggaactcattagagtttgttccgtcagggttctgctgtttgtttagccaactgacggccgcgtctgttcctgcgacaccgcacacagatgcttggccatgtggggattggccgtgtggggattggccatgtggggattggccgtgtggggattggccgtgtggggattggccatgtggggattggccatgtggggattggccgtgtggggattggccgtgtggggattggccatgtggggattggccgtgtggggattggttttgtggggattggccgtgtggggattggttttgtggggattggccatgtggggattggctgtgtggggattggccgtgtggggattggccatgtggggatggctttggtatcttgtggtctcgcctacacctgggcttg

SEQ ID NO: 19771 - DNA, 1561 bp, Artificial sequence
  DNA replication origin
tgcagagtgtcagctccttcacactgtccaacttgatctcagcgattttttgtcataacacgtagaaactgtcagagcccgttttaaacattgtgcttttctgtctgcaaagtcattattccgtgagttaacgagtcgtcacccccgcctgggaactcaggggtcccgggtgctcctgggtgtgggaactcaggggtccagggtgctcctgggtgtgctttcgggctggccggggaccagcagcttgggcgccgaggtgccaccgacaggaagtgggcctctaggctcagtgcaagggccgatgtttctctgtggtccagtccacgctggctgtgggtcctccctcccagttttcatgacttgggattccacttcccgggcagctgtgaagaggggggtgtgggaaatggtggagcacctgttgcccacccgccctggccctgctgccctcaccctcagcctccctggtggcccctccaggtgctgggcatgagctgacagcccacagcggggccacagtaagttggatggggccacggtgagtcagatggggacacggtaagtcggatggggacacggtgagtcagatggggacatggtgagttggatggggacacagtgagttggatgggaacacggtgagtcgaacggggacatggcggtccccgagactgttatcttcccattttagtctccagttccaaacacccacacgtattcatcttccaacggtggcaggacattgtttctgaaagacagactgagctggctttgatcatcctgggtctcttgtggttggcagaaatgagtgcccctaaaaccctctgttgggttgagctggcagcaccttgtcacaaggccccaccgcatgcctgtgtatcaacatttggccgtgctggtggcattgcctaaacgttcagtggctcctggtcgaggcatcccttcatctggctgtggaggaggaaggcagggcctctgcgtgtggtgggctgaggagcacatggagtttttaaagcacacatcccccagcaggggccccgaagtcctttccatcccgctgctgtgcttcctttctcctcgtagaggctgtcaaatggatcggtctctggcctgccatcccacaggctcggtgagggctcgagggcaggggctgtgcccatccttgctagaatccatgtccccgcgtccgaggctgtgcgggacccgggagcaaggcctgggggccacagaggcggggccctgtcataggctcctcctccacccccgccaagccacagggggctggaagcggcatttccggcaggtctggaacatctctgagtgagctcatttctaacctgttactcgagagccagtgagtccacagtgcacataagtacttcccgctctgactgggaggggccaggatgaaagtcaagaagaacccgcgaaagaccaaagccgatcaatcccgggcgcccagcaattggggaaaggtcagggagcttggaaagggccttttccttctggtagagcaaatgtcacagtaaagggcagctggtcctggccgggtcagagccgt

SEQ ID NO: 19772 - DNA, 985 bp, Artificial sequence
  DNA replication origin
agcaaggcctgggggccacagaggcggggccctgtcataggctcctcctccacccccgccaagccacagggggctggaagcggcatttccggcaggtctggaacatctctgagtgagctcatttctaacctgttactcgagagccagtgagtccacagtgcacataagtacttcccgctctgactgggaggggccaggatgaaagtcaagaagaacccgcgaaagaccaaagccgatcaatcccgggcgcccagcaattggggaaaggtcagggagcttggaaagggccttttccttctggtagagcaaatgtcacagtaaagggcagctggtcctggccgggtcagagccgtggtgaggcacgcactggagcagccgcgggagcctccctggtgaagggagccagctgctgagcccggtggccgggccgtgtgaccacaaggcgtcgggggcagtgggaagcctgggctccggtgcctgtggggcttgtgtggccgctctggtcttggcaggcgtgggggtcctggacgctgggtcccgtggggcttgtgtggccgctgtggtctcagcaggcgtggggggcctggactccagggcctgtggggcttgcgtggccgctgtggtctcagcaggcgtggggggcctggacgctgggtcctgtggggcgttgggcaactcctatgaaggactgcaaggctttcctttttctgctgagcagaaaaggaagaaagcacctcaccggggtttgcctgtgggtgtggccgtaagaggaggcatggcgggagaacagtgcaggggcctcgggagccggcctgagtctgccacatcttctcctgcatcacctggcctgctcccctggcctccctaagtgccttcacacacagccctcaaccctcatgggtcactgtcagcagtgttttttgatcaccaagatcagtcctatttcttaaagagttcctctcacacaggcagtcgcagcacggca

SEQ ID NO: 19773 - DNA, 1417 bp, Artificial sequence
  DNA replication origin
gtgccatttagaagggacctttgcagacagaacctggatttcccacgaacgccctgggcatgcctcggtgataaccacagagcacatgcggctttccttctgccgattcgtgtgaacactgagttctgcactggaggaaacccgcactggaggaaaccctcactgggggaaaccctcaccagagaccagctccctcccaagctgatcgcggggctggagagcccccactcccagcagatgcaacggaggctcagccaccacctcctgcgtgcccttccttggtcccctcctcatgtctgacaccaacaaacggcaccagcgaagaaaacctgctgctgaaaacacctgcgtctgatacgaggcaggggtgcggtcactcccagggtcgtctgatacgcaggagggatgcggtcactcccagggccgcctgatatggggcagggacgcggtcactcccaggggcgtctgatacgcaggagggacgcagtcacttccaggggcgtctgatacagggcagggacgcagtgactcccaggggcatctgatatgcaggaggcacgcagtcactcccagggatgcctggtaagtgggagggggcgcctgatgcgcaggagggacacctgatacgcaggaggggtgcctgatatgcgggaggggtgcggtcacctccagggccgccttctctgttctctgacctctcaccggggggaacccaggcctgactcttccctgggattgtgcagggctgaccacgccatcccatgtgaatgaccgccacgtctgccaggcagcgtggagaccccacccagggcccacctcagggctgtggttccgagaacagggatgcactggggagcagctgagcccaagctggctggacagcaagtccacgggaatgttcctcccccgtggtagcccctgcactggttgaaagtcacctggtctgtactgtcccatggaatagccacgcggctctatcagatctgaattatcagatctgaattaaaatgaaatgaagtgaaaaatcgggttcctgggctgccctcggtgcttgttagcctcatgtcctggcagccgctgcaggggcagaggggaggcagcttgcggtcaggctcacagcaggacacgccaacgcggctgggacttcaagacgccacctgggtcagccaggcccgcaggagctctgccacgttcctgcttactgttcctttgagaaatccacttggggcatgcagaggaggttccaggaagaccgcagttttctttcccttcctgacttatagtcacctctgacgcttcgatggccaggcaagccccacacccgctgtcttaacaagctgcacgcaggagctgctcttcctacacccaggacacctctccacagagctgagtgggtggggctgcagagcggccgagg

SEQ ID NO: 19774 - DNA, 1218 bp, Artificial sequence
  DNA replication origin
aggagtgagtccagtcttgaagaaagtgctgattcggaagcaaactgcctctggcactttgcagacatccaattgatactcacgggacaaatgaatgaatggagggaggggcagagcccacagccccagggttagggtccggccctccagggttcgcgcaaggggctcgccctcactcccaggcctggtccctgctggggctgagtgcagcgctggtgggtgggctcgccctcactcccgggcctggtccctgctggggctgagtgcagcgctggtgggtgggctcgccctcactcccgggcccggtccctgctggggctgagtgcagcgctggtgggtgggctgccctcactcccgggcccggtccctgctggggctgagtgcagcgctggtgggtgggctgccctcactcccgggcccggtccctgctggggctgagtgcagcgctggtgggtgggctgccctcactcccgggcccagtccctgctggggctgagtgcagcactggtgggtggccttgaagacacattttaccaatttttcatgccctcccctctcaacgtgaccctgctcctgagcttttatcctgctgacaacttcatgcagaaaaacacgcagacctctgatagcatgaaatcagaaacaatggccggggacaaagggggcgcggggcaggcgcaggccggctgggtcgaatttcagccacaaacagatgttcgtaggaacatctgaaaagaaactcttctaaaagaaatggtcttaaaaacaatgccttcagcggttaaataaagggccaaaggacgcaggatgcctgtcaatgataaatctcggcaaagagaaccaaaccggcatcatgaatttcaatgacaggtttcttgactaccaagggccccggttcaccagggattccagaccccgggaaggaagcatcggagctgggtgtccctcacggtccgaactcatcgggaggcactttttgtttcacggggctgtaatttatggaaagctgtgcccgtctccaagacttccctgaagaacagcaatgactaaaacagcaaaaccccgcaggggaagctctggctggacacagcctgactgggcgccggactagatacaaccgccttccacctggggatggcaggcaggacctgagaccaacggccagcgagtgaagctgggggtggccctctcgctcagacctggggctgacttccacag

SEQ ID NO: 19775 - DNA, 1877 bp, Artificial sequence
  DNA replication origin
cgcgccccctttgtccccggccattgtttctgatttcatgctatcagaggtctgcgtgtttttctgcatgaagttgtcagcaggataaaagctcaggagcagggtcacgttgagaggggagggcatgaaaaattggtaaaatgtgtcttcaaggccacccaccagtgctgcactcagccccagcagggactgggcccgggagtgagggcagcccacccaccagcgctgcactcagccccagcagggaccgggcccgggagtgagggcagcccacccaccagcgctgcactcagccccagcagggaccgggcccgggagtgagggcagcccacccaccagcgctgcactcagccccagcagggaccgggcccgggagtgagggcgagcccacccaccagcgctgcactcagccccagcagggaccaggcccgggagtgagggcgagcccacccaccagcgctgcactcagccccagcagggaccaggcctgggagtgagggcgagccccttgcgcgaaccctggagggccggaccctaaccctggggctgtgggctctgcccctccctccattcattcatttgtcccgtgagtatcaattggatgtctgcaaagtgccagaggcagtttgcttccgaatcagcactttcttcaagactggactcactcctcgtcacgtgtggggaggaaacttctgaatcactgaagtcagtggctgagttcacaccaccccagccagcccacagcggtcacacccttgctaagcttgctgacgggcagcctcactggagcgcagacgttaccctcccaggaaacctgtgatgaggactggggtgcacacgtgtgctgaggacaccctccaaggccggccccggggctcagacaggcaggctggggccacatctgagcctcctggttttagtgcattcactctggcgcagacagaccatggctgagcgtgtggtcccgaattccatccttggaacagaggaagtttttgttatgagaaagaactccagccacagcggatttgcacctgcaggtctgtgtcttgcgacacttaagggccaggctggacgggcccccacagaggtggaggagtggccggctctggccaagctgccagacaccaccagggaaacaggtgcacccacagagcttctgtgcctgctgaggggctgggagtcgtagcctcaaggagcaggctcattttgttgctttctgctttaaggtggtttttcttctggttggatgagaaaagttagttgagccccccacggattgactcagcagctgagtatgtagaaactggcctggtcctggggccagcatgtgagccatcccccaccacccacaggcctcccaggaggccctgctcccgcagcagagcggccgctgtcaccgaggcaatggccagatcaggaattccaggacccccgggagggtgggacactgcggctccaccggtccctgtgtctatggaatcggtgtcagcggacatcccgttcatggtgggatatgcccgtaggtgtcgggcagatgggggagtttcaataccggctcctttagggggtctcagtttggaggaaaaaagccttatttccttgatgatggtttcattccttaagaacgcactagaatctgccccttagtagctgcctgtggtgtttctagattcgggggcaacgttggctttgtggttcgtttttattttatttaactgtgaacgcccttttactccctgcattgaggtgagacagaggacacggctctcaaggagaggaagaagttgttgggattcccaggcttcatgaggccgggctgtccctgagcctgaggcgacctgcagggctgactgatttctatccactgaggaagg

SEQ ID NO: 19776 - DNA, 1403 bp, Artificial sequence
  DNA replication origin
gaggtgtcttcgtggaggcgagtgcccaggaggtgtctgggtggaggcaggtgcccaggaggtgtctgggtgcaggcaggtgcccaggaggtgtcttcgtggaggcgagtgcccaggaggtgtctggatggaggcaggtgcccaggaggtgtctgggtggaggcaggtgcccaggaagtgccttcgtggaggcgggtgcccaggaggtctctggatggaggcgggtgcctaggaggtgtctgggtggaggcgggtgcccaggaggtgtctgggtagaggcgggtgcccaggaggcgtctgcgtgaaagggggtgcacaggacgtgtctgggtagaggcgggtgcccaggaggcgtctgggtagaggcaggtgcccaggaagcgtctgcgtgaaggggggtgcccaggaggcgtctgggtggaggcgggtgcccaggaggtgtctgggtggaggcgggtgcccaggaggcgtctgggtggaggcaggtgcccaggagggagacagggctgccgtcgtttggaggaggtgctttcagggtccctagcagagctggctcctcagtgccaggggagcaaagtctccggggaccttgcacagggcatgaaaaagtggagggtcccttggaggaggatgccagggaagcccagggagatggaatgttttggaaggagctaggagacagggaagagggaggctccctcagccacaggtagggtggtggcaggggacagttcccagccggggctgcgtggagtggggtgcggcatggaggggcgtgtgatgtggagggggctgtggcgtggaggggggtgtggcatggagaggggtgcagagtggaaggggtgcagtgtggaggggcgtggcgtggaggaggtgtggcgtggaggggcgtggcgaggaggtgtggcgtggaggggagtggtgaggaggtgtggcatggaggggtgtggcatggagtggggtgtggcatggagtggggtgtggcatggagggacacggggcgtggaggggcacggggcgtggagggggtgcggcatggagggggtgcggcgtggaggcggtgcggcatggaggggtgtgtctagagcatctgggagcaattgtctttcatgtggatccaaagtcctccttttctctcagcattttgacacagagcacgcccctgctgtcggtagccaccataccgtacagtgtttcctacctttagaggaaaattaatctgaatatttgagagaacttttggatttggttctgaatgaaaacacgctgtggggttgaagccacgtgaggcacccggtgtgattgcggaggcctggtgcactgtgtcgatacgtcgggagtcccatgtggaaaggcggcctgagctcaggaggcgccttctgaggctgtttctcatgagaaga

SEQ ID NO: 19777 - DNA, 895 bp, Artificial sequence
  DNA replication origin
gtcgggtcagtcctgcaggggtgggagggtgtgtgtggtgacactcaggaacacggtcgggccagtcctgcaggggtgggagggtgtgcatggtgacaggaacacggccgggccagtcctgcaggggtgggagggtgtgcgtggttacactcaggaacacgggccagtcctgcaggggtgggagggtgtgcgtggtgacactcagaaacacggccgggtcagtcctgctgtggtgggagggtgtgtgtggtgacactcaggaacacggtcgggccagtcctgctgcggtgggagggtgtgcgtggtgacactcagaaacacggtcgggccagtcctgcagggttgagagggtgtgtgtggtgacactcagaaacacggccgggtcagtcctgctgtggtgggagggtgtgcgtggtgacactcaggaacacggtcgggccagtcctgcaggggtgggagggtgtgcgtggtgacactcaggaacacggtcgggtcagtcctgctgcggtgggagggtgtgcgtggtgacactcaggaacacggccgggccagtcctgcaggggtgggagggtgtgcgtggtgacactcagaaacacgaccgggtcagtcctgctgcggtgggagggtgtgcgtggtgacactcaggaacatggtcgggccagtcctgcaggggtgggagggtgtgtgtggtgaccgctcagaaacacggtgggccagtcctgcaggtgtgggaggtgatgcccgcctggggcttgttttggaagagtctcagggggcaaggccatttgctgcctcccgtgcatgtgagaatgaacattttgcccccgaactgctgccagaatctcaccagtgtgcaccttggggccattttccctgacctgttctcacaaagctg

SEQ ID NO: 19778 - DNA, 945 bp, Artificial sequence
  DNA replication origin
gcgtgcgtcacacagttgtggatgtgtgtgcataaggtgtgctcgcgtacatggttgcatatgtgagcatgagtgagagcatgagtgagaacatgtgtgacgtgtgtagggctcatgcatgtggctgtgctccacggatgtgtgtgcacatgtgtgtgtgttcacgcgtggagatgtgtgcctgggtgtggatgtttgtgtgcatttttatgcagatttgccagcacagagcagttctcactgttggaagccgcaggggacttccactggcagatgtggactttgcctgtcagctgggagcaagattgggagctggaggtgcggcctcagggagcctgggtgggagctggaggatgcggcctcagggagcttgggtgggcttgggtgggagccggaggtgcggcctcagggagcttgggtgggagttggaggatgtggcctcggagcttgggtgggagctggaggatgcggcctcggagcttgggtgggagctggaggatgcggccttggagcttgggtgggagacagaggatgcggcctcagggagcttgggtgggagctggaggatgcggcctcggagcttgggtgggagctggaggatgcggcctcagggagcttgggtgggagccggaggatgcggcttcagggagcttgggtgggagctggaggatgcggcctcggagcttgggtgggagctggaggatgcggcctcagggagcttgggtgggagccggaggatgcggcttcagggagcttgggtgggagctggaggatgcggcctcggagcttgggtgggagctggaggatgtgtcctcagcttggggacacaggctttcctgaagccagaggcagtgctgaggtctgagccttgaaagtgacggagcactttggtgtccaggggaagtttttggacaggttggaggagcctccagaaggcagtggtgg

SEQ ID NO: 19779 - DNA, 1519 bp, Artificial sequence
  DNA replication origin
ggcttcctcagcccatctgctccaggaagggcttccctgggagtgttcacagacgactcaacaggaggaagaagcctgggtgagagaggtgtcctggccaggctgttgggggcaacacccttaatccacagccaggggtgctccctgtggcccccaacacccagggagaaatgcaggaggggctggttccagctgggtctggggaaggccagtgtggactgcacacaaccgctgtacccacaggtgggaggtgctggcggggccacgctgcagagcagcaggacgcggggcctggacgctgcccagcagtgactgacgtgggagtgccaggcatgtgggcttatctgaaagcatacctgctgggtggggggggaggcacacaggacaggggcgcacctgcgcctacagcgtgggagcggctgtgatagggcgaacaatcgtactcctgtgctagcctctgcaggcactgcccctccccctgcccctccccctgccccctctcctccctgcccctccctctctccctgcccctcctctctgcccctctctcctccctgcccctctctcctccctgcccctcctccctgcccctcctccctgcctgtctctcctccctgcccctcccccctgcccctctctcctccgtccctcctccctgccccccctcctccctgcccctcctccctgcccctcctctctgcccctctctcctccctgcccctcctccctgtccctctctcctccctgcccctcctccctgcccgtctctccctacccctctctcctccgtgcccctctctcctccctgcccctcctccctgcctctcctccctgcccctcctccctgcccgtctctccctacccctctctcctccgtgcccctctctcctccctgcccctctctcctccctgtaggatgcgggcagcagcccctgtgtaggctgcacggcagattgtttgctgtggccaggctgactggccctgctgacaaggcccagctttagaacctgagcaggctgggctgggtaggtagggtcgccacgggcccgagaagcagacaacaagcttaaaagcccggctatgtcgaggtcttggggcagggctgacggcacaggagagaccaacgggcctgggaggaccccagaaggcaggctgggtgggggcccacggcttcgccacagtgctcagccgccctgaaccacaagtgaacggcgacagttcacgccaactccccgagctgtgctcagaggaagcggcaggagcgcagcctcacttctccaggtgggcgtcagggtgaaagcccctcctctgactcccgcctggttaaaatattaaccaattaccacgccgctcttgtgtacacggagcaggagggtgcagcacactacagagaaaacggttctgacacacccccgtcacaagcaggacctcatcaaagctctgccttcccgtgcagcctgcaggcaccactggcaatgctggcttcagacacccgcttccaaacacaccagctgccact

SEQ ID NO: 19780 - DNA, 892 bp, Artificial sequence
  DNA replication origin
cggctaccccaagcccctggccgagctgccggggcgcccgcccatcttctggcccggcgtggtgcagggcgcgccctggagggacccgcgtctggctggcccgggtgagtggcccgcgcggggggtgcggggcgggtgggcgcggagggggaccccgccggccgctgacctccctcccttcccctcccttgcagccccggccggcggcgtcctggacaaggacgggaagaagaagcactcgcgcccgaccttctcgggccagcagatcttcgcgctggagaaaaccttcgagcagaccaagtacctggcgggcccggagcgcgcgcgtctcgcctactcgctgggcatgaccgagagccaggtgaaggtgagcgcggcggggctcgggagagcagagccgggggcccgcgtcctgcgaacggccccagcgccagccccgggccccgcggccgcctgaccgccccgtccactcccaggtctggttccagaaccgccggaccaagtggcgcaagcggcacgcggtggagatggcgtcggccaagaagaagcaggactcggacgccgagaagctgaaggtgggcggctcggacgcggaggacgacgacgaatacaaccggcccctggaccccaactcggacgacgagaagatcacgcggctgctcaagaagcacaaaccctcgaacttggcgctggtcagcccgtgcggcggcggcgcgggggacgccttgtgaggacccgcggggtgggggcgaatctatttttgcagaatccgggggcggccccgggtgggcgcgagtcgctttgtatcatcaataaattatttaacgggtccccgtcggagccgtcgctccggagcctgcgccgcgtgtttcttccgtctcgaacccggagc

SEQ ID NO: 19781 - DNA, 1045 bp, Artificial sequence
  DNA replication origin
ccgggtgtgtgcgcgctcggggctgccccggcggcttccggctccactgaggtgcagccccgcgttcacggggggttcgcttcccccgtcgactccgcactcgattcgactgggattgggattcgattgggcgcggccgccccaccggtgatcggcccccgcggagcctggcccgggaacccccagcgcccgtccggccccgagacccgccccggcctgtcctgcgccccgctccctcggaggagacacgaggaagggccctcccgggtcgggttcgggcccctcccagcaccccaaggcgacggcgcccgcgcccaaggctcgggctctgagctgagacgcgggaactgcggggccggggggggcgggcagggggagttgggggcgggggctgctgtcgccctgggatcccccactctgcgcggccgggcagaccctgggcgggccgggaggggtgcgggtcgcccgaactgaggcccaggaggcgcgcgcgggcggaacggcgggaggaagccgcgctcgggacaggctctggctcttctcacagcctggaggggcggggcagggggcgtcgctagcgctgttttatggctgaggaaacatggacctggaggcgctgcgctgcggcccgataaaccctgggtctgtctgcgccccccggtcctccctgggctgccgagggaacgcgtggggtcgcgggtggggctggcgtgtcactggctgcggagcgcgcggctctccagggctcaggggcgcgggatgaggggccagggtgagttgggggcgcagaggagccgggtaagggggggtccctctcccacgttcttgtaagccgtggaagtcttggcgcgctccgcaggtgccgcgtcctacccggctccccggcctgcgccccacgcgctttcccgccctcctcctcgcggagctgcgcgtgggtccggtggcttcacctcctacgcttcccggcgcccactccgggccccgtcccctctccggcccccgcccgcaccttttctcctgcgtcccccggtgccgccctctcgga

SEQ ID NO: 19782 - DNA, 2005 bp, Artificial sequence
  DNA replication origin
cgcgcctgctgcccctcttccccccagctccactgctcaagcttggcctgtctgcacccagcacccccgggtgtcctcctgggagggctggaccttgtctcttggcagcaccgtggggccctcagagccctccatctagttccgggcagggcagggccccttcccaacaccatcggctgcctctggtcactcccacccaggggcacagggaatctctgaacaccccttccctggggagcaggaagacttgaaacctccttggccaggccagggcggtttctactgtgcccaccagacccccaggctaagccagcagggagactggaaggcccagtgtccagcccctgccctgcctcagggtggctgctcgccctctcccctcccaccccacctggacagcctcggtcctcagggcgctgtagggagtgaggcacctgtgggatggagcctcagcgtgggtgggagagatgctgcagggcccaggtgcggagccgcgtgtgaacgggcaggcggcccgcagcgtctccgtcacgagaaggaagtggatgctcgtgacaacagaagaactcggttcgggggaagaacttggttgttcaggggaagaactcggaccattctctgtgtgtctctctctgtgctttcggtaggtgctgctccgtggctgctgcatttacaagtgacttttaaagaacagaagctggaaggaaacctggggctcaggattcagggagggggccctgcaaggtgggaggggcccggccagggcccaggctgtgcaaggaacttcaggcccagtgaagctagagggtccacaaaggctgggcaggggccaccctgaaggggtgctcagagagttcaggcaagctctccctcccctgccatccaggtcctcccagcccctgccctcttagccccccttcagggcctcctcaacccgcgggtgttccagattccacagcctggcccatatcttccagggagagtgttcgggtgcccgggcacccactgtggccccaccccagcttccatcaaagcctccctccctgtcctgggccactcggcctggggagaagcggcaccctctccccagagcctgatcctccacttcatgtggacctgtaggtgttggcaagtgggcaagaggccgccatagcctgggaagagggggcacctggacgccccacctacagctgggtaccccagaagctgccgggctctacctggacaccctccagctcaggagatggggtggggttgagtttggtctaaacagcaagacctcaggctcagctgggaaatgccacggcgccaggccccacatccagcatgtcctgtggctcagggttcctggaggcacctccacagtacctgctcctcccggtgggaagtcaggtgcgcggtcctccctctccaacccgcacccgggctctgaaaattgctctgaggcctgcagctgtcacacttgcgttcattcacccacccagcagcatgaattcagtcctggaggcgcccagaggacagagcccctgcatccatccatgtcctgagcaaggtggcgaggaggcggacatcagacacatccactaatgccttcggcagggggccagtgccaagaggggcagccgtgctgagtgggagtgtgggggctgcaccagaccgggtggccagggaggcgtccctcaagctgagaccgcgtggaggaggtgagccctgtgaagtgggggggcagagtggccggggtgggtgagcctgggggccacgaggggaccagtggagggcctggcaggcatgggatggcattaggtggaaacaggtggaggtggagactcgcgatctctgaaataaagccgctgctagcaggctggtgctcagcaggcagtgctggaagtgtgagaaggggccaggctaggccaggatgaggagtggagcctcctctgcccacctaggggcgtcaactcccacccctgggcggtccccaccccagccctcagcgctcatggccttt

SEQ ID NO: 19783 - DNA, 1092 bp, Artificial sequence
  DNA replication origin
acagaaacaccatctgtgattggagtgttgccccccagcctcctcttccagccgaggggcgctcccctcggaaacggggtcttgtctggcctgggagttggaggcaggtctggggcctgaggccttgaggcttcgggtgagtcagtgtctccagggcagggctggggaggagagccactgccctgggtcctagtctgggcacgtgccctgaggctgggtggctcgcagctctcccaccacagttgggtctggcaccccctgcctggagtcgcaggtccctgacctacagcctgaggctgcccacacagccgtcctagaggggtcacggccttcccagttatggttgtttctggaaatgcttcaggccctggagtcaacgggagcccaacaggaagacaggactagtggggaggggtgggggctggcgggattgtggggggccagcagggaggggtgggagctgacggagttgtggggggccagtggaggcagtcagggggtcagggagggcaggggggactgatggggcggggacatgggaggtggggaagatgcccggtccctctcggcctctgccatccctggctgagttgaattcaattaatctaaattaatccacttttcccagcgacgctgcgcctccctgcccagacaacagtacttgctcggcttctcccaggagcactgaacctgccctcccaggtgcaaagggctcccggcgcccggatttcacgttcccccgggagatgggggtgcccactcagggagaggacacaggaggaggtgtgcatgggccacatcccagggtcagtcccccagggaggtggatcacttgaggtcaggagttcaagaccagcctggccaacatggcgaaaccccgtctctactaaaaatacaaaagttagccaggcatggtggcacatgcctgtaatcccagctactagggaggctgaggcaggagaactgcttgaaccagggagtcggaggttgcagtgagctggtatggtgccattgcactccagcctggatgacagagtgagactccgtctcaaaaaataataataataaataaacaaacagatctgtgtcatt

SEQ ID NO: 19784 - DNA, 1305 bp, Artificial sequence
  DNA replication origin
ttttaatcaagacgactctttggacacattgcactggttgaataattctggtttaacatggctccgcgtctcctctccccgtgtctctccggcgtgcggttcgggtctgcctggccttggattattttttcttccacggcccttcctgcctcccccagcgttctccaccgctgtgacgtgacacaacagtcccgttaggagacgtgtttcgcggtgtgacccgcaggtgggccgaggcggctgggctggacggtgtgatcctgaggtgggccgaggcggctgggctggacggtgtgacccggaggtgggccgaggctggacgaggtgccccagaggtgggccgaggcggctgggctggacggtgtgatcctgaggtgggccgaggcggctgggctggacggtgtgacccggaggtgggccgaggcggctgggctggacggtgtgatcctgaggtgggccgaggctggacgaggtgccccagaggtgggccgaggcagctgggctggacggtgtggccctgaggtgggccgaggcagctggatgaggtggggactgaaatcaggccgcagtctcgtggcccgaggcctcacacgtgctgccctgatgtatgggattccagggtgggtacatctaggaggaagcctggggtcacagtggctcacaagccgtatggggatgggcggagtagggcgtgtggggctgtggagttcaagcgtgtggggatgggctgagtggggcgtgtgtggctgtggagttcattgcaggacccggcttggaaggaccagggccgtttcgtgttgggccctggttgctccggggttttgctcagtgaggtaggagaaggggcctgggaagaagttgccgtcctctgtggcgggagaaggggaggcttctggctgttcaggggagctgtagacccgttactgccatggccctcgagcacaccccgtggtgaggctctgggacagggcctgtgtggggtgtggggagtgccgggctgtggggcctccttggaagaggcaaccccaacacagacgccagtggggaagcggctccacagcttccttgccagaccctcaggccacacggccacctggacgcactgtcccacagcacaggcgggcagggggtgcccagacccagtaaacccctttggccaaggccggcgctgggattccagcccaagtgatgtggcttggtgctcataggagaggagagaagggaaggtggtgcccagtgtaggcccgcacctgagcccaggacaccgcacctgtgcccgggacaccgcacctgagcccgggacac

SEQ ID NO: 19785 - DNA, 1228 bp, Artificial sequence
  DNA replication origin
cctgggacacctcgcctgagcctggtgtattagtgtgtttttatgctgctataaaaaactgcccaagactgggtaatgtataaagaaaagaggcttaactgactcacggttctgtgtggctggggaggcctcaggaaactcacagtcacggtggcagaggggactcctctgggtggctcaagggccatctgggggagttggctggaaactggaggggcccctctccctggactgcccagccctggccagcctgtggggtgtgcagtgaggtgctgactgattgagaggcacacactccccagagccctgtttggaggtgcccgtcttccacctgggtgggccacaggctcgggacacagagcctggccttgcaatgtcacacacccccgcggcacctggccttcctggggcattgaggggcaagtgactcgggaccggctgcagggcctgggtggggccccagctttcccccagcctctggccttggggcccccagcacagggccagccaggctgaggttgtacttcgtgtctggaattggtgggttcttggtctcactgacttcaagaatgaagccgcggaccctcgcggtgagtgttacagctcttaaggcggcgtgtccggagtttgtcccttctgatgttcagatgtgttcggagtttcttcctcccggtgggttcgtggtctcgctggctcaggagtgaagctgcagatcttcgcggtgagtgttacagctcataaaggcagtgtggatccagagagtgagcagtagcaagatttattgcaaagagcgaaagaacaaagcttccacagtgtggaaggggacccgagtgggttgccactgctggctcgggcagcttgcttttattctcttatctggccccacccacgtcctgctgattggtagagcctaatggtctgttttgacagggcactgattggtgtgtttacaatccctgagctagacacaaaggttctgcacgtccccaccagattagctagatacagagtgtggacacaaatgttctccaaggccccaccagagtagctagatacagagtgtccattggtgcactcacaaccctgagctagacacagggtgttgattggtgtgtttataaacctagctagatacagagtgccaattggtgtatttacaatccctgagctagacataaaggttctccacgtccccaccagactcaggagcccagctggcttcacacgg

SEQ ID NO: 19786 - DNA, 1419 bp, Artificial sequence
  DNA replication origin
cactcctcagcccttgggtggtcgatgggactgggcgccctggagcagggggcggagctcgtcggggaggctccggccgcacaggagcccacggagcgggtgggaggctcaggcatggcgggctgcaggttccgagccctgcccctcgggaaggcagctaaggcccagcgagaaatcgagtgcagcgccggtgggtgggcactgctgggggacccagtacaccctccgcagctgctggcccgggtgctaagcccctcattgcacagggccggccggctgctcggagtgcggggcccgccaagcccacgcccacccggaaatccagctggcccgcaagcgccacgcgcagccccggttcccgctggcgcctctccctccacacctccctacaagctgagggagtcggctctggccttggccagcccagaaaggggctcccacagtgcagcggtgggctgaagggctcctccagtgccgccaaagtgggagcccaggcagagcaggcgccgagagcgagcgagggctgtgaggactgccagcacgctgtcacctctcattcggacatcagagaccctggacttggggtagctgtgcaggccccacgtggcaggtggctggggctctccgaggtgggggcggggacatctgagatgggggtggggacgtctctccaccatggggatgcagacacccctgccgggttcttctttccacattcatggctctgctatggctgggcccttcagcctccccagggaagctgtgtaaccagaacagaacccgtgtttcctcttgctgggccatcccctctgcagccttgctcacgtgggctggtcctctgtccacagtcctcctcgttcctctccccaccgcctggcctcttgcctgggttggaattcctcgatgagcaggacagagcagccttgggaaccacacctgtcaaccctggaagtgattatgggaccatagcagcctggggcagcaggcccaggccccaccctcgaagcccatgcagacctgctctcaaggactctgccttggagggggaaacacgactctgggacccctgcccccatgcgtggtccatatggtcctatggtcccaccgcgtccacgggatcaggttctctggtgagaactaaaccaggggcaatgctgttgctcgctcatgtttatggagtccaaggcgagctagtcaggacaggaagcttctgaccccaagagcactgaggacccaggctcctcgcaactgtggctgtgccatcctcaacatgtagatttcacctcatagcacattatggctgccaagctccagccatcaaattccatcccatcctgcagacaggaaggaaaaagagcaagcctttccttttatggaggtgtcttgaaccagaacttagtcaaatggccacacgtgttg

SEQ ID NO: 19787 - DNA, 1463 bp, Artificial sequence
  DNA replication origin
cgcgatgggcgggacatctgggaagcaagcactttcccaggttcggatctgggctcccaggagccgtttgcagtgtggcaggtctgggggtccagcggggagccactgccccctacccccggctccctgggtctgccctgccagtcctgccacatacagcatgcaatgctgagacagacccagctccttgaatcctcacagagactgggcgaggggcactgttaccctgctttacagatggcgacctggggcccccagggtcactgatagcacatggtccagcagcaggggctgcctcttcaccagcagcactgcagcccctccagagaccactcgcagactctgccccccagatgcccttggggttccgtggtccagaggtgtccagaagcagccagcagggaacagagcaatcagggagagagcaccacgggtgggagggatcgttccacgtcacaggctccacgccaggggcggggctgcaggggcaggtgtgtgcaggggcggggctgcaggggcaggtgtgtgcaggggcggggctgcaggggcaggtgtgtgcaggggcggggctgcaggggcaggtgtgtgcaggggcggggctgcaggggcaggtgtgtgcaggggcggggctgcaggggcaggtgtgtgcaggggcggggctgcaggggcaggtgtgtgcagggacaggtgtgtgcaggggcaggtgtgtgcagagggtggcactgcaggggcaggtgtgtgcagggacaggtgtgtgcagaggtggggctgcaggggcaggtgtgtgcagggacaggtgtgtgcagaggtggggctgcaggggcaggtgtgtgcaggggcaggtgtgtgcagagggtggcactgcaggggcaggtgtgtgcaggggtggggctgcaggggcagggctgggatcctgtatggaaggagggaaccctggtctggtcactgtctcccatgcctggagtactgggggtgccttgacctccaggtgctgggccattgggaaagcccctcctagcgtttcccgcagcgagccccgcccgagtaggggtgttcattccagcgtagaagtccatgctcaccgtgggtccccttgactaggctccgccgtgacccctgtgatcagagcacagaggagggaggcgtgggcattaggaacatgaaagaaagttcagtttaatgcacaaatgggacaggcgtggaccacgcaggatgtggcctgctttaagaacgcacggtggggtctggtacaggtgcatgggcactgttgaccagcgctctcctctctctgcagccaggcccagtgggagcaggccctgggcagctgcagcggtttcttcttctatggaatggagagcttcctgtcccatatattagtggagagattggtcgccatgaacttgcaaggtgagaggtgtcctctcagcaccccctcccccgcgggcacaggacaaacccgcctg

SEQ ID NO: 19788 - DNA, 5419 bp, Artificial sequence
  DNA replication origin
acgtaatgcaaaagtgatctatggagtgggagaaaatgaatgtagaatgtatatttgataagggatcaatagcctaagtatataaggaactcctataatacaatagtaaaaaaccaaacaacccaatcgaagaacgggccaaggacctgaagggacatttctctaaagaagacataaaaatggctaacaggttgatgaaaaggtgacatctaaaggtgacgacggagcaggtctcagccttagcaagatgacatcctgtcgccgttggcgacaacatggatgaaccttgaggacatcacgcaaagtgaaaaaagccaggcaccgaaggccagaggctgcatgattccatatacatgaggaatctaagagtgcagctcacagaagcagagtgagtggtggctgacgggggctgggggagggagtgagaggtgctggcccagggtgcaaagccctggtggtgcaggatgaggaagctccgctgacccgcagggcaaagggtacacagcgctgatgtgtgctgtgtgagcactgatgtgtgctgtgagtgctgatgtgtgctgagtgctgatgtgtgctgtgagtgctgatgtgtgctgtgtgtgcactgatgtgtgctgtgtgtgctgatgtgtgctgtgtgtgcgctgatgtgtgctgtgtgagcactgatgtgtgctgtgtgtgctgatgtgtgctgagtgctgatgtgtgctgtgagtgctgatgtgtgctgtgtgtgcactgatgtgtgctgtgtgtgctgatgtgtgctgtgtgtgcgctgatgtgtgctgtgtgtgcactgatgtgtgctgtgtgtgctgatgtgtgctgtgtgtgcgctgatgcgtgctgtgtgagcactgatgtgtgctgtgtgtgctgatgtgtgctgagtgctgatgtgtgctgtgtgtgcgctgatgtgtgctgtgtgtgctgatgtgtgctgtgtgtgtgctgatgtgtgctgtgtgtgtgctgatgtgtgctgtgtgtgcgctgatgtgtgctgtgtgtgctgatgtgtgctgtgtgtgtgctgatgtgtgctgtgtgtgtgctgatgtgtgctgtgtgtgctgtgtgctgtgtgtgtgctgatgtgtgctgtgtgtgctgtgtgctgtgagtgctgatgtgtgctgtgtgtgctgatgtgtgctttgtgtgtgctgatgtgtgctgtgtgtgtgctgatgtgtgctgtgtgagtgctgatgtgtgctgtctgtgcgctgatgtgtgctgtgtgtgctgtgtgagtgctgatgtgtgctgtgtgctgtgtgtgtgctgatgtgtgctgtgtgtgtgctgtgtgagcgctgatgtgtgctgtgtgagtgctgatgtgtgctgtgtgtgctgtgtgttgtgtgtgctgtgtgagtgctgatgtgtgctgtgtgctgatgtgtgctgtgtgtgctgtgtgctgtgtgtgcactgatgtgtgctgtgtgtgtgctgtgtgctgtgtgagcgctgatgtgtgctgtgtgagtgctgatgtgtgctgtgtgtgctgatgtgtgttgtgtgtgctgtgtgagtgctgatgtgtgctgtgtgcgctgtgtgctgtgtgctgatgtgtgctgatgtgtgctgtgtgctgacgtgtgctgtgtgtgcgctgatgtgtgctgtgtgtgtgctgtgtgctgtgtgtgcgctgatgtgtgctgtgtgtgtgctgtgtgctgtgtgagtgctgatgtgtgctgtgtgtgctgtgtgtgctgatgtgtgctgtgtgctgatgtgtgctgacgtgtgctgtgtgctgacgtgtgctgtgtgtgcgctgatgtgtgctgtgtgtgtgctgtgtgctgtgtgagtgctgatgtgtgctgtgtgttgtgtgagtgctgatgtgtgctgtctgtgcgctgtgtgctgtgtgagcgctgatgtgtgctgtgtgtgctgtgtgctgtgtgtgcagtgatgtgtgttgtgtgagtgctgatgtgtgctgtgtgtgcgctgatgtgtgctgtgtgtgcgcttgtgtgtgctgtgtgtgcgctgatgtgtgctgtgtgtgcgcttgtgtgtgctgtgtgtgctgatgtgtgctgtgtgagtgctgatgtgtgctgatgtgtgctgtgtgtgctgatgtgtgctgtgtgtgcagtgatgtgtgctgtgtgagtgctgatgtgtgctgtgtgtgcacttgtgtgtgctgtgtgtgtgctgatgtgtgctgtgtgctgtgtgtgctgatgtgtgctgatgtgtgcactgtgtgctgtgtgtgtgctgatgtgtgctgtgtgcggtgatgtgtgctgtgtgtgcgctgatgtgtgctgtgtgtgtgctgtgtgagtgctggtgtgctgatgtgtgcactgtgtgctgtgtgtgtggtgatgtgtgctgtgtgtgtggtgatgtgtgctgtgtgtgcagtgatgtgtgctgtgtgtgtgctgatgtgtgctgatgtgtgcactgtatgctgtgtgtgtggtgatgtgtgctgtgtgtgcagtgatgtgtgctgtgtgagtgctgatgtgtgctgtgtgtgctgtgtgtgctgatgtgtgctgtgtgctgatgtgtgctgacgtgtgctgtgtgctgacgtgtgctgtgtgtgcgctgatgtgtgctgtgtgtgtgctgtgtgctgtgtgagtgctgatgtgtgctgtgtgttgtgtgagtgctgatgtgtgctgtctgtgcgctgatgtgtgctgtgtgtgcgcttgtgtgtgctgtgtgtgctgatgtgtgctgtgtgagtgctgatgtgtgctgatgtgtgctgtgtgtgcagtgatgtgtgctgtgtgagtgctgatgtgtgctgtgtgtgcacttgtgtgtgctgtgtgtgtgctgatgtgtgctgtgtgctgtgtgtgctgatgtgtgctgatgtgtgcactgtgtgctgtgtgcggtgatgtgtgctgtgtgtgcgctgatgtgtgctgatgtgtgctgtgtgagtgctgatgtgtgctgatgtgtgcactgtgtgctgtgtgtgtggtgatgtgtgctgtgtgtgcagtgatgtgtgctgtgtgtgtgctgatgtgtgctgtgtgtgctgtgtgctgtgtgtgcgctgatgtgtgctgtgtgctgtgagtgctgatgtgtgctgtgtgtgctgatgtgtgctttgtatgtgctgatgtgtgctgtgtgtgtgctgatgtgtgctctgtgtgctgatgtgtgctgtgtgagtgatgtgtgctgtctgtgcgctgtgtgctgatgtgtgctgtgtgtgtgctgatgtgtgctgtgtgtgtgctgtgtgctgtgtgagcgctgatgtgtgctgtgtgagtgctgatgtgtgctgtgtgtgctgtgtgttgtgtgtgctgtgtgagtgctgatgtgtgcggtgtgctgatgtgtgctgtgtgtgctgagtgctgatgtgtgctgtgtgctgtgtgtgcactgatgtgtgctgtgtgtgtgctgtgtgctgtgtgagtgctgatgtgtgctgtgtgtgctgatgtgtgttgtgtgtgctgtgtgagtgctgatgtgtgctgtgtgctgatgtgtgctgtgtgctgatgtgtgctgtgtgtgctgtgtgcgctgtgtgctgtgtgctgatgtgtgctgatgtgtgctgtgtgctgacgtgtgctgtgtgtgcgctgatgtgtgctgtgtgtgtgctgtgtgctgtgtgagtgctgatgtgtgctgtgtgtgctgtgtgcgctgatgtgtgctgtgtgctgatgtgtgctgatgtgtgctgtgtgctgacgtgtgctgtgtgctgatgtgtgctgtgtgcgctgatgtgtgctgtgtgtgtgctgtgtgctgtgtgtgcactgatgtgtgctgtgtgtgtgctgtgtgctgtgtgagtgctgatgtgtgctgtatgttgtgtgagtgctgatgtgtgctgtctgtgcgctgatgtgcgctgtctgtgcgctgtgtgctgtgtgagcgctgatgtgtgtgtgtgctgatgtgtgctgtgtgtgcagtgatgtgtgctgtgtgagtgctaatgtgtgctgtgtgtgctgcttgtttgtgctgtgtgtgtgctgtgtgctgtgtgagtgctgatgtgtgctgatgtgtgctgtgtgtgctgatgtgtgctgatgtgtgcactgtgtgctgtgtgtgcggtgatgtgtgctgtgtgcgctgatgtgtgctgtgtgtgtgctgatgtgtgctgtgtgtgtgctgtgtgctgtgtgagcgctgatgtgtgctgtgtgagtgctgatgtgtgctgtgtgtgctgtgtgttgtgtgtgctgtgtgagtgctgatgtgtgctgtgtgctgatgtgtgctgtgtgtgctgagtgctgatgtgtgctgtgtgctgtgtgtgcactgatgtgtgctgtgtgtgtgctgtgtgctgtgtgagcgctgatgtgtgctgtgtgagtgctgatgtgtgctgtgtgtgctgatgtgtgttttgtgtgctgtgtgagtgctgatgtgtgctgtgtgctgatgtgtgctgtgtgctgatgtgtgctgtgtgtgctgtgtgcgctgtgtgctgtgtgctgatgtgtgctgatgtgtgctgtgtgctgacgtgtgctgtgtgtgcgctgatgtgtgctgtgtgtgtgctgtgtgctgtgtgagtgctgatgtgtgctgtgtgtgctgtgtgcgctgatgtgtgctgtgtgctgatgtgtgctgatgtgtgctgtgtgctgacgtgtgctgtgtgctgatgtgtgctgtgtgtgcgctgatgtgtgctgtgtgtgtactgatgtgtgctgtgtgtgtgctgtgtgctgtgtgagtgctgatgtgtgctgtatgttgtgtgagtgctgatgtgtgctgtctgtgcgctgatgtgtgctgtctgtgcgctgtgtgctgtgtgagcgctgatgtgtgtgtgtgctgatgtgtgctgtgtgtgcagtgatgtgtgctgtgtgagtgctaatgtgtgctgtgtgtgctgcttgtgtgtgctgtgtgtgtgctgatgtgtgctgtgtgagtgctgatgtgtgctgatgtgtgctgtgtgtgctgatgtgtgctgatgtgtgcactgtgtgctgtgtgtgtggtgatgtgtgctgtgtgtgcgctgatgtgtgctgtgtgtgcgctgatgtgtgctgtgtgagtgctgatgtgtgctgatgtgtgcactgtgtgctgtgtgtgtggtgatgtgtgctgtgtgtgcagtgatgtgtgctgtgtgtgtgctgtgtgctgtgtgcgctgtgtgctgtgtgtgtgccctgatgtgtgctgtgtgtgtgccctgatgtgtgctgtgtgagtgctgatgtgtgctgtgtgtgtgctgatgtgtgctgtgtgtactgatgtgtgccgtgtgcactgatgtgtgctgtgtgtgtccaccgcgctg

SEQ ID NO: 19789 - DNA, 885 bp, Artificial sequence
  DNA replication origin
gaaacccaagttcattactgcagccaaaggaaaggtgcaggcggtgggaggtgagcagggctgcaggggagggggagggggagcagggcaggcggagcatgggcgagagtggggaggtgagcagggctgtgtcgggagggggaggtgagaggtggaggggagggggagcggggcgagagggggaggggagcagggcgagaaggggaggggagcggggacgggaagtggggaggggagtggggggaggggggagcaggggcaggagcagggggaggggagcggaggggacgggagcatggggaagggggagcaggggcgggaggggagtggtttcgggaggggagcgggggcgggagcagagctgatacccactgtgcctcaggttccctgcacacgggccctttccttccagaagctgaaggcccaccagggagccgctggggtcccaggggtgtggcctctcccagccctccacccacagggatggaggggtctgtagagcctgtgacattctggaaacaggtgtagacggggcgtgtgcttccctggggcccaggaggcccatccgctgcctgcgcaatgatgtggcagcgtctccacagcatgggaccagggggaccccacatgaaggaagggacttccatccatgcagcctttcctgtgggacagcagcccttttcccagtgctcaccatgcacggtccagctgccatcctcagccctgggcagcgacagagggtgtgtccatgtccccacaggctcctgcaaggtgatgcgtctggccataagtcccactgccttctcccacctgctggcctgtgcccagcagttccggaagcagacccaggcccaggtgtacagtgaggacatggccctgaacataggc

SEQ ID NO: 19790 - DNA, 1351 bp, Artificial sequence
  DNA replication origin
ctgttgtggtccccttgtggggacgagggccagtggccggcaatgtcccatctctttgcctggccacacaggtgtgcccactgcaaaaatccatcgagcttttcacgcatgggcttttacgccactttctgtatattctactttgatagtaagttttataaaaactgctttgtttgtgcaaacttgaagctatgactcagaaccagaagcctcacagctcgatggagggctgcccatgcggagaggcccaagcctccaggagccctctggctggccctcaggggctgtggtggccgcctgccgctggtggtgaggagcctgaactgcgtgccgggtctggtattagacagactcatagtccacgggagcggacgggccggagctgctgcctgcaccacctgaccacagccgactggcatcccaggggcctaaggccaggaagagagggccttccccaggggagcatgggggcacggctctgagtctgcactgtgtacacgtgtgtccgtgcatgtctgcgtgagtgtgtgcgtctgtgtacacgtgcgtgtctgtgtccgtgcatgtctgcgtgtctgggtccgtgtatgtgttcatctgtgtgtgtccgtgcatgtctgtgtgtgtgcatctgtgtacatgtgcgtgtgtgtccgtgcatgtctgtgtgtgtgcatctgtgtacgtgtgcatgtgtgtccatgcatgtctgtgtgcatctgtgtacgtgtgcgtgtgtgtccgtgcgcatctgtgtacgtgtgcatgtgtgtgtccgtgcatgtctgtgtgtgtgcatctgtgtacgtgtgcatgtgtgtccgtgcatgtctgtgtgcatctgtgtacgtgtgcgtgtgtgtccgtgcatgtctgtgtacgtgtgcgtgtgtccgtgcgcatctgtgtacgtgtgcatgtgtgtgtccgtgcatgtctgtgtgtgcgcatctgtgtacgtgtgcgtgtgtctgtgcatgtctgtgtgcgtctgtgtgcatctgtgtacgtgtgcatgtgtgtgtctgtgcatgtccgcgtgagcacgtctatgcacgggtgggtgtctgtgtccgtgcatgtctgtgtctgggtccatgtacacgtgcatctgtgtgtgtccgtgcctgtctgcgtgagtgcgtgtctgtgcacgcgtgtgtgtctgcatgcatccatgtgtctgtacatgtatgtctccatgtgtggtgtggaggacacagaaggatggagggaaaggcaccactcacagaggcggcgctggagaattttccatttgttattttgggtttggtgaacatgcactttgcgtcatgcaaatcaggtttctaaacattaacaaccggagaga

SEQ ID NO: 19791 - DNA, 1017 bp, Artificial sequence
  DNA replication origin
actgtatattttattagtgcttaaaatgatgttttaaaatagctaacatgtaaagacatcctcgatacgtcttagaggtttaagaagctggaataatgcagtatgtacagtgtattatggttataaaaattaagtgtgcgcttgaaggagatttgctgaagcaattccacagcatcagctttacccagcgggctgggtctgatcagctaactgaacttctgcaaggacaatgtacgacatccacagtaacagacacggctcaggtcagaccttgtggtgggttatgcttccctcgcgcaggcttctacacgcccgcactgggcccgccgtgtcgagacgcttgcgtgtggacaagtccgggggccataggttgggggcagggcagtgggcagggccagggaggctttgctgggggcggccccaggttgggggcagggaggtgggcggggccatggaggctttgctgggggtggccccaggttggaggcagggcggtgggcggggccagggaggctttgctgggggtggccccaggttggaggcagggcggtgggcggggccagggaggctttgctgggggcgaccccaggtttggggcagggctgtgggcggggccagggaggctttgccagggtgggagtggctggcagctgctgtggtggggacggctggcatcagggctgtgctggccctgccctcggtgggagcagcccctgagatgccgtctgcggccgcgctacagagccatgcagggcagggccacctcctgaggtcagggccctgcaagcagctcagggctgtgctcgggatgtgcacgtgtgacctgggcctgggcatgtgtgtgcaatgcgcgtgtgcctgtggctggtgggggtgggtggtgctgtatgtctgtgcgtgtctgccaagggctggaggtgcaaggcccaatgtggatgccctcgaggaaggtgtgggcagccgcagggctggggccagaaggaggccctgtcaggggcaacgggggctcccccgacg

SEQ ID NO: 19792 - DNA, 772 bp, Artificial sequence
  DNA replication origin
aggcagggcggtgggcggggccagggaggctttgctgggggcgaccccaggtttggggcagggctgtgggcggggccagggaggctttgccagggtgggagtggctggcagctgctgtggtggggacggctggcatcagggctgtgctggccctgccctcggtgggagcagcccctgagatgccgtctgcggccgcgctacagagccatgcagggcagggccacctcctgaggtcagggccctgcaagcagctcagggctgtgctcgggatgtgcacgtgtgacctgggcctgggcatgtgtgtgcaatgcgcgtgtgcctgtggctggtgggggtgggtggtgctgtatgtctgtgcgtgtctgccaagggctggaggtgcaaggcccaatgtggatgccctcgaggaaggtgtgggcagccgcagggctggggccagaaggaggccctgtcaggggcaacgggggctcccccgacggggagggctgggcatgtgatcagaacgtgtgggtgaggcggcagccgagagcttcccaggggagggtcctgtggaccccgcgggggtgcagccggggtgagccaggcccagaaggcaggatggcgctgggcgtgttgtgtgtaagagaagcagtgactcccgtgcaggggtcgtggaggcagccttacctcttgatcttcgcacgctctagttttacgtcaacacaattctctttgcagccacagtcgataaactttctctcaatttccaacaggccatcatccatctctttca

SEQ ID NO: 19793 - DNA, 1149 bp, Artificial sequence
  DNA replication origin
gcatttagatgcccaggacgagggaggggccccagccactagggaggcatgccccagttgtgcccctgcccgacacaggatccacctggacgccacagcctgcatgcacctgggcatggctgtgaccgccagacggcgtaggcagggcctgggcccatagcagcctcgtgggcagtcaggtggcctgagggtaggcaggtgggcgactgggctctgtggaagggcattcctggcctctggaccaagcctggcagggggctgcaggcctctgaggagggaagagggggaggcccttcgtggctgggcccagagagaagggctggcaagggtccaacggggccgggcccctgcggggcttgttgagggcagctacagtgggccggaggccggcgacagggcgggcaggggcttccacatggagaggaggagggtgcggaggtgggacagagcttggccgggggtgaggagcgcccagaaggcagggagaggacagggtgggtggggcggggtggggggtgcgtgaggctgatgccagggtttccagtgccgacactgagtgggaggggcagagccctgtcctgaggagtgggcagtacaacaatagtcacaacccccaaggcagatgtttccagcctggaggcctctgaggtcggcgggggtctgagtgctgagtgctgaggctacagtgggagagcccaggggaggtcagacccccgagagacaaggccactgtgtgggtgggcctgagaggggaggggtgccaccagcaggacggagagagccccgcggaggagagaccagggtggaagggcagagcgcactcccatcgccggcctcggggagcaggttcaggagaggctggagggggacggggcggccgggctgcactggctgagggtgaggaggggcgggaggggagggcagcacatggaggcaggctttctgtggtgtggatgtggctgagaagccagggtgagctgagggcaaagttgaggacgggaggtaggaggccttcaggcaagagggcgggaaagatcaaggaaacaaacaacttcctgtcagaagcgcctgctgtgaaacaaagtccctgcaaaacagcggctgcaggaaggagggtggcgaacccacgttcgcgggagtccagcaccc

SEQ ID NO: 19794 - DNA, 2029 bp, Artificial sequence
  DNA replication origin
gctgacagcccttggacccttcacctcggcccctcctcctgggactggccctgcaagcctcagcaccggaagccccagctgcagcctcctctcctcaccctgggcgcctgcactcccccagcagggatggcagccccaggaaaaagccagatggatggaggcccacgggtgcttttctctgtgcagagtgtagttgccagtttttgccagcactgactgccctccaaactcacctcagacacgtggtgacatcttctctccagattttagagttgctttcactgggagggtgaggcagagctgcagaaccagacagcctgtcgatgttttgaagaaaaactccagaaaaagagagggtcctagaatggtataaaagttcagtgatgcccatcaaagccttgagaggttcagactttatctctggcactgagggcaggtgtgtgcaggactctggcactgaggacaggtatgtgcaggtctcaggcactgagggcaggtgtgtgcaggtctcaggcactgagggcaggtgtgtgcaggtctcaggcagggggacaggtgtgtgcaggtctcaggcactgggaacaggtgtgtgcaggtctcaggcactggggacaggtgtgtgcaggtctcaagcagggggacaggtgtgttcaggtctcaggcagggggagaggagtgtgcaggtctcaggcactgagggcaggtgtgtgcaggtctcaggcagggggacaggtgtgtgcaggtctcgggcactggggacaggtgtgtgcaggtctcaggcagggggacaggtgtgtgcaagtctcgggcactgagggcaggtgtgtgcaggtctcaggcagggggacagatgtttgcaggtctcaggcactgagggcaggtgtgtgcaggtctcaggcaggggggcaggtgtgtgtaggtctcaggcatggggacagatgtgtgcaggtctcaggcagggggacaggtgtgtgcaggtctcaggcactggggacaggtgtgtgcatgtctcaggcactggggacaggtgtgtgcaggtctcaggcactggggacaggtgtgtgcaggtctcaggcactggggacaggtgtgtgcaggtctcaggcaggggaacaggtgtgtacaggtctcaggcagggggacaggtgtgtgcaggtctcagacactggggacgggtgtgtgcaggtgtcagggggacaggtgtgtgcaggtctcaggcgggggacatgtgtgtgcaggtctcaggcactggggacaggtgtgtgcaggtctcaggcagggggacaggtgtgtggaggtctcatacaaagggagaggtgtttgcaggtctcagacaccggggacaggtgtgtgcaggtctcaggcagggggacaggtgtgtgcaggtctctaatagcaggaacaggtgtgttcaggtctcaggcactggggacaggtgtatgaaggtctcaggcagagggacaggtgtgtgcaggtctctgatcgcagggagaggtgtgtgcatgtctcaggcactggggacaggtgtgtgcaggtctcagggggacaggtgtgtgcaggtctctgatagcagggacaggtgtgtgctggtctcaggcagggggacaggtgcgtgcaggtctcaggcagggggacaggtgtgtgcaggtctcaggcactgagaacaggtgtgtgcagggctcaggaagggggacaggtgagtgcaggtctcaggcagggggacagatgtgtgcatgcaggtctcaggcactgagaacaggtgtgtgcacgtctcaggaagagggacaagtgtatgcacgtctctgatagcagggacaggtttgtgcatgtctcaggcagtgaggagaggtgtatgcaggtctttgatagcagggacaggtgtgtgcaggtctcaggcattggggacaggtgtgtgcaggtctctgatagcagagacgggtgtgtgcacaccagggtcaaaagggagcttgtccaaggaagggactgaggatgctgtggacagctatggaggggacatacatgggtgcag

SEQ ID NO: 19795 - DNA, 778 bp, Artificial sequence
  DNA replication origin
tcgaggtctctaattaagaacacatgagaataacattgagcaattctcctagaagagtcacaaagaatggcagcgtgggcgcccacagccccgggtctggcagtggttgaggctggtggggggttagcgtggagcattctgaagacgggataggggggcctccctgcctttcctgctctgcccacggctgggcggtggccctcttgatcctgagatgccctatgggggctccgggcaaactcatcctcagaagaaaggcctgccatgcctggcgctgccctgctggggtgtagcctgcgggaggcctagacagacgcacggggaggcccccgacagctgctcctggtgggctttacagggagaggtggtaggaggagcaggacaaggaggggggtgggagtgggaagaaggctctggaagccccgtcagcgggcggttcaggagctgtcgggccccagctaacagaggcgcctgccgctgccttggtgtggcgagccaggcagaggcagttttgggtggtggtctgcaagggtgccagggcgggtgtcagggaggaccggctgatctggagggagccacgagcccctcccttggggagtgctgggaatgtggagggtgcaggaatgaagaggggagtcttttgttttgggggagtctcttgtttttatgctgatgggaaccattcaggagagaggaagaatctggatgtcgcaggaaattgctcacatctcaaaggtctttaggaaatgctgggaaagactctgacatctttacaacg

SEQ ID NO: 19796 - DNA, 1994 bp, Artificial sequence
  DNA replication origin
ccatgtccctgctggaaaggaggcctctgcagggtaggaaaggtgtttgccctgtcctgcgtccagatgcagagcccagtccaaggcctggcctgtgcaaacttggccatcatcgctacagaattgtatgaggctgccctaacctgacccttgcagagcagagcctcagccctgagagccagggttagcctgcaccgcaccctccgcagccctgcgagccggggttagcctgcaccgcaccctccgcagccctgcgagccggggttagcctgcaccacaccctcccctccacaggtgctgctggggccacggccacactcttctccagcagggtggacctcgcactggcaccacaccacgtgccatgcacagatgtcgccgccacttcatttctgctgtcaaatatctgtggctctctgagcgctggcccatgccacttattcagcccacgaatctgctgggggttccctctgtgctcggcactcacactgcatcagctgtcacaagcaggtccccatggggtgtgagtggtgcatgtgggatgtggggtgtgtgtggtctgtgtgggatgtggggtatgtgtggtgtgtgtgggatgtaaggggtgtgtggtgtgtgtgggatgtggggggtgtgtggtgcgtgtgggatgtggggtgtgagtggtgcgtgtgggatgtggggtgtgtgtggtctgtatgggatgtggggtgtgagtggtgtgtgtgggatgtggggtgtgagtggtgtgtgtgggatgtggggtgtgagtgggatgtggggtatgagtggtgtgtgtgggatgtggggtgtgagtgggatgtggagtgtgtgagttgtgtgtgggggtattgggtgtgaatggtgtgtatgagatgtgggttacaggtgtgaaggtgtggcctgtggggtgtagtataggctgtgtgggggtgggatacgtggggtgtgtcttggtcacagctgtgggctgttaagttgggtgtgtccatgggtctaggtgcaaggtgtgggtttgttgtggatgtcgggtgtaagtccagccaccggaggatggagctgcaacatctcgagggggaaggcaagaagaaggatggtgggaaaagcaagcgtttggttttgggtaagatgctggccccagggcggggccaggcaggcagcaggattcacaggtctagcgggtggggggtctgggctagagaattgcttgtgggtaaaatgggcggcagcggtgcttagctcaggacgtgcagtgagatcagatggccaaggtcctgcccttagcccggggcctcctctgtcatgaagaggtgggaaggggaggaggacgaggaaccagtgaggtggtggggcttgggagccacgtgaaggatgcccatggatggggaaggaggggagcagctgtggaggccgatggtggctcccacaaaagctgtgtacgcgggggagggccttggccctgatgggaggttcaagggagagcaggtcatcttctcaacagaagtgcggggccagctggcatccacaggctgaggagtgccggggaccctgcctcacactgtataactcattaacataacagctacaaccataaaactcagaagaaaacaggggaaccaaccttcaagaccttgggttatgcaacagtttcgcagatataatgccagaaacacaagcaacaaaacaagacacagacaactagaatttcatcacaatttaaaacgtgtttgtgccacaaatcatggcatccagaaagtggagacgtggctgaaaaagcagctcacagaacgagaaagggtttgtagatgaggctcctgctaaagaacctgcatccacgatacaccatgagctcctctaaagcaacgaaaaccaaccaaccagattaaaaatgggcaaaggactgcaatgaacacttctccaacaacctacaaatggcccataagcacatgggaatatgcaccccatcatcagtggctgggaaaatacaggcaaac

SEQ ID NO: 19797 - DNA, 1504 bp, Artificial sequence
  DNA replication origin
gagagggagaggggagagggagagaagaggagagagagaggaggggagaggagagagagaagaggggagaggagagaagaggggagaggagagagagaagaggggagaggagagagagaggagcggagagagagaggagcggagagagagaggtgaaagaggagagaggagaggagagagaagaagggagaggagagaagaggagagaggagaggagagagaagaagggagaggagagaaggggagaggagaggagagagaagaagggagaggagagaagaggggagaggagagaagaggggagaggagaggagagagaagaagggagaggagagaagaggggagaggagagagagaagaggggagaggagagagagaggagcggagagagagaggagaggagagagagaggagaggagagagagaggtgaaagaggagagaggagaggagagagaagaagggagaggagagaagaggagagaggagaggagagaagaagggagaggagagaagaggggagaggagaggagagagaagaagggagaggagagaagaggggagaggagagaggagaggagagagagaggagaggaaataggcgagaggggagagaggagaggagagagagaagaggggagaggagagagaagaggggagaggaaagaagaggggaggagagaggagaggagagagagaagcgagagaggagagagagaagaggggagaggaaagaagaggggaggagaggagaggagagagagaagcgagagaggagagaggggagagaagaggggagaggaaagaagaggggaggagagaggagaggagagagagaagcgagagaggagagagaagaggggagaggagagagagaagaggggagaggaaagaagaggagagaggagagagagaagaggggagaggaaagaagagagaggagagagagaagtgagagaggacagaggagaggagagagagaggtgaaagaggagagaggagaggagagagagaagtgagagaggagaggagagaggccagagagaagatgagaggagaaagaagagagaagagagcagagagagaggcgagagagagagaagagaaaagagagaagacagatccttcactgacctctgaaagagctgggagggtgtgggaattaccgtcaggggaagggtgtgcaggctgggctgggcagcgcccatgacggggaggggacgcgtcagcattctagtcgccatggctgtgttgggtcgggggcagcaacaaggcacagacccgccactcagcaccccttcccgaggtggggcctccatggccttggtttgatgttttggatctcccggggctcttggaatccttgaggtaaaaggactcttggccggaaggtggcagagtgggctgggttctgtgctcactggggatgtgtgagggatgcggccctgtgttcaccccgtctcttcagggcccttcaagttcatctgcagctcgcccagacactga

SEQ ID NO: 19798 - DNA, 3399 bp, Artificial sequence
  DNA replication origin
ttacatgaaccttgtccagggccacacacccctgagtgcagagtgggcactgtccccctggtcgtggctgccgcgaagtctggcctctaggctgtgctcacagataaatcgcatttttctacttccacaaaaaacgtggacacacactcctgcaaaaacaaacacacaaaaacgcatactgacttcagaacaatagaaccatattagaataccaattcatgtttatagaaaaaaaattgtctgctaaaaaaaattatccctgttaagagtcctaaggtgtatttgggaaatctttaaatgctgtggaatagaaaagtggaacctaccttgagcattagagtctatttagagaagcaaagttgatttaaaataataaacaaaagtgtggccatgtgtaattactaaggtgagtactaaccccagcagtgtgtgtggtttgctggtcctgcaggcatgagcccgacgcacacggcaagtccgtccactgagaggctaggctgcagcagaggaagggttaatcctagggttgctgagcaggagatggggatacagcctcagacccacctccctgaggagtttggggataggggtctcgagggttttggagaggacggaagtgtggaagagcgcagggtcttgggaaggcattcctgggccaatccctacccgctcctctgggggggactccgcactggttgctggcattcagggtctgaaaaatatcctaagtgatccttcaaccaaagccttagggttctgacgtcagaggcccatcataggagtgacgggggtccaagtgacttttagcagcaaggatgtgtccagggtgcagcctggttactgctcagtcataactactttctgtccacaacccggcatgtgattcttgtcagccctgtggggtgtttcacgaggacagagatgtggatcagggcactggggaggcagaaggcagcccagaccccttcagtacgtggctcgggcagaggaggctgtggagggtgttttgtgcctctgggcagcccagaccccttcagaatgtgacccgggcagaggaggctgtggaggggggttttgtgcctctgggcagaacctggaagccacgctatattttactcctttcaccaaaataaacatcagacaggtcgaataagtcgttttaaaaattcaaattctagaaaaaaatcagaaagtagaattgagcatagcagagattttgtggaaaggagcacttttcacagatacgaaaatgtacgctcctgaatcctgataagtgcagaacagtaagaagtgaacagacgggaagatactcacaccacgtctggcagctaaatgcttagcgtccaggccgcatcaatactttaatcaggcgggacggccatgctgtgctgtggaaacacgaggcccagagctcagcacaggcacattcctcctcatgcacagtccacggccctcacccacccggaggcaccatggagctgacggcctccggggaggaggagacggtccacaggaatgcatgaggggtggggtccggctgcagtgcctccgcccgtgaattggatgtgtactgggtggtcccaggacatggctgtgggtcaatcaggaggtcacacctcaaagtgagccctccacttaggcaggattgaagaggactccctgcgaccctatgtgtggtttccaagttcattggaccctggtttaatgaattcaagcaggaggaagcagggctcagggttcccaagtttcagacgcagacccgcttctctggccagtgcctgggtgaggagggcctggcagagtgtgaaggccacagtgagcccacagatcccagcatccaatggggtgccgccctcctagccatgggtgccttccttccagccatgggcacctctgctccctagacccagccggtcggctctggagaatgcagtctcatgaaaaatgagtcagagaagggaaagaagtctccacactctgtgacgtaagcctcggtggtccaggtgctggcaccagaggcgggtcctgctgatagcatgacggggctggtgcaggatgacacggactccagccctcagcactgtggcctgcagagtgctgggggagggcgctgggagaaaggggtttgtctttccttggggtcatactgtttatctttaaaattacagaaaagcaccagacttctgaaaagagaaagggcgtgaggggctgcgtagtctgagaaggctccagagggtgggtggaggcgggagccttcctgacctggcccagagacccgcaagcagcacagcagggccagtgggggtggcaggtgcaggcggcaggggtgaaggtggcaggtgcaggcggcaggggtgaaggtggcaggtgcaggcggcaggggtgaaggtggcaggtgcaggcggcaggggtgaaggtggcaggtgcaggcggcaggggtgaaggtggcaggtgcaggcggcaggggtgaaggtggcaggggtgaaggtggcaggtgcaggcggcaggggtgcaggcggcaggggtgaaggtggcaggtgcaggcggcaggggtgaaggtggcaggtgcaggcggcaggggtgcaggcggcaggggtgaaggcggcaggggtgaaggtggcaggggtgcaggcggcaggggtgcaggcggcaggggtgcaggcggcaggggtgaaggtggcaggtgcaggcggcaggggtgaaggtggcaggtgcaggcggcaggggtacaggcggcaggggtgaaggtggcaggtgcaggcggcaggggtgaaggtggcaggggtacaggcggcaggggtgaaggcggcaggggtgcaggcggcaggggtgcaggcggcaggggtgaaggtggcaggtgcaggcggcaggggtgaaggtggcaggtgcaggcggcaggggtgaaggtggcaggggtacaggctatggaagcacccaggatgggagccaggtgaggggtggcagggtgtggagacagccaggaaaacccaagacccgctaccattagacggggtggagcccgcattggtgcccactatggttctcgggcgctcgatgcagcagaaattgacttgagatccaaagagttttccagacgaggcttcactgaagcttattcctgggatgagagagggagaggggagagggagagaagaggagagagagaggaggggagaggagagagagaagaggggagaggagagaagaggggagaggagagagagaagaggggagaggagagagagaggagcggagagagagaggagcggagagagagaggtgaaagaggagagaggagaggagagagaagaagggagaggagagaagaggagagaggagaggagagagaagaagggagaggagagaaggggagaggagaggagagagaagaagggagag

SEQ ID NO: 19799 - DNA, 1017 bp, Artificial sequence
  DNA replication origin
aggtgaagagagagagagaggagaggagagaggtgaagagagagagaggagaggagagagaggtgaaagaggagagagagatgtgaagagagagagaggtgaagagagagagagaggagaggagagagggaggtgagagagagagatgagcagagagaggagaggagagagaggcgagagaagcagagagaagagaggagaaagagaggagaagagacaggagagagagaagaagagaggagaagagacaggagaaagagaggagagagagaggaggagagaggagaagagagaggagagggaagagagagagaggaaagaggacaggagagaggagaagagagaggagagggaagagagagagaggaaagaggacaggagagaggaggagagagaagagagagaggagagagagagagatgtgggggtgggggggtgggggtggagggagagagcagggaggcagctgacctgagacagagccctgcagacctgtagctggaggctggggctgagcttctgaaggctcctggaaaggccctgggagagcaaactgccttcagtggaggcgacagacgtgagaacaatctaggaagtaaaacgtcaggggctccagttactgggaaataaggccagggctggagagaggaaaacaagacccgtgggtgggtgtgaggcctcccctcagggcgggctccaggcctagaggagagtggaaatagaaccagaaacggcggattggaacggcgagaaacagggaccacaccacccacacatgcagccgtcccagtaaaatgcagcagacccagtgtgtgggacgatcctggtggcccaggcggatcatttatcccatggaatgtggattttgttgtaatccaaaaggaagggaaaagaaatagtgttctcgttgacagatgctgcagaagtgtttgatgagccattgcccatttctaactcagaagagcctcaaagaacccgagagaaagccggtttcctaatgagtcaagggagtctgtg

SEQ ID NO: 19800 - DNA, 2064 bp, Artificial sequence
  DNA replication origin
tggagcgaagccaggaggctcaagggagctgcagtgtggctggacacagcctcgggccggggtgcagtgtggctggacacagcctcgggccggggtgcagtgtggctggacacagcctcgggccggggtgcagtgtggctggacacagcctcgggccggggtgcagtgtggctggacacagcctcgggccggggtgcagtgtggctggacacagcctcgggccggggtgcagtgtggctggacacagcctcgggccggggtgcagtgtggctggacacagcctcggggcggggtgcagtgtggctggacacagcctcgggccggggtgcagtgtggctggacacagcctcgggccggggtgcagtgtggctggacacagcctcgggccggggtgcagtgtggctggacacagcctcggggcggggtgcagtgtggctggacacagcctcggggcggggtgcagtgtggctggacacagcctcgggccggggtgcagtgtggctggacacagcctcgggccggggtgcagtgtggctggacacagcctcgggccggggtgcagtgtggctggacacagcctcgggccggggtgcagtgtggctggacacagcctcgggccggggtgcagtgtggctggacacagcctcgggccggggtgcagtgtggctggacacagcctcgggccggggtgcagtgtggctggacacagcctcgggccggggtgcagtgtggctggacacagcctcggggcggggtgcagtgtggctggacacagcctcgggccggggtgcagtgtggctggacacagcctcgggccggggtgcagtgtggctggacacagcctcggggcgggggccagaggtttgcaggggtgagcgggggtcccatggcaggtgtgagcactcgtggccacgggaaccagccaggggctgttggaggtgtccagggaggatgaggacaaactggaacgagggggctgctgggaaaggggagcaccaggccaggcttcaggtggagcgcgcaggccggcggggggctgggtggaggggtggggcagagacgctctgccccatgcagcccccacaggagcccctttctgagcccagggctccacagacttccggaaacaagagagtctcataggaagagtccacactctctttagcgagggcgggtggggaaagaccgtctcacacttagacaccatccagccgtcccagcggtttcagccccagggactggtttcgtgggagacagtttttccacggactggctgggtggaggctggtcgcgggatgaaacgtttccacctcagatcatcaggtgttcaattctcgcaaggagcacgcggcctagatccttggaatgcgctgatcgcaatagggttcgcgctcctgtgagactggaatgcagctgttgatgggacgggaggcggggctcaggtgggagtgccagcggcggggcgactgtaaatgcagatggagtttggtcgccgcccacccgcccctcccacttcttgccctgcagcctggttcctaacaggccccgcagccttcctggtgcctggccccggggctggggaccctgcattaagggcttggtggtgctcgttttgcagaacctggatcgagagtctgtcccggtgtgccatgaataactggctgcgctccgcagagatcggacaggagatccaggaggcgtggattgtgcagaacgccgtggtctacgtcctgaaccacaaccaccacctgatcctggccgggcggcagaaggagctggtggacgccctgtaccacctcctgagcatcgttaaggccacaggccacagtgggtgcgtgtgggctgtgctgcgttcacgcagggaggggcttcttcccttgggagaccccagagcaaaggcaggcagctgcactccatggccctctgtgtcccagcagaggagggtcgtgggcacccgtgcatctcaggcctcttaccgtgacctgaggactcagcacatgggatcggggcgaggcctgcgggggccaaggttccctctgacaagcatgtctcccagggaccccg

SEQ ID NO: 19801 - DNA, 1085 bp, Artificial sequence
  DNA replication origin
ccctgcccaaagtcagcaggtagaaatggcggagtgggatccaaacccagccctgggacctcgggtccgagctcgcagccaccgcgctgcaccaacacaagtgtggcccttgtgacattgtgtgacttcagagttcccagagccactctcggttaggtttctgtggactttctcagtgggtgcgtggccatcagccctggaggacagggcacctgccgatttaggcagtatgtctgctgagtggctcccaggtgccaggcccatgccctcagctggggtcagggtgagaagcggcacagaactctctgctcagggagccggaggccacatggcagaaccagagccagcggcggccacggggctgtgccacatggtcatccacgccccggaggccagcgcagacctttcccctcaaacatttaaaacgtaatgattacgtaggggaggtgcaaatgctggccggtgtctgctgataccgggaagccactgttggtccttcggggctgctggggtgtgcggtgctctggaaggaccttctcttccctgacccttgtgctaatgggtggagagagtctgtgaggagctggctttagtccctggagtggctattggggcaggcccagcttgcaaagggcacagcaaacgggtctcacagcctgtgcttggcattttcaaatcagagctgagggaagggcgtgtgtgtttcctatctggtgctgggcccgtgctccgcccatgacccctcccaccgcatgtgtgttttgcaggccacggttcatttgctgcggtcagaaggtgtagagctgaatgaccgggccatcccccccgaagacctgagccagcacccagctggctacgtgcctgagcccccggaggtgaatgctgagtggatcacatacaggtgggcagaggcgacagtggccttgagcaccgcccggggccgtgggtcagagtgtcccctgcactcaggctggcgtggggagggacaccctttgcattcgtaaggacaccggcttcttgcgtgggggacgtgtccatcgtcacgtaaatgactgagaccatgaaagagaaaatggggtgacgtg

SEQ ID NO: 19802 - DNA, 1093 bp, Artificial sequence
  DNA replication origin
gaacgggcacagggggtctgggagtcctgcaggagtcagggagggcaccccccaagaaggcaggggatgcaggaggagttgggagagccacaggtgccaagagcatctgcagggatgtggccaagagcaagccctggctgggagccagcactccacccacctccgccatcccacggagagctcctccagcctcttcctgggcaagctgcccacctcccgcctacccgcccaccttggcggaccctacacggagctggggagaggctcaggcactccaagatggttcaggaattcttgtgtttttatttatttgctagaaaaaaacatgatccttacctgctgccatttctctcagggaagaagaagcgaggtagggacggctcggtgcaggacacctggagccagcctgaggtcgtcctgcagaggcaggtgtgccccgacctgctgcggaagttcgcggaggtggggttcatccatgctgaggtgcgtcatggagaggggggttcatcggtgctgaggtgcgtcgtggagaggggggttcatcggtgctgaggtgcgtcgtggagaggggcgttcatcggtgctgaggtgcgtcgtggagaggggggttcatcggtgctgaggtgcgtcgtggagaggggggttcatcggtgctgaggtgcgtcgtggagaggggggttcatcggtgctgaggtgcgtcgtggagaggggggttcatcggtgctgaggtgcgtcgtggagaggggggttcatcggtgctgaggtgcgtcgtggagaggggggttcatcggtgctgaggtgcgtcgtggagaggggggttcatcggtgctgaggtgcgtcgtggagaggggggttcatcggtgctgaggtgcgtcgtggagaggggggttcatcggtgctgaggtgcgtcgtggagaggggggttcatcggtgctgaggtgcgtcgtggagaggggggttcatcggtgctgaggtgcatcctggaactggggcttatcaatgctgaggtgtgtccctgcaccacagcgtcagagggttgctttcctgcatccacacaacctgctgtggggcaggtgttggtgtccacgtggcc

SEQ ID NO: 19803 - DNA, 847 bp, Artificial sequence
  DNA replication origin
cagccggcggctttcacccagcacgacgaaccaggtgtcacccagactgcagcctgtggagatggtggtcgggagtggagctgctgggtcatgtctcgggtctgagacgaggagatgggcagacgcagggtgggtcgcgccctgcaagggaaggttggcgactcttggagcgggaaggggctgccgccctgtcatccaccgccctcagatgctgccgcacctgtgctttcattttgccctaatgagtttgaggagcagctgcagatccaccagtaggacccagactcacctgttttgccttcctgactcctttcactcatgggcgtgtgctgctggctgcctgggggtcaggtgcatgtccactgctggctgtggggccgagacagcacctacacccagcaggaggtgctgcggggccctgcccaggggcagtgagggcggcacgggctccaggggaggatgccgttgagtggctcctgaaggtgaacccctgtgctggccgagagggtggacaccagccaggggaggcccagcccccggggtcgcccatgcacaggaggccccccagggtgtggagctgagttccgggtgctcgtgattatttgccaggaaaaggagcggtgattcggaacatctggcgtcatgcggataaacctgctgggacttggggtgctacgcaggggctgggtgggagctcgggagtctgaggccgggtgcctctgcttggagggcagctggacagcgcagccagcagagcagcaggagggtcttggcagactctgctccaaagttcctggagcctcccccactcagaggagcactggctcggcctcatcgccggcaggag

SEQ ID NO: 19804 - DNA, 853 bp, Artificial sequence
  DNA replication origin
ggacaccagtcagattggactagggtccaccctgatgacctcatttgacccaaattacctccaaagaaggtcataccctgaagtcctgggggcgaggacttcaacacaccctgctctggggaatggggttgagccactgcctgaggcacaggacggggctccctggatcacgggggtcaaagctgaagccatcacatctgtcccagggagaccctgagctggctttgggtaatgggacacggggccgtacggcccatgtgcggggactgagccagggttcggcaggtgtgttgcatcctcactgcccgagcttctctgggcactcgccagtggctctgggaacgcaggcggccccactctctccagcccagtgcaggggccaggctgggcctggcttgggagcccttcccgctggtcccctgagggtcctgctgggggctgctgccaggcctccctccagctcagtgcccagcagccggcggctttcacccagcacgacgaaccaggtgtcacccagactgcagcctgtggagatggtggtcgggagtggagctgctgggtcatgtctcgggtctgagacgaggagatgggcagacgcagggtgggtcgcgccctgcaagggaaggttggcgactcttggagcgggaaggggctgccgccctgtcatccaccgccctcagatgctgccgcacctgtgctttcattttgccctaatgagtttgaggagcagctgcagatccaccagtaggacccagactcacctgttttgccttcctgactcctttcactcatgggcgtgtgctgctggctgcctgggggtcaggtgcatgtccactgctggctgtggggccga

SEQ ID NO: 19805 - DNA, 1254 bp, Artificial sequence
  DNA replication origin
gtaccccggaacccctggcctcaagcagccatgtgggggtgccccggacgccctggcctcgagcagccatgtgggggtgccctggaacccctggccttgagcagccatgtgggggtgccctggaacccctggcctcgagcagccatgtgggggtgccctggaacccctggcctcgagcagccatgtgggggtgccctggaacccctggcctcgagcagcccatgtgggggtgccctggaacccctggccttgagcagccatgtgggggtgccctggaccccctggccttgagcagccatgtgggggtgccctggaacccctggccttgagcagccatgtgggggtgccctggaacccctggccttgagcagccatgtgggggtgccctggaacccctggcctcacgcagcccttgtgggggtgccccggacccccggcctcgagcaggctgtgtgtgacaggagcctgcgtttgatggccccaggcttgagaagcagttctagacacagctgagccgggatccagggttcattctgtgctgtgggaagtcgaaggaaggcccagcaggggtgtgaggggtgtggtcaccatgttttagggtatgtgtctgtgtgaaatgagctggagtgatgctggcctgacacagactgtgctaagttaagggtgcatgttcttagccccagagaaatcttccattcctccaaaaggtatagtcgagaaaccaagaagccaatagagaaaactaaatagaactctagaaaaattcagggagccccagagaaggtgggaaggagcactggcagtgcaggaaggtagcagacagggagcgggggctgagccggcggactcagagtcaagattgtgctgacggcaacgaagaggctgagccctcccaacaagaaacaggtcctgagatcagggctgtgattctccagccaccctgggcccaggctctgcaacagcttgtggctgcccttgcacctcacccccagtacctgtctcctgcctgccatggtccaccctgatgcctgccgcctgcctgccatggtccaccctgatgcctgccgcctgcctgccatggtccaccgtgatgcctgccgcctgctgccacgctggcccctgcattcctgtcacccctgaggacacaccgtgctcctccctgacgctgggccctctgagcactcctgtctcacccagcatggcccaagtcccacggggccacaaccagccccccactcccggcctctgtggcca

SEQ ID NO: 19806 - DNA, 1304 bp, Artificial sequence
  DNA replication origin
gagggctttctgccagcctcacttgagtccgggaaggcgtcctaatgatgaggggcaaaagccaccgccggccctggcgtcaggtgccaattacaggcacttgacccacctctgtcctgctgtctgagacgacaggctctggaatagcagccactaccaggaaaggaactaggaatccttttagactcttcctcagtaataatttcccagttaaaagatgaacagaaacctcacaggatggtggcctgcagccctgatgtggtaccacggcaagtgccacagggtcggctgggaaccctcaggccctgtcagccaggcagtgcgaggctccgctgggtacagaggagccaggggcgtgcgggtcagtgccagaggtgccgtggcaggggatgagcacggcagctgggaggccttccccatccccactcctaacgcatccatcctcagcccgcactgcctggcacacgtgtcacagcccggcgggtgccgatgccgctgtggacttgctcctgggtctgcctccgtggggctgagcttctcgcgggaggtttttgactgctgctgtgcgctggtgccacacgtggtaggcgcttaatgagtgttcgtttaaggaatgatttccagacgctttggctgttgcactttgttgtgaaagtgaacagaggctgcttgtggctgtggcgctgtgggttgtgcggctgcttccccgactcacctgctgaggacctcagaggggccggcaccggcgtacgaggctttcagacccagcagccaagtggcaggatggagttgtgaggttcaggccccacccagcccaggggcagcgtgagggctaggcccccgtggaagccacaggctgtggggacgtggccaagtgagcccaggacggtgggcggtccagcagggcttgtgggaggtgggagtgtggggagactgctccactgaaatcctggccaaagcctttgtcctgggaagggcccgtgtagcacagaccggaggaggcattctgggggtgggaagcgtagcgagcacaggccccaggaaagagacgggatcaggaagggagcagcgcccgctgagtccacacgggggaggcgggcgcagccacgatgtgtgggcaccgccaagcctcctgcatgtaatatcttgtgagacgtccacttcctcctagaaagagtcactctggccattttcacggacagatttgagcatgacgccacgcagggtgatgaatttagggcctgcgttctcagtgtgccctgcacgcaggtgccgccccagccccgcagctcgagccagcaacc

SEQ ID NO: 19807 - DNA, 3050 bp, Artificial sequence
  DNA replication origin
ggcagggacgaggggcggagaagcgtccgcaccccaccccaaagcagcctcctgcccacagctacccagggatgcagggaggatggtcacaccacactgagggccgagttgagtcgctgccagcagccgccaattgtgttcccggtaagactgtgattactccccgggaaacagcagaagacatgtagacctgctccccaaggacatttggcaatgtctggagacactgtgggcggctgctcttcatctagcgggcagctgcagggacacaatggacaggctcctcctggaagagaggcgtcccggagggaaaccctggcctaatctccaccggaggagcgtgatcctgatccctgcagctcaacaggaagccttagagtggagagctgagagcacccgctgtgctctttcttgaagttgtctggagcactgtgggtccttgcatgtggatacaaattttagcctcagcctgtcagtttctgcaaagaccctgattggtgactgcaggtgcggttggcggcacgcctacgggcttgtcgcatggtaggaaggcccaggctctgtgtggggagcgtggggaagcccaggctctgtgtggggaggaggaagctgcaggatctatgtggggaggaagaaggcccaggctctgtatggggagcgtgggaagacccaggccctgtgtcaggagtgttgggaaggttcagcctctgtgtgaagaggtggaaggcctaggctctgtgtgaggagtgtggggaggcccaggctctgtgtggcgacaaggaaggcccagcctctgtgtgtggaggaggaaggcccagcctctgcgtggggaggaggaaagcccaggctctatgtggggaatgtggggaggcccaggctctgtgtggagaggagggaggcccaggctctgtgtggagaggagggaggcccaggctctgtgtggggaggaggaaggcccaggctctgtgtggggagtgtagggagacccaggctctgtgtgagaagtgtgaggaggcctaggctctgtgtgagaagtgtggggaggcctagcctctgtgtggggaaggcccaggctctgtgtggggaggaggaaggcccaggctctgtgtggggaggatgaaggtccaggctctgtgtggggagcaggaaggcccaggctttgtgtgagaagtctggggaggcccagcctctgtgtggggagtgtggggaggcccaggctctgtgtggcgacaaggaaggcccagcctctgtgtgtggaggaggaaggcccagcctctgcgtggggaggaggaaagcccaggctctatgtggggaatgtggggaaggcccaggctctgtgtggggagtgtaaggaggcccaggctctgtgtggggaagaggaaggcccaggctctgtgtggggaggaggaaggtccaggctctgtgtggcaaggaggaaggcccaggctctgcgtggggagtgtggggaggcccaggctctgtgtggagaggagggaggcccaggctctgtgtggggaggaagaaggcccaggctctgtgtggggagtgtagggaggcccaggctctgtgtgaaaagtgtggggaggcctagcctctgtatggggaaggcccaggctctgtgtggggaggaggaaggcccaggctctgtgtgagaagtattgggaggcctagcctctgtgtggggagggtggggaggcccaggctctgtgtagagaggaggaaggcccaggctctgtgtgaggaatgtggggaaggcccagtctctgagtggagagtgtggggaggcccaggctctttttggggaggaggaaggcccaggctctgtgtggggaggaggaaagcccaggctctgcgtggggagtgtggggaaggcccaggctctgcgtgaggagtgtggggaaggcccaggctctgcgtggggagtgtggggaaggcccaggctctgcgtggggagtgtggggaaggcccaggctctgtgtggggagtgtggggaaggcccaggctctgtgtggggaggaggaaggcccaggctctgtgtggcgaggaggaaggtccaggctctgcgtggggagtgtggggaaggcccaggctctgcgtggggagtgtggggaggcccaggctctgtgtggagaggagggaggcccaggctctgtgtggggagtgtggggaggcccaggttttgtttgtggaggaggaaggcccaggctctgtgtggggagtgtagggaggcccaggctctgtgtgagaagtgtggggaggcctagcctctgtgtggggaaggcccaggctctgtgtgaggagtgtggggaaggcccaggctctgcgtggggagtgtggggaaggcccaggctctgtgtgaggagtgtggggaaggcccaggctctgcgtggggagtgtggggaaggcccaggctctgtgtggggagtgtggggaaggcccaggctctgtgtggggaggaggaaggcccaggctctgtgtggcgaggaggaaggtccaggctctgcgtggggagtgtggggaaggcccaggctctgcgtggggagtgtggggaggcccaggctctgtgtggagaggagggaggcccaggctctgtgtggggagtgtggggaggcccaggttttgtttgtggaggaggaaggcccaggctctgtgtgcggagtgtggggaaggcccaggctctgtgtggggaggaggaaggcccaggctctgtgtggggagtatggggaaggcccaggctctgtgtggagagtgtggggaagtcccaggctctgtgtgggaagaaggaaggctcaggctctgtgtggagagtgtagggaaggcccaggctctgtatggggaggaggaaggcccaggctctgtgtggggagtgtggggagtcccatgctctgtgtggggaggaggaaggttcgggctctgtgtggggagtgtggggagtcccatgctctgtgtggggaggaggaaggttcgggctctgtgtgaagaggaacctgcctcttccctgcatggcctctggcctcgctgagctgcagatgtgggtctgagctgctgtg

SEQ ID NO: 19808 - DNA, 2687 bp, Artificial sequence
  DNA replication origin
tgctgagagatataaaaatctatatgcatacatacatgaacaaaattacataagcatattaaaaagaaatagcagttcatccaatgcaaagatgtatagaactgtgacatttagaaaacaaaacagggtcttttgcctttatcgtcgctctttaaatatttcctttgtaatagctttgaatttttttaaagttaatagaaaattcacaaagatacaagtaattactacaagaatatgtaccaaaagcattcattcatcagcagtccattttgacatatggggaatcagcttaagttgtatctgaaaagctagatacaaaattaatgagaaaataaaatctagacacaaaatctgaacctctaccgaattgtttgaatccagattaataatctgctccattttatgacaggttcgtcatgaattaatggacgaacttcagttaaaggaagaaaagaaaaattccattagcctgtcagtcactttctatattaatatgctaaaggcgtaagtcgttttgggagggagagcaaatactgagtttcacaagtgctgggcttgggagagctctgtcccctccatggggggaggtcctgtgtccaggggcctgtgagtctggagttgcagtgagtggggctggagaataggagcctgggagacctcagggtgtggggatccgaaggccaccccaattcctggccctgcctccctcccagcacagaggagaggccagtgaggccacagaagggagagggcggctttaagccaagtgcagaaagagcctgtaggaggagatcatggtgtgtttggatgccgaggggagtgaggagatcatggtgtgtttggatgccaaggggagtgaggagatcacagtgtatttgggggcagaggggagtgaggagatcacagtgtatttgggggctgaggggagtgaggagatcacagtgtatttgggggccgaggggagtgaggagatcacagtgtgtttgggtgccgaggggagtgaggagatcacagtgtgtttggatgccgaggggagtgaggagatcacagtgtgtttggatgtgaggggagtgaggagatcacagtgtgtttgggtgccgaggggagtgaggagatcacagtgtgtttggatgtgaggggagtgaggagatcgcagtgtgtttgggtgccgaggggagtgaggagatcacagtgtgtttggatgtgaggggagtgaggagatcgcagtgggtttgggtgccgaggggagtgaggagatcacagtgtgtttgggggctgaggggagtgaggagatcacagtgtatttgggggccggggggagtgaggatatcacagtgtgtttgggtgccgaggggagtgaggagatcacagtgtgtttggatgccgaggggagtgaggagatcacagtgtgtttggatgtgaggggagtgaggagatcacagtgtgtttgggtgccgaggggagtgaggagatcacagtgtgtttggatgtgaggggagtgaggagatcgcagtgtgtttgggtgccgaggggagtgaggagatcacagtgtgtttggatgatgaggggagtgaggagatcacggtgggtttgggtgctgagggctgtgaggagatcacagtgtgtttgggtgccgaggggagtgaggagatcacagtgtgtttggatgtgaggggagtgaggagatcacagtgtgtttgggtgctgagggctgtgaggagatcacagtgtgtttgggtgccgaggggagtgaggagatcacagtgtgtttggatgtgaggggagtgaggagatctcagtgtgtttgggtgctgaggggagtgaggagatcacagtgtgtttgggtgccgaggggagcgaggagatcacagtgggtttgggtgctgaggggaatgagaagatcgcagtgtgtttgggtgccgaggggagtgaggagatcacagtgtgtttgggtgctgaggggagtgaggagatcacggtgtgtttgggtgctgaggggagtgaggagatcgcagtgtgtttgggtgctgaggggaatgagaagatctcagtgtgtttgggtgctgaggggagtgaggagatcacagtgtgtttgggtgccaaggggagtgaggagatcacagtgggtttgggtgctgaggggaatgagaagatcgcagtgtgtttgggtgctcaggggagtgaggagatcacagtgggtttggataccaaggggagtgaggagatctgaggtatttgtgtcctatgggcagcatccctgggagagagcaatgctggcccaggtcctatcgccgttgagcagagagagtgccccacatttcccgtgtttggctcctatgtggggtgctgactctggcgaggggtctgggccctctgagtgtttctattccagccttgtaggaaggccgggcatcatggagggaaggaggaccagaaggggtgaaaagtcatctcaggaatttgaggaaagaaggcaggaggggttattttcagtctcctcttcagtgagaaacacaatttcatacacgcagagtttctcttagaagaatttgaataaatctgacaggatcttgtgctgaattactctctgaattatttctagaaaagcggagcaaaatgatttaccaggtgacatcagtgtcattctgaggaaggcctacagacacttaggtcattacaaccaccag

SEQ ID NO: 19809 - DNA, 1449 bp, Artificial sequence
  DNA replication origin
ggggtcaggaccagaacccgggcacacaggagccctgagcggggagaggaggcccgcgcggagcccccggcgtccccccacgccgccttccctcccctttcttcttcccgcccctcgccgggggtcgctgccctggtgtctcactcccgcggagctggcggggggcagggcgggggcgcggcgttgttcgccttccccgaagtgtggccccgccgccgacccgtagccccgcgtccgcgtccctttcggtctccaggcaaccgtggccgggtcctcgcggctggagaacccaaccgacagtgggcggcaggacgcaccgcggaccccggagagagcggacgagcagggcgccggcgccatggacctggtcatcacgcaggagctggcccgcgccgagagccagcaaggtgaccccaggcccgccacgacccccgccccggggaggccccgggacccgccacgacccccgccccggggaggccccggaccctctcatcccagcccgcccaatgggtgatccctcgagggccacagccggagcccccacctcccgatcgtctgaccagagcaaacgtacaggaaggcgcccacaccgctgctccctggcggcgacaggttctgacggtggctgtggcccgggggcccaaggcggctgcctggggccttcgggatggcgttgcccggctcacttctcccagcccagtgaccaaaccttcctcaaccacccgtttgggacagatgctgcgtccttgaagaaggcctacgagttgatcaaatcggccaacctagggaaatcggagtttgacccctcagagagcttcagcccagacctgtttgttctgtgtgcagagcaggccctgaaggtaactagttcccgggatcctcggtcagggcagctttgacagggagagggagggcctctgggtgtgcagcggatgcagagtggggctggggagaggcagctcctggccgggcagtcaaggggccaggatggaggatggggctggaaacaggctccacctgtgctgggggcctgttctgaaagcgggcccgtggtgcttctgggcagggaggccacccctccgggtctgtgatcttctgtggtggtgttctcttgcagatgaggcagccagaggtgagcgaggactgcatccaaatgtacttcaaggtgaaggcgcccatcacccagtttctgggccgagcgcacctgtgcagggcccagatgtgtgccccgaagtcggcagaaaacctggtgagaggcgtcctgtgccccttatccccaacagttcaattttcaccccatctccagagcaatgccaggctagaccaggcttaaaatcgttcttagggtagtagagtgaaggaattcctttccagagtgacacgaaacttgcaccatttcctgtccatgctttttgctcaagtggtgatatctgacacacaggaccc

SEQ ID NO: 19810 - DNA, 1113 bp, Artificial sequence
  DNA replication origin
cattactttaacaggcggtgatttgcccctgccacggtgctggaagtgcagcgggcacagaaagtcgcgcagtggaaatgcgggctgcgggcgtggatggggccgccgggtctggggacgagctaagacctggcagcagggggtggccgaggcgggaggagcagacgcagagccccggcccccacggagagggtagcagcgcagccacctgccccccggggctccccacctcccagccggggctgctttccggccggggtccggacggcgcctacgaccgacccgaattggaggcttggcggggcgcgcagcccccgcgcggggaagccggagccactgaaggacttgggtcggcctggggaggggagggcccgggactcaccccggggtgggcacactaggggagctctaggggaggcccacctggggtaggcccacctgggagaggaccccctgggagaggcccacccacgagagtcccacgtgggagagtggaattccacccgggagaggcccacctgggagaggaccccctgagagaggaccgcctgggagaggcccacctgggagagtggaattccacccgggagaggcccacctgggagaggaccccctgagagaggaccgcctgggagaggcccacctgggagagtggaattccacccaggagaggcccacctgggagagaaccccctgagagaggaccgcctgggagaggcccacctgggagagtggaattccacccgggagaggccaccatacctacatgggatcaaataagctgcctggacatagttttgaaacctgaacgtcgtatgtttctcaggctcctagagccccaccccgtcttgaagttggcagcctcagatccctgctaaatgaccatattccttcccaaagacagttctcagatgggcctttgttggtaaagacactccacacatgggtacagcctcgataaaatatttatcccctcagagaaagtatatccaaacataatgtagtaagagatttcccaaatccaagggcattaaatattaaaactcagttttctagttacacattagccttaaatatcaagagtgcaacacaaaattatcacagaacgcagga

SEQ ID NO: 19811 - DNA, 927 bp, Artificial sequence
  DNA replication origin
agagaagagagtgctgccgctgtccaagtgtgccatgagctgcagcagcctctgcagcagggcctgctggaccaggagttcagaacgaggctctgctctaatgacacagcaaggcttcaaaaatatcttccagtgaatggatgggtagttagctggaagccatgatgctaaacaggtatgatgcaactgccatttctgtgaaccaaaaaagaatatacatgtacacatcacctgtgcacggtgtctgcagaaggcagagggaaggcaggtagaagcattaattaagagctgcagattcatcagataaaaatgtgtgaccccaggttaggtgctgggatgcagcaatgctgagttcctgggatcctgggatgctggaggtactgggggtagtgggatgctggggtgctgggatacatggaggctgggatgctgcagtgctgggatgctgggatgctggggtgctggggtgctggggtgctgagatgctggggtgctggggtgctgggatgctggggtgctgggatgctgtggtgctgggatgctgagatgctggggtgctgggatgctgggatgctgggatgctggggtgctgggatgctgaggtgctggggtgctggggtgctgggatgctgagatgctggggtgctggggtgctgggatgctgagatgctggggtgctgggatgctggggtgctagggtgctggggtgctgggatgctggggtgctggggtgctggggtgctgggatcctgggatcctgagtgctgggtgcagggctgttggggatgacagcctggggtgctgagtgctgggctgttagggatgatggtctgaggtgctgagtgctggggtgctgggtgctgggtgctgagtgctgggctgttggggatgacagcggatgttctcctccctgtcttttcagggcat

SEQ ID NO: 19812 - DNA, 764 bp, Artificial sequence
  DNA replication origin
gacgtccatcagcaacgtgattctgtcctcccagccaagctggcagctcccggagcccctgccctatcgctggtctcccgggctgtgcaggccctgcagggactgtgagccctcctcacgcggaggaagcagagggggctggacctgccggcctggcacatgcacgtggagaggccgactgttgtgcacactcacgcaggcacacacacacttgctcacacacacactgaactcatgctcacacatgcctgtcaggctcacactcacactcgctcatccgtgcactgacactcatacacggccagcgtcctaaggcggaagagtgaaggagaaaggcctgcactccaaggctgggctgcaagtgcagcgggggtgaggggtgggggatcgccggagcaggtgtgcagcaggggtgaggggtgggggatcaggggagcaggtgtgcagcaggggtgaggggtggggggtcaggggagccagcatgtggtaggggtgagcaggtgagaagtgccggggagcaggcatgaggtgggggtgaggggtggggagcccccgggagcaggtgtgtggcaggggttgggggtgaggggtcctgggagcaggcatgcggcaggggtcacattgagccgatcttgatgtttctggttttgcctttcttagccctcagccccaaattcttgcttacacttctagaaataaattacagccaacccggtcaacacgtttccaaattttccaagacgtttgctgacgtcgttagctgg

SEQ ID NO: 19813 - DNA, 1357 bp, Artificial sequence
  DNA replication origin
atgataaaccagtttatgccaatacatttggcaattacaatgaaatgggggaaagtccttgaataatacaatttaccaaaaccaccttagaataaaatggaaaatccgaacgtcaacccagactgaggggcactctgcaaagtcgctgacaaacactcacaaaaatgtcaaggtcaagaaatacaaagaaaggctacaagaactgttgaagaaggatggaaattaggactttgaaaaggtcataggcccgcggtcctggattagatccaggatgtagtgggaaaaagctaaagggatgtttaggcacaattgatgaaatctgagtatggactctggattagatatttcattggtgtgaactttcctgattttgacagctatactgtggtaatgaaaagaagtgtctttgtcaggaagtacacgctgaggtatttagcagtaaaatggcataatttcttcaactctcaactcaccctccgtcgattcagggaaatgcgcatatgcagacacaggcacatgcaaacacatgtaaacacatgcaaacacatataaacacgcgtgaacggcagaacagcaggaaggtaacgccagagagaattgggaacagcaggaaggtaatgcgtgaggagaagtgggaatggcaggaaggtaatggcatgaggagaagtaggaacagcatgaaggtaacgccagtgagaagtgggaacagagggaaggtaacgtcgttgaggagaagtaggaatggcgggaaggtaacgctggtgagaagtgggaaaggcgggaaggaaacaccattgaggagaagtgggaacggcaggaaggtaacgccgtgaggagaagtgggaatggcaggaaggtaacgccagtgaggagtgggaacggtgggaaggtgacaccggtgagaagtgggaaccgcaggaaggtaacgccgttgaggagaagtgggaacggagggaaggtaacgccagtgaggagtgggaacggtgggaaggtgacaccggtgagaagtgggaaccgcaggaatgtaacgccgttgaggagaagtgggaacggagggaaggtaacgccagtgaggagtgggaacggtgggaaggtaacgccagtgaggagtgggaacggtgggaaggtgacaccggtgagaagtgggaaccgcaggaatgtaacgccgttgaggagaagtgggaacggagggaaggtaacgccagtgaggagtgggaacggtgggaaggtgacaccggtgagaagtgggaacagttggtgaattcgcctaaggctctaatggcagttccttgtcgtattcttgtgacttttacatatgtttgacgttgtatcaaaatggtaagttgggaaaaaccct

SEQ ID NO: 19814 - DNA, 848 bp, Artificial sequence
  DNA replication origin
aggaccatcccttcctgctgtccctatgaagggagccttttcccaaggctgctggtggaccaccggtcccatcccactggctagaaacatggtctcacgctcacccctgtactcatcctgcaggcagctcaggctgatgggaatctgccctcgaagaggggctggggtggctattgggctgtgcactcccagcaggctccagggctgtgacgctgcagcctggaccgcaccgtgtgtgggcagcaagttgccaagaacatgcttggtatccacctctcctgggcagggcaagtcggggagaggcaggcacaggcggcgtccatctctcccaggcagggagagtgggggagaggcaggtgcgggcggcatccacctctcccgggcagggcgcgttggggagaggcaggtgcagacagcgtccacctctcccgggcagggtgagtgggggagaggtaggtgtgggcggcgtccacctgtcccgcgcagggcgagttggggagaggcaggtgcgggcggcgaggatctggcctcatctcacaggcagcggcagagcccacctggagtcagaacagaaatgacgctgcagggttttgggggagctgtgtgtggacgaggctgggacaatgacacgctggaaggaggctgtgagcggcgtgggttgacctagattctcgtcaccagtcacagcctgaagctggcgcctctggaaggcacagcccggcaccacaggaccccagccatcaaaccacagcctctgaatttggaaatgtctcgccagagagggaaatacccatccccacaggagcgagagcccaggggttgacaaccctgggaagccggtggatttc

SEQ ID NO: 19815 - DNA, 967 bp, Artificial sequence
  DNA replication origin
ggacggtgtcatggaccggccgcctgagcgagctctaagctggggtgtccagccaggcctgaagacccactgccctgagggccgcagttacaggcggtgctgggagccggagggtgggaggagggttacaggcggcgctgggagccggagggtgggaggagggttacaggcggcactgggagccggagggtgggaggagggttacaggcggcgctgggagccggagggtgggaggagggttacaggcggcgctgggagccggagggtgggaggagggttacaggcggcgctgggagccggagggtgggaggagggttacaggcggcgctgggagccggacggtgggaggagggttacaggcggcgctgggagccggagggtgggaggagggttacaggcggcgctgggagccggacggtgggaggagggttacaggcggcgctgggagccggacggtgggaggagggttacaggcggcgctgggagccggacggtgggaggagggttacaggcggcgctgggagctggatggtgggaggagggttacaggcggcgctgggagctggagggtgggaggagggttacaggcggcgctgggagctggagggtgggaggaggggaagcccgtccttagaacacgccactgctcctaggctggaaactcagagggtccagagggtccacctgacttcatttcaatgacgacatcgtggctctcagcatcaccgccctatctgcacctctgccaactccagcctggctgtgtcgagctcacaggacagctgcctggagtccactccatcgaacaacgggaagctgaggaaaaagacaaacagcagcagcgcacagagggaaggccaggccctcccaggtttcgtgtctcttttaaaaggtccactgtgcacagacctacttccgcaggcaactggaccatcaggtcaggaggcagcgtgcacagagaccgaaa

SEQ ID NO: 19816 - DNA, 1604 bp, Artificial sequence
  DNA replication origin
gggcctgaggcctgggggtagctgaccttacagggaggggcctgaggcctgggggtagctgaccttacagggaggggcctgaggcctgggggtagctgaccttacagggaggggcctgaggcctgggggtagctgaccttacagggaggggcctgaggcctgggggtagctgaccttacagggaggggcctgaggcctgggggtagctgaccttacagggaggggcctgaggcctgggggtagctgaccttacagggaggggcctgaggcctgggggtagctgaccttacagggaggggcctgaggcctgggggtagctgaccttacagggaggggcctgaggcccggtggggggggggggggtgctgaccttacagggaggggcctgaggcctgggggtagctgaccttacagggaggggcctgaggcctgggggtagctgaccttacagggaggggcctgaggcctggtggggggggtgctgaccttactgggaggggcccgaggcccggtggggggggtgctgaccttactgggaggggcctgaggccagtttgttggggagctgctgttcccctctctgtgccctggtgtggagctggtggcgggagaatgggaattcttatcttgggaagaaagacagtgtgtggggcaacagtgggtgccgggtgctttgaagatctggttcatagcaaatattcgttcgtttaatccaccacaccgaggcacactttccagaaatgaaatgcacacgtttgaggggcggttgatgtgttttggtgggtgccctcaccactctcaccccacaatcgggatacaactattttcttcacaccaaaagttttctcaggcccctgggtgctaagcctgtgcgctgtcagccccccgcagccctgggtctattccgccaggcaggtgggccttgtcttgtgtaggactttgtggacgtggcccacacatgggatctgggctgtggctcctccactcggctctcgggagccaccgtggtgctcggtgtgtgtcgtgggtggatctgttccttcgaagcgccgtgccctctgcacagacgtgccaccacgagggtgcgttctcctgctgagggacatgcgagctacattgcatcttcaccacgacctgtaagctgctacccatatttttgcataagtgcaggtaggaacacattcttatttttcttggagaagcaacgggaagtgggatgggtgggttgtaggtgacacacgccgtctaactgcccaggaagctgccaagttgttctccaagcaactgctccacttgacattcccgccagcagagcacgcgtgttccggtacctcccgccctcagcagccctagcccggtcggcgtttgtgtttttaattttggccattccattaggtgcaccgcgatttaatgtgcgtttccacgtggattaacggtgtgaactgtctcttcgcgtacttgctggttgtttgcgtgtgttctttgctgaatgaagtgtctgctggaaccgggggtgtgtatttgtatcaggttgttcgttgtcttatttctgggcgacgagttcctcgtctattctagatacaagtcccttcccagatccgggc

SEQ ID NO: 19817 - DNA, 1266 bp, Artificial sequence
  DNA replication origin
tgcaggccaggccggctccggtggaaggaagtcctgggcgtccgctgcaggccaaggcctctcctgtgcacctgccctcactgcggctggcagggacggacgtgtccggaggcctctcctgtgcacctgccctcactgcggctggcagggacggacatgtccgggccgcagggtgaatcctccacgcttttccttgtctctgttgcagttttcctggcgtcttgtcctctggatgggcctctggatgaacataaactccagggaagctgcatagaatatgcagctcttctttaacgctccctagaggaagaaagcccctcagccggaagtattgttgacgtcgccgccactactaatgaaatatttactgaaaagccaaagcgaaacatttttctagttaattaaaacagtgcatctttcaagcaagctccctcgaggggccaggctcggacggacccagcgggcaggcaacccgaggtgctcctgagtggggtctcgactgggaagggggcgcccaggacgcaggtggggttcctgccacacgacactgaggggtggggggacagacgctgcagagaccctgcgaaaggcccctcccgatgggtaaactcacacttggtacacgctggcaggggcatctgggcctgcactctggaattggtggtggtcctgggaaggttttttgggccagggacaagagtacttgggtttgctttctggaaaaatgaaaaaagagaagtttctgtgttctctcagctgtgttaaacgctggcagaagttgcctctcggaccctccgcagggctatgacaggctggagaagtgggggctcgggagggagctcaaacagcctgcagactccgccgcagagtccgcacccctggaaggaggcgtcggggaaggcactgcacccacgcatggcttcgagggcaggaggcaggttgcacagcgggggtcacaggctcctctgtcccaggtgggactgggcgatcccagacacgtgtgctgtggcctctgggcctcatgcggagagcagatgccagggcctgcaactctgacctctgagcacacaggccggcctcagggaagggttgttctggctgtgggaacctgaactcgaaatggcctccgttcgctgcagacactgcccgcctgcaccggggactcagcccaggcagctctgcacacacctcagcaccacccaccctcaggcctcagccgcgctacccagcaggcgcttttgcccagaacgcctgctcagaacaccg

SEQ ID NO: 19818 - DNA, 1146 bp, Artificial sequence
  DNA replication origin
cgccatgcggcatccgtgtctaccagacgccatgcggcatccgtgtctaccagacccccatgcggcatccgtgtctactagatgcccacgtggcacgtcagcacctggcgcccggagtggctggggtctctgtgaacggaagtggtgtgtggccatacatgagaaatggttggacccctccttgccaggctcaaggtgtccttggaggctggcagccccggccagaaccgtgcaaatttttccaaggtggcgctgcctcacaggtgcctgcacattccaaagactcagagaaccgcatgcggccccctcagctgcacgggggatggggagacccgcagggagcgtggcgacagggactgtggcgatggggagcgtggcgacggggagcgtggcgacggggagcgtggcgacggggaccgtggcgacggggagcgtggcgacggggaccgtggcgacggggagcgtggcgacggggaccgtggcgacggggagcgtggcgagagggagcgtggcgagggggagcatggcgacagggagcatggtgacagtgaccatggcgacagggagcgtggtgacggggagcatggtgatggtgacatgtctgctgcccagtcggcctccagtccttgagccttggaggggccaagggatgaagggggacgacggtgagctccacctgtgcccagcccagcgggaaggaaggagggaaggagagcggtggggtcagtggtggggcagcagcttcctggcctgttcctggctctttcctgggtatctcgatgctgcgctttgattgtaaatggtccagcacaaaggtggagacgggcagccctggcctgctcgcccagcggatgagaccatctcaggggctggcagtggggaggcaggcgctgcctggctgggcccgccctggatgcagcttctccacgatgcccggccacggcacaaaggacaagaaacacgtttgttctgagtctctcaaataggcattctggaacattcccttccacctgactctccccagttcctagtccccatcgacacacctcactgagggccccagactcctggagagccatgggctgggctctggtgctctaaccagatccatcaactccagcacttttaggaagagaccccccgggg

SEQ ID NO: 19819 - DNA, 2228 bp, Artificial sequence
  DNA replication origin
cggccgtgaccacaggtgacattcacgcagcagccagcgtcctggtgcctgcccgtctgtccctgctcctccccagccctccctcaacccagggctggggccgggaccgcggaggggctgacgggaagggcggccgtcaccgcagacaggtgcagactggagcgaccagtctcaatcacaccaaccagcccagggggaggttctgagcatttggttggctttttggaactggaaacacgcgttcccacagaagcactgctgtacaaatagcgttcccagcttctccccaaacacacacacccttggagaaggtgtcccgggcaacagcactgctgcctctaactcctggagccaccccctctcctgactccttcaggggagaaggcggccgtcccctgggggagaaggtggccgtcccctgggggagaaggcggccgtcccctgggggggaaggcggccgtcccttgggggagaaggtggccgtcccctgggggagaaggtcgccgtctcttgagggggaaggtggctgtcccttcgggcagaagggtggcagtcccgccgagagccccattctctcctttgtcctgtcagggcggtgatgacttctgcccacacggcaggaaaggacagagaggcttccacccgcggtctgaggggctgtgtcaggaggcgtgaatccgcaccctggtgcctggctggatggggggcaggcgggatccctggatcttggggtgaggggaggccctgacttcactggctcgggctggacctcaggtggtctgggccactggtctgtggctgtgtgagtggcccagcccatctggtgctgctcaggacatgattggtcgagtgatcacctacgagggcgcgggcagagctggggatcccgctggggaggcagcagcttctcacacgcagcgccgcgtctctgccccacagccggcgcccaccccagcgactcgggtccttgggtgttggactggactgcaaggcggtggccccggcctacagacagcgcttcccaaagcaggcaactggacctagaatttcagagaccagagttgggtgcagttaggggtcccagcccagctcctcacttgcagatggagatgctgagttctggaaggttctgtgctttgcccaagacccccaccagctgtggcagagccctcactttcaccggttctagactctggctcttctgaaggccctgggatccctgtgccctgcgcggggggtacagcctgcatgtcgatgtcaggcgcccgcccagtgacttggggcagaggttggtgtttcggtggctctgacgcccagcctgtgcccggcatggagcttgggttagtgacgcatggacaggtgctggcacccctttgagaagcagctgtgcagggcacaggtcctcccttcaaatgcctctggaagtagctgggggcgggcatgggcggacatgaattcagactggatgccctctggaacagccgcgtctccagccactgtgggcacgaagggacgggtgctcccaacatgcagctgtgtctgaggatgaacttcaacccgggtatctccagcagcgcacatgctgttagcggcttggagcacagggtcccccactggctggcccaggaagggggcaaccccagcccttctgaggatgagggacccctgtttctggcctatgttgcctgctactgggagggcagcgtcttcgccatggtggactttgcctttatcctggacacaaatgtcacagctgcccttagggaggtgcgtggagcctccccaccccccgcccaacgcaccacaggagaggccccagctccacctaggccatgtcccgctcgggtccttccctccagcctgtggctgtgtgaggcaggggtgcatccgacggccactcgccagccacccccatccccacgaggatgccaccgccactccaggagccaggacaccagctgcacagagtgcgaggcaggtacccacatcccaagggccccgcctgcaaaccagctccgaaggcagcagacgcccagcgcggaaggtgccggaaagagtctcagggatgtgtgcctgatgcatgtttatgctgcatgaaaaggaaaacatttcaaaccccaaacaaccttcacctttatctaaatctggaaaagtgtattttttcatttgttcagaaagagcatctctcagaggcagcctcggctgtcactcgatattaaactgtcaga

SEQ ID NO: 19820 - DNA, 1171 bp, Artificial sequence
  DNA replication origin
cttctcccctgaaggagtcaggagagggggtggctccaggagttagaggcagcagtgctgttgcccgggacaccttctccaagggtgtgtgtgtttggggagaagctgggaacgctatttgtacagcagtgcttctgtgggaacgcgtgtttccagttccaaaaagccaaccaaatgctcagaacctccccctgggctggttggtgtgattgagactggtcgctccagtctgcacctgtctgcggtgacggccgcccttcccgtcagcccctccgcggtcccggccccagccctgggttgagggagggctggggaggagcagggacagacgggcaggcaccaggacgctggctgctgcgtgaatgtcacctgtggtcacggccgacgcccggcgggcctgggcatggagtcaggaccggaaagcgaggccggcagcagcaccagctcctcagcaaggcccccgctgccgactgggcacgggcactccaaggggacgcctggcacgtgccgggatccacgcgcggaacaatttagagaggcagcagcgtgcgcagcgggtgaagtggcagaggacgagagacactgtggcttaatgcctgaatcccacggtttcttggcacaaacaattcctaacaagtgtaggtgtttatcccagtcacactgcacacagcttctcattttcaccattagggaaaggtcaagttctcacaccgataaggcacagggaggttgcgggagaccttgggtctccggggatggttcctccagcgtcgaggttggcggccaactccgggcccctttctgagtggcagtgtcttatcctctcaagtctgcgtctcagccagcgggttgagctgactggggaatcctctttctacagtccctcgacggcatccacctgtgtctggctctcctggaggtcggcgcgcctggctcgtgacatcgtccctccttggaaccccccaacgcggttggtctaatcaagtttgggtgttccagacattttggcagacatccgagcttacaaactgtgataacatatccacattaaacccataaactacattacacccataaacaggaaggacccggggtctacgccacgtcagacctgcccgcgcgtgatcgcaggccgagaacaaccttctacttccgttccctcccctccagt

SEQ ID NO: 19821 - DNA, 1280 bp, Artificial sequence
  DNA replication origin
acagtcctcgggtggcgtcacctttgtcatttgaaaagtcagcaacaggtgcttttttcttctttcatgatcagttgaccagtagtcaggctaagcatggatcgcaggaccagccttcccgagttctctctgacgtgggactcagcccagatgtggcctcctggggagctcctttctgctctcccagcccacccctagaaacaagaatctcttttgtttgaagtactttctcccttctgcactgacctttatcttggtgtttgaggagtcagttacttgtgctgcgcctggaggttttgatgctggagagcaggaggtgcatctgtttcatctctgcacctcagtgtacccaggagtcagaggggctcagtgtgtctgttgagtgaacagcaggatgagtggatgaatgaatggatggacgggtgggtgggtagatggatgggtggatgggttggtggatggatgggtgggtggaggggtgagtagattattaggtgggtgggtggctgggtggatgcatgggtagatggatggatgggtgggtaggtggatgggtgggtggatgagtagatgagtgggtaggcagatgggtggatgggtgattgggtggatggatggatggatgagtggatgggtaggtggatggatggatgggtggatgggtgattgggtggatggatggatgggtaggtggatggatggatgggtgggtggatgggtagttggatggatgggtgggtgaatggatgagtgagtaggtagatgggtagatgggtggatgggtgggtggagggatgggtgggtggttagataaatgggtgggtgggtggatgggtggatggttgagtagatgggtaggtggctggatgggtgaatggatgaatggatggatgggtggataggtgggtggatgggtgggtaggtgggtggatggtgaaactcgggggctattcccttgggataggtagctctggtgaggacaggggtgtgggcagcagggtggccatgctctagctgaggcctcttgggaggataagacccctgttatcattcactcatttaggatagaacatggctgcatagagcacccctggaattttgcccaacccctgggttctctgccctccttctagatgttgtgaataatttgggagcttggcacttccctggcagggccatcgccaccttcagggttgcccagttcacactgagtgagcagtcccaggatcagggcaacacagttgccaacggacccgtgggcgtgtggtgggaggctgatc

SEQ ID NO: 19822 - DNA, 1068 bp, Artificial sequence
  DNA replication origin
ttcccggcgcgttgttgggtgtcctggaggaacgggggaacctgtggtttgggtttcccggcgcattgttgggtgtcctggaggaacgggggaacctgtggtttgggtttcccggcgcgttgttgggtgtcctggaggaacgggggaacctgtggtttgggtttcccggcgcgttgttgggtgtcctggaggaacgggggaacctgtggtttgggtttcccggcgcgttgttgggtgtcctggaggaacgggggaacctgtggtttgggtttcctggcgcgttgttgggtgtcctggaggaacgggggaacctgtggtttgggtttcccggcacgttgttgggttgcaacaatctctgttcttgtgacaccactccagcccaggcatgcggtgaggtgtccagctgtttcacggccctctgggagtgtgatgccctgaattcctatggcccaaggctcaggagcagcctctgcctttggggagagaacccaggaagggaccgtgtggcgctcggatgacatcctggttcaatattgtcacgcagttttcgttgaagaaaagaatggaaaatgctggttcatctaaactttctcatgttttatttaggatgctgaattattcactatggccctgagcctccagtgatccaaaactaagctgcccgttcatcagggacgcctcctggcactgccttttcctctgcatctcgtggggactctggcttggcaccccctggcccccgaggctctggtatccaggctcccctgaatcagctccctgaaaagaagtcggaggaaagcgggtgggggcatggcctcattccctggcgaggtgaaacaggaaggtgaaaacattcacacttaaaaggactgcacggtcctgcagctctgcagccccgaacccagagcctgggaacgtggccggtgagaattgggcttcagctcaaacccggtgcaagctgctggcttctcagggagacgtgttcactgctgctcagctgctccgtggcttggccggcacctggtcaacctgagtctcctcggggcaatctagaccctcacccttagg

SEQ ID NO: 19823 - DNA, 2174 bp, Artificial sequence
  DNA replication origin
agcccagaggtcactgctgccacctggctctggcattctcacaccttctggaagaattccagctgtaatgacggcagctgctcataaaaaacctggggcaggccggctcaaggcgagtcaggccaggcggctgcaggacttagcatcttcccacctggcctgagcagcctggaaactgcatccgctttcatgcagctgacaccagccagctgtccccgaggatgtgggatgcagtgaggccagaggcaccctcaggacaggaggggcacgaggcgcaggaggccatgaggctgctgagtggaggcgagagggacccaggacacgagtggctccgtgcaggggggctgagggtgaggtggggcagggggcggcgtctgtgggtgaggtggggcaggtggcaggggggggggctgtgggcggggcaggggcggggtggcggaaagggggccgggggcggggggctgtgggtgaggtggggaagggagcggggcagggctcttctccggaagtggacattgtgacatccactgggggaggagacatggcaaatccaggtctgaaaggagccccaggccaggcaccgtggctcacacctgtaatcctggcactttgggagactgaggcaggtgaatcacttgagcccaggagtttgagaccagcctgggcaacacagggagaccccatttctagaaatagtagaaagattagctgggcgtcgtggtgcccgcctgtggtcccagcttcaagggaaggtgtggaaggaggagtcctcatgcccagaaactgcagtgagctgagatggcaccactgcactccagcctgggtgacagagactctgtctcatgaaaaacaaaagaaaagaaaaaggaggttcacttcctcacaaaccagcggagcaaggatcagggctgggccattctctctggccttctcagggatcaagaaagggaacggggccagcattgccaaccctcagccccgggtccagctcccttcaggggtggggggaccctagacccatcctcctgggaggggctccttcacggcagcccaccccacccaccacgcctggtcctggacacgtgcaccctgtgaaaccctcacctccaactccccaagggccggcagctttctagcagggcacctggcaggagtctgggaaggcagggtccaggaaggcagggtccgggaaggcagagtccaggaaggcagggtccgggatgggtccaggaaggcagggtccgggaaggctgggtccgggaaggcagggtccgggaaggcagggtccgggatgggtccaggaaggcagggtccgggaaggctgggtccgggaaggcagggtccgggaaggcagggtccgggatgggtccgggaaggcagggtccgggaaggctgagtccgggaaggctgagtccgggaaggcagggtccgggaaggcagggtccgggaaggctgagtccgggaaggctgggtccgggaaggcagggtccgggatgggtccgggaaggcagggtccgggaaggctgagtccgggaaggcagggtccgggaaggcagggtccgggatgggtccgggaaggcagggtccgggaaggctgagtccgggaaggctgagtccgggaaggcagggtccgggaaggcagagtccggtaaggcagggtccgggaaggcagagtccgggatgggtccgggatgggtccgggaaggcagagtccgggaaggcagggtccgggaaggctgagtccgggaaggcagggtccaggaaggcagggtccgggaaggcagagtccgggatgggtccgggaaggctgggtccgggaaggcagggtccgggaaggcagagtccgggatgggtccgggaaggctgggtccgggaaggcagggtccgggaaggcagagtccgggatgggtccgggaaggctgggtccgggatgggtccgggaaggcagggtctgggaaggcagagtccggtaaggctgggtccgggaaggctggggtccgtggggatgggcagggtctgtggggacacgcagggtgtcccacatgatgcagcctgtcctcatatggggactctgagctctgagactccctgtgtgagatgtttgggtgcagagctgtgaagacacagaaggaaacgttgccgtctgcaccaggctccccaccgttggtggccct

SEQ ID NO: 19824 - DNA, 1736 bp, Artificial sequence
  DNA replication origin
ggtgggtgggtgggtggatgtatggatggatggatgatggatggatggagggtggatgaatggatggatggatggatggatggatggtggatggatggtggatggatggtggatgggtggaggggtaggtgggggatggatggaggatggatggatgagtgggtggatgggtggatggatggatggtggatggatggtggatgggtgggtggattgtggatgggtggatggattgatgatggatggatagatggagggtggatgggtggatgggtggatggatgagttggtggatgggtggatggatggtgaatgggtggaggggtaggtgggggatggatggaggatggatggatgagtgagtggatgggtgggtggatgggtggatggagggatggatagatggtggatggatggagggtggacgggtggatggatgagagggtggatggatggatggatggatgggtggatggatggatggatggatggatgagtgggtggatgagtgggtggatgggtgggtggatggatggatggatggatgagtgggtggatgagtgggtggatgggtgggtggatggatggatggatggatgagtgggtggatgagtgggtggatgggggagggtggatgggtggatagatggtggatggatggagggtggatgggtggatggatgagtgggtggatgggtggatggtggatgggtggagggtggatgggtggatgaatgagtgggtggatgggtggagggtggaggggaggaggggtggaggggtaggtggggaatggatggatggatggatgttggatgaatgagtgggtggatgggtggatggatggatggtggatgggggagggtggatgggtggatggatgggtgggtggatgggggaggatggatggatggatggttggtggatggatggatggatgttggatgaatgagtgggtggatgggtggatggtggatggtggatggtggatgggtggatggatgggtggatgggtggatggtggatgggggagggtggatgggtggatggttggtggatggatggatggatgttggatgaatgagtgggtggatgggtggatgggtggatggtggatggtggatggtggatgggtggatggatgggtggatgggtggatggtggatgggggagggtggatgggtggatggttggtggatggatggatggatgttggatgaatgagtgggtggatgggtggatgggtggatggtggatggtggatgggtggagggtggatgggtggagaggtggaggggtggaggggtggaggggtaggtgggggatggatggatgagtgggtggatgggtggatgggtggatggtggatggtggatgggtggagggtggatgggtggagaggtggaggggtggaggggtggaggggtaggtgggggatggatggatgagtgggtggatgggtgggtgcagggataggtgggtggtggttggcaggcatggacaagaagaggaagaacgaacaaacagatggctggagaatggacagggcaacagagggaaaggaacacaggatggtttcaccttcaaaaaaagaggaaggctggttccaaggagcagcggtccagccttaagcatttatttttccccggaattcattatgcctgtgaatactgacacacggggcggacatttacggatccacatcataaagaagttgttctatagaaattccaaaa

SEQ ID NO: 19825 - DNA, 1233 bp, Artificial sequence
  DNA replication origin
aaaccctttggtggcttttcatctgtttcagaccaaaaccaataaacacattcacttatgtcttgagtgaggccggccccaagggctccgtgtggtcatggcgcacaaggacctttggagaaacctcatcgtgcccttcgctggcccaacccccgcggatcggccgccccgggcctggttccagctcctgccagctgctgtgggaggcctcagaccctgggacccacagctgggaagctggcggggaggccgaggggccgtcagcaggtctcaggcaggcctctggggtgctcacaccaaccctgtcccatgagtgacctcaatggagcgaaggaaggggtgggaaggcggccgacgtttttctagaagcactgggagatgtacttggcgttctgttgtgtttacagaggatgtccatgttttcctggagcagtgtgaggaacctcgcccgcctctgcccagggcaggcgtgggagggcagggggccgtagtgtgcagagccagggggccctggggtgcagagtcaaggggccgtagggtgcagagtcagggggccgtagggtgcagagtcgggggcgtagggtgcagagttagggggctgtaaggtgcagagtcagggggccatagggtgcagagtcagggggcatagggtgcagagtcaggggccctggggtgcagagtcgggggcgcagggtgcagagtcagggggcatagggtgaagagtcagggggccctggggtgcagagtcgggggcgcagggtgcagagtcagggggccatactgcagagtcagggaccgtagggtgcagagactgggggccatagggtgcagagtcagggggcccgggggtgcagagtcagggggcgtagggtgcagagtcagggggccctggggtgcagtcagggggcatagggtgcagagtcagggggccacagggtgcagagtcagggggccctggggtgcagagtcagggggccatggggtacagagtcggggggacctgggttgcagagtcggggggccctgggttgcagagtcagggggcagaggtgaagccacgccctgggatgtttgacctccctgtgccgaggaggtctccccgcagccccaggctcctctccaccagcagctcaccctgcactggggaatctttgagagcacagcttttcttcttctagagacaggatctcaccctctcacccaggctgagtgcagtggggcgatcacagctca

SEQ ID NO: 19826 - DNA, 1052 bp, Artificial sequence
  DNA replication origin
gggagggagggagagagggagggagagcaggagggacagggttcagctctgtgctggaagccccccagctcctgtgctctctcctccctggctgcgaggcttcttggtgtgagttcacctcggaagggcctctgcacgcaggctttggggcttgggtcctgggggaagctgccacagatcccagcagcacctttgctccgggaaagctgacgttgatgagggcctcgatgggccggtacgtccatctgccccgggtgtggcccccagcggttgggccccggctgtctggtgactgtggtgtccggccccctcggcagtgtgcaccgtgcgccatctgtgcctggtggtgatggacgttgcccagagaagcacatctggatttcagccgcgagtggttcccgtggcctcgcatctgccgggcaggtgccccttcctgggtccactgcgccccccttagaggctggggtgtcttcactcagatccgagattgcagaacaatggaggagttgatctctgaaattgctccttgggcctcctaataggtgactaggtgactggcctgtgcggatgggcgaagtcccacggaggatgtgagccgggtgggcggccccagaggagagacaggcacagaaatagctgtggctcaagtcaccagggacaggcactcgcctgaggcaaaggaagggaggagcaagcaggcagggtgtcctggaggaggcggctttgaaagatgaataggaaccaagaggagaggagagaagtcgtgggaagggcccagggcagagtgacgaggaacgccagcgagtcagtgagtggtgagggcctcagggccagctcctccgagcctcaaaggccagcgggcagagatagagagagaaatgaggtcagaacagagcttctggtcgggcgcagggcctcacacctgtgatcccggcactgtgggaggcagaggtgggaggatcacttgagtccaggagttctaggccagcctgggcaacatagcaagacgccatgtttacataataaaagatggaaagattcgccaggcgtgg

SEQ ID NO: 19827 - DNA, 1508 bp, Artificial sequence
  DNA replication origin
ctgcttggcccgtgggtgctgtcttcctgaccgagggcgcccacgtgtgatttcacgtgaccccagcttgcctgccaggtggacagggactgcgaccgctcctggctgggcctgctcctccctccatgcagcttggcgtggcctggggcggccctgccaccgccactctgccctctcctacctgcccagcaagggtgctcgcctggagaaaatggctggttcctgtgtggacttggggctccctgactgggctgtgctgtgtgggaggtgaaggggctgtgtgctctgcggagtttagacggaagcctcagcagggctggacatggtgctgtcagccaagcctcggcacagaggtcacagaggtcagctgctgggcctcggcagggggtgctgtgggctgcagagctcggggcctgtggctgttccctgctgtgaccacaggccagggctggggcctgaggcttctgcggtggccctgtgaagagcaggagcctctgctccacccccagggagctcatgacagagatcggaagggaggttcctgaggggcggctgcttctgagtgcatggccgggtcctaggtctgcatcctcagaccgactcccagcttcaccctgagccaaggtccccacgggctgctggcacctgtggtccccaccacactcctcactcctagtttgcccagttaaacaatgaatagcccagtctcagtgaacactctgggcaaacactctgtggtctctaaagcccacagcccctgcaaggagccctgggcacaatggtgatgcccagctggatcaggaagagtgtgcacaatggtgatgcccagctggatcaggaagagtgtgtcggggccgggggccagcagcaccagaaatccgggccactgctgctgacatcatctcgggaggactctggagccactgaccacgcgggattgtgcaggcgtctacagggaccacggaccatgggggcctgtgtaggtgtctacagggaccacggaccatgggggatcatgcaggtgtctacagggaccacggaccatggggtcctgtgcaggtgtctacagggacggcagaccacgggggatcatgcagacgtctacagggaccatggaccaggggtatcatgcaggcgtctacagggaccatggaccgggggggctgtgcaggtgtctacagggaccccagaccacgggggatcatgcaggcgtctacagtgaccacggaccagggggacctgtgcaggcgtctacagggccactgaaagaaaaagagatgaggggattggccttctgacccctgctgggtcagtggacttggcaacagccattgtgggaagagagactccaccacctctgggcggtcagtacctcagacacagccacaaccttgtaagacacgcaggggctgggcatggtggctcacgctgtaatcccagcactttgggggtccgaggtaagaggatctttagagctcaggagttcgagaccagcctgggcaacatgg

SEQ ID NO: 19828 - DNA, 920 bp, Artificial sequence
  DNA replication origin
agggtgcctcggccaggcctctgcgtccagcgcaaggccctggcacacgcatccaggcttacagggggacggcacagggttctgtcggcctgtactgtggggcggactctgcgtgtcaggggtccggctgtgtgagggatgtgctctgtctcagcatcctatgcccacctcaggccaaggccgtgggtctcgtaggcctctacccgctgggcctcagataccttctcctccttggaaaaggcataaaggcctcccctccccaagtcgcgaaccttggttttgctgaaggcttgtggagggtattgaaagaaggcaggagtaggctctgagtgggtgttcacgggaagggaggccctatgcaaagccccgatcctacaaggttctggggtccccggtgtggcctggggcccccacagctcctgttggctcctgccggtggccacagaggatccacgtggcctcctctctcactgagcccacccgggacccaggcagagagcacctggggaagtctgggatcaggtggggagggctggatgggtgtgggattctgctcattctgcaggccagggagccaggcaggtgtcgggggcaggggctgtgaggggcaggagtgcacttggctgttggggcaatggctatgctgtagctttgctcacacactgggggtgacatgccttcacccgttctccccgaggccccacaggccccaccccagacatggctttccgacgtcctcagctgcgcattgatggataaatcctctgcagcccaggagctccaccagcctctgtctggacacttgagtgggggaggggagcggatgtggccaggccacagtagttgggaacccacagtgtccccgccagccagtggctgcacccggcacaaaatcctcgtgtagagctgcatccgagcac

SEQ ID NO: 19829 - DNA, 2382 bp, Artificial sequence
  DNA replication origin
agacgctttgctgatgaacagtgagcagagggccgggggcccagggcccggggcagtgacctctggtggcagggcaagtgctgacatccccgggctgccgggcacacggccgccggctcacctgctgaatgccacccagaggcctgcgtgatcctccaggggggcagctcctcatcctgccacacagcgcccggagacttctggaacacacaaccgcaagtggggtctaacctgcaactggaagagcacgtgactgtctgtgcctcggtttccccatcccacaggcgtgccgcccaggccaccatgtgggactgttcaggagacagtgcccggtccccagcaccaccctggagatgagacctgaagcaggtgccctccaagggcagctccagggaggggctcgcagagcagcgggggaggggccctggggggcagctgtgagtgagcaggagacacccggtgcccccacccctcacaaggccgagccccacagactctgcccaagggcagctctggaacacgtggcagtgccagctccccctggctctctctccttcacctaggttatcactaggtgtggaatggggggggaggggcagccctcccgggtcctgaccaccacgtgcgggggcagcaggacattcgcaagccagtggacctgtctgcctcaagtgccggaccccagggcccccacagcacctggtagccttctgtgtgtcctacccggataccagcggcctccagggctttcccttggacaacctttccctttggagcctgtgggggcccagcccagggcccaaaaccagctaggactgaggtgggcagtgggagcttctctggggcctcccagagcctggctggctccaccacctccctctgcccccacagcaccttcgagaagttcccccgcaaagtccccgtgggactcagggcagggctccagtccgtgtgcagggaaagagacaagccagggccactccccccaccggccggggcctcctctgggccccaactgtgatgtgccaggagcctcccgggagacacaggctgacctgtgctcagtgtggtaccctcacctggagcagtctctgtggtgggagccgctgggtgcaggagtaagacgtcagggcagagcccatggggacccccggcctggggacgtctggggcagaatcctccccttgctgcccgcttcttcccagccctcttgtccaggaccatcacccaggggacaccagggggggctccgaggctccaagggaacggtgtccagggagtcagggcggccaggtcctggggtgcctagagcgtctccagctgggaactagaccgtcgcctgcctggaccctgtgtccctcagctggagttcagggaccagcacagtgtccccacagaggggctctgggaacaccagctagatggggcagtggggccctgagcacatcccgctcaaaagccccataatgagaggccggggaagcggaacgctgtcacccctgcatctaattctgcctctgtgagtcttcatgacaacctcccaatagtacatccttcaggcccctcaaaatccatggcagcagggcctggggaccccctgaacaggcgccagtgtcacagaacctggggcagaagtagccatgcaagggtggaggccaaggagggaacaggtggaggggtgtggggtcacccagggccaaagggggaacaggtggaggggtgtggggtcacccagggccaaagggggaacaggtggaggggtgtggagtcccccagggcagttcctgagactcttgctgaggctgccaccaggccagcacgtgccccagaaaacggagtttgtgacgaaaactggagtggacttggacccaccttgtcgggtaggaggccccttggggcaggatagggacctgtgggatgtgtgcagagcccaaacctcgctgcgggtgggaggctgggctgcgccgcccctggcaccctggcctccacactcgccttggctctggatgcccagctctgtggcccaggatgcaggagggttggggtagggggacagggacgctttctgcacagccacaggccctgtctgtctacaccggctgcggctgccctgctgactcacactcagacgggttcacgacaggtgcacctcggttctggcatatctggacttgagaatgttaaataaaggatggaaaattccttccaaatccattttcttgtgtatatttctgttcctgcagcttctccacggatggagattgtctttgggaataacacagggtcgtgcagtccgcccggcggcgttttcgggcgagggtctggtgctggggagcgagcgcggagcgaggtgtctctttaaatacgctctgcagtgtgacg

SEQ ID NO: 19830 - DNA, 1447 bp, Artificial sequence
  DNA replication origin
gttgagtttggctccggagccgggagtggggcgcagattgatttttaaatatggagaaggagacgcatctgccgctggcgcgttcggtccgagccccccaccggtccccaccggcaccgcctccgccagccccaggcgcagcccccaggccgcccgcggaggggagggagcgacaggggccgcggctgctccctggcggggtcggggctgcgagctgccctccgcggggaccctccgcccgccccgctgaccgccgctgtcttcacagatgggagcagctcccggactgcgcccgccccgccgcggtcaccctgaggccaggggcccgggagcgcgacctcctggccgccgtctgggactttgaccttccagaggccatggaggctggcggggagcagggcgccacctgatcgcctccccctggacgcctcctccagcggcgctcacgcttccgcaactttgcagcgctcatggtgagtacgggggtcccgggggtcctgcagctgggggctaggccgctgcgggggggcggccacccgtatggggactcccaggctggaaaagttgtggaatggcgagctggtgaccgggcttccgggctcagtgccggggtgggaggctctgtggagtgggggccggggacaggccgcgtgtctgggcacctctgctccccgcgtgctgggtgctgatcatactaatgagttgcaggcatatggcaatgtggaatcatttaatcaatggaggcgacgtccctcccgcaaagctggcatccgtgccctgtgaaaacctggtctgtgcctgggctggggtccctgccaccccaagcccctccaccctggtcaccggcctcctccacgccaccctgccggccccttcccattagaaagttgatgaaaggcagtgcggacagacgtaggtgggcttcagcagtggaggctgtggcggagagaaggcggccgcgcacacggcaggcacgggaagggtgtttcagcgggaaggggctcgtggctggcagctggctggatcggctagccgagcccatcgtgggtccctccctgaggcaccagcaagcttttgctgcagttgctgaatgtctgggttccggaagggctgacagctgagtgaacaatgcattgtgtgtgctggtaagggacagctgacaggcggtgaggacccagggcacgtgcagagaatgccaatggcctctagaatgtgcggccgccacagacgccggctggcgtgcttcggagcagacccagtgttcgctgcataaggagccatcggtctgagtcacttgctcattttcttcttgttccgttcgaaatgtccaagcaagagagatgcctttgccaacattcagtatcgtcttccagtggctgcttcacctctgaggctggctgaggtctccgcacttacctttcagacacctgacaaggttgcgtctcca

SEQ ID NO: 19831 - DNA, 1153 bp, Artificial sequence
  DNA replication origin
cagacatagccgaacccccgcccatgactggctgtgggcatgcccaccctgactgcggctggacaccctcatgttcttggtgcctctcccaggctctgcaggccatagtgactgcccgggggaactgagctcctcagggtgcctggacggacaccacacctatttctggaagaacttattttgcccagttaaggacacgggggatgccgtggagaagaccctgacggaggcctgagtggacaggcgcggcttccctgagctccatccacccttcggctgtgtgatgggcaccaggctgctgagcgggtctgagctagctggtgacctgagttgtaccttcaaggacttcttgctacatgagggggcagtggcattgcccttcagggacttgcctttgaaggtaaaagcaggtttcttgggcacagggggcgcccttgcccatgccaggctcacctctggtgcacgatgtaggtgacgaaggaggccaggaggcagagcagcatgacggccgtgcacgcgtacaccacggggtgcaggaactcccctgggtagcggggcagggagagcactgtcttcagatcctgaggataaagcaaaggagacgtgtgtgactggctggtgggtctgtgtgggcggcgccgtcgcctgagcctacccttggggctcggcttcccctgcagccgctccaggcattttcgtgtggggtctcagggaaggggggctgcctggggaggtacggtcaggctgcgtctgtggatgctcagggagtgcacgggaggggccccacgtggccacggagtgctgtctgtcctcgccctccactggctctgctggccaaaggcatccttgtgtggctctgaggctggctcctggggccatgtatcggccgactgatgcctgcctccagcctcctctcttcccgtggcctgcgggtggccaggtgggatctggatgggccttacagagaggcagggaaaccatgggatggccccagccctgcactgggagccccacactcatcgaaaccctgcttgtcaacatcttccgggaggattctgtacgagcttctgcgagaggtggagaaagagtggagactgttcggcaccaacagacctggaccggaggccgcaaactccacctgcttctcggccca

SEQ ID NO: 19832 - DNA, 1022 bp, Artificial sequence
  DNA replication origin
agcccgggccgaggctgctgggctctggggggtgggtgcccgccaagggcctggctgaccgctgctcccccacaggtgggcatcgtgctgcactattctacactgtccaccatgctgtggataggagtgaccgccaggaacatctacaagcaggtgaccaagaaggcccctctgtgcctggacacagaccagccaccgtaccccaggcagcccctgctcaggtactgagtgcacatgggcgcgaggccccgccacctgggccctggacgctgcatgcaccttctgggtcttggcaaaccttctcaccaggccaccaggggcctgaggatgatccggtccatgggggagggtcagtgttcccagggagggtggagagcgggcgacggatctgagggtagggtggtgtgctggaggggaggggcgccggaggggaggggcgccggtcactgggggtggggcagagggggccctgagggtggagggtcccgggtggagtctgaggcaggcggtgccctgccctccacatctgcagctggagcccggctgctctggggctggtctggggctggcgtgtgttgggggctggacaagcctcctgtgctaccgagttgctggcgtgagaccctctatgccccgcagggcagccacactggggaaacgggctctggtggttttggcttcggcttcatggtctccgtaacatcaggcagctgactgtcagcgggtggaaaacctcacacactcaggcactcatttcaaggtggccctggcctgggcccttcaggccaggaggcaggtgtggtcccccagtgtctctgctgtgtgaggcccggttgctgggatgggacactcgccctcccccgccgccccggcggcctgcaccagctgttggtccccatccatcctcaggctgggaatgcaccgtggcctttgtgggaaccatgggcctgcctaggggggcggacacagcccatgatggcacagacctccctccctctctccctcagtccagagccagggga

SEQ ID NO: 19833 - DNA, 1305 bp, Artificial sequence
  DNA replication origin
ccacagacccagggcggttctgagggcctggctgtgcagtgcctcctaaccggggtgggagagggtgcccccaaatctctccacacaggcccacatgcatggggggctcatgctgggactaaggggagatgagaccaggtgaatccccatctagaaagtggcagaatccggtgcagagtccaggcttgggttgtcctagtaacaagggccacactcctgcttgaggggagaggtggatggcggctgtgaccttggcccctgcagctggaacgttcgggccgcagaggctgctggcttctcgctgctgggcctccctggactggcccctctgttccttgaccttgccctgaccagagggcaggttcctgcccacggagtccaatccctgcagagttgggggtcttggggggtgtccgccccctctgctgaccaggctgtcttgtggagaggggaggtccccagccgaggtggggcatcccccctgctcacacagaaaggggctcaggcgtgtgaaatgctcacggacaccagcgcagcaacattttacatggctgtatcttccctggactctgaaggtttggtttccaggaagcagagcagaggtggccgttgcatgtgggccaaccccagctgtgggccttcaggatggcgagggctttctcaaaacgtcggctgctcaggagcgtcctgagttcacgcagctgcttctcggggacagccgttttcttgttatttcttgttaaacacttgcagagctgggccggggacgggggcttacacacggctccttcatgcacggcggctgagactcggccactgcccatgtgagtgggagctggctgcgctgccctgtcccggcggagggtccggcaggaagtggtgtgggcattcttttcagagggcaggatgggaacggccagagagggtgtgggcgacgtgctgcctggagaggcgtctgtgcccttccctcccagaccgcaagattcttggaactcaggaactaaatttctgctggcgtggataacgtgtgggccatgtagagttctgggaatggggctggggatgcagggccgctgggaggggcttctctgatgaggaggtttcctggtggaggagggggaggtgagcggaggctctggaccagggcctggagggcagaccgtgagcaccttcggggtgtggggagaaaggccccgctccagcctgctggcctccctgaggaggtgcagcccagtctcccagcacagtcccccagcagccccaggcccagccacggagagggcaggccctcggcaaagcccaagc

SEQ ID NO: 19834 - DNA, 1601 bp, Artificial sequence
  DNA replication origin
tgagtgtatctttctgtggagacaaaccacacccaggaatgccaccactgctgagtcccgagtccttccagccccgccctgagtgtgcagaggccgtggggcctgacactgcatgacgggcagtgtgctgctcacccaagcctcagaacaaagtatgaaactgattgctttccatcgacacatccagcccagctgagcctggaggccgatttcacacatatttactacatccctgccgtttgtctctttctggtttcaacatttaatcaggaggggctggatgccaagcctggagaatatgaaccaggagggaccttcccgtcattgtcatcgaggggaggagaggtcaggggacagttgctctgcaataggaggtgggcaccgggcagaaggtcggggtctcacttaagaggaagctgaggtgcagggaggaggctggaatggagacgggaggtaaccatcccactggagggaccgaccctcagtgctcaaagggcaggtgaggccaggaaggggcagacaggaaggctctgagccacagctgagcagcaatggggggtctggggagtggtcgtgggggcaagcagtcaggcttccagctggggagaaaaagtatccaggtggtgtggaggtggcagagcaggaggctgagaaagggacctggaggcccgctggggtcagggcagtccacagagcaggaaagatgaggtccagggagcgggggctgggagaggaggagggacaggaaaggtggggaagactcctgggcctggaggtgtggcctgatctgggaaagggggtagagagtttggcaaaatgtctagcacccagacacgaatgctgggagagcagtgctgctgctgagctgcaaagacattgtgggggtggagctggttccatggaggatatgaggggcaggggtggggccggggccatggaggacatgaggggaggggtggagctggggccaagtggagctggttcctttgtgggactgatggacgggtggagctggggctaagtggagctgggaccgtggaggacatgaggggacgggtggagctggggccgagtggagctgggaccatggaggacatgaggggaggggtggagctggggccaagtggagctgggaccatggaggacatgaggggaggggtggagctggggccgagtggagctgggaccatggaggatgtgaggggaggggtggagctggggccacatgcacccagtattgagctgtcttgggatatctgagggaggcatcaggaggctgcggcaaatgtgtgtagtggtcaggactggtgggcagactgcaaatggtgttttgtggactggcaacagagtcttgcaacagagtctagtgtctagaatcttgagagtattgggaggtgacagtggccaccatgttggtcaaaggtgagggtgcctgaatccaaggaggcaccactgtgaggggttgggtggctgagccggtgcctctgtgggcctggggggtcctgtgtccaacacctctgtctcctccctgccaatcctcttcctccttcccttctggtgtccctccctgcttccttctccacggagtcaccctagcccca

SEQ ID NO: 19835 - DNA, 1425 bp, Artificial sequence
  DNA replication origin
cagacctcaaataaccgacgcggcctgcagaccccaaataaccaacactgcttacagaccccaaataaccgacgcggcccgcagaccccaaataactgacgtggcccgtagaccccaaataaccgacatggcccgcagaccccaaataacggacgcggcccgtagaccccaaataaccgacacggcccgcagaccccaaataactgacgcagcctgcagaccccagataaccgatgcggcccgcagaccccaaataactgacacagcttggtgcacttgatcagaaagggtggccgtactgcaaaattaagatgtcattattcatggctaaatggggaatcagcccccgagcacctatgaaatcacaaaaggtctgcttgtttctggagtgtcttccttttggctggcaaagggagcagaaaatgtggaaagttctgtctacttagaggcccttcctcaaagtgggctggccagcaggattaggagggagatgcccatggcaggcaggtggtctggaggcattaggagggaggtgtctgtggtgggcaggtggtctggaggcattaggagggaggtgcctgtggtgggcaggtggtctggagggattaggagggaggtgctcacggcgggcaggtggtctggaggcattaggagggaggtgtctgtggtgggcaggtggtctggagggattaggagggaggtgcccgtggtgggcaggtggtctggtgggattaggagggaggtgcctgtggtgggcaggtggtctggagggattaggagggaggtgtctgtggcgggcaggttgtctggtgggattaggagggaggtgcccgtggcgggcaggtggtctggtgggattaggagggatggttcccgggggggcaggttgtctggtgggattaggagggaggtgtccgtggtgggcaggttgtctggtgggattaggagggaggtgtccgtggtgggcaggttgtctggtgggattaggagggaggtgtccgtggtgggcaggttgtctggtgggattaggagggaggtgtctgtggtgggcaggttgtctggtgggattaggagggaggtgtccgtggtgggcaggttgtctggtgggattaggagggaggtgtccgtggtgggcaggttgtctggtgggattaggagggaggtgtccgtggtgggcaggttgtctggtgggattaggagggaggtgcctgtggtgggcaggtggtctggtgggattaggagggatggttcccgggggggcaggttgtctggtgggattaggagggaggtgcctgtggtgggcaggttgtctggtgggattaggagggaggtgcctgtggtgggcaggttgtctggagggattaggagggaggtgctcacggcgggcaggtggtctggtgggattaggagaggaggcacccctgg

SEQ ID NO: 19836 - DNA, 1482 bp, Artificial sequence
  DNA replication origin
cctccagaccacctgcccaccacagacacctccctcctaatgcctccagaccacctgcccgccgtgagcacctccctcctaatccctccagaccacctgcccaccacaggcacctccctcctaatgcctccagaccacctgcccaccacagacacctccctcctaatgcctccagaccacctgcctgccatgggcatctccctcctaatcctgctggccagcccactttgaggaagggcctctaagtagacagaactttccacattttctgctccctttgccagccaaaaggaagacactccagaaacaagcagaccttttgtgatttcataggtgctcgggggctgattccccatttagccatgaataatgacatcttaattttgcagtacggccaccctttctgatcaagtgcaccaagctgtgtcagttatttggggtctgcgggccgcatcggttatctggggtctgcaggctgcgtcagttatttggggtctgcgggccgtgtcggttatttggggtctacgggccgcgtccgttatttggggtctgcgggccatgtcggttatttggggtctacgggccacgtcagttatttggggtctgcgggccgcgtcggttatttggggtctgtaagcagtgttggttatttggggtctgcaggccgcgtcggttatttgaggtctgtgggccgcatcggttatttgaggtctgcgggccgtgtcggttatttggagtctacgggctacgtcggttatttggggtctacgggccgcgtccgttatttggggtctgtgggccatgtcggttatttggggtctacgggccacgtcagttatttggggtctgcgggccgcgtcggttatttgaggtctgcgggccgcgtcggttatttggggtctgtaagctatgtcggttatttggggtctgcgggccgtgttggttcggttatttggggtctgtaagctgtgttggttattggaggtctgcgggccacgtcggttatttggggtctgcgggccgcgtcagttcggttatttggggtctgtaagctgtgtcggttatttgaggtctgcgggctgtgtcggttatttggggtctgcgggccgcgtcagttatttggggtctataagctgtgtcagttatttggggtctgcgggccgcgtcagttatttggggtctataagctgtgtcagttatttggggtctgcgggccgtgtcggttcggttatttggggtctgtaagctgtgtcggttatttgaggtctgtgggccacgtcggttatttgaggtctgtaagccgcgtcggttatttgaggtctgtaagccgcgtcggttatttgaggtctgcgggccgcgtcagttatttgaggtctgtaagctgtgtcagttatttggggtctgtgggccgtgtttcggtttggaagtccaatggcaccgcggcacttagattccgtgtcacggcccggcttgccgaggatg

SEQ ID NO: 19837 - DNA, 928 bp, Artificial sequence
  DNA replication origin
gggcagctggtgggcggccttgggtgtggtctgggtgggagaagggtttgggcagggcccagggacgccccccagacagggactgagggagctggagtagccgtggtggccctgaagggaccgtgggtggtggcggggggtgggggtggggcgctgacaaagcctggaccacgtaggagctaagagctttgggattgagggacagtgaaggcgaaggcacaggccctgcggggagggcggctgggagctttggggtcccccacaggccgagggactgttataggcgaaggcacaggccctgcggatcagctcggttcccaggagcattttcaccacatttcgttactgtgtctttcacccaatccacactcgccccgtatggcctcgcactgggcagcggcccagggtaggggggcaaggggcctgggctccacgaggaatgcccctgcagagcggcgtgggtgggccaggcatgcgtctagccctgggcttggcctgaagccgatggaaggtggggaggggagaggaggaatgagggggagggagaggggaatggggagggaaaagagggagggagaaggggagaggtgagcgggagggataagttagggagagggtcttgctgggtggatgctggagcaaagcgccagctctcccctggggcagggtctctggaaggcagggaggggttgggggctgtagtacaccaggacctggcagtggtgtctcagggctgggtctgatgtgtggccctggaggctcagaggacaagggaacgtggccctcttgaggacagtgagggttggaggcttgcagccggtgtgtcaagggtcccagcagtgggtggttcaaggggcccgggaggggtgacaacgccatcggccgaccctcggctgtgctgagtccccacagtgccggcggggtcctg

SEQ ID NO: 19838 - DNA, 678 bp, Artificial sequence
  DNA replication origin
ttcgcttgggttcctggaggagtctctgctcgaggcgcctgcccaccccttgcctgactcggaactgaccagagctggggggtcagatgaggaggagaggatggaggaaagaaagaggcgcggccaaaaggaaggaagcctggggctccatcggctccacctggcacacaggtggcatccccaccactgaggaaggggggccctcctcgggctgcccgtttctggttgagtgtctgcgtctcttcatcgtgagaggccctgccacacctggggggagaggacgcctgtgggtgggttgggtgtgctggggggcagctggtgggcggccttgggtgtggtctgggtgggagaagggtttgggcagggcccagggacgccccccagacagggactgagggagctggagtagccgtggtggccctgaagggaccgtgggtggtggcggggggtgggggtggggcgctgacaaagcctggaccacgtaggagctaagagctttgggattgagggacagtgaaggcgaaggcacaggccctgcggggagggcggctgggagctttggggtcccccacaggccgagggactgttataggcgaaggcacaggccctgcggatcagctcggttcccaggagcattttcaccacatttcgttactgtgtctttcacccaatccacac

SEQ ID NO: 19839 - DNA, 1263 bp, Artificial sequence
  DNA replication origin
ttcacaacgtggctgtttgtcacaagaggctgagcttttggcctatctctgcttttgacatgccttcctcactaagcgtaatgatttctagttttataaataaagcaagagatgtccaactgttcctttcatttgaacacttagaggccattgtagggttattaattggcctaatttcaatatttctgtggctcggggaataggagggagatggggaacagccaacccgtggagcgaccagatcacacgggacatttacccactaagttcaccgtcttatacgggcgtggtttgtggtgcccaagacaactaccatggaaaccccaaagatcactgatcacagctccccatagtaatcatggtaaagttgaaatatttacagaattaccaaaatatgacacagagacataaaatgaacacacgctgttggaaaaatggcgctgatggacttgctcaacccggggttcccacagcctccacctgtgaaaaactcaggacctgcaaagcccaggtgcacctgtgcacgtgtgagtgcctgtgtgtgtggaatgtgccagggtacgtgtgtgcatgtgtgtggtgtgtgtcagtgtgcgtgtgtgcatgtgtgtggtgtgtcagtgtgcgtgtgtgcgtgtgcgtggagtgtgtcagtgtgcgtgtgtgcatgtgtggtgtgtgccagtgtgcgtgtgtgcaagtgtgagtgcctgtgcatgtccagtgtgccagtgtgtgtgtgagtgtgcttgtttgtgtgcatgcctgtgcatgtgtgtgcctgtgcgtttgtgcatgtgagtgcctgtgtgtgtgatgtgtgccagtgtgcgtgtgcatgtgtgtggtgtgtgccagtgtgcatgtgtgcatgtgagtgcctgtgcatgtggagtgtgccagtgtgcgtgtgagtgtgcttgtgtgtgtggtgtgtgccagtgtgcgtgtgtgcaagtgtgagtgtgcgtgtcgtgtgccagtgtgtgtgtgagtgtgcttgtgtgtgtgcatgcctgtgcatatatgtgtgcctgtgcgtgtgtgaatgagtgcctgtgtgtggtgtgtgccagtgtgcgtgcgtgcaagtgtgagtgcctgtgcatgtccagtgtgccagtgtgtgtgtgagtgtgcttgtgtgagtgtgcatgcctgtgtgtatgtgtgtgcctgtgtgtgtgatgggtgccagtgtgtgtgtggtatgtgtgttccagtgtgtgagagtgggggggcatgtacgtgtggaagtgtcat

SEQ ID NO: 19840 - DNA, 1263 bp, Artificial sequence
  DNA replication origin
ggcaggtagatgagcatcgcacaggagaacaagagctcggtcctatgtcggctgagtaacacccccagacatccacgttctcttccctgaaaccagtgaaggtttcacctcacgcgtcaagagggaccttgcacatggggttaagtgagtggcggtgaatggtggagactgccctgggttgtttggctgtactgacatcaccggcgtcctcttaaaagggagggcagagatcccagtggagagaggacgcagggctgctggctttcagggtggaggaggccccaagcccaggagtgacggtggccgaggcagccccagaaggtgccggggggggggagggaggcagtcctccccacaactcgacgtcggcccagcggggcccatttcggaccttacggcctctcgactgtcggatgatccccctgagttgctttaggccactgagctttcaccgtggccacagcagccacgggaaggcggtgcggccccagctgtgcggtgaaccccagctacacacagttacaggacgggcgtgctgctgctcacagggggtgactggggagcctcgtggaggagacatggtgtggatgtggcatgaggacgggtaccttaaaccatccctagaagcacgaggcaccccagtatcacagactttgggttccaaagctgactcagcgaaagggaaagtctctgccgctcgggctgatgtgaggaacaaacacaggctcctgcccgtcagtgaggaagagtgggcggcccagaagagagcggaagagacctgcacacgcttcacagaggcaagagaggacggcgcagccagcaatgctcacagacgggcgcagagggacgggcgcagagggactcgcggggcccctgccagggatgggcttgtgaggagttagcaggcttagagctgagccccgcatgggtgggacgagcctgcagaccacctgagccctcggagaccaacgtgccacagtcggcaggagggataaagggataaagccccgtggtctcgccagaagcgggtcccgtgcagccatggacatggggagccccagctaccgacggttacaggatgggccttaaagaaacacgtgcagggaaagaaatcagagaaatctgctatgaaaccaggtgagacaacaactccaggaacacacagctcgaagccagtgcagcctggggacgcgtgtgcctggggacgcgtgtgcctggggacgcgtgtgcctggggatgcgtgtgcctggctggtgaaccggg

SEQ ID NO: 19841 - DNA, 1308 bp, Artificial sequence
  DNA replication origin
gcaccaccggctccgggctccttcccggtgagccggcagagggcgcgggaggccgccgcttttctcgccgccgccgctgggcagtcaccgccgtggacgtgcaggcgcggggccggggccggggccggggccgggggaagggggtgctccgctgggtccagcatccaccatccaccgcctgacgtgggcccctcgcaacagcctcggcccaccggtgtccggggagttgttcccgcccgtctggcagctgggaacaccctctcctatggctccaagccccaaccagggtaggggtccagcttgtcctcctcctctgggcgctgacgaatctgtcactcaagcgtcatcttctgttacgtcgaatcccgtctaagccccaggcagactctgggcgtcggggaatggccaccccacccctctgtgcccaggtgcccagcgttggggcagcggctcgcacgccagggccactcgctgggacatctccgggttacgtgatttccgcgagtcaggccaaccactgcctttgggggaaggtttctagaaagggagggcggatctgaatctcggtgaaatcctaacagcttccccttgggagctatgaacccgacccagaggtgtccggaggggcaaagcgggagctgactcacggcagagcacattgctcagagcccggggaaggtggcctggccagggagggtgcagagccggggagggtgcagagcccaagagggtggcttggccggggaggttgcagagccggggagggtgcagagcccaagagggtggcctggccggggagggtgcagagcccaagagggtgggctggccggggagggtgcagagcctgggaccagccctgagtgcatcaccacgtgacccagtgccaagtgagggaggagcggccatcagtgccggggcaggtagatgagcatcgcacaggagaacaagagctcggtcctatgtcggctgagtaacacccccagacatccacgttctcttccctgaaaccagtgaaggtttcacctcacgcgtcaagagggaccttgcacatggggttaagtgagtggcggtgaatggtggagactgccctgggttgtttggctgtactgacatcaccggcgtcctcttaaaagggagggcagagatcccagtggagagaggacgcagggctgctggctttcagggtggaggaggccccaagcccaggagtgacggtggccgaggcagccccagaaggtgccggggggggggagggaggcagtcctccccacaactcgacgtcggcccagcggggcccatttcggacct

SEQ ID NO: 19842 - DNA, 1336 bp, Artificial sequence
  DNA replication origin
gccccaggtccaggcccaggccttgctgcttcgtcctgggcttccccaccacaggtgcctgggagggacctcaggcagagcccacccgctgctcccagctcccggttctgggtgcccggtactcactacgccgtgtcctcgtcctctgtcccgtaattcctgatgttcgtggcagccgtgaccccacagatgataaaggggacccctccgctgacgaggtaaaacctgccggggaggaaggcgttgacccccttgcagacgccgcctgcatcctccggggtcagcgctgtccctcccccactccgcggggcaagggagagcagcgggtgcgggcggagcaggaggagaccaagaaccccgacccccgacccccgacccccgaccactgaccgagcagccagtgccggcctcgctggcctcccgcgggcctctgcgcctggagagggccctgaccaggtcctttcacgggtgggccccgggagagctccgttggctgcggacttctctgcaactgcagggagcccctggctacaggcgggactgctccccggggcagcgtggggtcacacagggagctgtgcgtcccaccgggtccccaggtcatggcccctccccgcgggtagtgcgtggccagtgaccagcagtgccccgttttaaacagttttaaggccccgctcagcctcaggggaagaaggtcggagggccgaagtatctgctccctgtcagaccgaggaaccccgccttggaggggcagagtctcatcctgacaggcacagcccgagcccagggcaggggctgaccttcccctctgcagggcctggcaacggtgctgagggcgcccagggatccaagcgggatgcagcgtgtcccggaccgggtgcacttgctcaccgcctccagcccccacccggacccatgagacaacccctggctgccacccctacggagcatgggtgacctaggggccggctcagagaccatcccccatggacgctgtctccccggctcctgcgaacacctgggttggccacagacccctgccccacacgttcagtgggctccaaggtgcagtggtgggagggggtggcctgtgtctggtagttctcagggactccctaggaaacctgtgcttcccagactctatatcccaagaagatatccttcaagaataaagatgaaataaagatactttctgataaaaataaaactaacagcattttccgtgtatcgacctgtacttcaggacatgttagatgaaattcttcagggtggagggagagtagacactcctgcaggcaccgcacctgtggaaaaccccaaccagacctgcacggtg

SEQ ID NO: 19843 - DNA, 719 bp, Artificial sequence
  DNA replication origin
gccccctgcagagcaaagggccctgcacccacccggcctagcgagtggctttgcacagctgcggcttgggggccttgggcgtttctagagtcgctgagagtgtggatgggaaccgggccctattggccctaccagcttgggaggtggggtagccaggaaagtgtcccaggtgcgggtagaggcagagccaggcagggggccaggtgcagggcgggtctgggtgggcaggggcaggaaggacagagctgggtgggtggggctggtgtggggtgggtggggccaggaagaggtgaagtggggtgggcggggctgagcagagggcagagctggatgggaggggccaggcagagggtggagcctggtgggcgtggccagcgtggggtgggcggggccaggcggaggtggagctgggtgggcggggccaggcggaggtggagctgggtgggcggggccaggcggaggtggagctgggtgggcggggccaggcggaggtggagctgggtgggcggggcaaggcggagggcagacgggcgggccatcctggggccgcagaaggaactgagggccctgaatgagaggttccaggctggctctgggcactgatggctggaccgccgttcctactcgatggggtttcccttctcagctgagctctgtgctgttgccaaatcgctatttgtccccaggcccctcccatagaaggcaaaccaggcctgcct

SEQ ID NO: 19844 - DNA, 890 bp, Artificial sequence
  DNA replication origin
caggttggtcatcttgcaggggcccggtgggtgcgcgaagccccgtggctggcccagtcccggcgagtgcaggcaggcggcgcggcccagcgcggccccgttggcgtcaagtgcggggtgggcgtccttgcggggcgggcagcatgcccaccagcactgccacacgtcctcacgcttggcgcagtggtggatgagcacgaagagtcccagggtcacgcagaaggcgccgtacaggcagctgaagaccatgtccaggaagtggccctgtgacaccgccagcgccccgaaggcccacgtggccgtgaacaggaacagcgtgaaggcggcggcgcgcagctgtgcctggaatgagtgctcgttctgcagcacggaggcgccgggggcatcgtgtgcgggtggggtgcctggccggatcccacggccgccctcgggtgtcgccagccgccgctgctcctcgggctgtgtgcgcagctcgtacctgcgccctgggtggcgccgcagctgcacgtaggtgcccaggaagtacacacaggtgaccagggtgatgatggcggctgggccgtagaaggcgcccaggctgggctcccaggccatccagcagctgtggggagacgcacgtcagtgtcagcggggccagcacggccaggactcaggacgccccctgcagagcaaagggccctgcacccacccggcctagcgagtggctttgcacagctgcggcttgggggccttgggcgtttctagagtcgctgagagtgtggatgggaaccgggccctattggccctaccagcttgggaggtggggtagccaggaaagtgtcccaggtgcgggtagaggcagagccaggcagggggccaggtgcagggcgggtctgggtgggcaggggcag

SEQ ID NO: 19845 - DNA, 1279 bp, Artificial sequence
  DNA replication origin
gtgcacatgtgtcacagacaaggaggaagagggagggagggaaagctgtgcacagtttcacacccatgaccctctggactccctcccacctagggacgggccacttgctttcacagaagtcttgctgtcatccacatctgtcctttgagtcagggcttggtacccagatgttcatggagacgagaaaaagggaaagggattttgtccatgagaatctcccgtctgtcagccccttttctttttggaataaaccttcgtgttgctaagtgcctatactggagtggaatccagtcccagcggtggctggttttggaagtcgagtcttcactaaaggatgtctgggcattttcccaagccttgggcccgtgaaagccccccattggccctctgaggctgacagccatccccaaagtccagagcagcccccagcatctgtggtgctctcagccctgcagggctggggctacgacaaggacagggctgacagggcacactgagtgggcagaggtgtgcaggggccctgtgaagctgcaggggtggctcagacacacgacagcggagggtcccgagggttctgcccagagcgagaatgctggggacagacctgccgccgccacccccggagtagaacgcaagacacacacattgaacactgggaaaggtcagggcagccccctcctgcgatctcggccctgcccggccacaccaggggaagccaggactccgtgggcagcagggcatctcgggcagggccatgctggggtctcagtgggtcctttgatggaatcccctgctctgcctctagggtgccccaggactggagaccacaggacagaaaccggatgaccgtgtgcgggaccagcacgcggaattgggataaggggagtgggcgtggcccggagcgtttccccgctgaggtctttcacaaggaaggggcaggggtgtgatcacaaggaaggggcaggggtgtgatcacaaggaaggggcaggggtgtgatcacaaggaaggggcaggggtgtgaacggcttctgaaaggcggggtcacttcggtacccccagtgacctcatgtggcagatgggccccccactctgctctgaagctcctccaggaacaccgtgtcctctgcccccatctacacagtagtttcgtttttccagggtcccgttcggatgttgccggtcccgtcggtgccaaacggcaggccttctagcaatttacccttgggcagcccgttctggctggggccaccaaagggcagggactgtgtcctccgcagc

SEQ ID NO: 19846 - DNA, 1026 bp, Artificial sequence
  DNA replication origin
tttgttctttgtgaggctggttaatagcatccccgtgtgtttttctcaccctcgatggggtagaggggcacctgaatgtgtggcccccgtctgtgtcctggatcctggggcagggctgctctccctggcccctgcagcccctcatgaactttccaccctcagtgcccccggctgagcagagaggcgtcccaccattcaaccaaagaaagtcaacattgaacattaaacctctgtgtgtttctatactgacttagcctcatgagtccacttgggactggtgttgggccatatccaattgcacgtaacgttttggagcataaacatccacagcccaaccaccctgaggggctcctggctcggagtcagcttccaccagaccatgaagccagagccagaccctgcgttccgcacctgactttcgtgccacttccttccttgtgtgtgcccgtgtgtctgcatgtcggatgcaacggagcgtgggtgcatgccagcctgtgtgagtgtgcttgcctgtgtgcctccgtgtcagacgtgctggagcgtgggtgcatgccggcctgtgcgagtgtgcccctgtgcctgcgtgttggatgcaatggagcgtgggtgcatgccggcctgtgtgagtgtgcttgcccgtgtgcctgcgtgtcagacgcactggagcgtgggtgtatgccggcctgtgcgagtgtgcccgtgtgcctgcgtgtcggatgcaatggagcgtgcgtgcatgccggcctgtgtgagcgtgcttgcccgtgtgcctgtgtgtcggatgcaatggagtgtgcgtgcatgctggcctgtgcgagtgtgcctgtgtgcctgtgtgtgtgtgagtccgtgtgcctgcgtgtcggatgcgatggagtgtgcgtgtatgctggcctgtgtgagtgtgcttgcctgtgtgcctgtgtgtttgtgagtggcttgtgggttgtgtgggtgttgacgtgttagtgtgtgagagtgtgcgcctgtgtggtgtgtaggtccctctgtgggagttgtgtgcac

SEQ ID NO: 19847 - DNA, 4792 bp, Artificial sequence
  DNA replication origin
gtatgggctgaaatttcaccctccgtgtgcccaggtggcggcggtggtggtgcgtttgcatgtggtgggctggagctgcgcccgtgtgttcttctgtgtgtttgggaggctgagttctcgtggtctgagtcgtctcaattgagtactaggtcctgtgtcacgtgggctgtgtatctgtggtctgtgtctcctggtaaacactgtttaaaatgagttccggggtctctgcctccaagggagtgcgggacgctggcgtgggctgagctgccagggtaaagaatccactgcagcacctgtggcttcagtgcctcggtggggtggggccgatggcctgcaggtgagcagtgttaaaggaaacatggttcaatgatgcttgttaaaacacggcagacttcattcggggccactgggtccctgggtgtgagacagcctgggctggtaccataggggagctggtctccaggtccctgttgggggggtctggtctctgggtccctgtggggggggtctggtctctgggtccctgtggtgggggggggtctctgggtccctgtgggggcggctggtctctgggtccctgtgggggtgtctggtctctgggtccctgtggtggggggggtctctgggtccctgttggggggtctggtctctgggtccctgtaggggttctggtcgctgggtccctgtaggcgggtctggtctctgggtccctgtgggggggttctggtctctgggtccctgtggtggggggggggtctctgggtccctgttggggggtctggtctctgggtccctgtgggggcggctggtctctgggtccctgtggtggggggggtctctgggtccctgttggggggtctggtctctgggtccctgtgggggcggctggtctctgggtccctgtggtgggtctggtctctgggtccctgtgggggggttctggtctctgggtccctgtgggggcagctggtctctgggtccctgtgggggtttctggtctctgggtccctgtgggggggtctggtctctgggtccctgtggtggggggggtctctgggtccctgtgggggggtctggtctctgggtacctgtgggggcagctggtctctgggtccctgtgggggggttctggtctctgggtccctgtgggggcggcttgtctctgggtctctgtgggggggtctggtctctgggtccctgtggaggcggctggtctctgggtccctgtaggggttctggtctctgggtccctgtgggcgggtctggtctctgggtctgttgggggggtctggtctctgggtccctgtggggggggtctggtctctgggtccctgtggtgggggggggtctctgggtccctgtgggggcggctggtctctgggtccctgtgggggtgtctggtctctgggtccctgtggtggggggggtctctgggtccctgttggggggtctggtctctgggtccctgtaggggttctggtcgctgggtccctgtaggcgggtctggtctctgggtccctgtgggggggttctggtctctgggtccctgtgggggtgtctggtctctgggtccctgtggtggggggggtctctgggtccctgttggggggtctggtctctgggtccctgtaggggttctggtctctgggtccctgtgggcgggtctggtctctgggtccctttgggggggtcctggtctctgggtccctgtgggggcggctggtctctgggtccctgtggggggttctggtctctgggtccctgtgggggcggctgatctctgggtccctgtgggggggtctggtctctgggtccctgttggggggtctggtctctgggtctctgtgggggttctggtctctgggtccctgggggggcggctggtctctgggtccctgtggggggttctggtctctgggtccctgtgggggcggctggtctctgggtctctgtgggggggtctggtctctgggtccctgtgggcgggtctggtctctgggtccctgtggaggcggctggtctctgggtccctgtgggcgggtctggtctctgggtccctgttggggggtctggtctctgggtccctgtgggggggttctggtctctgggtccctgtgggggcaactggtctctgggtccctgtgagaggttctggtctctgggtccctgtgggggggtctggtctctgggtccctgtggggggatctggtctctgggtccctgtggtggggggggtctctgggtccctgtgggggggtctggtctctgggtacctgtgggggcagctggtctctgggtccctgtgggggggttctggtctctgggtccctgtgggggcggcttgtctctgggtctctgtgggggggtctggtctctgggtccctgtggaggcggctggtctctgggtccctgtaggggttctggtctctgggtccctgtgggcgggtctggtctctgggtccctgttggggggtctggtctctgggtacctgtgggggtgtctggtctctgggtccctgtggtgggggggtctctgggtccctgttggggggtctggtctctgggtccctgtaggggttctggtctctgggtccctgtgggcgggtctggtctctgggtccctgtgggggggtcctggtctctgggtccctgtgggggcggctggtctctgggtccctgtgaggggttctggtctctgggtccctgtgggggcggctgatctctgggtccctgtgggggggtctggtctctgggtccctgtaggggcggctggtctctgggtccctgttggggggtcttgtctctgggtccctgtaggggttctggtccctgggtccctgtaggcgggtctggtctctgggtccctgttgggggttctggtctctgggtccctgtgggggcggctggtctctgggtccctgtgggggttctggtccctgggtccctgtgggggcggctggtctctgggtccctgtgggggttctggtccctgggtccctgtgggggcggctggtctctgggtccctgtgggggcggctggtctctgggtccctgtggggggttctggtccctgggtccctgtgggcgggtctggtctctgcatccctgtgtgggggtggctggtctctgggtccctgtgggcgggtctggtctctgggtccctgtgtgggggtggctggtctctgggtccctgtgggggcggctggtctctgggtccctgtgggggcggctggtctctgggtccctgtgggggcggctggtctctgggtccctgtggggggggtctggtctctgggtccctgtgggggcggctggtctctgggtccctgtgggggggtctggtctctgggtccgtgtgggggtggctggtctctgggtccctgtgggggcggctggtctctgggtccctgtgggcgggtctggtctctgggtccctgtggggggggtctggtctctgggtccctgtgggggcggctggtctctgggtccctgtgggggggtctggtctctgggtccctgtgggggggcctggtctctgggtccctgtgggcgggtctggtctctgggtccctgtgggcgggtctggtctctgggtccctgttgggggggtctggtctctgggtccctgtgggggtgtctggtctctgggtccctgtggtggggggggggtctctgggtccctgttggggggtctggtctctgggtccctgtgggggcggctggtctctgggtccctgtggtggggggggtctctgggtccctgttggggggtctggtctctgggtccctgtgggggcggctggtctctgggtccctgtggtgggtctggtctctgggtccctgtgggggggttctggtctctgggtccctgtgggggcagctggtctctgggtccctgtgggggtttctggtctctgggtccctgtgggggcagctggtctctgggtccctgtgggggggtcctggtctctgggtccctgtgggggcggctggtctctgggtccctgtggggggttctggtctctgggtccctgtggggggttctggtctctgggtccctgtgaggtggctggtctctgggtccctgtgggggggtctggtccctgggtccctgtgggggggtctggtctctgggtccctgtgggggcggctcatctctgggtccctgttgggggctctggtctctgggtacctgtggcggggggggtctctgggtccctgttggggggtctggtctctgggtccctgttggggcggctggtctctgggtccctgtgggggtgtctggtctctgggtccctgtggttgggggggtctctgggtccctgttggggggtctggtctctgggtccctgtggggggggtctggtctctgggtccctgtgtgcgggtggctggtctctgggtccctgtgggggggtctggtctctgggcccctgtgtgggggtggctggtctctgggtccctgttggggggtctggtctctgggtccctgtgggggggtctggtctctgggtccctgtgggggggcctggtctctgggtccctgtgggcgggtctggtctctgggtccctgtgggggtgggtggtctctgggtccctgtgggggggtctggtctctgggtccctgtgggggagtctggtctctgggtccctgtgggggcggctggtctccagggctctgtcgggggcagcaggatagtcagtcagtggtgggattctcaccctgacttgctctttggaccaaggtgggctcattggtcaactggggaggaaggaagaggcggcagca

SEQ ID NO: 19848 - DNA, 1133 bp, Artificial sequence
  DNA replication origin
ctcccgacctaattccccctgggtcctgggcctcactgggtgctcttggccacgggcccttccctggcagccttgcttttgtactcacagtggaggctgcttgcctcgcccctgccacacctcccacaggggctgccgtccttccctgatgctgtggcctgacggggcaggaggctggggtccctggtgctctccaggagctccagctgtggacactgtgatatttcacccctccttccaggagggccgcaggctgaggccgagacacgcggtttcccttgaggcattccaagctgtggcctggcctccgctggctcccagaggcccccgggggaggcacaaatgccgctgatgtcagagggcagcgtcacggatctggccccagaagtttctgtgtggggcctgcctgcccttctcccctgtgacctggggaggccccagccttgcaggggagggtcactgcccctgcacggcgctaaggcgggaggcatgtggaaggagagggacggtggcttagagaccctgcgtgtgaatggcgtggagcccaccgtggttcccgaggcccctgggtcagcacctccagagcaggactgaggccccggacacacaagagagtcacaaggttcttatttctgcttcccgtggatgaccatcctgcccatgaaatccagccgagcctgaggctgctcccagtacatccaggaggctgacacgatgcagctgggccctctccgccagccctgccctctgctctgaaggctgatgctactcagccaggcccaggcacctggcccctccccaacatcagcctgcttcttgctgggtgtgtgtgaaatcgattttaagccttcaggaggtgtaagtgacgcacagtgagctagagtgcagccccacaggctggggcccgcggctacaccgtgaggccatcgctagcctcctgcagtgccatgtccacctgtctgctgtgcccctgccgccagcttggccctctctcccccggtttgcctgtgggccgggggtcctgtgaaggagtgtgagggggcacgggctcacagccctggagggtcagaggcgtcagggacgtgctggagccgcatctcactctggagaccaggccggatggagaagtggat

SEQ ID NO: 19849 - DNA, 2438 bp, Artificial sequence
  DNA replication origin
taggtatcaaaaccattttggcatttagcttcctagatacatttacaggagtgactaacaattttacttcaaaatgtgagtatttacatcacaccagaaatgacattatttgccatcatttacatgtctggattttttaagaaacctggatgttgacgtcaacatgtgtgagtgatttggcagcttttcaaaattgttttagggaaaacgagagccaaggccctgaagacccctgctccacccgcctcagcacgcagcccagtccagctgagcgccgactgtgggagaccgagtgagaaggacaaggccgatcctgacagcgtccgggtgtgacaagggcccggtaaccccctcggagcaaggtctcaggagaagcatctgggagtcctaccctgggcccctcatggaggagggagggtgggcagggcctgggcagggagggaggaaccaggttcctcactccagccaggagccacagttcaggctgttgcctctagcagaggggaacgtctggtgggaaagggcagtggggtggggcagaggatgggtagaggccatggaagagttggaagaggacgaaagtgccaccaagtcatggccctggaccacggacctgatcgtgcagctgggaagcccctcagaattccgacaccaccacaagcatcctcgggaggaagctgtgccagcacatgctgggcacacagggctggcaccgagaggcaggagggcttgatgaggaggccgttccttgtggctcacggagggctcttggccgtttccgcgtggcacccagaagctgctcaccagctctagaagacgtggggcgatgaatccagaccctggaggaactgcgccctcgtccagcataactgaggtgccaggacacaggaccgacatcgcaccctccacttgggtcaaagctttatcactgcaggcgagtgtgcgggcgcccgggacaactcgcaaaacgtctggaagttcccaccactccccagaacaacagagaccaaagcccacaaatctttaaaggaaagcagcaggtgcgtaaaagaaagagcctgcggcccctgcccgaggcccctccccacgtgcccagccctgagcagcagcagcgctgagtgacccaggtgtgggaaatgcctgctgaggggttttaggccgcaacagccgaagctgacacggccgactccaggagcctgtgagttctgcattttaccaaccgcatgcacgtctttccaggagtgcttgccctatggctgccccccaaattatggggttacctttgccccctattcagtgtctatatcctcaccccaagcccgtgaggtgacctgggcactcggtgacaaagtcctgtgcttgtggggtccctggtgccttccctttggggtcacgtcagcccggcgttcccccggaggcacaagtctgggtggcagctgagaggcgtcaggggcacatccagacctgacaaaggaggcggccccagccctgcagcagagggcccaggagcccaggggctcagctccaatgtccaggtctgagcaccagggtgcagcgggatcaggctcctggagcagagtctgcctgccacttccgcctccttccaagacagggactggggcgctgcaggccctgtggggcccacagagagagagctcagggacagctggctgaggccaccctctgtgagactcctcctctccagctccagcccactccaccttggcttgctgcccaagcttccaaacacccaaggatgggggaggctgcacctgactgctgactcggtggaccagggtgggccccagggtgggcattttcaataaggtggggctgcctggctggacgcagggagtctgcccagcacctgccccactcccagcctccggcttcagtgcccacctggctcccggggagctgagcccctgaactccctgccaggccagagtgacagcccgggtgaccgaccaggggacagagtgctgggaattcacgtccctgaacacactgcaccctcccactctgcggtcaaaagccctgctgctccttcaagccaggagcatggattaagtacctactgtgtgcctggccagccacacggacggggagctgacagccgggccctgaagccgccctctctcctgtgggagttctgggggtggccggggaaggtgagattctcctccaccctccctgcctcttggccgagcttggggctatcctggctcttctgaccgcggcactaccgtgggccggggtcaccctggcgctgaagaaagccccggggggcctttggggcaggaagaggtcaagagccccaggaccccccagggtcccccaggaccggggagggtcgggtgcccagtgggtctctccgatgcctccaggtggggatgaggcagcgttattgccccacccccaacatccccgggcctccg

SEQ ID NO: 19850 - DNA, 1683 bp, Artificial sequence
  DNA replication origin
ggctccgcccccggtgcctcccccaggaaggagcgacgttccctaggcgccgggtccggacagcgccgcgcagcccccgcgcaccccgcgccccccgcgccccccgggcccgccccgtatccctgaccgcgtcccctggagacactgcggcagcggcgggcgggcgggggcgggcgagggccgggcgcgtctccatggagccagggcgcgcgtagccgagcccagcccagcccagccggaggccccgggggcggtgcgcggcgcggccgcaggatgcaggccatggacccggccgcggcggatctttacgaggaggacggcaaagacctggacttctacgacttcgagccgctgcccaccctccccgaggacgaggtgagcccccggccccactggggggccccttccgccgccgaggggtccgcggagagcgcccggggggaggacccgggaggggctgtgagctcccgcctccccaggcgccctccatggccgaggggttcccaccgccgttctcagcccccgcgttaggattttcacccggaggggacagcacccccgaatgcgcacgggacggcggcgggtgggcagcccctgcagaagttggtgcgcggtagctcctggtggaaaccctggcgggacagtgtgggggcagcaaggaggacggaggggggtctgcttactccctgccgggccccaggaggccagcggggtgcagagcagcagagtccaatcaggcgccgctcaggagctgggggatgaggtccccggagctgaggttcaggagcggggggtggggggagcgctggatgactgccccccgagactgagagctgcttcctgctctctggttttccgggccttcacccaagacccccctaccccgcaaggtgcagaggggctctgcctgccatctgcataccctggcgcttctgctcatggaccgcccaccctacagcaccggctgcccagacgccaccttggctgggtctgaccctgtagctcagctctggcttggctgggatggagtggacaagccaggcccggaagcatgagaggtggcccccaggggatacagcagctcccagagggaccctcaccctccagggatccgagatctgccaaacctccaacaggcaagagcccagacgctgggcgcctgcgtctccgggtgacagcgtcgtcacctgcagccattagtgggatgttgtggcgccctctctttaaagccggccaagtaagcctggagcagggaatcccggctgcagcagccgcgggcctgaccccctcgcagtccccacctgctgccccaggggagtgggctctgaagggaccgggagtttctgctgtggaagcaccgtccttctgggaaggttcagccccaggaggccctcggcccagccacctagaaacagctgaggctgtgcgggggttggcgatgcccccgcccccaccatggcctggattcggtgcagttgaaggctgcagagaggagcagccaggggaggcaataaagcttccaagatcacctcggctctgaccgagagggaggggcagcccgcagccttcagaaacgccccaggacacatcccagggtatctgttaggaggcggccctgaggacgcagctcttcccacagctccttcgtgcatcagaggcctgagccttgagggcctccccgct

SEQ ID NO: 19851 - DNA, 1087 bp, Artificial sequence
  DNA replication origin
caggaggccctcggcccagccacctagaaacagctgaggctgtgcgggggttggcgatgcccccgcccccaccatggcctggattcggtgcagttgaaggctgcagagaggagcagccaggggaggcaataaagcttccaagatcacctcggctctgaccgagagggaggggcagcccgcagccttcagaaacgccccaggacacatcccagggtatctgttaggaggcggccctgaggacgcagctcttcccacagctccttcgtgcatcagaggcctgagccttgagggcctccccgctccgcacacggaggcagcagccggtgccacgcacacaacacgccgcgccaggcgcgagcccacttggagccacaggctgtctttctgcacactccccactcccgctccccacccccacgcacacaccagtgtcctcgggccggccggacagctcccggccggcacagtactggggtgggtggctccatcctgtgacgtccaccaaggcctccaggtgaactgtcatcccaccgagtttgcagcgtgcagtgggaacgttcaggtgggcccttcgcagacactcctggaaagcatcgggtggtccctggcccaaccctgtgcccagtactgagcccaacacaccccatgtctcagaattcccctggcgttcagactctgcttcccacacgtgtttggcttggaaggttctgaaatctccatcggggcacctgacttgcatgggaaaaccgtcctgggtgaggtgagggcacggtgaggttgcatcatcatcccagaatgccggaaggccaagggtgcagggcagctgccgggaaagcacggtggcgccaggcccaggacatatgcaggcttcataagatgtaggaactcactcattctacagctaattataatggctggctccatgatggggtcaagaaatagacccctatggacacccaccggagcccctggaatgtccctcccttgacatggtcccaaagaaaatccaaatggctgctgaacatgtgaaaagatgtttgctcattgcaatcaggaaaatgcaaaatacacccccacgaatgccttc

SEQ ID NO: 19852 - DNA, 805 bp, Artificial sequence
  DNA replication origin
acagctaattataatggctggctccatgatggggtcaagaaatagacccctatggacacccaccggagcccctggaatgtccctcccttgacatggtcccaaagaaaatccaaatggctgctgaacatgtgaaaagatgtttgctcattgcaatcaggaaaatgcaaaatacacccccacgaatgccttcccaagaccgccaggctggcaagaactgaagagcggacagcggcttgtgctggcaaggacggcgcagcagctctccctcgcgccagtgggaggacaaatggagcagcctctttggaaaacagcccagcattcgctggtgaagtagaaggcaccagtgccctgtgtcccagcaacttcactatggtgtgggccccagagacacgtggccgtgcgtgtgtgagaacactctcagctggaacctaccagagcatcagcaagtgggccagcaggtcctggaggaagtgaccaggttggatcccagtacaggcaaagaaccaccagtacacgatagacagggagatgttctgtgggggtgatgcaaggagggcttcctggaggtgtcctgcccgggattcccatgagatttcagtcactgtggatgggggtatgggatctgaggcagaacagtgcaatccaggcagaacagcggctgcagaagaggcacacagtccaggcggctggagtcgatggatgggcaatgctggctgccccatgggaattcagatgagacgaagagggtgcaccggtttgggtgccagagcaggacgtgtcccgggtccctgagaggcaggcagca

SEQ ID NO: 19853 - DNA, 938 bp, Artificial sequence
  DNA replication origin
ccaccctctggaaagccccagagaggctgagaccatcctatccctgaggggaggcttcagccacagaccccatggaattcaccgctaaagtcatccagagaatctccgacggaattcagacacgcccacctctcatgggtgctggggctccaggtgtccggcttccctgaggggaggagggggctgcccatcaccaggcatctcccctccaggtctgagcaggagggcgtgctgtgtgcgagtggtggccctgctggcacggctgacctgggctcccttcccgggtccacgtgtctcgacaccattctgtgggctggcggcaggcgcctgacctgtgagtgacagccagaggcaccccagggccccgcagggggacggggaccggctgagacgcgcctcatgctgactcccttcctcctaagcagcacaacctacggggtcctcagactgacttaccgcttggtgcacgtctgtgcccgtgtttgcaggcacgtgtgcgtgggcatgttgcgctgtgtgcatgtgtgtgccagtgcacgggagtgtgtacatatgtgtgcgcctgcgtgtgcaggtgcatgggtgtgtgcatgtgtttgtgtgtacgcagtgcccaggtacctctttaaccagcctcacaggcgtcgctgggagcttcgggctctctggagtcctgaggagtcctgggcggtgctaagagggcggcaggcttgagcccaaatcaaacacctttgatcgatcacgggccacaggaatggggcagggagattcccgccatagaaagagctggaagggcctgggaaatgatgtcatcaagcccctccctggaccgcaagaaggagatggacgggatgtgccaggaccccacgaacagacgcagagccagccccatggccaggccccaccgggcgcccatgccctgatcccgtcgtttgttg

SEQ ID NO: 19854 - DNA, 1097 bp, Artificial sequence
  DNA replication origin
catcaagcccctccctggaccgcaagaaggagatggacgggatgtgccaggaccccacgaacagacgcagagccagccccatggccaggccccaccgggcgcccatgccctgatcccgtcgtttgttggcctcctgctttggtttgagcccttcatccctttcctgtgcctggggggcctcttgcagtgccagccgctggggcagggtagggggaccggaggcaggaggtgcctctcaggacatcagcccagtggctccagtacagccagagccgccctgtgcactgggggagggggggccagcgatgggggagaaggggcctctgcctcctcctcacgggccccacccatagtgtccaggctgcagcccccggccaccccctcctacctgcacatggggtgccccggccggggagcagcacacccaagagggccttcagctccatactcgggtgcgtgcgagtgtggattgtgcagccttgtgtgttcctgtgagggtgtgtgcaccaagtgtgggaatgggtgtgtgcgggtgtgcatgtctgtgcgtgcatatggtcagtgttaggcatgtgtgcggtggcatgtagtatgtgtgtgagtgtgaggtgtgtgtgtgtatgaggatgtctgttctcattgcatgagtgtgtgtgtgtgaagcggatggaactgtgagtgtgcacacaccttgcaccagcgtccgagtgttactgtgtgagcgtgccctgtgttggcgtgtgtccatgtgggatgcatgtatggggatgcgtgtgtctgtgtgagggtgagcacgtgtgctaggtgggtatgtttgtgcatgtgcatggggggggtgtgggtgttggtggcaaccatcgtgatcacagctgagccctcgcggagtccaggagcccactcggatttggaggtgagcccacatgggggcggccgagccacatggagggaaccgccgtgactgtgtcctccgtgtgaattgcctggaacaaatgttggcagcgcgtgtggttgtaagtcatgtgagtgtcaggatcacgccccgttagctctgcacgagtccacagttggggatgtccactccgtcgcctcgctcatct

SEQ ID NO: 19855 - DNA, 1106 bp, Artificial sequence
  DNA replication origin
gtggatgcatgggtggatggatagatggatggttaatatgtgaatggataggtggatgtgtggatgggtgggtggatgggattatgaacaggtaggtggtggatatgtggatggatgagtgggtggatgggtggatggtggatatgtgaatggatgggtgggtggaaagatgggtggaaaggtagatatgtggatggatgggtaaatggatgggtgggtggatgggtggatggatagatggatggtggatatgtggatggatgggtggatggatggtgggtggatgggtggatgaaaaggtagatggtggatatgtggatggatgagtgggtggatgggtgcatggtggatatgtggatggatgggtggatgaacaaatggatggatgggtgggtggatagatgggtggatggtggatatgtggatggatgggtggctggatgggtgggtgggtgaataggtagatggacatgtggttggatagataagtggatggatgggtgggtgggtggttgtatgtgtggaggatggatgggtggatgaatgggtgagtgggtggatgggtagatgaatggatgagtggatggatgggtgggtggatggtagatgaacaggtggatgggtggataagtagatagatgggtagatgaacaggcacatggatgggtgggtggatggttgggtggaggatagatgagtagatgcatgggtgagtaaatggatgggtagatggatggatggatggatgggtggatgaacaggcagatggattgatgagtgtatgaattgatgggtggatagatgggtggaggatgggtaggtgggtggatgggtggatgaacagtcggatagggatggatgtgtggatggatgggtgaatggacggatgagtgtatggattagtagaggatggacgggtggaggatgggctgatggatgggtaggtagatgggtgaatatgtagatggctggctgggtggatgggtgagtggacgtgtggatgggcagttaagtggatggatgggtgggtgaatggatgggtggatggatggatggatgggtgggtgaatgcatggatggatgggtgggtgaatggatgggtggat

SEQ ID NO: 19856 - DNA, 1308 bp, Artificial sequence
  DNA replication origin
ccctgccggccaccatgagactcctcgtggccgtgccctggctaccgtcctgaggccccacggggctccgtgctgcaggtagcgatgccaatgcagacacggcctctgttcaaaggcggcctgagagacaccagaatatgcgtgagccacaaacgccccagatgctgcagctgcagctctgtaacgcacccacctggcgctcctggtgggggcaggtgaaattcagttgtgaaacatcaacccatccgtttattgaaatgcccatgagactaacacccagatgcctggcaccaatgccacaccggcaccaatgccacactggcaccaatgccacagacttctgaagctgagcctgagtcacctctgcctgcgtgggtgcctgcaaggctggcacaggcaacatgatgcacatgagagtgtggaaatgggtgtgtgcataggaccagcatgtttgcgtgtctgaccacgtgtgaggcagtggacgtggtaggcatgagagcgggtgtgtaatgtgtgcattctggtgtgggcgtgtgcagtgtgaacaggcatgcctgaattttcatgtgtgtgactgtgagcaagagtgaatatgtgtgtacgaggcacatgtgatctatttgaacactcgtgtgtgactgtcagtgtgtgaatacgtgagtttgtgtgatctctgaatgtgtgagtgggtgtgtgcgtgtgtgcgtgtgtgtgcgcagcatgtgtgtgtgcatgggtgtgttgcagcgtgtgtgcagcacatgtgcataggtgtgtgtgcatgggttgtgcagtgtgtgcatgggtgtgtgtgcagcgtgtgtgtgcatgggtgtgtgtaacgtgtgtgtgcagtgtgtgcgcatgggtgtgtgtgcatgggtgtgtgcagcatgggtgtgcatgtgcataggtgtgtgtgtgcataggtgtgtgtgcagtgtgtgtgcatgggtgtgtgtggcatgtgtgtgcatgggtgtgtgtgcagtatgggtgtgtgtgcagtgtgtgtgtgtgcatgggtgtgtttgcagcatgtgcacgtgtgcatacatggcacacaggtatatgtgcatgaggatgcacgtgtgtgggttcaagaactcaccctgcagcgctccgaaggactcgatggagaggaccctcctccccacagcagagaggctccggcacacgcgacaggaggatgtgagctgcagcttctcttcacacagcgcgatgatgctctggggacgggaacacctcagacaggaaggctcggaggaggggccatctcccgcagccacccacccgacacggccggat

SEQ ID NO: 19857 - DNA, 1115 bp, Artificial sequence
  DNA replication origin
caggaggccgcccggggaccccagcactgacccggaggttctgccgacccccgaaggcccggagtctgagacgagccggggccccagagcctccccaaccaaggctctgctgtccaccccggtgagaaatggcgagagccacagccgggaggggctggccggcctcgtcctggatgccgagcgcaccctcggggagctggacagagacgccctcaggagaagccgcctgcggaaggtgcagacgttccctaggctgctgtccgacagccccgaggccaccctctgcctgccgctgacccgcgggaaaagccagctgcccatatcggaattattctctccggaccccaggaaggcctttctggacaggaaaaatggcctttctagcttccaggctcagcccaaatgcaggctgtggccggagcaggagccggaacaccagctgggacgggttccctgtgcaggccgcagcacggacaggggccctggggtgcccggcagtccaggacagcccgagacttcacaccccagccaggggccagcagaggcccctgcagaccctcgagatgctagcggtgaagcccagactcccagggacgatgagagaattccagaaggagctaggcagctggaaagtgcagccgcggagcaggtgggtgcctgggtcttgtgtgtgggtggaggggtcggcggtcagtgagtccggggccgggcctctccacagatgcaaacgctttgtttaactcagagaattaaccttcaccctcgctccataattaaagacattttcattgagctgccccgtttctgaaggaagctgtggctgcggctggggatgctgtcacccaggcgtggcctctcgggtagacgtttgcctctggatgacccagaaagcagccgcctcctcagccctgcccggctcctcacacagccccgcacggccgtcccgagggattaattttcttccgggaagcaaggccagcagccccggctccgtgatgtcatttcaggggctccgtgtccccagtcctgatgctcacagccctcctcatcttcctattctgacggtttaaaagttagaaaccaaagctgtgggttgagcttgctcatctgtgggg

SEQ ID NO: 19858 - DNA, 1267 bp, Artificial sequence
  DNA replication origin
cgcctgttccgttcaccggagacactgtcctggctgcccctgggtcccttggttcaggtgggggccagttacgcatgggacggcaggggtgatgggacagtgggggggcgtgggacggtgtggggggtgggacggcgggggtgtgggacggcggtggggggtggaacagcagtggggggtggggacggcgggggggatgggatggtgcgtgcgtcacctgggtgctcagggcgtgtctgcagtgcgcggaggcaggccaggcacagggcccacagctcgtactcccggaagggccggcccagctgggacaggaggtcctgcagggacacccactgtgggcaggagagcggcgaggtcagtgtggacaccccttgccagggcccgccgcctggagaggcatgtccgggggacaggccagggtgaggcccactcagcccctgagtaggcgccccccacacctgatagaagggctagggaggtccctaagtcaactccagcgtgtgggggccgtggggagactggggcccttggccctgtgggtgggaacgtcccacggtgcagccactgcagacgacagtgctgccgttccttgaaaagctcaacatacacctcccaggtgacagcagttccacacggccacattccccgaggaaccgagggcagggctcacgcatacgtgcacacccatgttcccagcagcacggctcgaaatagccaacacggggagcacccaggcatccacggacggacgcaggggcagtgtggatggcgcttggcctcgggacagggatggggggttctcacgcaggctccctggggaggaaccgtgaggacagtgggctcagtgaagagaccagacacacagctctgtccatcccactcccacgaggcccctggacagagctcatggaggggaagggtgggacggggtgcaggggccaggctcatggaggtggagggcgggacggggtgcagggggcgggctcgggggttggggtttcgtgtgggctgatggggacagctgtgcaacagcgtgaacacacccaatgccgctgagctgtgctcttgcagagggttgaagtggtggcttttgttcggtgcattttctcacatacacacacaccgtgacaccaggcatgcgttcagcctgggaggccactctccactccaaggcctcacggacagctgggaccaaagtccaccctccaacaggtggctcggccaccctgtgcctccgtgtgcccttcgggaaggtaggctgttgtgc

SEQ ID NO: 19859 - DNA, 1405 bp, Artificial sequence
  DNA replication origin
tgagaaggcgttttggaggctgatggtctcttcctcctggtacacctggggaggaggtgacagccctgggccaggtgaccacggagctccgccagcgccggcaacacccacagggcgtcccccaccacccgccggtgccgtggagcttcctgctggggaggagccgggcatggcggccacacggcccaagctctgcagcggctctgcctggagagggagccgttggggctcctttgcctcccaagccaaccaggtttccgtgggttccagggagtgggagacgccagcaccacccgagactcagggcccacactcccaaagctctctgcgcccggggtgggtgctgggccgccgtccttgggaccctgccctgatcctgatctgggtccctgggggccactgtggggcctttagatgggactcgagtgtccccctgcacccccagatgcacccacccacagctcggtggtcaacagagaccggggtgtggggctgccgggagcggccaggcaagggcaagtgcgtccaggagggaggaagctaagcgcggcggaggaggcggcggcctggctgttctagcccacctggcagatggaagctctgaggtgggcaaggattttccggctgtccatgcctcgctggaggaggtagctgccgcacacctggagggaggagacagttcacacgtcccgacaggcctcagccacggctgcaccgtccccgtgtcactgggtccccatctgaaaaagctcagggctgccaggagggtttcctgtttgttctcaccgacacccaactacaggccccggacaagcctttcttagagcatttcctgaaaagggctcacagtcggccactgtcccccaggctccctgggagggcagaatcccaaacccagcgttggccacagacctggtagcctcgtcgcctggacactggcagcccttggtcacgttcgcctgagccccacgctccctgcccccggccactcctgtcctccctttataagctcaggccttgtgcacatgggaactgagctcagcttccccagctctcagtagttactgaataaaatctgctttcactgcttggcagacgcccagccgtgtctagatctcatcctcctgcagcagaggaggcctgagaggcccacagggtctgagcaacccgcccaagaccacagagcagtcgaggcggagacggctggacccaggtccccaaccccatggccgtctccgctcccccagacacggctcctccccaggaggtcctcctgatcacccacacccagctcggctcctccccaggaggtcctcctgatcactgacacatgagagtttggctcctgccccacctgctggtccacccgctggtccccatgccgggtgcgggtgcaggtcccagc

SEQ ID NO: 19860 - DNA, 2093 bp, Artificial sequence
  DNA replication origin
aaggctgatctcggctggggggctgggggaagggcgtggggcggccccgagtcccctgtggggctctccctggcccgggcctcctctggggcgtctgcggcccccacgtacccatgatcagagcctccagcccattgtccaggtagccatcgaaggcaaattcctcctggatgaggcgcgtggcctcctgcagcgacgggcaggccgtcctccctgggagtggcgaggcatccacgcagggcagacagagcctccggtctgcgggccgcggcctctctgggacactgtctggactctggtcatcacgttccccggcaggggtggccccggggccctctggctcctggcccgggcgctcggtggccttgcttcgtgggggcttgggcgggtggcgtgggccgtggtgggccgtggtgggccccagggcgtcgggcctgaggcccccggaagcaactccaggtgggatcggctcagccggcccttgctctacgggcagcgcagatgccttcgtgggcggggcggggactggagagccgggagctgccgatgaggccccctctggctggtttgctggggcctggggtggagggcaggggcggccctgggctgagtcacgctgcactgacgccccaagaggctctggggctgctccctgtggccccggaccaggcaccggcccgtcaggcgtcttcaggctgggggacccagcgtgggcctccagggagagcttctcctcaccttctccctccctctggccgcccctctcctcggactcctcctgggccaaggcaggctggtccctacgggaggagcagagctcaggaggggctgcctgcgcccgggacccagcagctccggggtgtggggacgatgctcacctggccacacttgcgttctgcgcgaggacaatgggcttgaagtgcgtggcctcggaggtgaacgctgcaggcagctgggtggcttcttcaccgcaggggtgctggccgggcacgggccctggcacagccacaagcccggtgtcgctgttcaccggcaggaagcctggggagccagggggctgagggtgtgggcgggcggagtggccccagcacgtgccgcaccaccggctcatcccacccagtgctcatcccacccagtgcgtggtgccgcgtcccctcccgcatggccctgggggcttcctctgtgctgggccctggaatgggagggtgggtgagactggtgcttgggggagggccagcaggcggggacgggccagcaagaccaggccccaccagaagccttggaggggcctgctgagcagggctcagtacgggggtggggtgggctctgtgtggactctgggggtctccagatgtgggcttgggagggccagctgctgggagatgggagtgagaacctggagctggggcctgagcgactgggagttttgggagatgggggctggcaggggcaggcaggctgggctgcatgggccacgttggccgagctctggacttgcttcccgggtttccgagaggtgcccggctgtgtctgtccatgcagaggtgggggcagctgtggtgtcaggtgcaggagctggtggggcagcaggggctggtcaggtccccacctgggctgggctctggggctggtgccacactgggcttcagttcaaccactgagaaggcgttttggaggctgatggtctcttcctcctggtacacctggggaggaggtgacagccctgggccaggtgaccacggagctccgccagcgccggcaacacccacagggcgtcccccaccacccgccggtgccgtggagcttcctgctggggaggagccgggcatggcggccacacggcccaagctctgcagcggctctgcctggagagggagccgttggggctcctttgcctcccaagccaaccaggtttccgtgggttccagggagtgggagacgccagcaccacccgagactcagggcccacactcccaaagctctctgcgcccggggtgggtgctgggccgccgtccttgggaccctgccctgatcctgatctgggtccctgggggccactgtggggcctttagatgggactcgagtgtccccct

SEQ ID NO: 19861 - DNA, 1688 bp, Artificial sequence
  DNA replication origin
tgctggctggacgctgggacgtccccagcctggcactcatgtgccctgggatcctggggctaacaagcccacttctgccttgtcaccaaagccccggctcacaggcccccctctgcttggagagcggatcccacctggctcccggcggctcccactgtcccagtggccggtgacagaggaccccccacctccaaggtcctgggctcctgctcgcccccagaagaggacggcctttggctgggcacccccaggagaggacggcctttggctgggcacccccaggagagggcggcctttggctgggcacccccaggagagggcggcctttggctgggcacccccggggcaaaggcagccccgctggagcagtgcagtctgaggctgctgggaccctggggcgccccccgcattgcagagagcacagaggagccgcccagcagagctcctgccgcggggcccgcccagcacttacccaggcggtgcagcgacggcctcttgctggacggggagcgggggctttggctgccctcgagctgtgacccagcctcctcggccgtgctgacgacgagaatgcaggtcagtccccacctccgcccactgggaggaggccacagtctccacagggcggggcccacaggcccacacgtctatgcggagctctcgctggaggcggcaggagctcacccctctcagtcactaaggggcacagcagccgacgggatccctgggtcattcactgcttggggtccctggggggactcgggagcagcctctcagtgctgcggggccgaggaggccggggctggggtgggtgcccttgctcacagctgtgtttactccacacgcacgcggaggagctgcccgggctgctggcaccgcgtggagctgtgagcaaggcaatgtggggtggccgccgccccacccaacacagctcagtgctgggccctgtggggtctggggccacctgtttgggagtctcttcacctccttggggccctcacactggtccctctgagcagggagccctgtggccatcactgcccaggccccctgcagcctcccggagagcccctgcctcatattctctgaaagccctttcgtcctccagaagaaacccaggtccgatgggaaagctgtgagtaggcgtcaggcccaaggaggggctgctgggacccccacccatctccaccaagggtagcccctctggagacagcagcgagatggaagcggagggttgggaggggaaggctgggcccgggtcaggcagcagagcccaggcacagtgggcatcagggaggggcgggaatgcagggccgaactgggcacccaccttggggagggtgacgcctgcccgttgaccaccttaaagaggttctgcagcaacttctcatcccagtacaggtcacagaacttctcggaaatggcgccacagaaagtggcaaaggtgagatctttcaaggcgaagatgtactcccctggttttgcaaaacgatggagacaagtgagatggtggcagggctgctcatctggttcccttgtggctgatgaaacggacaaggctgatctcggctggggggctgggggaagggcgtggggcggccccgagtcccctgtggggctctccctggcccgggcctcctctggggcgtctgcggcccccacgtacccatgatcagagcctccagccc

SEQ ID NO: 19862 - DNA, 1004 bp, Artificial sequence
  DNA replication origin
aggtggggactgacctgcattctcgtcgtcagcacggccgaggaggctgggtcacagctcgagggcagccaaagcccccgctccccgtccagcaagaggccgtcgctgcaccgcctgggtaagtgctgggcgggccccgcggcaggagctctgctgggcggctcctctgtgctctctgcaatgcggggggcgccccagggtcccagcagcctcagactgcactgctccagcggggctgcctttgccccgggggtgcccagccaaaggccgccctctcctgggggtgcccagccaaaggccgccctctcctgggggtgcccagccaaaggccgtcctctcctgggggtgcccagccaaaggccgtcctcttctgggggcgagcaggagcccaggaccttggaggtggggggtcctctgtcaccggccactgggacagtgggagccgccgggagccaggtgggatccgctctccaagcagaggggggcctgtgagccggggctttggtgacaaggcagaagtgggcttgttagccccaggatcccagggcacatgagtgccaggctggggacgtcccagcgtccagccagcaggcttggtgttagggacaaggtgggggtggtggtcaccctcaggctgtccgtagtcgtggccaggcttggtgacgggcccagttcctatcaagtcggagaccaggcgggcaggctggggcatgaggcccgtgcactcctggatggcaggaaagccctgcacaggggaagctcccgcagggacagagctggggaccactttttaaattccagaagaaaagaggagagcgtgagggggcagagggacacagtcctgatagcagagccagcgaggacagggcccggccccaccccggggcgagtacgagtttggaagcagtgagggcgcagagtggggctccatctggggagaggcctctctctgtcacccggccccgtgcggcagttcagggtcccagcatctcccctgcactggg

SEQ ID NO: 19863 - DNA, 1647 bp, Artificial sequence
  DNA replication origin
cagcctgcccgggctccgcccacaggagccactgtccacgtaacctgcgtctctttctttcaaggaaaagagaagccagccatggccaggaccagcagcagggccccctgctcacccacctcggtgtcggatgtggactcggacgcactgtcacggggaaacttcgaggtggggtttcggcctcagaggtccgtaaaagccgagagagcgcagcagcctgaggctggcgaggacagacggccagctggcggggcctcagacgtggaggcagtgacccgactggccaggtccaaaggggtcggcccagccttgtcccccggcccagccggattccagagctgcagccccggctggtgcagcgccttctacgaggccgactgcttcggggccgacgtccacaactacgtgaaggacctggggcggcagcaggcggacggggccctgcccgacgcccagagcccggtgagtcccaggccttggcactgccgggtggggcagggcgtctccttccagcagagcttcctggtcactgcaggtgacagatggcaccgtgtgcccagagcccccaacagggtgacactggtcctggtgcccccaccccgtggctgtcaagatggtcagggccccctccctgggctgagctccacgtctagggacaggctcgtctgcactggtgctcctggtggctccacgtctgaggacagggaagggcttttctctcatggtcgcccgggcgatgggttcacaggaggcccctccatgctcgtgaccaggttgcgttcggtcgtgttttccgtggggcaggcacagcctccgggcccttgggcagcctcgctctgcagtgaaagaaaacaccaaaaacgcctgcccagcaagtctagactgggcctggtcgctgcagcctggtccgggctttctggccagcagtgccatcctgggtcaggagcagctgcaactcctccctggccagcagggagaggaggtcttagaccggggagtcctgggtgcaggagaggcctgcagagctctggacgcaaggtgggaccagtgacccacagccccgacctgggctgcattctcgagagccccgggactccagggtggatgacaggaggggcccagtggccatcagctccgggaacctctcctaccaccgtctgcctcgagctgagccaccgtgggaagcctcccccagcctctgggcatcggagcccttcctggggctcctccttgctcctctcctgccgcctcctggcctgcactttatgactcagtccagaacatgacccggtgtcccttcagggcaggtgaggggacaggggttaagctctgtgaagccttcacttcatttcagcttctgggccacgtgaaagacccgcatggtgctacagcctctgcacctgcatctcggacaccccacacagggcctgagggggcttcgaggacgcaaaggccgcccccggggctggggagagaaaagggcggccggcacagcaaacaccaaacgacccggcccccaaacgcagggagtccagcagggagcactcagcccccaaactcacggcgtccagccgggagcactccgcccccaaacgcatggcgtccagcggggagcactcggcccccaaactggcagagtccagcggg

SEQ ID NO: 19864 - DNA, 1370 bp, Artificial sequence
  DNA replication origin
ccccccaaccccgttaccccaaggaccctctagagagggacgtggcccccccaaccccgttaccccaaggaccctctagagagggacgtggccccccaaccccgttaccccaaggaccctctagagagggatgtggcccccccaaccccgttaccccaaggaccctctagagagggacgtgggcccccaaccccgttaccccaaggaccctctagagagggacgtggcccccccaaccccgttaccccaaggaccctctagagagggacgtggccccacctccgaccccgttctcccaaggtgagctgcccctggtcacatggggccacctactagccaggggtccaggctgaccctcggacctagttctcagcctcctcaactgcaagacagacacagcccacgcccaccgcagggtctctgtgccgttgcgggagacgtccgtgtgcgtgactgggcacgtgtgcagtgtggtgcgttcttggtgtgtgtgcatgtgtggtgtgtccgggtaatgtgtgatgtgctttgttgtgcatgtgtagtacacaaatgtgatgtgtatttaggcttgtatggagtgtgtgatgtgtgtggtgtgtgtatgtgctgatgggatactgtctggcatgtaagcacacgcatgtgtggcgtggggtataatgtgacatgtgtgcacgtgtgtggtgtgtggttgtgggatatcgtgtggtgtagtaggtacgtgtgcggttgtgaggtatagtgtgatgtgtgtgcatgtgtggggtgatgtgtggcttgcgtgcccatgtatggtgtgtgatgtggagtattgtgtggcgtgtgtggtgtgtggttgggtattgcgtggcaggtgtgcatgtgtgtatggcatggggtgtagtgtggcgtgtacacgtgtgtggttgggttttgtgtggtgcgtatgcacatgtgtggtgtgtggtatgcggtagtgtgtgtgtggtgtgtggagtatagtgtgtgtggtgtggggtacagtgtgtgtgtgcacgtgtgtgctgtgcggtgtggggtatagtgtgtgcacatgtggtgtgaggtatagtgtggcatgtgtgcacatgtgtgatctgtggtgtgtggcgggtatagtgtgtgtgtgcacgtatgtgtggtgtggggtatagtgtggcttgtgtgcgcgtgtgtggtgtgcgcgtctggttgtggagttctgtgtggctttgtgcatgtgtgtggtgtgcgcgtctggttgtcgagttctgtgtggctttgtccacgtgtgtggcgtgcgtgtctgtggttgtacagtttgtggcttgcatggcgtgagtgtgagtgctgtgcttccatggaaggagcgtctcctggccgtgatgtgg

SEQ ID NO: 19865 - DNA, 915 bp, Artificial sequence
  DNA replication origin
tcttacttggagcgggacctggtgaccccagcccacgacagccaagcgccagctgagctcaggtgtgaggagatcacagtcctctgtaataggctgtccgtctgctgggtgaaggcatccgctgggtgaaggtgcagacccctggggctgggggactctggcctcctgagaagctgtggaccctgatgcctcctgggcaggtaagccccgtgaaggatgagctggtcgaggcagtgactctctaggggctgcacagtgccctgcctgacagcaggtggggcaggtcaggggaggagcccccagtccagcccaagccccacaggacctagaagaggctgagactgggccccggcgctggagcttgaccttgaccttggtcagaccacggagccgatccgttccacagactaagaacccacaatgagcattcggccaggaggagcccagggtgggacgctgggcatcacaagccccagcccaggggccaggctcaggcacagaggggatggggcctggggtggagtggggtgtgtggcggagcccagtgctgggggtggtgcgtgagggactctgtgtgtggtgagcacaggtgggggtggtagcagtggtgggtgcagcttgtcctgggtctccaggcggcccacagccaaggatcacccaccactgaggggagccatctctggctgcagatgtggacgtggctgtggaagtggccgtggatgtggatgtggccgtggatgtggcaggcagtgctgggggagagctgggagggcggctgacccccctcctcctgatgtagtgaagcctgtgccctgctcccctcagccttgggtcgggtgtggttccaagggacacagagttgggttcactgcattgggagagggttcaggccacggccttataggaggcgctgcc

SEQ ID NO: 19866 - DNA, 932 bp, Artificial sequence
  DNA replication origin
agggtgcgcccaggacgatgtgggttggccaggtgacagccacctgtccttgtgctcatcctcatgaagcctggccacacgggccgtgcgtgaaggctctggtttagggaaatcgcattttcatgtccctcacgatatggtgaaaaccatggatctgaggaaagaggcaaccaggctccctgttcccacgccccgtgctggcgtgccctggcgacaaatccccaaagttggaaagttctccccaagggaggagagaaggcggtgcctctgccttcgtttacggcccggggttgcctgcgggcttggaggggtgtgaaggaataataggaagggaagctctgtccaccgtggaggtggctttgccgcctggcagggaggtactgcaccttggtggactgcgagcagctcctggttcccccagagccttcagcccactctgggacagcagcagggacggcagtgatggggttcgtggccgggagtcctgttccttgggctcaagtttgctttcagagagctccggcccaggagggggtgggcgtctacctgcctgctgtgggggaaggggccctgtaatcctgagtcttacttggagcgggacctggtgaccccagcccacgacagccaagcgccagctgagctcaggtgtgaggagatcacagtcctctgtaataggctgtccgtctgctgggtgaaggcatccgctgggtgaaggtgcagacccctggggctgggggactctggcctcctgagaagctgtggaccctgatgcctcctgggcaggtaagccccgtgaaggatgagctggtcgaggcagtgactctctaggggctgcacagtgccctgcctgacagcaggtggggcaggtcaggggaggagcccccagtccagcccaagccccacaggacctagaagaggctgagactgggccc

SEQ ID NO: 19867 - DNA, 1197 bp, Artificial sequence
  DNA replication origin
cacctgggcgcgcggccgcctgagcccctcctcacctgggcgcgcggccgcctgagcccctcctcacctgggcgcgcggccgcctgagcccctcctctcctgggcgcgcgcccgcctgagcacctcctcacctgggcgcgcggccgcctgagcccctcctcacctgggcgcgcgcccgcctgagcccctcctctcctgggcgcgcgcccgcctgagcccctcctcacctgggcgcgcggccgcctgagcccctcctctcctgggcgcgcgcccgcctgagcccctcctcacctgggcgcgcggccgcctgagcccctcctctcctgggcgcgcggccgcctgagcccctcctctcctgggcgcgcgcccgcctgagcccctcctctcctgggcgcgcggccgcctgagcccctcctcacctgagcttgctccacctgtgggccccgttggtcatggtgaagccgcctgtctccagctgctggatgtgcatggccaggaggtgggccgagggcagggtgggctgcgcccggaagcgccgcccttccatcagacacaggctgtcgctcttcaggaagacctggtggtccagccggggcgtgggccggggagagacagggcgtggtcagtgcaggagcctcagccggggccagcgcagcccaaccagtcccagcgggtcctgcgttctccacgcacggggtctacccggctctctgaattagcttccagtcccgaatgttcctggatggttggacttggctcacacctgcggggtcttaagctttcacggccctgacagccgctgggaggttttgtgcctcctgctgctgaaatggtgagtccctttccttgctctctgctggactccaggaagtgccaggtaacccagcttccctaaatgagaccccggctgaccagagcagggccccgtgtctgcgtgtccagcaaagacatgcaggagccgtcccacccgtggacagctgtggctggggcttgaggccgagctctgagacccaagacggggacaggctgtggctgctctgggactcgtctgagtcatgtttggggatggctggtcacttccagcagcaattccttgttcatcatctcatgaggccacccctgccgtcctggaggaggtccaggtcggtcaagctcaggccccagccacagacctcagtgctgtcctctgggcacctg

SEQ ID NO: 19868 - DNA, 1473 bp, Artificial sequence
  DNA replication origin
gtgaggaggggctcaggcgggcgcgcgcccaggagaggaggggctcaggcgggcgcgcgcccaggtgaggaggggctcaggcggccgcgcgcccaggtgaggaggtgctcaggcgggcgcgcgcccaggagaggaggggctcaggcggccgcgcgcccaggtgaggaggggctcaggcggccgcgcgcccaggtgaggaggggctcaggcggccgcgcgcccaggtgaggaggggctcaggcgggcgcgcgcccaggtgaggaggggctcaggcgggcgcgcgcccaggagaggaggggctcaggcggccacgcgcccaggtgaggaggggctcaggcgggcgcgcgcccaggagaggaggggctcaggcggccgcgcgcccaggtgaggaggggctcaggcgggcgcgcgcccaggagaggaggggctcaggcggccgcgcgcccaggtgaggaggggctcaggcggccgcgcgcccaggagacgaggggctcaggcgggcgcgcgcccaggtcaggaggggctcaggtggccgcgcatccagcagaggaggggctcagatgggcgcatgcccaggtggggcacgctcaggtggcacctctcctcctgtccttgcttttcagaggcctgggtaccttgcccctcacttggcactcacagcctcagacctccctctacccaagataacctccagccacctccttctctgcaaatctggagcatttcctgcacttctgctgtccatggtcccaaaacactccccgtggtctctagggacccctgtgttgggacccaggcacactttccaccccaccctgagggtctctgcagcacagaggctgcccggcagcaacctgtcctgaccgctgggtgccacagtgtccctgctccccttgaaacccctctccctagagacatccaggtgggacccaggatcagtcctcagcctgttcctgtggtcctgctgtccacctgcccagcacctgggaccaactaccttgcacaccacctgggaggcgcagactggggctggctgtaaaacctaccaccacgacccacagggctcacaccccaggccacacaggctcttccacctggtaaggcacaggggccagcctctccttggagccccaggcctgtgtccgatgaccctcaggtgcccacagccccaagctcggcctcactctctccctcaagacacaatctcccaccctcccgtctcatctcatcgcctgccgttgtccacacacggtcaggtggaggctgcccaggccacggcggctccaccctcccccacggtagatggcctcacttggggagcaatgctcagcggaccaggtgcccatggatcctcagcctgataggtgaaggtccccttcttagatagccaccaatttaaaaacaataattataatatgccataaatgtatgcttatcgtaagagatcagaaaacccatgtcagcaaaagagaa

SEQ ID NO: 19869 - DNA, 1649 bp, Artificial sequence
  DNA replication origin
ggcatgctcttcccggcgtgtgtgtgtgtgtgtgagagcccatccaggcatgctcttcccggtgtgtgtgtgtgtgtgtgagcccatccaggcatgctcttcccggcgtgtgtgtgtgtgagagcccatccaggcatgctcttcccagtgtgtgtgtgtgtgagagcccatccaggcatgctcttcccggcgtgtgtctgtgtgtgtgtgagagcccatccaggcatgctcttcccggcgtgtgtgtgtgtgtgtgagagcccatccaggcatgctcttcccggcgtgtgtgtgcatgagagcccatccaggcatgctcttcccggcgtgtgtgcgtgtgcgtgagagcccatccaggcatgctcttcccagtgtgtgtgtgtgtgagagcccatccaggcatgctcttcccggcgtgtgtgtgtgtgtgtgagagcccatccagccatgctcttcccagtgtgtgtgtgtgtgagagcccatccaggcatgctcttcccggcgtgtgtgtgtgtgagagcccatccaggcatgctcttcccagtgtgtgtgtgtgtgagagcccatccaggcatgctcttcccggcgtgtgtgtgtgtgtgagagcccatccaggcatgctcttcccggcgtgtgtgtgtgtgagagcccatccaggcatgctcttcccggcgtgtgtgtgtgtgagagcccatccaggcatgctcttcccggcgtgtgtgtgtgtgagagcccatccaggcatgctcttcccggcgtgtgtgtgtgtgagagcccatccaggcatgctcttcccggtgtgtgtgtgtgtgagagcccatccaggcatgctcttctcggcatgtgtgtgtgtgtgtgtgtgagagcccatccaggcatgctgttcccggcgtgtgtgtgtgtgtgtgagagcccatccaggcatgctcttctcggcgtgtgtgtgtctgtgagagcccatccaggcatgctcttcccggcatgtgtgtgtgtgagagcccatccaggcatgctcttcccggcatgtgtgtgtgtgagagcccatccaggcatgctcttcccggcgtgtgtgtgcatgtgtgtgagagcccatccaggcatgctcttcccggcgtgtgtgtgcgtgtgtgtgagagcccatccaggcatgctcttcccggcgtgtgtgtgtgtgtgagagcccatccaggcatgctcttcccggcgtgtgtctgtgtgtgtgtgagagcccatccaggcatgctcttcccggcatgtgtgtgtgtgagagcccatccaggcatgctcttcccggcgtgtgtgtgtgtgtgtgagagcccatccaggcatgctcttcccggcgtgtgtgtgtgtgtgagagcccatccaggcatgctcttcccggcgtgtgtgtgtgtgtgagagcccatccaggcatgctcttcccggcatgtgtgtgtgtgagcccatccaggcatgctcttcccggcgtgtgtgtgagcccatccaggcatgctcttcccggcgtgtgtgtgtgtgtgtgagcccatccaggcatgctcttcccggcgtgtgtgtgtgtgtgtgagagagcccatccaggcatgctcttcccggcgtgtgtgtgtgtgagagcccatccaggcttggcctttctttgccgtaatgga

SEQ ID NO: 19870 - DNA, 1306 bp, Artificial sequence
  DNA replication origin
atcccggggctggggcgcggcgcgcgaggatggggagagggccagacgccgcccgggccgcccacacgcgttctgagcatcccgcgccgccgtccctccgtcccagccgggtctacgcgaccctcccaccatccccgccccgccccgcgcgccccgccccgcccgccgggtcctaaggggtcggtcctggcgctgcggccgggaagacgcagagcaaagactggcttcggttggaaacggagggtcctcaggagttctgttcttagacccgttcaacggaggtgccgcgatgcctaagccccggcggctccgctcgtttttagcctgtgccgagcctacccccgcccccgtcgaggtgtgtgcggagcccctcccgctccggaaggcgctggcgcccccttgtccggcccccagtgctgcccccgcccccgccgcccccgcccgggctcagcacctgcacgcgaggggtccggaggaccgacccgggtcccagggggagtcgccaggccaggggatgggtccgaggagaagccacgccagccgcgggaatgggtgtcggaattcacgcgctcgcagaagtagcttttaaaatctgaacttcttccatctgcagcgcgtctgcagccagcatccctgggaggaggaaattctcttcctattaaatgctcttcctccttgccgcacggcgccgagtccttctgtctcctgggtctcctctgggccgtggcagcttctcgcgtcctcgacacggttgaggacgggccaggtgttttgttgaatgttcctcgacttgggtttgcctggtgtcttcctgtgatccgactagggtggtgggttttaggaaggaaggcgcaggggtggagtctcgcccctcctgtcttgtggctcagcaccggtgaggtctgctccgtgctggggtgcggactgtctgccactcttgcagtcttcaggtatcgcctttccatccctgctctggtcactggaatccggcccctcagcccatccccaactcatggggagagtaattaggccccacctcctggaggggtgtctgtattttctgggattcttctgtaaggtttgtctctctgcctgttgatttatttactcagtcatttatttctacagtgtgggctcgtgtatatttattttatcctttaggtcataacccgatgctgttattatttatttgttttaaaagttctgtttgtttttattattttttacaaatggggtctctttctgtcactcaggctggagtgcagtggcctgatcacagctcactgtagccttgaactcttgggcc

SEQ ID NO: 19871 - DNA, 3836 bp, Artificial sequence
  DNA replication origin
cccggtccccaacgcgcacgcgccggctcccagcgaaccaggtaggcgggggactggggggccaggtggggccgaggactgcggaggaaccgggggctgccgagggctgcgggggaggggcgggcgcgccccgcgaaaatccgcccgaccgcctgctccgcgttcccagacgccaccccgctgcccaccgcccgcgaccgcgacgcggaccccacctggacgctccgcttcagcccgtccccaccgaagtctgcggacgcctcccccgcccccggctccccgccagctcccgccccgaccgccctcgccacctgcatccccgaggaccgcgcgcccgtccgcggccccgggtccccgccgccacccccggcccgcgaagaccccgactcgccgcccggccgccccgaggactgcgcgccccctccggccgcgcccccgtcgctgaacaccgccctgctgcagaccctggggcacctgggcgacatcgcgaacatcctgggcccgctgcgcgaccagctgctgaccttgaaccagcacgtggagcagctgcgcggcgccttcgaccagacagtgtccctggccgtgggcttcattctgggcagcgcggccgccgagcgaggggtcctcagggacccgtgccagtgagtcccggctgcggccagtctcccctctccaggccgaggcccctccgccctgacccctcctgctgccttcccacccccgttcttgggtatgttcaataaaaggattgttttcctagagtccgggctgtgtaggagtgcgggtctggagacggggagggagtggcgccctgcagtgctggggctgcaaaggtcagggcagggttgcgacgctctcatcacagagaggggctcccactcgctcctaaggtgtagacagagctccgtggggcgcacccaaatgtaggccgaggaggccaggctcgagggtggtgggcgtggtgcctgctgccgggtcctggtcacacactcggttctcaaggccacaccagactctccctgcccctcccggggagccccactgagtaaaacgaagtgaacgggtgggctccgctgggggtccggagagaacctgaggctgaccccacctcttcactcaatgcaggggtaggggttagagtggtcgcctccacactgcccagcagagaaccccctttgacccaggagtagcatggggggttccgaaggtcctcccatggcctcgggcagccttggaccacccggctgaactctcccaggtcctgggaaacaaaaggggaagagaagccacagagctccagggaggatgctggttttgtctccagggaggtggctctggtctgggtgggcctagggaggcgctgagcgtctggggtgtgatccttgggcagaggctgagggcagggtccttgcaattttgagaaaaccgaagcaaacctgcccaggaagcattttccaagtagcaatagagggccccaccctggacccctgagtcagaagagggattggctggagccggagatacaaatgtagcctggaggagttccgctagcataacaatgcctgcaaattagtgggcccatccagaaagacaagtggtttgcccagggccatgcagctaaatggggctgggggggtccccgctggcccagcacccagcagtcctgaggggttccctgtgggtggtatggttgcagcccctcctgcacatgcttttctgggtatccagaagaatagttcccgctagtgctaaaggctgctcctggggaaatgaacggcttgcccaggtctgagggggaggcctgtgagaccacgcctgcaagaactgactccaagcctcacctcatttaagaaactgaggcgccggacgctgtggctcacgcctgtaatcctaacactttgggaggctgaggtgggtggattgcctgagctcgctcaggagttcgagaccagcctgggcaacatggtgaaaccccatctctactaaaaatacaaaaattagccgggtgtggtggcgggtgcctgtagtcccagttactcgggaggctgaggcaggagaagtgctgaacccaggaggcggaggttgcagtgagccaagattgcgccactgcacaccagcctgggcaacagagactctgtctcaaaaaacaaaaaaacactctgaaggcagacgcggtggctcacgcctgtaatcccaggtctttgggaggccagaggcgggcagatcacaaacgaggtcaggagtttgagaccagcctaaccaacatggtaaaaccccatctctactaaaaatgcaaaaattaggcatggtggcgtgagcctgtaatcccagctactcgggaggctgaggcaggaggaggcaggagaatcgcttgaacctgggaagtggaggttgtgcactgcactccagcctgggtgacagagcgagactccgtctcaaaaaaaaaaaaaaaaaatagacaccctaggccaggctaggtggctcacgcctataatatcaacactttgggaggcctgggcggaaagatcactttgagctcaggcattccaaaccagcatgggcaacatggtgagaccccgtctcacatcagctccaccctgctgtgtttcctgagaatcttcaagctgctaaaagcctgttggatgagccaagcttgcaaacattccccctcacatacacagcccccaaaggtcagagtcacaggctgaggccacagtggggtctgaaacagagcttaggtgcaccctacatgaccctgtcgctccagaaggttactgctgacagcaagcccaggtccagacagccacatcccagcaaacacaccagcaccctaagggtgggggctgtgccgctctatcactcgggttactggacactcggccctggaggaaggacccatctctgggctggagcaatttaggggcaccaagcagaattaatctgccttcctactcaggtagtggggcaggggccacgtgctatgatcctcctgagcccggtatcagaataatgaatctgaatacatgggccccggacctctaatgctttctaatctggtgcagagagtgtattttggctgtttaaatcaatctaggggccagatgcggtggctcatgcctgtaataccagcactttgggaggctgaggcaggagaattacttgagctcaggagtttgagaccagcctggccaacatgataaaatcccatctctacaaaatacacaaaaattaactggacatggtggcacgcacctgcagtcccagcttcactggaggctcaggcaggaggatcacttgggccctggagatcgaggctgcagtgagctgtgatcacatgaggcgctccggcctgggcaacagtgaaagcctgtctccaaaataagtaaggcgctctgtaggcatggcaggattagcctcctgtgtgctgtttaatggggccagtgtctgagcacagttggtttagcgttacctttttttttttagatggagtctggctcttgttgcccaggctggagtgcaatggtgcgatcttggctcaccacaacctccgcctcctggattcaagcgattctcctgtctcagcctcccgaatagctgggattacaggcatgtatcaccacgcctggctaattttgtattttagtagagacagggtttcaccatgctggtcaggctggtctcgaactcccaatctcaggtgacccgaccaccttggcctcccgaagtgctgggattacaggcgtgagctaccgcacctggccggcttagcgtttctttatcggccatgcaccagaccagccccacttcctagtggacgtgtcggggagcggggaaca

SEQ ID NO: 19872 - DNA, 979 bp, Artificial sequence
  DNA replication origin
acagttggtttagcgttacctttttttttttagatggagtctggctcttgttgcccaggctggagtgcaatggtgcgatcttggctcaccacaacctccgcctcctggattcaagcgattctcctgtctcagcctcccgaatagctgggattacaggcatgtatcaccacgcctggctaattttgtattttagtagagacagggtttcaccatgctggtcaggctggtctcgaactcccaatctcaggtgacccgaccaccttggcctcccgaagtgctgggattacaggcgtgagctaccgcacctggccggcttagcgtttctttatcggccatgcaccagaccagccccacttcctagtggacgtgtcggggagcggggaacatgggggagtcggggagcggggagtgtgggggagtcggggaggggagcgtgggggtgtcagggaagggggcgtggggtgtcggtgaggggggcatggaggtgtcggggaggggggcgtggaggtgttggggagcggggatcgtggggcgtcggggaagggggcacgtgggatgtcagggaggccgaggccacaggggtgggtgttggggaggggttggggaatctctacaaactttttttaaagtctggttaattgacgtgtaattcacatacagtaaaactcaccatttgtagtgtacggttctacgaatttgtaaaaatacatatagttgtgcaaccaaaaccacaattgagttacggaacatttccataacaacaagaaactttttttgtgtccctttatagtcacctgctccctgactcccagccctggcaaccattgatctattttctgttcctatagtttcgctttttctagagggccatatgaatggaatcatacaatgtgcagccttttcagccgagtctcactctgtcgcccaggctggagtgcaggggcacgatctcggctcactgcaacctccatctcccagg

SEQ ID NO: 19873 - DNA, 977 bp, Artificial sequence
  DNA replication origin
ggttcaagagattctcctgcctcagcctcctgagtagctggcctccccctcaggtggtcccagagtgctcggaggaggctcgggcgagtcgcgacggggccggcagcacgcgctgggcccggtgtctgtcctcaggccctggactcggggggagcgcgtttcggggactagctggactccgggctgtgcgtgggggcggtgctgtcggcctgggagtgacgcgggacttcctgcccagcgcaacccggcctggcccccgagggtgggggacagggcgacgcccgcggggaccacgctctggggcgtgcggggcgcaattcacggggctgggctgccccaggggctgggaggaaggaggcaggggggcgcccaagtctcctacccatggcagcgcatcagggcgcgtcccagagccgggggtggacggaggcttggaggcggaggctttggggacccccaagcctgggctagagcagcctcggcgggctctagagggagggtggagggaggggcccgggctgcaggaggcggggaggcctgagccacggtggtggggccgctgggcaggagagaggggctgcctgaccctgccgtgtgaaggtgaggttgtcttcgggcttggggggatcggagggggcggttcaggtggaggtggtggcggggggctgggaaaccggcaggaggggctctatgtagagctgggggtgggggtgctgaaccacgtacagaagggggctgagacaccggggccctgggccccggaaattagaaatggagaaatggaaggctgggtgctggcgtttcggaaatgcatgctcgtggtgttcctctttatgtaagggaagcttctgggccttttccctgcctgtcgaacgttctgtatgtttttgcgggatgtgtgaggtgtgctgtcttgctccactttgaggcaccgcccccactgcgggagtgctggggacctgccccatggggcatcc

SEQ ID NO: 19874 - DNA, 948 bp, Artificial sequence
  DNA replication origin
cgtcaaggctttggttccgagggaagctgcgctccagtgagggcgccggcaaggcctccgccggccctcatggaaacgcccccggccctgacctagtgggcagggcaccgcggggagtgcagccgccgggctcctggcctctcccccactcccatctccacctgggaaggaagggaccccccccacccggacctaccggccatggtcctctccggcgcaggcagatttgaggacccggcggcctccttgatgctgacggcctgagggggctcccgggcgccggatgtctggcctgggccagggaggctccccagggagaagtcggcaggcctgggggtgtgggtcggccctgagcagctgctctgggagagccagtccacggagccaaagctggagagctgctgcgggccacgaggtggggaggaggagaggcgcatggcggccaggtgggccggagggaaggccaggcggggctggccaggcgcaggatccacctcgggcctcgccaggcggcggcgtttataagcccaggaggagggggcgggagcccggtttgcatacacggctaatgcccagataagcagcgcctaattgccttcgattcagaggcacaaaggaggccgttcacacctccccggctcctcgatgtctgggggaggggcggggctgcgggccctggttaatggagaggcgatggttcgggatcggtcacctcctttcatctctcccaaccccccaccccgcgggccgaggctgcaggaaggtaggagggtcccactcccacttgggcctgtcctgggaggtgccgggcgacctctcctctccagggggacgctggcgcctgtgcccagcccggacacccgagggcgagcaggcttcaggctgggagagtcagggcggacttaggttgggagcaggcttcggggtgggagagtcaggccggtgccc

SEQ ID NO: 19875 - DNA, 892 bp, Artificial sequence
  DNA replication origin
gcagcctgtttcccactctcttctggggtcctctggctgacagctggacgtcagtcccagagtttggcaagtcctctgctcctggatgcccccagctgcccccacaagcacagtgccccaggtgctcttggccccaccccactcaacatccccatgtggacatcttacaagcactgggggtcctgacctgactgggggcgcagggcggcggggcagagacacctacacatcccgggcagaggaaggcggtcagaagctgcagctgtgaggaggtctcagcacagctgggcacgaggggtgcagcctggacgcgccggatggcaggggtcagggcgtaggacagggcccctcagggtccagctctctgcgagacagaaagtcttggggtccagccaagatgcatccggaaacaacagtctttagatgccagaactcctgagctccacggtgattcctgccgaagctgagtcacgtgtgggtgtgtcacccgtgctgcacgtggcgtgtgagtgggtgtgtcacgtgtgatgtgtgtggtgtgagtgcgtacatgtcatggatgtgagaattccgtgttgtgctctggatgtggggtgtatatgtgtttgtgcatgtgtagtgtatgcacgcatgttactgtatcttgtatgctgtgcatgtgtaatgtgtgctgtgccgtgtgtgtcgtgtgcatgtcctgtgtgcatgtgtaatgtgtgtgctgtgtatgtgttgtgtgcaccacgtgtgtgtcatgtctgtgctgtgtgtgtagtgaacgtgtgtgctgtgtgggtgtgtagtgagcgtgtgtgctgtgtgtgggtcgtgtgtagtgaacgtgtgtactctgcatatgttgtgtgtctctcccaagccccggacacactct

SEQ ID NO: 19876 - DNA, 1018 bp, Artificial sequence
  DNA replication origin
ttctccaccgctcctcccaggctcacgaggctcacgggctacccagcgccagcggcccaggaggctggaccacaggtaagacgaggcccaaggcctgcctctgggaactcggccctggcttggctctgccctcctcactcccacaggatctccgtgcccaccaggcctcagtcccgacttctccctgctgcccggcacgggaccctcccccaggacagccacctcccagtgctgaagagccggcccgcctcagagccgcccgccgttcctttttcctatgcatatacttctttgaggatctggcctaaagaggtatagggcatgggaaaacggggcggtcgggtcctccccagcggcacctgcaccagtgcacctgcacctgctccagcagcacctgcctcctgacttgggactccacctgcttcctttctcctcggccgggagccccggggctttgacccccacatccttggggcagaaaggggccaaatattctaaaacaagggaaacgtggatgtgtgcttttgtgtgggttctggaagtgtctggggaggacgtggtccaggcctctgccctgggttgatctctgcagcccctgagctgggacccaggatgcagagaggagggctggagctgggcggtgctctgtgaccagtctgaccggagttgggggtggacccattacaggaggtggcgggagggacaacctgggctctggggccgcctggtggtcgggggaagtggggcggggtgcctgggatctgggctctggctgggaggatccacaactcattctttggacattttctttgcagactacgaagctgcaccgtgtggggcccactttttatacaagcgggtggcggtggatccaggcgcagacgggagtgaggcgtggcggagacgcgtgcacgctgggtctgtgcacttttgctgctgctgctttttttttttttttttttttttgagatggagtctcgttctgtcacccaggctggagtgcagtggcgcgatctcg

SEQ ID NO: 19877 - DNA, 884 bp, Artificial sequence
  DNA replication origin
ccgaccaccaggcggccccagagcccaggttgtccctcccgccacctcctgtaatgggtccacccccaactccggtcagactggtcacagagcaccgcccagctccagccctcctctctgcatcctgggtcccagctcaggggctgcagagatcaacccagggcagaggcctggaccacgtcctccccagacacttccagaacccacacaaaagcacacatccacgtttcccttgttttagaatatttggcccctttctgccccaaggatgtgggggtcaaagccccggggctcccggccgaggagaaaggaagcaggtggagtcccaagtcaggaggcaggtgctgctggagcaggtgcaggtgcactggtgcaggtgccgctggggaggacccgaccgccccgttttcccatgccctatacctctttaggccagatcctcaaagaagtatatgcataggaaaaaggaacggcgggcggctctgaggcgggccggctcttcagcactgggaggtggctgtcctgggggagggtcccgtgccgggcagcagggagaagtcgggactgaggcctggtgggcacggagatcctgtgggagtgaggagggcagagccaagccagggccgagttcccagaggcaggccttgggcctcgtcttacctgtggtccagcctcctgggccgctggcgctgggtagcccgtgagcctcgtgagcctgggaggagcggtggagaactctctgagccgggagttctgctgctgccgagcgagctccacatttatgcgcaggggagaccttggccgccgctgtcacatgcaaccagagggctgctctgtgccaaggaccccgtcgcacccccgcacctgccagattggggcacaaa

SEQ ID NO: 19878 - DNA, 1045 bp, Artificial sequence
  DNA replication origin
gcacacgtgagcaagaatcgcttgtccagggaaggggccgactctccttcctgggcctgcccagctcagcaataagcagcaccttgggctgcacccgcagcctcctggctcacagggactctcagaacccccagccagcgtgtccaacactgtcctggccactgggaaccagaccccacccccagggtaggtggccctgcttggcctggggcggcctccacagctggggctccctgaggattcacggcatcaggcggacactggtccagtgaggcccagagccttccccgggccacagagcccgcgagcacgtggagaggggccacgctctgcagccttgggggcaagagtgcagggtcggagggagagggcccctcagggacagctggccagacccacagctgcccacacagagcgagaccacacaggcaggcagacaccctctcctagggccagggagcccccggccgaagggcccaggcaggcagcagaactcctgcaggtctggggctgtccctgtgtcccaggctcaggacacaaggaagaggcccagaggaggccagggcacagggcttccacaggtggccagggacagggcttctgaaccccagccagcggtctctccccaggacgtaggcaagtggaggctggtgaaggaacaaggctgaggcctcagaggcctcttcagtgaccatgtcctcggggagactcaacgtcgctaggcaggcccgtgcgggcgcctggccccagcacctgtgatctgtagggccagagtctcaggactgacccgacgcagcacccacatgcggcagggacacacagagacccccatagacacacgtagacacatatagactcacatagacacacacagagacacacacagacacacatagacacacacagagacacagacatgtagacagagacacactcagacatgtagacacacagagacacagatgtacacagagacacacacagacacgcacacaatggacccacacaccccccaggtgcagcgggccttgactgttgtacgcga

SEQ ID NO: 19879 - DNA, 938 bp, Artificial sequence
  DNA replication origin
cactgtctctgtctctttgtttgtctctttgtctctgtgtctttgtctctcggtctctgtctccccactgtgtctctctatctctgtccgtgtctctctctctttgtctctctgtgtctgtctctctctctgtctccccactgtctctgtctcttggtctctgtttccccactgtctctgtctctgtccctctatgtctgtgtctctctctgtgtctgctgatctctctctctctgtctctgtctgtgtctctctctgtgtctgcctctctctctctctctgactctgtctgtgtctctctctgtgtctgttggtctctctgtctctgtctctctggccctctgcctgtctcctccttccctcttgcagaaccgaggtcaggagcccaaggtcagggtttgcattatgtgtttcccagaagcctcgccgggcagctgtaaacggggagaaacggggagaaacaacggggagaaacagggagggctgatgctgggcggaggcccaggatggggggctctgcaggggccttttgagcccaggcccccgaagtgtgatgctggggctctctgtgtaggttctaggtgtctggaggagtggggcccctcccctgctagccccccaaggactcttcctcggatcctcggacctcatggaggtgggggaccatgggcgtgtgtgagtgagggtaagcataagtgtgtgaattgtgcatgcgtgtgcggatgtgagcgtgcctgcaggagtgagtgtgggtgagcctgagtgtgtgaattgtgcatgcacgtgtgtgtggatgtgagcatgcctgcaggagtgtgcgtgagcctgagtgtgagcatgcgtgtgtctgagctccacgttccctcctcccccagaaggcaaccctcagcctgccagcaggtggatggagcccagcagccccccgtgcccactctggg

SEQ ID NO: 19880 - DNA, 1185 bp, Artificial sequence
  DNA replication origin
gcaggctgagggttgccttctgggggaggagggaacgtggagctcagacacacgcatgctcacactcaggctcacgcacactcctgcaggcatgctcacatccacacacacgtgcatgcacaattcacacactcaggctcacccacactcactcctgcaggcacgctcacatccgcacacgcatgcacaattcacacacttatgcttaccctcactcacacacgcccatggtcccccacctccatgaggtccgaggatccgaggaagagtccttggggggctagcaggggaggggccccactcctccagacacctagaacctacacagagagccccagcatcacacttcgggggcctgggctcaaaaggcccctgcagagccccccatcctgggcctccgcccagcatcagccctccctgtttctccccgttgtttctccccgtttctccccgtttacagctgcccggcgaggcttctgggaaacacataatgcaaaccctgaccttgggctcctgacctcggttctgcaagagggaaggaggagacaggcagagggccagagagacagagacagagagaccaacagacacagagagagacacagacagagtcagagagagagagagaggcagacacagagagagacacagacagagacagagagagagagatcagcagacacagagagagacacagacatagagggacagagacagagacagtggggaaacagagaccaagagacagagacagtggggagacagagagagagacagacacagagagacaaagagagagagacacggacagagatagagagacacagtggggagacagagaccgagagacaaagacacagagacaaagagacaaacaaagagacagagacagtggggagacagagagtagggagatagagacagagacacagagacagtggggagacagagaggcagagacagagagacacatacagagagaaagagcagggagacagacagacacacacagagagacacatacagagagacagagacagcggggaagcagggagacagagacagagagacacacacagagagacagagacagcagggaggctctgggctattctagggcatcgcccagtccctcacttggtttccctaacttttttctggattataaacccacacctgctgatc

SEQ ID NO: 19881 - DNA, 1464 bp, Artificial sequence
  DNA replication origin
gaattgccaggtcacacggtggacacaggtttcatttgtaagactctgtccatctccgagggaactctatttccagcacctcctttgacaggtggggaaactgagtccaggagcggtcagctttgctctaggcctcggctgcttctctggggtagccattgacatcgcccggcctgcaactcaggggtcggtgggaccagcacataacctgagggaagtgctgactcccgggacactggacctatggggtgggggctgcagggcagggtcaggagcagagtgggacagggtgcagggcaggacagggtgcagagagggatggggtacagggcaggacggggtgcagggcaggacggggtgcagggagagctggggtgcagggagggatagggtgcagggcgggccggggtgcagggtgggctggggtgcagggtggggcggggtgcagggcgggctggggtgcagggagggatggggtgcagggcgggccggggtgcagagcggggcacggtggggtgcagggtgggatagggcaagatgaggtgtggggcaggacgggctgctgggcagggttgggcccagcctcagggtgtggccagtgtagactgaggtctccacatgcgatgcaggaggagcaggccaccctctttgggaacttcagcagggagagtccaccaagggttaacagtgggctgcctttggccagagacagctgcagggacacccccgccacccgcctccaccgggccccacaaggaatggaatggagggagtggagccgcctgaaggccacccgttatcaccgccagctccgtgccaagcacgtctgccagacccacagagatcctttctgtttctggtggagggagggagggtggccggtgtgtttggtgtggaggggctgctattggggtctgaggcacccagggagtgtctggacccacagcagggcccctgcccaggtggtcatcctgacccctgctgatgggggaaggaccaggacacagtccccggctggtgctggctggactgctgaggccttctcggggttggcggtgcagcaggaggccccgggatggtgggaaggatgcccgggtggggctcctctgctttcaggcccttccacccctactctgcaaatctccggcaggaggtccccaggatgggtgggagccaggctgtgcggcctccagtgggtgaggtgggtccctgtcctcctgctcacaggctgggtttcattcaaagcactggggagccacagggagctcgggacgggggcaggtgtgtggggtgtgcctgtcgggaagcctggggtccacctgcgggtggtccctcggccctcaggggctggggtttgctctgagtccctcccgtcacctcacagaatcccctgaggggtctcaggacctccagggctcgtagccaggatggccaggcgacactgacacctggtccctcggctgc

SEQ ID NO: 19882 - DNA, 805 bp, Artificial sequence
  DNA replication origin
ccaaagtgctgggattacaggcgtgagccaccatgcccagccttctttttttttttttgagacagggcctcgctctgtcacccaggctggagtgccttggaccatcacagctcactgcagcctcgaactcctgggtcagatgatcctcccgcctcagagtctcgcatagttgggaccacaggtgcatccaccacacacaactagtttattttttaattttttgtagagacaaggtctcaccatgtttcccaggctggtctcaaactcctgggctcaatcaatcctcctgcctcaggctcccaaagtgttgggattacaggcgtgagccacccaccgcacccgtcccagaatgttcttattgaagtctttctggggacggatgatttcattcctctttgtaaatgcttaggagtggaattgccaggtcacacggtggacacaggtttcatttgtaagactctgtccatctccgagggaactctatttccagcacctcctttgacaggtggggaaactgagtccaggagcggtcagctttgctctaggcctcggctgcttctctggggtagccattgacatcgcccggcctgcaactcaggggtcggtgggaccagcacataacctgagggaagtgctgactcccgggacactggacctatggggtgggggctgcagggcagggtcaggagcagagtgggacagggtgcagggcaggacagggtgcagagagggatggggtacagggcaggacggggtgcagggcaggacggggtgcagggagagctggggtgcagggagggatagg

SEQ ID NO: 19883 - DNA, 1942 bp, Artificial sequence
  DNA replication origin
gaagcggggttcgcagccccagactcttgggcgggggggtcagcgagcaaccgggaggggcgccgcgggccattcgccgcttctcctgggccgagggcgcaggcccctgccgcgggggcccctcggactccacgacttcgcggacgcgcgcccaccgccatagctgaggtcccgggccaggcggcgcgtgggtggctgagcgggagcgcgtccagccaggcgtggaggccgcgcggggccggggtcgagcccagcatggcggggggggtgcggggcagtggcccggacaagggcatggggccggaagaggcggggccgttgccaggagacgagacggaatgggcggggcgcgggcgggggccgttgccgggagacgagacggaatgggcggggcgcgggcggggccgttgccgggagacgagacggaatgggcggggcgcgggcggggccgttgccgggagacggggcgggggcggggccgggccattgcccggagacggggcggggcaggggtagcgcgggctcctccgtgcatcgcggcgaagtcttcttgggcgtgggttcctggatcggatcgtctgcccgcgggaggggcgggactgcttagttacgctggggagggcctgagaaatccagggagaaaagaaggtggcttgacctcatctattcgcagtctgcattttaccaagcgccgacccttgtatctcgtgaactgaagccctccatccttccccgctgatctaacaagaatctacagaactcggtcaataatttattagtaaaatatacatttctcattattaaagaataaaagctttcagccctgctgaacacacatctgaggtctcaagaaaaccagacaagatagctgactctcccacatagccctttccataaaggcgattcctaagcttaaacacacacaaagctggggctgtccctcttgaatcccatgggaaacaggccccaagatcaggggacctggagtcgggagcttggggtgcagtctgctcactgacaccctctcgaagagcacgcaggggaacctggtcctgggatggagtctttctggggatgccccacgtctgtgctgcctggaaccgggtgcccagggcagccggctcagcaggccccagagcaggggcaggtgtggctgggaggggctgtatatgtggcctcctgaacacagcgggagaccagcggccacctggagacacgtacacacacacgcacccgcaagcacacagctcatcccagcctggtgcctgcagacagctggggctacacgtggccaaggcggggagaaggaattggctgagggcgtggacagcaggagcctctcaggtagatgcattcctgaggttagaacagcagctgagcctgcaaagtcagggtctagggctgagcggcactagctggaccgtggaatgctggaacgcatggcttctctgccgcaacttctccaaatttccacacaggcgcaggtgcccccctagggtgctgtgggagctccggctccttgcttcctctggatggggggcttcagggcaacctttgggccaacagcaccctgggaggaggaaaagataattgatgttgaaaaactacctgctataaaaggtatataaagggtacaacgaaattttacgtcctttaacatctcttaaaatgtggattcttggttcatccaccaacaacatggcccatgcacacaatggcaggtgtggcagtcacaatatatacagctcacagaggacagactttcttccctgcagttgctgggggaaggtcaggcaccactgacagccggggtcggcatctgctgagaagtcccctgatcacagcacagataccacagtacagccactgccaatgcctttcccttttctttcagtcacccaagtttatccacagataatcagaaaaaaaccccaccctccag

SEQ ID NO: 19884 - DNA, 2240 bp, Artificial sequence
  DNA replication origin
gcctcagccctgggaaaccgctctggcagtgggtggagaaggacccttgagctcccttcctggggccactgactcagctagggcagcagaaagggccaggctttctctctggggcctggcacggggccccagtggtaccatcgaggtccacttggcattgcgggacattgtgagcagcctctgtcctcagagagggcaggacggtggcgggcaggctggggctggggaggtgcctgtgtgaagaggtcccacggtgcatctccggggaccccctccacagaggttcgtggtcagccctaggactgggctgtgcatggaagacctggggcaggagagcccctgccctctgggttgaggctttttttttgttaacatttaattttgaacaaattttagacttacagaaaagttgcaaaaatagcctagagaatcctgcatgcccttcgcctggcctgctcccgaatggccacagtgtgggcgcgcagccgaggctccacgtcaccaatgcgacccagtcagtaccgcctgctccctctggacgcccttctccagccatggtccccccaggcactcagcccccggcccctctgcctttcctcagcttgccctttggaagtgtggccagcagtgttttcagagtccctcagcctgggtttgtcccgtctttccttgtgtggatgagggccctgcactgttggcgggggcagcactggacacacccttccccaggcacagcccaggcctggcccacatgcagcttcggtcacgggggatgttgacacagcgcctagttggagcagcgtccacagatttttccttagaaagctcctgtcttctttttatagtgagcagatgcctcagggagataccttgagactctttgaaccttaagcttggacccactagttttggcatccattggtgaatattggctgcaatagttgttctgtgctgtttgcctaatagtgattttctctcttttttttttttgagatggagtctcgttctgtcgcccaggctggagtgcagtggcgcgatctcagctcactgcaatctccgcctctcaggttcatgccattctcctgcctcagcctcccaatgtatctgagactacaggtgcccgcgaccatgcctggctaaatttttgtattttttttttcagtagagacggggtttcactgtgttagccaagatggtcttgatctcttgacctcgtaatctgcctgccttggcctcccaaagtgctgggattacagacgtgagccaccatgcccggccctaatagtgattttctatttctctctttcctttttaactttttatttgaactaacttcagacttgtacgtgagttgcagaaatagtcctagaaggggtctggacaggcaaaatgggggcctgaagggggcagagagatttctggccaaggaagttatggttaccaggcatagcagtatatggggcagaggctgcagcaggagccgggcgtggtggtagatggggcagaggctgcagcaggagccgggcgtggcggtagatggggcagaggctgcagcaggagctgggcgtggaggtagatggggcagaggctgcagcaggagctgggcgtggaggtagatggggcagaggctgcagcaggagctgggcatggaggtagatggggcagaggctgcagcaggaacaggcgtggaggtagatggggcagaggctgcagcaggagctgggcgtggaggtagatggggcagaggctgcagcaggagccgggcgtggaggtagatggggcagaggctgcagcaggaacaggcgtggaggtagatggggcagaggctgcagcaggagctgcgcgtggaggtagatggggcagaggctgcagcaggagctgggcatggaggtagatggggcagaggctgcagcaggaacaggcgtggaggtagatggggcagaggctgcagcaggagccgggcgtggaggtaggtggggcagaggctgcagcaggaaccaggcatggaggtagatgcggcagaggctgcagcaagagccgggcgtggaggtagatggggcagaggctgcagcaggaacaggcgtggcagtagatggggctgaggctgcagcaggaacaggcgtggcagtagatggggcagaggctgcagcagaactgtgcaggagggaagtcactcactcttcactctcacgggcttcccctggctgctcagtagggtcctttggaagctgctgaaaact

SEQ ID NO: 19885 - DNA, 1385 bp, Artificial sequence
  DNA replication origin
cgtgccggccaagggcggggctccagccccatccaggggcccccaagagctggtccccaccacccacccgggccagcccgcccgacacccggcctcctcggtggctctgaagaggccgccccctgctgtaagcaccacccctggcgggttcatgaggccgaaagcagtgcccaggccccatcctgcgaccccaagtgcagcccgaggccagcagagccctttcattaaattcacgcacaggccagcggtggccccgaggcccagagcagctgctgtggtcgccctgctgggaacactgaggctttgggagtgggcacttcccagacccctttgagccatgatagaatctgagcttgaacttaaacttgggggctcccagcccagggaagcttcctggcctccacagagcccatctgaggacagtgtcgagacacaaatgctctccggcccccagctcgggatcacacggctgaggggaggaatggggcggggcctctcatctggggtggggccctgtgggccgcgcagacgcctccagcacacacaagaggcaggaacctcggatcctggagctgggggtgctggaggggcacgggggtcccagctctgacccaggctctcggccctgtctcctccagcctccggtcactgtgtccagcccacccttcccagttcctgtctacacccggcaggcaccaaagcaggtgagcagtggtgattgggcggccaagccttctgagggtgtccaggccttcctgatgggattggggtctgtgcactgcaccgggggccagggatccccaggtggcccctgctgtacacagaaggctggttagcccgacctcgtgaggacatcagacagaaaggcaggtcagcgaggccacaggaaggcaggagctcagtcctgccctgcgttggagctggtttgggggtcctggctccttctccttccactcagacctgctccgcccaccaagcccctcccagagctgaagctctggcagagaagaggactccctggggccctgcaggacagatgggtgggtgggctcagggcagggacacgttccgcgcttcccttgggtttgggggctttgggggttttggaaagatctctcaaaacccgaatcactggagccctggcatgctgagggttaactcccaggcctccgtgtccccccagggttggggtcctgtccctgcgccctggctcccacctctgggctaaccttggagccctttttggaccccgtgggggcagctcattggcctcagccctgggaaaccgctctggcagtgggtggagaaggacccttgagctcccttcctggggccactgactcagctagggcagcagaaagggccaggctttctctctggggcct

SEQ ID NO: 19886 - DNA, 1862 bp, Artificial sequence
  DNA replication origin
ggccccgccccattcctcccctcagccgtgtgatcccgagctgggggccggagagcatttgtgtctcgacactgtcctcagatgggctctgtggaggccaggaagcttccctgggctgggagcccccaagtttaagttcaagctcagattctatcatggctcaaaggggtctgggaagtgcccactcccaaagcctcagtgttcccagcagggcgaccacagcagctgctctgggcctcggggccaccgctggcctgtgcgtgaatttaatgaaagggctctgctggcctcgggctgcacttggggtcgcaggatggggcctgggcactgctttcggcctcatgaacccgccaggggtggtgcttacagcagggggcggcctcttcagagccaccgaggaggccgggtgtcgggcgggctggcccgggtgggtggtggggaccagctcttgggggcccctggatggggctggagccccgcccttggccggcacgcggctggcagcctggtggaacagggggttggagcgccccattgtggtcttgggagccacgttcctggggaggaagcacagggcgcatggtcagtgtccggccatggggccccagcaccacaccccgagtctctccctcccagctccagccgacccgagaggcttcagggcgagaggttgtggccatgagagacagacaggcccaggaggtggggcggaccctgaagaggcagggacaccccctccatgtcctgggggccccagtcaggtgggcgggagatgcttggaggctgtggggccagtgtgtcctgctgcgtgggggtctcctgctgtgtgggggtccaggtccctagagcagggctcagcaggaaactggcagggtgctcacggggctgggtcagggtatgggggaccccaccgggcctctctggatttgccccaagcccaaccggccaccaaaaccatgccccgccccagcctcaggggaaggtggagtccagagtggcactggccgagtggagccaggaaggcccttcaaactcagcccaagccggggggcgtcatgacgtcggggcacagaggagcctgggtgtccgtgccgtccaccatgggcccgtgctgggcactccttcctctggcagctgagcacgggaagcactcgccaccctccgtcacagcccccaccaccctcacctgctcaggatgcggctccgggctttgcggtagacgatgatgcctgccagggtgaccagcacaactgccaggagcaccagaaccaccaccacgaagacggggaggctcccggacgctgtgggacacacggccccacatcaggcaggcaggccgcgacctcaggcaggagccagggaggttcccagagacacggtctttctcagcacccccaggctgtgccctgtggacccctcagggaggacctggtaccttacactggcactcccagcttgccagtgacaggttggagagcttggcagggtggccctgggccacagtgctgtgggcacggctgtgcctttgaggcctgatgctctggacgaccacatgctcagtggccgccggggaggaaatgctgggtggcctcagggccccgggccgaggaggggctggaagacacaggctgaggacactggagtctcagctcacggccgtgccctgccctcggccactgcctccctctgggacagggctctcccctcctcacatcagcctggggacagacaggctctgcctatacctgtgtgtcgatgcctgtggcagcaaactggcaccgtgaacaccaccagcttcccgggcccgcggcttctgcctgggctctgttcgggccctctgagcttggaccccagccccacct

SEQ ID NO: 19887 - DNA, 1451 bp, Artificial sequence
  DNA replication origin
gtgcgtcatcgggtgctggaggtggtgaatcacgtggacaaggtgggcagcggtcctggctgcagaggtgccagagcccctggcgggaggtggggggggtgttgccacagggttcattccacctgctccagctctgccccgcacctgtgcctggccccacctcgccgtgggacaggtgcatcctccgccacccaccctccctgctgtaccttccgccaccctgcctgacccccaggactccaccacctctccagctatatcagaaactcaacttccgtgtggtcctggtgggcctggagatttggaatagtcaggacaggttccacgtcagccccgaccccagtgtcacactggagaacctcctgacctggcaggcacggcaacggacacggcggcacctgcatgacaacgtacagctcatcacgtgagctggcggagcgggcagggtggggagggctggggagggagggcgggcagggtggggtggaagggagagcagggctggggtgggagggaagtggggagggagccgtgtccagggcatctgtgtcactcccacttccaggggtgtcgacttcaccgggactaccgtggggtttgccagggtgtccgccatgtgctcccacagctcaggggctgtgaaccaggtgagggggctcctgcccgggtttgccaggccgaggccagagctggataggggaggggacgcctcggtccaggtctctggagcaggccacctcccctcaggccaggtttaatgcctgattttatgttttaaggtggtgttggcgggaagctgtgccaagtcctgggccctggtggggtgagggtggcaggcgtggggagttggccacatggttcctgagagcacagaccctcctgcaggaccacagcaagaaccccgtgggcgtggcctgtaccatggcccatgagatgggccacaacctgggcatggaccatgatgagaacgtccagggctgccgctgccaggaacgcttcgaggccggccgctgcatcatggcgggcagcattgggtgaggcggccaggccctgcagagccagggtatgctggaggtacgaggtgggtggggaaggggccaggccgcctcccccaatgctgccccgcctccccagctccagtttccccaggatgttcagtgactgcagccaggcctacctggagagctttttggagcggccgcagtcggtgtgcctcgccaacgcccctgacctcagccacctggtgggcggccccgtgtgtgggaacctgtttgtggagcgtggggagcagtgcgactgcggcccccccgaggtgcgtccatgccccatacctgctcccgtcagcactgggtgccacaacctctgtcccttcaggccagggtgaccactgcacatccacacgtggaacttggggctctgtgggtgtccagagcggtcacagggagggagtg

SEQ ID NO: 19888 - DNA, 1116 bp, Artificial sequence
  DNA replication origin
cggggggctgctggtggcagggtagggggagctgtaggcaacaaactggagcctctggtccttcggggcaggaccaggccactctgaagcccacagcacacccggctcccactcccctcaggggtttcttccaggtggggtcagacctgcacctgatcgagcccctggatgaaggtggcgagggcggacggcacgccgtgtaccaggctgagcacctgctgcagacggccgggacctgcggggtcagcgacgacagcctgggcagcctcctgggaccccggacggcagccgtcttcaggcctcggcccggggtgagcacccttgtctcctgtgtttggctggccctgccggtgtccacttgcctggcctgtgagtcctcctggctccccatgtgctgggtgctgcccattgtctgcagcctggagcaggcctggccacgctcccccagcactggacaggggctggacagtggccccgggtccctgagggagggtccaggccccggcgctgggaaggctgactggcttcttgtggctgttccccaggactctctgccatcccgagagacccgctacgtggagctgtatgtggtcgtggacaatgcagaggtgtgttgggggcagggaaggtgggagagcagccggcggcgggggcatggggggtgtgtgggctccagcctgagggtctcgtgtccccagttccagatgctggggagcgaagcagccgtgcgtcatcgggtgctggaggtggtgaatcacgtggacaaggtgggcagcggtcctggctgcagaggtgccagagcccctggcgggaggtggggggggtgttgccacagggttcattccacctgctccagctctgccccgcacctgtgcctggccccacctcgccgtgggacaggtgcatcctccgccacccaccctccctgctgtaccttccgccaccctgcctgacccccaggactccaccacctctccagctatatcagaaactcaacttccgtgtggtcctggtgggcctggagatttggaatagtcaggacaggttccacgtcagccccgaccccagtgtcacactggagaacctcctgacctggcaggcacggcaacggacacg

SEQ ID NO: 19889 - DNA, 1484 bp, Artificial sequence
  DNA replication origin
ccggagcccagcaggtccctggaaaagaagtgctgtgactgcctcggccccctcggtgcagagaggctggcccagaggctggacgccggggacaccagtgtgctggagccaggcccgggcaggggggccgacccgagacccactcacctgttcttccgcaggtggagggtgaagttgtgccctgtggccccaaggacgtagctcaccctctctgggtgcaggccctgagcgaggagggaagggtcccaggtgagcagcctgcccgggctgtgcccacctcaatcctgggggccagagaagctcagctgggggggaaggggtgccggcctccagccccaggtcaaggctccatcctggagggtccacagcctcaggcagggtagagggtggagggtggagggtagggggcagggggtggggggtggaaggtggagggtggagagtggagggtggagggtggaggcggggggcggagggcagagggtggggggcggggggtggagggtggagggtagggaacggggctgtgctgaaggcgaccggcggagcccagcacttgggtagacaggaaggacacggtgctcctcggtcctcccaggcctcagtttccccatctgaccacgcatgggtaacgacaatgccccttccccgagaaagcatagggtgggggaggcatagcctcagccaggcagcaaaggaggtgggtggcggggatagcacgcacaggcccctccagcgacagctgcctgcctccaggacccatcccttccagcagctgccggacctggtggtgcctgcagagcctcctgctggaccactgcatctccagcccccatgtgcaggctggggctcggcctgcagagctctgggacagccttagctgtgccaccggctggatgagcccagggcagcgggcaggtcggtagtaggttccccggatgctgaggtaaggacagggctggggccggaactgccctccctggaaacaggtgcacacatgcatatgccgtgcacatgtgtgcacacccacccactcaggcttcaggaatcaccctcgggcagccccagtcggggaggggggcattctcagtttctagccctgggaaacccccgccaggccccccccccaacacaggaaggtgtgtcaactctgcggtgagccagcgtcacttctcaaagaggaatttggcttatcagcctcgccaagtgaaactggggaggggcccggggccagcacaacctgcccctgctcccttccaggggtccatagagctcctgaaggaacgaggaggctgggagccctcaggcagtgctggagggaggaacggagatgggccccagggggctagagctgtacagggcagccccagacacccactggcctctcaccactttctgtaagctaaagctcctttcacaaaaataggctcaggggccagccagggaccctccccaggccagcttagactcaccaagtgggaggg

SEQ ID NO: 19890 - DNA, 1533 bp, Artificial sequence
  DNA replication origin
cctccttccagccgccgggtccttcgagaggccccctctcggggctctggccggacttgggacaggctgtgcctgagtttcctcacctgtgcaagggaggatgctggattgtggggagaggggaaacggaccccgcccccaggtgccgcgcgccccgcccctcccaccggccgaggggcccattggctgcggggcgccggggcggggcgcgcggaaaagagcctcgggccaggagcgcaggaaccagaccgtgtcccgcggggctgtcacctccgcctctgctccccgacccggccatgcgcggcctcgggctctggctgctgggcgcgatgatgctgcctggtgagtggttccagggaaccgtcccgggcgcagcgcggggcagggtggctctccccgcaggacgcgacgcggaccccgagcccctggcctgctcgcaccccgcaccctggcccggcttcgggctggtccctgggagcgggccatcaggtgcacagtggtctctgggtggagagccccgggccggggaggccggggaggtcggagggaaccttcaaaggtgaactgtgagagggaagtcccgcctctgagcttgttagtggggtcggggccgggccaagcaggacgcttcacctgctgcgcgaggcgccctgggttcctgggattcacctgtggggctacccacccccactatttagccgaggagggaagggagggcagacaagctgaggcctggagtgcaggggtgtgggctgaggggacccgtctcctgcctgggggaggacatggggctgctgaccctggatcccacccctgctcctggagtgacttgggctggggtgtgctgaggagcttcaggctggaggccgggttgcttcccgccagtttcctgggcagataggggctggctgctcccctgctgcctctccaggttggagatgtggtcatggagacacgtccactattgtgttttaatgggagcaaagggtcctggggttggtggtctccgaaaccctgcccattgcatgctgggaccctgccctctgctctcggataccagggagtttccagttcttgggaggtgaacagcctccgggaggcacttcctgctccccagttagatgcgatcagatgatcagaagaatggaggaggagaatggaaacgggcaggtcggcggcccgagtcctcctccctggggggaaggttcatccttgccctcgggcccctccagagatctgagacagcctggagacctgtggagtcactggcacccgctggcacccacagcgtctctgagcactgtgtgtgggtgctgcaggacacaggcccaccggccatgcctgggggcgctcctggggtcttttaggcacagaaccctcacttgagtctttgtcccagagctatctggtgagttccccaggggagggtcaagcccagcaagagacagaatctgagggcccaggaggcctctgggaaggaaacctgccccccggcccctcatgcctgctgaccctccctcctgcagcgattgc

SEQ ID NO: 19891 - DNA, 1520 bp, Artificial sequence
  DNA replication origin
caagcctgcgccccctccaccaggctgaggcctcaccggagtgggataggcatgggcccgcaggcgtccaagtggggagggggagccctaggtgggggtcccagcccaggtgatggcaggtgcaggggccgtccctagcctaagatccccagacagcagctgacgctggccgacgtggaccaaagcctgcagcagcccaccgtggcctggctccggcgtctccaggcctgcggccaagcgtgcttgcccttggtgaccacattccccgtggtgggctcagcctcgagggtgcaggtttgggctgacaccacagctccccagacggtccacccaggacccctccctggggctttcacagccaggccgccctcctggagtgggaacagtggtggtggcaggaaaggcagctcagatgaccacacagggcgctgctgacagatcacatggggggggggggcctcagggcctccctggggagaggcagggcagggccagcaaggggctggagggagtcctgcctggagagagggcaccagggcagggcgagtcagggaactgcacgggcctaggggcagaggacagaggtcaaggggcagtggcaagaagaggccggggcctcggacgttatcctgggaggacagggaacccggaggatctaagctggcgtgagtgatgctgtcacattttgtctcaaagccattcttaccctaatgtgaatggcatgaaaagcaagaaagcaagggctggcactgggccgcaggtgacttctgctgcctgggggtgtgtccgcttgcctgtgtggcacaggacgaggtcccccaggctgccgagaggctcccaggtagggctggggatactggcctgtgcctgagctcatgcaggtgaccctgttattatagaacaatggccagctggcaatcacacttcccttccttgacctcatggtgcaagttactcaacagcaaagtgcaaaggcggcacgctggccacatcagaggcacagcaaggcccctgccgacgctgagctaccagggatttattcctaaaaagacaggaccagcttgggccagaacaggctcctcccgcgctgaggaagttccacccaatcccacagaacacagctctcctcttcagcaggtgccggggggtctgggagcctgaaccccacagccctggaggcttccctcccctcctcctatcaccacctgcaaaccccacttctcaaggcccagggcttcccagaccccaggacacaagatcaggggtttctgggcctcggggccaggcaggaaagctagcaggctcctctgctcaccagtccggcatttgcacaacactgagactgacagcttgggttgctgataaatgtgtttactcacaggccagacctgcacagcctgcagacaaggaggaagcggtttgtggctggagagttggacacccccacccccactcggcggtgctctcagtgaggcagccccgggtgagagctgcccacaacccttgttccccgcaggatc

SEQ ID NO: 19892 - DNA, 842 bp, Artificial sequence
  DNA replication origin
cccgtacgtcactaccactgtctctgctcacagtgccaaggtgagcactgcccttggtgtagcgctgtgcagggtgagcactgttcctgggtcagggtggtgcagggtgagcccacccctgggtcagggtgcagggtgagcgccgttcctgggtcagggtggtacagggtgagcaccattcctgggtgagggtgcagggtgagcccacccctgggtcagggtgcaggatgaacactgttcctggatcaggatggtgcagggtgaacccacccctcagtccatgtgcaggatgagcgtcgtccctgggtcagggtgcatgatgagcaccgcccctgggtcagggtgcagggtgagcgccacctctggtgcagggggcagggtgagcgccacctctggtgcagggtgcagggtgagcgccacctctggtgcagggtgcagggtgagcgccacctctggtgcagggctgtgcggggtgcagggtgagcgccaccccggggtcaggatggtgcagggtgagcactgcccctggtgcagggctgtgtaccgtgcaagatgcagggtgagtgcccgttcctgggtggcctcaatggtaccggcaacgatggcagacagcacttggtctgtgtgtgtgttcagctctgattctcctgactccccccagcagctcctgtgattcaccccactgtgcagatgagtaaatggaggcctatggagaaagctgggcctagaaccctccctcttccccactctgtcccctgcagccatgaggtgggagagtcctgacatgtgcattcctgtggataaaaagggagggactgggccaggcgcggtggctcacacct

SEQ ID NO: 19893 - DNA, 1191 bp, Artificial sequence
  DNA replication origin
aagggcgcggccccagccgcgggatcccgctctacaggcagcggctccgccgccccgggccccgcagcgaggcgggcgcacagcgcggggggcaactgcatcaccccgggcgcgggcgggcgcagcctgtcggccaccgtccgcgagccgagccggacgtgacgtcacgctcacttccgccgccgtcgggggctgcgcgggggctgtggctccgggactgcggtgagtcctggccgaacgcgggcgcgggcgtgatgagggggttgggggactgccaggcccgggggggcccacgaggcgacggggctggcgggacgcggctcttcccgcgcgctccctctggctgtgcagcggtccccgaactctggggccgaagcccttcgggcctgcaccggccaggccagcgtcttgccccgcggcccgacactcagccggggcggggcggagcgggcctccgggtcgtcccgggtgtcccctcccagccctgggaagccgggtcgcaggtccccctctcgcacgccctctcccgtccgccttgccccgcctgtcgtctcccgctgcagtccctggatcttgttccctctaaaccagtcgcgaactggagccaaagtgactccagttttattgtaaccgtttttaatttaaagcccttgggtgacttcccgttactttagttcaaaggccctttcctggtttgtcggggtcctgtcgacctctccagtccccgcagctcccgtgaaacacaggacctgtgctaggtgctcagggcgtgtgggggaaggcatcacaggagggcgcggcagccttgtaggagagacagacgtcagagtaaagagtcacctaattaaaatggtgaatgacaacacacgcgggaagcagtggacgcttcagatctactgcagagaatgggcccagtggcggatagaggctttagctttctcgtctgtcacccaggctggagtgcaatggtgcgatcatagctgatagatcgctgcggcctcaaattcttgggctcaagtggtcctgctgcctcagcgttccaaagagctgtaactgcaggcgtgagccaccatgcctgcccctgtactttttccatgtttagatacacaaatatctctgtgttacagttgtctagtgttcagcaccgccacctgctgggcaggtttgtagcccacgagcaagaggctcctc

SEQ ID NO: 19894 - DNA, 1156 bp, Artificial sequence
  DNA replication origin
agtcccggagccacagcccccgcgcagcccccgacggcggcggaagtgagcgtgacgtcacgtccggctcggctcgcggacggtggccgacaggctgcgcccgcccgcgcccggggtgatgcagttgccccccgcgctgtgcgcccgcctcgctgcggggcccggggcggcggagccgctgcctgtagagcgggatcccgcggctggggccgcgccctttcgcttcgttgcgcgccccgtgcgcttcccgcgggagcaccagttcttcgaggtgcgtgagcaaaagagggaaaaagtagttgtaggatccagtggggcctacggcggcgaggcggggccggagcctggagtgggaggggcctacgactgcggggcggggccggagcctgggacaggcgggacctgaggtggtggggcggggccggaacgtggagtgggcggggcctgaggctgtggggcgggaccggagcgcgggatgactggggccacgggtgtgggcgaggcctgacgcggtgggcgtgccgcgagtcacctggccccgcccacggcgcacttttcctgcaggatggggacgtgcagcgccacctctacctccaggacgtgatcatgcaggtggccgacgtgcctgagaagcccaggtaagcgaatgggcagtgcctagccagtgctactcctgcgccgcctccctgaccggtgcctggtccctggggctgtgctgccgctcttccatgtgcggccgccccaccgaggcgctgtgcctgtccagctttggcgtggccgactcttccaccacctagcctgtttgtgaaacttaattcataaaaagagggtttgggattgcaaaagatgcataggggctttattggacgtctcaaagggaaactgtgcagaaagtccagcttggttcctcgcaccggaggaagggctcctgaagcacgtctccttggcagggtgcccgcgtttgcctgccaggtggccggctgctgccaggtgttcgatgccctggacgactacgagcaccactaccacacgctgcacggaaatgtttgctccttttgcaagcgggccttcccttccggacacctgctggacgcccacatcctggagtggcacgattcgctcttccagatcctgtctgagaggcaggacatggtgg

SEQ ID NO: 19895 - DNA, 1181 bp, Artificial sequence
  DNA replication origin
catctctgtgtgtggcggggtgcggtttttccatctctgcgtctggggggggtgtggtctttccatctctgcgtctggagggggtgtggtctttccatctctgtgtcctgggggagggggggtgcggtctttccatctctgtgtttggggatacagtctttccatctctgtgttggtggggggtgcagtctttccatctctttgtctggggtgggtgtggtctttccatctctgtgtcctgttgtggggggtgtggtctttccatctctctgtctgggggggtgcggtctttccatctctgtgtcttgcgggggtggtctttccatctctgtgtctggggggtgggtgtggtctttccatctctgtgtcctgtggcagggtgcagtctttccatctgtttgtgtgtgtgtgtgtgtgtggggggggggggggggggggtggtctttccatcgctgtgtcctgggggggtatggtctttccatctctgtgtcttggggagtgtggtctttccatctctgtgtccaggtcggggggaggggtggtgcggccttcctatctctgtgtcctaagcgggggtgtggctgttccattctgtgtttggtaggggggtgcgacctttccatctctgtgtccagggaggggggtgtggcctttccatctctatgtcttcggggtgtgtggcctttccatctctatgtcttgggggtgtgtggcctttccgtctctgtgtctggggagtgcagttgttccatcctgtgccttgtctgagtcctcttgacagctgcaacctggaagccacttccaggtgtgtcgggagttggttccttccagtgggttcgtggtcttgctgacttcaagaatggaactgcggatcttcgtggtgagtgttacagctcttaaagatggcatggacccaaagagtgagcagcagcaaaagttattgtgaacagcagagggtcaccactgctggctgggtggcggagggggttgtgtgtgtgtgttggaaggggcagcttttattcccttatttgtccctgcccatgtcccgctgactggtccattttacagggtgttgattggtccattttacagtgtgctgattggcccattttaaacacttctagctagctacagagcattgattggtgcatttttacagagccctgattggtgcattttac

SEQ ID NO: 19896 - DNA, 1093 bp, Artificial sequence
  DNA replication origin
tcgtctctttagctgctacctactacctttttttctgagccaatgagtgaatggggcatctgagtggggagtggggggtggggcctgaggaggggtgagctctgccccagggacgggcatctcccattcccctggagccagatgggagatgagaagggcccaggggctcctggagctgccgtaagtcccaccctccccacccggcctggcaactccttgcattcagaggaagtgacctctttatccgtatatacttgagtgtggattccctgcaaacaagggcgtcttcttacggaaccttcatgcaatgatcaaaatcaggaatttaggtttccagatccacacagcccacgtgagagccaacaggatgggggtggaagggcctctggcttccctgtgtgcgagcatggacgcacgtacagagaggagggggcatggattgtgtgtgtgagagtgcgtgtgttagtgtgagtgtgtgagggtatgagcacagacgtactgagaggagggagtgtggatgacgtgtgtgagcgtgtgaacacggacacacagacaggagggggtgtgcattgtgtgttagcatgtgttagtgtgagcatgtgagtatgtgagcacggacgcacagagaggagggggtgtggattgtgtgtgtgtgagcgtatgagtgtgtgagtgtgagcacagatgcatatacaaagagaaggggtgtggattgtgtgtgtgttagtgtgagcgtatggacgcacatagaggaggtgcatggattgtgtgtgtgagcgtgtgagtgtgagcacagatgcacagagaggaggggcgtggattgtgtgagtgtgagcgtgtgtgagcagggacgcacatacagagaggagggggagtggatcatctgagtgtgcacgtgtatgagcatgagaggcagagaggggcaagggggacagtaggagtcaaggaatgtgtccaccgtgttcccagcactgggcttcaaatctggctaattcttggagctcacccgtcacctgctcatctacagatgggtaaactgaggcccgcggcagaggccttaccttcgcgcagggtggctggaaccgggaggatc

SEQ ID NO: 19897 - DNA, 985 bp, Artificial sequence
  DNA replication origin
agctgtattttaattcaaacatcggccatgcagagactccctgcccccatatatcccagctgacgccccaggccccgggcccccctcccttgcaggccatcagggccaattcagttctgcgtgtgcttgttcatctggccaatgcccttagaagcccagcagtgaagggtgtggtgtgcatggccctgccttccctgaccccacctggctggcttccagctcaccatggcttccctggcaggcccagttcacaggcttcctgggcactgccgctgttccaaagcaggccagtcccactgagctgggaagctgcctagacccgcacctagccagcaagcctgggagccaatggtggggggcttccatccaccaatggtcgggggctggggtgggcggggctgcagagccgctgctggctggggtgggcggggctgcagtgctgcaattggctggggtgggcggggctgcagtgctgcaattggctggggtgggcggggctgcagagctgctgctggctggggtgggcggggctgcagagctgctgctggctggggtgggcggggctgcagagctgctgctggctggggtggtgcaggtggtgggtgagatctgccggaagtccattccctgtagtgttcagtgccgggagttggctggggctggggtggggatgctggggctggggtggggatgctggggctggggtggggatgctgggggagactcatggcagctccaggctcccctggcgtttcagcctcaccatctttcatctggctccagggacacgggagaccccagcccccaggaaccagagctcacccctcatcaggccccactccccactcagacgcccccattcactcctttcttcacttggtcatttatgcctgtgggccacacatctaggaggcaggagctgctcatgggtgccgcccagaaccaggggtcccccgggaggcagacactcctgtcagagggggaa

SEQ ID NO: 19898 - DNA, 1520 bp, Artificial sequence
  DNA replication origin
ccctgcagtgctgtggggtccagaggggctgtgggggtcaagaaggtacagcacccagcatctcgctggatttgaccggtttgtccaaggaggctggcctgaccacttacagcctgtccctggctctggtgtgaggagcattaggcccagctcagggtcctctggcttcagagccagctggcgtgggcatccagggggcagcctgtgggcagtgactctgtctgtctttggacaggacaaggactgccatccaccatggtgaagctgggctgcagcttctctgggaagccaggtaaagaccctggggaccaggatggggctgccatggacagtgtgcctctgatcagccccttggacatcagccagctccagccgccactccctgaccaggtgagggcctgggccagcgtgggggcccttctcaggctcccctgggaacaaaggggtgtggggtgaggtttgtctagatatggcctcttcccaggtgcagtagagcaaacagatgaagggccatgggggccaaagccccagctggccatgggcactctgtgtgacctcctggtcagctcccccatatgccagagctgggcaaactggctgatgggtaaccgagaattcacgcactgactcctagacagcaccccgcccacgtgctgtccatagggcactcagcaggcaacgcttcccacccttcccctcggggcatggccctgtcctgggtttagcctgagatctgggggtccttgggcaagtgaccactggggttgcttatagcagaaactggggagaagcaaagagctcagcttgagcccagcccagtttgaccccccagggagtcatgcagcatgaagggcaccccgagttgtccctgctggaggtgggggcagcatctatgctggggacccggggcaggaggaccacccctgctggccaagggcaattctccagcaccctgagttgaaggcagcaggcagagtgaggggctctgtcagcagcccagccaggcccagagctgccatgcgcccagcagacagactttcagcgtccaccttcccttggcctcactttgtggctgctggagccctgccatccaccagacagtcctgggagatgggtcagcgtcaacaccactgccacgaagctgacgctggctccctcccctctcagttcagggctctcttgggtccctgccagctgcctactgaggccatggccatctcttttcacaggtggtcatcaagacacagacagaataccagctgtcctccccagaccagcagaatttccctgacctggagggccagaggctgaactgcagccacccagaggaagggcgcagggtaaccacacccaccccacccactgtggggactcaggacaggaggagaaggtggaaggcagctgggggtgcctgggttccgtccaggccagtctggggtccccttgctctcagggaggagagggtggcagtgagtcatcccgcccagagctggccccaccggctgccctgcacccaccag

SEQ ID NO: 19899 - DNA, 840 bp, Artificial sequence
  DNA replication origin
atcaaaggagaaaagaaaggtcctgtgtgcagtagacacggaacctgtggcccggtgctatggcggcgcctgtggtcccagccactcgggaggctgaggcgggagaatcgcttgaacccgggaggcggaggttgcaatgagccgagatcacgccactgcactccagcctaggtgacagaacgaaactctgccaaaaaaaaaaaaaaaaaaaaaaaaaggcagggcgcggtggctcacgcctgtaatcccagcactttgggaggccgaggcgggcgggtcacgaggtcaggagatcgagaccattctggctaacacggtgaaaccccgtctctactaaaaaatacaaaaaattagccgggcgcggtggcgggcgcctgtagtcccagctacttgggaggctgaggcaggagaatggcgtgaacctgggaggcggagcttgcagtgagccgagatcgcgccaccgcactccagcctgggtgacagagagagactccgtctcaaaaaaaaaaaaaaaaggaatctgtcattacaaccttctctcacaaagaactccaggcgcagacagcatcaccacagcattctaccaaccatttacagggaaagtaatgcacgtccacaaaactcttccagaaagacaagggagcactcaccagctcctgaggccaacgtagcctcagtccctaacccagcaaggacagcagcggagaggagctcacaggccagcccccgccacacgtacacaccactgcgaggccccaaagctcaagcagcgtgaatccagcgaatacaacaaggtaacatatcatgacagtttgggtgtattctggaaatgaagtttgg

SEQ ID NO: 19900 - DNA, 1243 bp, Artificial sequence
  DNA replication origin
tcccctagaggctttggagggagcatggccccgtgaacaccttcattttggacttcttgactccagaactgtgaaagaatttgttattttaagccacctgcttgtaatttgtgacagcagcgcgaggatgtccaattaactgccagagccagcagtgaccagtctttctcgccctgcagtggccaggctccgctgtgggttccaggtgtgggtaggcaccacgggaacaggagcaagggacccgcggtcacagagcttctgcccagctgctgccactcaagtacagataatgtggaggcatctgcgtggaggagaatctaagggtggaaggagctgagggtggaatgattgcaaggtggaaggatccgagggagaaggattgagggggtgggggggggggaaggatccgaggggtgagggatccaaggacagagggacccaacggggaaggattgcgcgggtgggggtggggtggaggggagggatccgagcggaggggtccgagggtggaacgatctgaagggaagggaccccaacggggtgcggggagggatccgaaggggtaaggatatgacgcggggggaaggatccgacgcagggggagggatccgagggtggaaggatctgaggggggaagaatccgacttggggaacgatccaagtggggtaggatcccaggtgggaagggtcggagagcggaggtatctgagagggagggctctgagggggaaagatctgagagtggaaggctctgaggcggaaagatctgagagtggaaggctctgagggggaaagaaagatctgagagtggaaggctctgagggggaaagatctgagagtggaaggctctgaggggggaaggatctgaggggggaaggctctgaggggggaaggatctgaggggggaaggctctgaggggggaaggatctgaggggggaaggctctgaggggggaaggatctgaggggggaaggctctgaggggggaaggctctgaaggggaagctctgaggggggaaggatctgagcggggaaggctctgaggggggaaggctctgaaggggaggctctgaggggggaaggacatgagggggaaggatctgaaaggcgaaggatctgaggggggaaggatctgagcggggaaggctctgaggggggaaggctctgaggggggaaggacatgagggggaaggatctgaggggcgaaggatctgaggggggaaggctctgaggggggaaggctc

SEQ ID NO: 19901 - DNA, 934 bp, Artificial sequence
  DNA replication origin
gggaggctctgaggggggaaggacatgagggggaaggatctgaaaggcgaaggatctgaggggggaaggatctgagcggggaaggctctgaggggggaaggctctgaggggggaaggacatgagggggaaggatctgaggggcgaaggatctgaggggggaaggctctgaggggggaaggctctgaaggggaagctctgaggggggaaggacatgagggggaaggatctgaaaggcgaaggatctgaggggggaaggatctgagcggggaaggctctgaggggggaaggctctgaggggggaaggacatgagggggaaggatctgaaaggcgaaggatctgaggggggaaggatctgagcggggaaggctctgaggggggaaggctctgaggggggaaggctctgaggggggaaggacatgagggggaaggatctgaaaggcgaaggatctgaggggggaaggatctgagcggggaaggctctgaggggggaagactctgaaggggaggctctgaaggggaaggacatgaggggaaggatctgaggggcgaaggatctgagcggggaaggctctgaggggggaaggctctgagggggaggctctgagggggaaggacatgagggagaaggatctgaggggcgaaggatctgaagggggaaggatcaggggaggaaggatttggaggtggcagcttctgcgtggggaaagaactgagggggaaggatctgcgtgggcgagagtgcggccggtgaacgagggctgggtaggggatgggggaggccactctgagccggaaggagctaggcgaggggagacagggcccccagtcctggacctggccacgcgctttggggccctaacccgtgcccctcgttgttgtgtgttcatcgcaggcgaccctgtgcctgccgggcctttctggaagaggccgtg

SEQ ID NO: 19902 - DNA, 3754 bp, Artificial sequence
  DNA replication origin
atggctcgaacccgggaggcagggcttgcagtgagccaagattgcgccactgccctccagcctgggcgacagaccgagactccgtctcaaaaaaacaaaacaaaacaaaacaaaaagacagtagtaacaacgggttaccgttcagcgtggatgaaacgcggcatgtccatgagttaacagcgggaacaatgggttacggtttagcaatgaaaacgaaggcatcaccaacgcatgctcctgtcattgctgaccacccacagctgggagccgcactcaggcaaatgcctatggagcgccttctgtgtgctgggcaccatgcgggcgccagggccatcctcagggtgagtgagagccaaacccagctgggtctgacccagcacaaaggcggaggggacgggggagtctgagcatccacccaaggtccacctggagactctggggggggccccagaccaaggagcagccagggttgagctggccagggcacctgcccctgcacagtgaggcggcgagcgtgtgtgcgtgtgcgtgagggtgtgtatgtgtgagatgtgtgtgtgtcacatgtgtatgtcaggtgtgtgtgaggtgtgcgtgagggctgtcaggtgtgtgaggtaagtgaaatgtttgcgtgatgtgtgtcaggtgtgagaggtgttttgagtgtgtcaggtgtctgctggggtgacaggtgtgtctgagtcaggtgtgtgtcaggtgtgtgtgaggaatgtgtgccacctgtgtgggagggtgcatggggtgcatgtgtcaggagtgtgtgtgcctgaggtgtgtaggggtgtgtgtgcatctgggatatatgtgtgaggggtgtttggaggtgtctggggtgtgtgtcaagggtttgtgtgtggggttgtcagtgtctagggtgtgtgtcaagagtgggtggatccagggtgtgtctagggtgtatgtgtgaagggtgtgtgtgcaggtcagggatacatgtgtcaggtgtgcatgtgtgaagtgtgtgtgagttgtatgtcaggcgtgtgtgtctggagtgtgtaagggatgtgtgtgtcgagtatatgtcaggcatgtgtggctggtgtgtgcgtgaggtgtgtgagggtgtatgtgcatgggaggtgcgtgtttcgagcatgtgtgtgtctggggtgtgtgtgcctgaggtatgtggagtgtttgtgtgaggtgtgtgtgttaggtgtgtgagggtgtgtgttaggtgtgtgagggttgtgtcaggtgtgtagatctgggggtgtgtggtgcgtttgtgaggtgtgtatctgggttgtgtgtgtctgatgcatgtgtgaggtgtgcatgggatgtgtgtgtctggggtgtgtatctggtgtatgtgtcaggcatgtgtgtgagttgtgtgtgtctgggatgtgtgaggtgtttggggtgtgcatgtcaggtgtgtctggtgtgtaagcagtatgtggggtgcatttgtgaggtgtgtctggggggggtgtgtggtgcgcatccggggtatgagtccagggtgtgtctgtgtgtcgggtgtgtatcatgtatgtgtcaggtgtgtggtgtgaggtgtgtgtggcgtgtgtctggtgtgtctgtaaggtgtgtatgggggtgtgtctagtgtgtgtgtgtgaggtgtgtgtccagtgtttgggatgtgtgtctagggtgttttggtgtgtgaggtgtgtgtcaggtgtgggtgtgtcaggtctgcagggggtgtgtctggtgtgtgtgtgtttggtaggtgtgtgtttctggtgtgtctagggtatatgtgaggtgtgttgggtatgtggtgtctgatgtgaggtatgtgtgtctggggtgtttgggtgtatgtgtcgttgtgtggtgtttgcggtgtgtgtctgggtgtgtggtgtgtgtgaagcgtgtttcctgggtgactggtgtcaggtgtgtgttggggcgtgtgtgggtgtgtcttgggtgtgtgaggtgtgtgtgtttgggtgtgtctggtgtgtgaactgtatgggtcaagagcgtgtgtgaggtgtgtgtgaggtgtgtgttgggggtgtgtgtgagaggtgtatgtgatgtgtgtatggctggtgtgtgaggcgtctgtctgaggggtgtgtggcgtgtgtgaggtgtgtgtttgggtgtgtctggtgtgtgaggtgtgtatttctggggtgtgtgtcaggtgtgtgtctggggtgtgggtcaggtgtgtgtatgtcaggtgtgtggtgtgtgtgtgtcagggatgtgtttgaggtgagtgtgtttgggtgtgtctggtgtgtttctggggtatgtgtcagatgggcatcaggtgtgtcaggtgtgtgggggggtgtgtttgggtgtttctgctgtttaaggtgtgtgtttctggggtgtgggtcaggtgtgtgtgtcaggtgtggggtgtgtgtcaggggtgtgtgtgaggtgtgtttgggtgtctggtgtgtgagatgtgtgtttctggggtgggtgtcaggtgcgtgtcgtgtatgtgagatgtgtgggtgtgtctggtgtgtgaggtgtgtttctggggtgtcaggtgtgtgtgtgtgaggtatgtctggggtgtgtgtgtgaggtatatctggggtgtgtgtgaattgtgtgtttagatgtatttggtgtttgaggtgtttctggggagagtgtcaggtgtgtgtgtctggggtgtgtgtcagatgtgtgtttctggggtgtgggtcaggtgtgtggggtgcgggttaggtgtgtggggtgtgtctcaggtgtgtgtgtgtctggggtgtgtgtgaggtgtgtgtctggatgtgtctggtgtttgaaatgtgtgtttctgggggctgtcaggtgtgtgtcagctgtgtgtgtgtctgaggtgtgtgtgagatgtgtgtttggatgtctggtatttgatgtgtgtattactagggtgtgtgtgtcaggtgtgtgtgaggtgtgtgtttggatgtatctgttgtttgaggtgtttctggggtatgtgtgtcaggtgtgtggggtgtgtgtgtcaaatgtgtgcctggggtgtgtatcaggtatatgtgttgttgggtgtgtgtgaggtgtgtgtcaggtgtatgtttctgggggtgtgtcaggtgtgtgtgtcacgtgtgtgtcaggtgtgtgtcgggtgtgtgtgaggtgtgtgtttgaatgtggtgtttgaggtgtgtgattctgggggtgtgtcgggtgtgtcaggtgtgtgtgtgtctggggtgtgtgtgaggtgtgtgtggtgtgtgtgtcgggtgtgtgttgggtgtgtgtctggggtgtgtgtgtctggggtgtgtttggatgtgtctggtgttcgagatgtgtgattctggggtgtgtgtgtgtcaggtgtttggggtgtttgtgaggtgtgtgtgtggggggtgtttgtgtgaggtgtgtgtctgggatgtgtgtgaggtgtgtgtttggatgtgtctggtgttcgaggtgtggtttctggggatgtgtcaggtgtgtgtgcatcaggtgtgtgtatgaggtgtgtggtgaggcccgagcagggtctgaggggcgcatgcgcggctccctagccggggcggtgggtgggggtagagggtgcgggaccagagtcgaggccccgcctctagccgcgtttccatggcgaccacagcctcggtctcgcagctgcagcccccgccccgcccggccgcgaagcgtctggaaccgcatcctccgcatccacatccgcatcgtcgtcctccccgaccgcgtc

SEQ ID NO: 19903 - DNA, 1185 bp, Artificial sequence
  DNA replication origin
ctgagggggggccagagagggaagtgtgaggtaggggaaggggacgccctgaactccaggcagcaccctgatgggcagctgggaggcctgggctgggttcctccttgggagcgcaggtagttttactggactgtgctcacatgggccaagacacgcaggcacagaacagggagaagccccaggcccacctgcctccagcccccctcaggccagagcccacagccccagccccagactctgctcctcacagtctgggcagaccccactgtggcaggcactggtggttggcttggaaactccagaggttctgccatgcctctgtgccgccctccacgtggggacacacatgaacacacttgcacatgggtgtgggtatgggtgggtatggagcagcgagggcccacagccccacgcccacagagccctgaggctgcacgctgctgcaggcagggcacctgctgtgtcccagagctgcggggccacggctggggggctcaggggtgaatggcagcactattaggcaggcaggcagggtgtcaggtcagttcggacacgggatgtgtgtgtttgtgtatgtggtggggggtgtgcatatgttgtctgtgcatgtgtgttttgtgggtgtggaccatgtgcatggtgggtgtgcatgtatgctgtgggtggtgtcgtgttcgggtgtgtgtgcactgtgtgcttcagtgtgtggtgcatgtgtatgttgtgtgtggtgcggagtgtgtgagttcgggggtgcgtgtgctgtgtgtgtatgttatgtgtgtttgtgtgtggtggatgtgtgtgtatgttgtgtgtggtgtggagtgtgtgggcttgggtgtgtgtgtgtgctgtgtgtgcatgtatgtgttggatgtgtatgtatgttgtgtgtggggtggagcgtaagggtttgggggtgggtgtgtgctgtgtgcatgcgtgtgtggtgtgtagagtgtgagggtttgggagtgtgtctgtgtgtgcgtgcgtgtgtgatgtggtgcagacttgtctcttcagggccctgcgggggaggcttgcgtctgtcagggtggggtggtcttggggtggggcggggctctgggtctgtacagggctcagcagggctgcagtcaagggtgtctggggcaggcgcagtggttcacacccataatcccagcactttgggaggctgag

SEQ ID NO: 19904 - DNA, 1282 bp, Artificial sequence
  DNA replication origin
ctggccctgcagcccagctcagtgctgggcttggctcctctgcagggagacggccctctacggaaacctcatcctcaggaagggggtgcttgccctcaaccccctgctgtaggcctggtgaagaccacctgggccggaagaggaactgggggcaccctgagctccagtaccaccactcacaacaggcctcccagtggcagctcccagacctgggccctggccagggctctaggggccggcagtcttggggtgggccctgccaattgggacgagtatccctgatttgtgaaaatgatggaaaaacgttcagtctcaagagtccaattccagctctgttctcacgcaggcttgtttggtgctgagctcaagggaggctgctggctccagagtggcccccacgtacccttgacgaaccttgagtgggaaatcaggcctggggccctggggactgggcggggtgcctggtgccctggggacaccaagggctggagtgggggcagtggctgccctggaggccttgagaggggtggggacttctgccatagcccctgggctgtggacaccaagggggttcttcaccggggtccattccttccacccgcaggagggcaggtggcaggggctggcctggacgcttcgggaggaactgtcggctggagaggcctcggtgtgggccatgccctatgcctgtggcataggtggcctcccgctgaaagcctcacttgccctggcaggcaggggaggtaaaggacacgaggtcatttggagtccagtgccaggcagaggtgggatgcagggggttcctgaaagggggtgcctgggaggcttgcccatgggatgcttggactggtccccaaggatggggaagaataaccaccagccactgtccggaccctcgtcttgctccccagaacttgctgcagtgacaggtacaggaagaagatggggcagggctggagtttgagggaccaagggcaggagtggggatgacaggggcttcccccagggcctggggctggtgtccccggggctcgagggggcaagtcccagggttccagacccccactccagaccgcaggagaaccttgggggtgcaggcaagcccaccccggctgagatgtggctccaaatctggggaagggaccctgtctgggcttggctgcagactttggggtcctgtccgcctgctgctcccagatggtagccaaggctttctctgtgctcactagtggtcagccttggccccaggggcctcgcacttgcctggccaatcactgctcat

SEQ ID NO: 19905 - DNA, 1929 bp, Artificial sequence
  DNA replication origin
ctgctgtcccccgagctgctctacgcgctggcgcggatggggcacggggacgagatcggtgagcgcagcgggccggggcctcggggagcaccccgggacaggcaggagggcgaggcttgcacggggacccccgggccgggaagggccgcgtcctggggtgtgggcgttgctcgggcctccctggcttccgggcaggaagccccctcccccgcattctttagggaactgagacctcgtggggctctgggcggagccggcccgagcttctcccggagtccctccccagacggcccgagagccctcgcgtctgggctgcccccgagggttcggcgctttttcttctcctggggcctggggtcccggggcaggggttgggtggccgggggcctggtccgggcatcgcgggcagccgcgcgtcctctggcccctggggaggcggccgggtccgggtcggccccctggcctggtcagcacccgacagcctcgcgggcagctgttgacgcctctctgcctcccaggcagggaccttgccctccccacctccccgcgtggcttccagccctgcggatctgactgcggccggtcggcggtgggggcgcccaactggctgacctgagacctcttgtgacccacgatctgccgccatgactgggtgggaggacgggcggcgccgaccccgagggcagggataggtgccgacacgggctgtcctcccggctgtttagttcttgcggacttgaacttcccggcctcctccatctgccagtgtgggcccatggagatccgtgcagacggtgagcgagccccaggtcccccagggcagggcgggcgggtgagcggtgctcctggctctgaggctcctctgtggcctgccgtggccccaagtccatgcttgcagtgtgaagggtgcagacaggcaggcgggcgggcgggctggagactgagtgctgcctcctctgccctccaggcctgggcatcccgcagctcctggaggccgtgctgaagctgctgcccctggacacctatgtggagagtccggtgagggctgagtcgcccctgcaccctgctgctccgtgcctcagtttccccttttgcgggcttcatagggcccacctgccttggagtggggggaagccatgtgtccccaaaggggccctgaccctcaccaggggagtcccgaatggtcacctgaccaggaaggctggcagtgcccagggccccagagctgacccctccctctaggctgcagtcatggagctggtgcccagcgacaaggagaggggcctgcagaccccagtgtggacggagtacgagtccatcctacgcagggccggctgtgtggtaagcctgcagccccagttgtggggaaaaggccagggaccctctgtctcctggaggctcaggaggagccaaagacagagggtcccaagctctgtcctcaagtggtctcccacccatcaccctgagaaccccggaccactggcactccttcaccagccaggtggaagaggtgcacctgggcagtgtggcccctcttcctctgcccccgagctttccacctgccctgccccgcccaggatcctgacctgccaggtgggttgtcacccaccacagcctgtgagtggagcctgggggactcaggatgcctggcctccacctcctcaatctcccctggaggggtgccccctggtcccaggtctctcgccccatcctggctatggttggtcagaggcttagctgggtgctgtgtctcactcagccctctccacaccttgccctgcaaggggacaggcccattttcctgggcaacccactggcaggtcttgagcagggcctccataaggggggccaggggctcttgtcctgggcaggggactccccccaggacagctggcaggggctcgacagtctactgagctgtctgggtgg

SEQ ID NO: 19906 - DNA, 1317 bp, Artificial sequence
  DNA replication origin
agcccagacgcgagggctctcgggccgtctggggagggactccgggagaagctcgggccggctccgcccagagccccacgaggtctcagttccctaaagaatgcgggggagggggcttcctgcccggaagccagggaggcccgagcaacgcccacaccccaggacgcggcccttcccggcccgggggtccccgtgcaagcctcgccctcctgcctgtcccggggtgctccccgaggccccggcccgctgcgctcaccgatctcgtccccgtgccccatccgcgccagcgcgtagagcagctcgggggacagcagtgcggggacacccttcagcgccaccatggcccggcagacggggcgggcggggcctaggggcggggcttgggggccggggcggggccttacggggagggcggggcttgggggcagaggcgggggccttacggggagggcggggcttaggggcagaggcggggctttacggggagggcggggctttattggagggcggggctttagggtcccgggcttggggcttggggacgggccgggcctagggttcggcgggctggggtccgcttgcggctcaaggaagggcggggagccccaggaactggggacgtgcgggctgagtcgtggcgtgggggcaacacccagccagcccacgggctcctcgccaggtccgagactcgggtgcccttgcgctgtggccgggggctccccagtgtccctacccgagcctcccaccccgagctccctcaggccgaaggggttcaaccgccgcggcctcccctcatgagggtctctgccctctgaccacttcgtgctgcccttaggcctggcagaatgcccggagcgcaccgggtccctggggtcaccatggtgggtagctggacccaggccttcagcccacgctcctgagggaccgggagcaagggacacgggagccaggacttcggacccccttggggggagtccaggagggcagccaggcccagcttccaggctcagctgcgaagtgccaggacacctaagggtcctccatcatcccccggtgtcagcggcctgcaaccccctgcccaggatggcggcatcctgacctttggctgagctcaggctggccaggccctccctccgcggaaccaccttcttccacatgattcccagctggacaccagctgtggggctagcactgcggccctggccctcagccctgaggtgacacaaatgctctgaggcctggcggctcctaaaaagttctgaaaatcaatctgtatgtgaaaaatgacaaagccgcgtcagaaaaccaggaggaaac

SEQ ID NO: 19907 - DNA, 981 bp, Artificial sequence
  DNA replication origin
ggcagagtgagcgggtcgctctccgccaggccccgcccccaggcccgagctgccgctcgcggatctaaggccgaggggcgtccccgggaccccgccctgggctgggaccagcgccctccaggccccgccgcagtcgcccgcgcccccgcccccgccccagccctcggggtcccagctggccccggggagaccgcgcggaggcggaggcaacggcggcgcctgccgggctctgcgccgcctccccccgcccgcctgcccgcctgcccgcctgcccgcctgcccgcctgcccgcctgcccgcctgcccgccggcgtctgtagcagcggacacagcgcgcccaggcgcagggccaggcacggtggcagcggcgtgggcactgaacgccacattaggaggagttttattttcatgcacacaagacttcaacagatttaaataataaaaatttcattcatttaagttattttatttataccttttaaatatctagacaagtattgtggagcatccatttgtgtacttgcccggattctgcaaacgccagggtggagataaaaccaccctggataaaatggaatggaaagcgaaactgctattgtgaccggtggagggtgtccaggttcttgacgtcttgaacaaagaactggacaaaacgcacaaacaaagcacggaaagaaggaagcaacaaaagcgagatttatggaaaacaaaagtgtggccgggcgcggtggctcaggcctgtaatcccagcactttgggaggccaaggcgggcagatcacctgacgtcaggagtttgagaccagcctgggcaacatggtgaaacccccctctctactaaaaacacaaaaattagccgggcgtggtggtgcacgcctgtggtcttagctactcgggaggctgacgcaggagaattgcttgaatccgggaggcggaggttgcagtgagccgagatcgcaccactgccctccagcctgggcgat

SEQ ID NO: 19908 - DNA, 1866 bp, Artificial sequence
  DNA replication origin
ccaggcacgcctgtgtttctggagaatccccggtgcaggcggccgagttttctgctgcatcgcagcccgcgggggttggaaaggctcccgccctgttttcaggcgcgtccccgcctcctgagccccggtcctctgccgaggggccgcgcgctccagtttgccagcgtgagcttcactcttcgctctcggcgtgggcctcctgagccgtgtcttactttcctttgattccctctcgtcccagctggagaaaaggctcccggaagggtgacctggtgtcgctggattccactccccatcactccctagccaaccccgcgagctgagctccaggcagggagaggggcgggtgcctgggagtcgggctgactccctgggcggtggcgggcaggggtcgagcgtcctctgtccgtcaggggcccgcagcaccaggaggcgacgctggatgcagtggccatctcctcctgcctccaggccatggggaacccagggcggatcccgggtcagcagggccagctgtccaccaagctgacccacccgacatgccaggactaaggaaagaagggctgccccacacccttagtcggatggcaagtgtttggggtgcagcccccgccacgagtgtcacctgttctgcctgagcaggcttctctcttactccctgctcttgggcctgaagcagagccgctggctcagtggggcgctccattctgaggtccctggcatgcaccacggaagcccagcgggaccacccacccacctgccccagctccccagcggaggtcctgagatggcagattaaatactctggggttctgaattccacagatgaactgggtcccccacgggtatggccaagggaacggcccactccctagtggctccgtgtgaaatcgagctgctgctgctctcgccgcagggcccagctcactgcccagacataggagcacatcgccctgcgcacaggctgggtgggcacagctgtgagggaggccaccccatgcctcaggcctcctgcacaggcgtgggcctcgccactctgggtggacaggctactttggcccctcagcctctggggactgctgccctgttttcagcaccgtgtcaggcaccatctggtcagccagctcctccagccccgagactcccgtgtcctcattctcctgggccgttacggtcggccagtgcccagcctttgctggaaggctgtccaggctgggctctggtcaggcatcgatgtcccccaggcacctggcctcacctcgcgttgggacagcctctgcaagatggaacaggaagggtctggctttgcctctgtcaccttctcccggtccatcatgtcctcctggccagcccgttcctggttcctgcggggagcccagcccgaaggggaaccgaaagattctaacttaactctagttcagcctcccggatcctcctgtggagcggcaggatcccataaaagatacttggctcagcaacttgctggccaagcctccccacagcggtccacacaggccagaggtaaacatgcccatgccccacacctggaaggcctggtgcaaggaggggtgattgtagtgactgaaatgggaactctggctttatggcgcggagagagaagacatggacccaagagctgcagggtggggacaaccgacgcgctctttgtcccctggatgtggtgccacagcctgaatccaatagcacgggccgctgacgcgctgacctggggctgggttagtcgctcgtcccccttgctctgaaatggagagtgcacgtgaccacggccagtcctggacaatcctgccatgccagagccaccagctggaacacacggacacaacctcttttccatctgactggtac

SEQ ID NO: 19909 - DNA, 1059 bp, Artificial sequence
  DNA replication origin
tctcggaggaggccggaggcggagcgagggggcggggaggcgctgggaggggcggggaggggcggggaggcgcggggaggcgcggggaggggcggggaggggcggggaggggcggggaggcgcggggaggggcggggaggcgcggggaggggcggggaggcgcggggaggcgcggggaggcgcggggaggcgcggggaggggcggggaggggcggggaggggcggggaaggggccgggccgagccccacagtgcgcctcggcctccgcgagcctccggactgggctcgggtctcagagggaagcgccccgcgtgggagggcccgcgaggacaggcgtcagggagcgtcccgcgctgccgggcggtgcgcgcgagcgtccccatggagggagaagccggccggccgggcgggccagtgtctcctccaagggagacgagggcgcagcgagcgcttcccccagggacccgcgtcgagtgcgagggcgcagtgggtctgggggtgccacggtgtcaggggtgggacctgggagagcttaacgcgtccggaggggggctgtgaaagcctccagcatcgccagcgagccgtcagttcgcgtgtgcgcgcgcctgcgtgtgcgcgtgtagtcacagggctgcagggacacaggaccaaagtacaaagtacactcgcaaagtacaaagttcagaagccgagggcaagtgcagaaacgtccctcgcccgggaagttgagcgcacacccaggcacgcctgtgtttctggagaatccccggtgcaggcggccgagttttctgctgcatcgcagcccgcgggggttggaaaggctcccgccctgttttcaggcgcgtccccgcctcctgagccccggtcctctgccgaggggccgcgcgctccagtttgccagcgtgagcttcactcttcgctctcggcgtgggcctcctgagccgtgtcttactttcctttgattccctctcgtcccagctggagaaaaggctcccggaagggtgacctggtgtcgctggattccactccccatcactccctagccaaccccgcgagctg

SEQ ID NO: 19910 - DNA, 953 bp, Artificial sequence
  DNA replication origin
ttgaggctgtcctgtccttcctgccttggggctccagcatctgctgctgttgtctttgtcttgctccgggcccaggttgcacagggccctgtgtctccaatccccacaaccacacatggccccacactctgggttccctgaactctgggtcctgtagttgcttctcgtgcccctgcattctcgtggctgctgcctgggatgacagcatagctgacaaccctcctcttgctcatcaactgatgctgcatcaggcgcccacttcacaggttcgcagggcactggggagatgaggggtgccctgccctgccctgaggccgggggttttctggaggaagtgaatacataataaggcctgaaaagagaaacggtgcccagcccatgggagccagggagtgtgtggggcgtgggcagtgctggggtgagtgtgctgggtgctggggggtgttggggtgggggcagtgctggggtgctggggggtgttggggtgtgggtagtgttgggtgctggggggtgttggggtgagtgtgctgggtgccgggggatgttggggtgtgggcagtgctggggtaccacgtggtattggggtgaatgtgctgggagtccaggcccctctccggcccctccaccccagcctggatctgcagggctcctctcttctcaccctctggtctctgttcaaattgcccctcctaggatgttccctgaccccaccctcccgagccccagcctccctctgtagccagcagccccacctgcatttgctgtgtcaccagactgttctctctggggacacctgcccatcagacgcctgggagagaaattcagattccacagggttttattgtggttttgtgctcctaggaccatgagggaatgcagcttccttaaagtacaaaaatctttatcattgacatttagggtttcatcaattctgtatcccagggagaaaggca

SEQ ID NO: 19911 - DNA, 1800 bp, Artificial sequence
  DNA replication origin
tttgtgtccctgggtacttgagattagggagtggtgatgactcttaacgagcatgctgccttcaagcatctgtttaacaaagcacatcttgcactgcccttaatccatttaaccctgagtggacacagcacatgtttcagagagcacagggttgggggtaaggtcacagatcaacaggatcccaaggcagaagaatttttcttagtacagaacaaaatgaaaagtctcccatgtctacttctttctacacagacacggcaaccatccgatttctcaatcttttccccacctttcccccttctctattccacaaaaccgccattgtcatcatggcctgttctcaatgagctgttgggtacaactcccagacggggtggtggccgggcagaggggctcctcacttcccagacggggtggctgctgggcggaggggctcctcacatcccagacggggtcgcggccgggcagaggcgctccccacatctcagacgatgggcggcggggcagagacactcctcacttcctagatgggatggcggccgggaagaggcgctcatcacttcccagactgggcagccaggcagaggggctcctcacatcccagacgatgggcggccaggcagaggggctcctcacatcccagacaatgggcggccaggcagagacgctcctcgcttcccagatggggtggcggccgggcagaggctgcaatctcggcactttgggaggccaaggcaggcggctgggaggtggaggttgtagcgagccgagatcacaccactgcactccagcctgggcaccattgagcactgagtgaacgagactccgtctgcaatccctgcacctcgggaggccgaggctggcggatcacttgtggttaggagctggagaccagcccggccaacacagcgaaaccccatctccaccaaaaaaatacgaaaaccagtcaggcgtggtggcgcgcgcctgcaattggaggcactcggcaggctgaggcaggagaatcaggcagggaggttgcagtgagcagagatggcggcagtacagtccagcttcggctcggcatcagagggagaccgtggaaagagagggagagggagaccgtggagagggagagggagcggagcgggagcgggagagggagcgggagcgggcgcccctgttttttcatagacgggtcctgcactcatttctttgtgtaggtccaggtttccttctggtgtgattttacttctgtctgaaggatttcctttaacatgtattgtaaggcaggtttgctagtgatgaattctttcagcttttggttgtctgaagatgtctttatttcacctttgttttgaaagatattttctctacgtgtagaattccagattgacggggttttttagtgcttgagaggggttggtctccctttctcacttgcgtggtgtctgatgagccgtctgcggtcatgtttgtttgttttagtgcttgagaggggttggtctccctttttcacctgcgtggtgtctgatgagccgtctgtggtcgtgtgtgtttgttcctctgctgcttccaggattttctctctcagtgcttttgagcaacttgattacgatggaccttggtatggttttctatgtgttccttgtgcttgtagttcattgagatttttggatctgggtctttgtagttttcatgaaatttgcatcattttgaaacttcatatctgcaggtgttttttctgtccctctactcctcaggacctcaggcatgcaggtatcaggcacgcgggtatcaggcaggtgggtatcaggcatg

SEQ ID NO: 19912 - DNA, 2704 bp, Artificial sequence
  DNA replication origin
aggagttaaagctataacctgtaacctttaaaatctccagttaaagggcctgtttcttactggcctgtgaggtgcaccgtagtgccttgggcctgtgtgttaaagctgctctcaccagtgaaacctaagaaatgagcaggttggcagctagggtttgtgttggaggctttcggtccagtgtcttgcagtcctacaacaagtgagaggcttgctgccatcagagaggtttatttcacacttacaggcacacacagacacagaccagagactcccagcagcagagcccaagcactggcttcgcccctcagtgccctggggcatgttcagggcagggttgagggggacgccctgcacatggctttgctgtgcaatgactggaaggccgcccggcatgggcagtagagacccctggcctctgagcaccttctagctcacgggtagtgggattctgcattagtggggctgagagatgtgggggcccctccagccccattatagtgcacctgaaggggtccacagcctgtgtcctagaagagggaagaggaaggaaggtgggtggggctggtagtatggactaaggtgctgcaggacctggggccagggacatcctgtgcagaagctccggctgcctctttgcggtggtggcctgaccgtcccacagcagcctccaccagggccctggtgctcagtggcccctctttgctggctggctgcctctgctgccccataccccacacactcatcagcctgaagttagcccctgagtgccacctgcatcgtgccataaccctgaccgcctggggcaggaagtattcaggttggctgtgtcagatgctaatgtgctgaatcaacagtcattgcagatcacgaagtgtccatcataactggaacattccatcagcttgcagtgctgtggtgtgtgagggtctggtgcagctcagcccattttccaggtgggcatctgcaaagttgagggggctccggtgggtctctctgctgtgaggagactcagaccaccccctgcctcctgggggaaatgtcagaagggcttctctgcctatgaggatctggggcagggcttggccttggcctgctggtcttggaggcgttgagcttggtctggaaggggtggaggagcgtctgggctcactgggccaggggcattgctggcagtgtggacgggaggctgcagggcgctgcctcctgtggcttagtgccctggagctagagagcagtgcttggttgagtcctgccaacagcttccagatcctcacccaggccagaacccaggccagctggggaaggcagaggctggcagggcccgtggtgggtgctggtcttgactttggtgtccactgagtcccgaggctcaggcccaggagggatgcagtccggctgagggcgaggctgtccccaggacatggagagggtgagatcccaaggccacggcggggggcagggagaacccctcctaccctggatgagtgggtgactggagagctagagaacgtggcagacccaagacctctcagtgctgagcccatggaggatgccccaggctggcgggactgggaagcagagggctggtcttaacacaggtgtgtccagtgctggaggcaagtccttgtcgtgactgtccagcgccactccatgtctctcctgtccttggatgttggggggctcagcctcttgcatgggtgtcctgctgggcgctgggccccgccactggccccctgcttgctttggggtctgagttagctcctggctccactgagcaggccgtcagctgccagcccaccacgcggatacccaggccctgttccgaggcctggaacagctgcttccgaagaaggggctgccttcagggaaatgcgtgcaccgtgcagcctgtgctgtgcccagggaggcctcttcagcgggattggcagttgctgtgccctgagaacaggcagaactgtgtgatccctgaatgtgaacctgaagttcaaaggacttggaaagctctggaatgtgttggtttttcccccccaaaatgggtcctaaggagggtaaagtgacttgtttcaagttgttggagcaaagtgggtctctcacggatctcggcctgagggtgtgggggagaaggcctggacagcccctcagggcagggtgtgttttcccaccagccgcagagagccaggatggacgttcctcggacggacggttttcctgcttgggaatgttcctgggctgtgagatccactcttctgggcaggtggttagcacctaacgtttttccctcacttccccccaaattcttaagtcctttggtccatttcactgcttcttttggggagggtcagattcctcaggggctcagtggcagaaccagcctgatgtcgcctccctgcccgtgagtcaccacggcccctgggcaggcgaggggagccggggtggcttgggttcctggccttggcacctccctttgggcggcgatggagcgtggctgggcggttggtacaggagccacaggcagctgcctttttggctgaggggaccctaacatcctggagtgggtggggcagggcccatggtctcctctaggtgggaggtggcaggctgaggcggcgtgggcaggacggtggatggcgggtccacagggacagccagcagctcctgcacccagtggggctccaagaccgtgggcaagggaggaagggggagc

SEQ ID NO: 19913 - DNA, 1465 bp, Artificial sequence
  DNA replication origin
cccgtccccgcggtcccccgcgacccccgcacccggccccgctccacccgccgtgcttcctgcccctccacaccctcgtccccacccgggcccatccccctgtgagccctggtgccctgggatgagggccgaggtcctgagcggagagggtgcttgtaccagccccatggtggctcgagcccaccccgcggcccctcccgtggcaggtgcggtttctccaccggttgtcagctgcggggccgggcggagacctcctcaacctccggccttgtttcagggaggatggggtcgacccttgcgatccccagaggccccccatggctcctcctgggctggctgtcttcctcctgtgggttctgatgccacctgggccgacggcgtcttctcagcccagggcggccgcgcctccggtgagtttcagctgagggcgcacggccagctccgagcctggctccgggtgcagcaccggcctgggacctctgctgtcccgcgtaggggtgccctgcaaatatgtgatgaataagtgaagaaatacgttctatcttctaacttgccggatgttagaaggaaaccaagcttatgcttctcatttatagctaccgttaaggattggacagaagcttagctttttgggtgagacggacaacagtgtttttagaacctttggcaaggaagagctggaaagaacatgtatttgaaagtgactgacaggtcttctggccctagggggccacctgagcaggtgcacccagcttccctccaagacagaaaataaattaagaaggagagcaggaagggccccggcagactccagacgggagggggtgctgcccatcaggcagaaggagcttggaagggaggggccgtggccatgggacgtggaggtgggagcgggggtcatcataggtctgcacactcgggttgagtcccccttccccatcacacacaggacagccagcagtgagctgcttaccccaaggagtcaagggggttcttgggcaacccctggtgctggagccggcagtggacagcaccgcagccagaccttgcttatttttggctcatgaggaacatctgtgaccgttccctcccctggccctgggaggggatgtgtgacctccactcaagacagccatgcggctcctccggctgcgggcggggagggcatgtttcccagcacaggcccaggactgccagctgagaggctgggaggggcccctcacccctagactttgcatgtgaagccaagcgtggagcctcacagggaatctgagatgggagccagtgagatgggggcaggacccagaggggagaagaggtcctggggatgctgtggatctggatccagcgtgcgggagctgaggttccggagtgaaacactgcctttcatggaagcacgtcttcctgtcacccatcggcttcattttaaaggatgaaaatgtatcagacattcaaggagagctgc

SEQ ID NO: 19914 - DNA, 864 bp, Artificial sequence
  DNA replication origin
aggaagagggattgggcagctctccctcctgcagctctaaaggggaagggcctggaggagtttggccagggcctccctgatgttgcagttcccaggcagtagatgatgggtttgagcagagggatcccaaccaagtagacccctgacaccagcttgatgaggttagaggagccgccaccccaggtgggaggcataggtggggaaggcctttagctgctgggcctttctggaatcctcagcgatctggccaggatgtgggtgtaggagaccgtggttgcctgcagggaagccgcaaggatcacctgggctgcctgagtccgcatttctatggtagtggtgctggagcaagagagccctagcgggggtgggatatcacagaagtggttgaggacatcggggctgcggagcctcaggctggagttgagagccgtggacacaaaggaggctgggaagctgctgagctgggcgctgatggccaggtgcaggcagagccagctgcatggagtccatgatgggctgggtagtgcagcaggtggcagatgaccgggtgccagtcacagtccatgttggccgggaggatgcactcagaggagctgagtgagaggaagaggagcagccaggtgaggtgccccgagaaggagatagatggtcgtcgctcgtgctgggagtccggccaacagctttgggacggtgaccgaggtgtacagggtctccagcaccgagagtttggccaggaagaggtgtgtggatatgtgcaggtggtggctggctctgatggtccccacgacagccaggtcctctaggatggtcaccacatagatgatgaggagtgaccaaatagcagcccttgaagatggcgcagct

SEQ ID NO: 19915 - DNA, 1530 bp, Artificial sequence
  DNA replication origin
tggcagtcccatcggagtgaaaatttgcaatgagagacttccaggatggggagcagatagggggtggggagggcaaggtcacaaaggaaccgaataagaaacaccagcggaggcaggtagaggcggggccgggggagacgcacctgcgagggaggcggggcccgccgtgaccttggtctccacgcgaagacctgggggaggctgcgcggatgcacccagggccccagccctgagccccaaggtgcctcgctggctggtccacgtcgcccggggtgctgtgggactggggcggggtggacgggggcgctgcagagggtcctcagcgctgagccttcgtcggcccagcccctccccgcagccgcccacgctgcacccagggcggggcccatgcatctcctgaggctggccagtggcgccccccagcactccgtcctcgcccccgccatgggtaggggtctctgaagtcgcctcaccaggtgggcctggagcagccgccagctcagacccccgagcgccggtgagggaggggtggtagaaggctgggtcaagggtcacccaggaattccacttgtccacggggacccggccgctgcccaggcgcagacagacccagaggcagagtgcgaggtaggggtctggggcttacatcccccgagaggggcggggacctcccagaggagctgctgcacaggcctgcggagctccttctcccaccactgtcccagctcaccctccaacccccatcctgccctcagacacccaactgcaggcaagtccaggaaccagaaccccacgccacacagacccattggaggctctgagtggacagctcccgcccttccctcgtccgcccctttgctggctcagaaagtacaagataaagatgtcaggacctaaaaggtggggaggagcctccctcccctctgcaaaacccctggaagctttgttcacccgtacagggtgcccctggcccctgggggccagcagggttgaggtccaggaagggccccaaggcacacagccccgagaaggcacgccaggcagaatgggtcttcccttgcgctgtgtgtacatctgggggtgtgcacttgggtgcatgtgtgtgcaccagggtgtgtgtgcagctggggagggacgtgcactgagtgtatatgtgtgcacctggccacgtacctgtgtgttggggcagggaagattatgcacctcagggcgtataagtgtaagagggggtatacctgatcatatgagtgtgtacaggtcccaaggccccttggccaggcgttagctctgggtaagtgggcatgttgggctgagaggtggggatgacagataagtattgcagcaggtcccaaaggtgcatggtgggacagtctgtgagcctgagcccctgccctaagatcccaggagggcttacagtgctcttacctagctctcaccagtggagcagggctgtgaccccatcacacaccacagcctagtctccccactgttctggagtgctgagaagtgacttgcctgaccaggagggcc

SEQ ID NO: 19916 - DNA, 1315 bp, Artificial sequence
  DNA replication origin
aggactcgcaagtgtccactgcacagggtgaacatcccagatttttacaaccttgccagcaggactgacagtcattactgaaacagttgttgcagatacatgtgattctgacctacacgcaggctgtgtcagcagctcccagctgtgggtccccatgacacctgaaggtcaccatagaagacacatggagccacacagctccgccagcctggagccactgcgttcgaaggggaaccggaggctcctgcacctggtctactgccctccctctcctcacagcctcttaggaggagcaggggacagattcctccgggaggccaaggctgtagcccccgtcggccctgcatgctgggctgtattcagcatgggcagcctcgtccggtctccgaacctggccttctgcagatgcccgccctgcagtgggattgaaggatatttgcctggaagagtggctcagcctctccagggtctccttatgttatggtctgggggaaggttagggagggatgcagggagggacctaaggatggggcaccgggtgtgaatccctgtggggaaccccagtgcctgggacagggtccatgagtgcctgggtcagtgtctgttgtggtctgggtcagcgtccattgaggtctgggttggggtccatcagtgtctgggtcagcgtccatcagggtccaggtcagggtacatcagggtctaggttggggtccattggggtctaggtctgggtccatcggggtctaggttggggtccattggggtctaggtcggggtccatcggtgtctgggtcagcgtccatggaggtctgggtcggggtccatcggtgtctgggtcagcgtctgtcggggtctgggtcggggtccatcggtgtctgggtcagcgtctgtcggggtctgggtcggggtccatcggtgtctgggtcagcgtctgtcggggtctgggtcggggtccatcggtgtctgggtcagcgtctgtcggggtctgggtcggggtccatcggtgtctgggtcagcgtctgtcggggtctgggtcagggtccgacggggctgtgagctcaggttccagccgcccttacccactggttcccaacagagccgggggccagccgtccatggagactgggtcatggtgggcagtgggtgacccagcagcttggtttttgtttggtaacattcttggccacctgagtcctttgtcctattttcctatttctcctcctcctcgccctgttttaaagtaaatctactcgtgtgcactgtggttgggcttttcctgcttatctgcaccctaagtgcctcaggtgagccctcc

SEQ ID NO: 19917 - DNA, 1285 bp, Artificial sequence
  DNA replication origin
ggctgtgaaaggggcaaaggcacctgaaccctctgccctcctcacctagacccgtgaggaccacggccctggggcagagccctctccctggacaccaaggtcctctgactgctccccacctggttggctgagcctggctgatgctccacagaggggtggtccaggctggacagctcaaggtggcagagggcagtgggaggtcaggagaaggtgctcaggacccaccaaggggtctttggcccctgccttctgtgtgtgcttggagaagggacttcactggtcccagagacagctgatcagtccatccagcctggcctggtgtcctggtccacacggggtacagacctccaaggctgccgggggcaggtgtatggctctgtgttcccacgtcccaaaaccacattcataaatgtcacatttattcacattcagccatgtctgagggtccttactgggcctcagcactggcttccgacccagcagtggacgcatgaatttttgcctgggggatcaggtgttggagggagacagacaacagctaatggtgggtaactctgcagcacgcgggggtggagcgtggcatggagaggcaggcacacaaaggagtgggatcagggccactgcttggacagaacacccaaggccagggtccaccctggaggtgtcagggaagagagtgccagggaaggggacagcggctgcgcaggtgaaggtgggcctgggccctgcgtggtgggggacgagcagtgggcagggagggctgagctcagcggtgggtgtcggcacacaggcctgtggtgtgtcctcggctgtcaccgactgagtggctgcggggtggcgagcagagaggggactgatgtgactttgctttcaaggagccccctcgacctctggacgctggtggagcatgggcggggcagggcccagttgggggcggccctcgtagctgaaatcgggcagaccctgccggggtgcagcccgatggattcgctgatggattggatgtgggtgtagaacagagataagccgaaggctgtgaggtcagcgtggttttgggggctgggggaagtcggaagtaaggttttggggtgcaagtgcagagatggaggagcggctgggcaaaggcatggacacaggcgtgtggagcaggggcctgggctggaggtgggcattggggtgcgtcgggaccgaccccggggctccaaaggccggggctgtgggtggggggagagcagaggctgggtgtccgtcggcgaaggcgccattctcatctcctccagttttg

SEQ ID NO: 19918 - DNA, 2373 bp, Artificial sequence
  DNA replication origin
ctctgccattgccccagctaagcagcgagagcttgctgaagcccagagggctgtgggaccatgagggcagctctctggaccctgggactcgggccccttcttctgaatctctgggcagtccccattggtaagtttctgcttccttcatccatggaactttctggaggcatcagctctgttgatgcccaggccccggggcatgagggtccctgcagtgacctgccgtctgcctgggtctcactcagcccagagtgggtgggacatgctggggcaggagggaggtgactccacatggctggatccctgtgacctcagggcccccagaccctagccccactgcttggaacccagggttcagggctgggtcaggccctggacaaaatgagggacacggcccagtgtctggtcccaatgaccctgatcaacagagtcctgaggggtcctgcgggggctgctccatccacgtgccctggagcagggctgaggtcctgggaaggaggtgggagggttggctgcatctggcagtgaggttgagcatggggtcccatggagatgctgcacccaggtggagacactggggtgtgaagccatgtggaagggctgctgggtcaggggcagggaggtgtagagaggggggtctagctagaaggaacagcaggagaggctggaggtgagagggagccccggggacctgcgtacgtgggcatggagccatgatgtgagtgtggggctgggcgggaggcaggggagggtgcccttgaggctgaggaacacttcactgtcaaggctggtccaggtgcccagcagggcggtgacctggtgctggacggagccacatccccagcggtggggtggaagtctgtgggcagctgcagaaagtgcagaggaggttaggatttgaaggaaaggcagcaatgtggccacagatggatggaagcctggggttgaagggatttgcttttgtgtcaacgatcgcatgcacaagggccggaattctctattacaacaagaaatagctttagaaaatataaaatgaaaagctattcatagcgggcgtggtggcttatggctgtaatcccagcactttgggaggctgaggcaggcagtttacctgaggtcatgagttcgagatcagcctggccaacatggtgaaaccccatctctactaaaaatacaaaaattagccagtcgtggtagtgggcgcctataattcccgctacatgggaggctgaggcacgagaatcagttcaaccctggaggtggacattgcagtgagctgagatcgtgccattgcactccagcctgagtgacagagcgagacttttgtctaaaaaagaaaaaattgcagacaccagcacgcatccatgtcctgagaagaaccaggtggggagggtgatgaggaggctggggggtgtggagggatggatgaagactgagagagaggagattcaaggctccccaggaggtgggagggaaaggtcttcatcttggaccaggcagggtcccccctctgctcctgactgccatcggggaggctcttttctgggtgtggagagtcctccaggggccctggaggctgctctgggaccacacagcaccacccacatggacttcctcctactggttgcttcattttcctcggggtggctgtgttgatgtggggttgcagaggcctggagagggtggttaggggtgcctccgtggcgggtgggagagaaggtgctggagtagctgagatgctcagagaccggagggtgagatcctgcctggaagccggtatgggtggggtagtggggctgggtttggcatagtgggagggcaggcaggggtggttttcctggatactcagggttgcagaggacaggaccgaagggtgagcggggcactccaaggggtgtggacagtcacgtgggtggggcaggtgtgacagtggtgggctggagaccacagggcctccagtggaagtaggggaatgatgcttgggaggcagagagtgggtgggaggacccacccagctgcagacccaggaggacaggggacttccttgcctgggggatggggtcctccaggatgttggggctccagagggccagggaggggagtagcccccggggagacacatggggtgagggtttctctgtgagccgcgcccatcacctctctgggactgcttggtggggtgagaggagcccgactcgctgctgaggcctcacaggccgttccctgctgccgcggctgccatctcctcctgcgcctctggttggttctggcccctctaactggacctgtctgtctgtaggtggaccaggtgctctgaggctggcgtacagacacagcacgtgcgacggagtggtgttggtccgacaccacggg

SEQ ID NO: 19919 - DNA, 1067 bp, Artificial sequence
  DNA replication origin
gacccaggaggacaggggacttccttgcctgggggatggggtcctccaggatgttggggctccagagggccagggaggggagtagcccccggggagacacatggggtgagggtttctctgtgagccgcgcccatcacctctctgggactgcttggtggggtgagaggagcccgactcgctgctgaggcctcacaggccgttccctgctgccgcggctgccatctcctcctgcgcctctggttggttctggcccctctaactggacctgtctgtctgtaggtggaccaggtgctctgaggctggcgtacagacacagcacgtgcgacggagtggtgttggtccgacaccacggggcatggggatacgtgtgcaaccaggagtggacgctggcagaggcctctgtcgtgtgcaggcagctgggctgcggccctgccgtgggcgcccccaagtatgtcccgctgcctggagagatggcccagccctggcttcacaacgtgtcctgccggggcaacgagtcctccctctgggagtgcagccttggctcatggtgccagagcccgtgcccccacgcatgggtggtggtcgcgctgtgctccagtaagtagggaggagtgaaggggacggggctgaggaggaggaggagtgggaggacgaggaggaggactgggaggacgcagaggaggactgggaggatggcgggtctcggagacgggcggggaggctgtgggtctggagctctctctgggaggggctcctctctgggcaccggggccatcctgactgtaagattcagctgtggaaaaaccaacgccagggagagtcagagattggaggaaggaagcagagtgcggcccaggcgtgggggaggcagcagccgagcgggggcggggtctgtggacgcctgaggcccacacaggtagctgatgatggtttcttagacaaatgacagacaggtacacgctttccctttgaggtctggctcgagggtcctcagctgtccctcacattttatgtggctgtgaggaccccctcatagcgtcctgcctctgaggctgaaccacctggcc

SEQ ID NO: 19920 - DNA, 1202 bp, Artificial sequence
  DNA replication origin
tcacctgcccctgaagctggccctggctcagcccatcactgtcctccctgaaaaaggagctgccgagtgaccatgcggccagctgggtccataccttaaggaggaccggcctgtgctccacagacggcactttccgggagctccggctggtgaagggccgcagtccctgcgcgggactccccgagatcagaaacgtgaatggggtggaccgcctctgtgtcctgcatgtggaggaggccatggtgttctgccgggagctggggtgcggccctgtgctccaggccccccgccgggacgtgggcgtcgtcaggaagtacctggcctgcaggggtaccgagcccaccatccgcagctgcagactggacaacaacttccgcagcggctgcgacctgcggctggacgcagaggtggtctgctcaggtgaggctgccacctgatgttcccagtgacccttgggatgatgctgggcccggacctggggagggcagggagaaggggggtgggcgttcccacggatgggcccccctgtcctgcatgagacattgggcgcagaggtgggaaagggcctcagctctcacgctggttctcagcagagtggagctgagtttctggtggccccacagaggtgtcctggctcagaacccgcaggccatctaggggtcctggctgccgctgcaagtctgagctgcctcagctgtgatctctgcatgtctaacatggatcggggttgggtagaggtcacttcttcccagccctgcctcaactgtgtgtgagctgcactggcctcacagctcctggccttgttgtgcatatgaggagcagctgaaatgaggtggatagtctgcctgctgcggtaccccagagagggtggtgctcagtggaccaaggggtgccctgacctcgcctctgggattgcagagggtgttgctgtcatggcctcggacaggcagaggctgtgaaatacgtgagcacctgcagcaggtgaccctgaccctgaccttggtgatgcggccaaggacgtctgctctgctctgggtgccgggtggaagggcctgtggctgcaagttcctgcctgtgcttggtagaccctctgcctagatgcaggtgatggctcctggctgaagccttccgcagtctgaggctcagggccaggctgttgacctgagaacacctgtctcctgcctgagaggacgtctgccccc

SEQ ID NO: 19921 - DNA, 1437 bp, Artificial sequence
  DNA replication origin
ggcagaggctgtgaaatacgtgagcacctgcagcaggtgaccctgaccctgaccttggtgatgcggccaaggacgtctgctctgctctgggtgccgggtggaagggcctgtggctgcaagttcctgcctgtgcttggtagaccctctgcctagatgcaggtgatggctcctggctgaagccttccgcagtctgaggctcagggccaggctgttgacctgagaacacctgtctcctgcctgagaggacgtctgcccccaggacacaccgaggcccgactggtgggcggcgagcacccctgcgccgggcgcctggaggtgacctggggcaccgtctgtgatgcggccctggacctggccacggcccacgtggtgtgccgggagctgcagtgtggggcggtcgtgtccacgcccgagggcgcccgcttcggccggggctcggggccggtgtggacggaggccttccgctgtgcgggcaacgagtcgctgctgttccactgcccacgggggcgtgggagccagtgtgggcatggtcacgacgcggggctcaggtgctcaggtgaagtcctgtgtgtgggctctgaaggctcagccctgccttgttctctgtcaaatcccttcgtgccctaaaggtgcctctggccagtaggtgtgggtgcttttgatgtttgcttctgttggttgaaagaagcgcagggaagagactgggtgtagagtgatgtaccccaaggctgcagctaagatcaaattcttctggagagctgtgtgagctggatgctgatgcagaggagggtgggggagctggtgagaccaaggctgggctctgtgcccatcccactgggtgtgaaggaaggaaatgaccacagacagccatgttctgggtcggccgtctgcaagccaggctgactcctcctctcccccagagttcaggatggtcaacggcagcagcagctgtgagggccgcgtggagttccaggtgcaggggtcctgggcacccctctgtgccacccactgggacatagcagatgccaccgtcctctgccaccagctcaactgtggcaacgcggtggccgcacctggaggaggccattttggggacggggacgctgccatctggcctgatgcctttcactgtgaggggacagagtcctacttgtggaattgcccagtaagcaccctgggggccccggcctgtgccccgggaaacacagcctccgcggtctgctcaggtgggtgcagccaggacggtggaccaggagggtgagtgagaggcatggacagaggagtgcaaggaaggacagagggggcggagaggtacgggccctgctggggggtggtcctgggtccctcccgctgacatcttgggcccctgtgcgtccccatccccaggtctggcccacgccctgcgactgagggaaggacagagccgctgtgacggcc

SEQ ID NO: 19922 - DNA, 1249 bp, Artificial sequence
  DNA replication origin
ctgtttaacccgcaggattgtcagaggacaggccacaggctgctggggagcccctcaactgctcctcctggctcggctgcccaggtacccctctgtccttgtcgctgtcctccttcccatcccggtccagcccccgcagtgaccgcagccccttttgcagaggagggcgcactgcgcgtgcgcgggggcgaggaccgctgctccgggcgcgtggagctctggcacgcgggctcctggggcaccgtgtgcgacgatggctgggacctggcggacgcggaggtcgtgtgccgccagctgggctgtggtcgggccgtcgccgccctgggggccgccgcctttggccctggctccgggcccgtgtggctggacgaggtggggtgccggggcagcgaggcgtccctgtggggctgccctgcggagcggtggggacgcggagaccgcgcgcacgaggaggacgcgggcgtgcgctgctggggtgagtggggggcggtgggaagtcggtcatggggccggcagagggcgctgggatggagtcagtcttgagtgtcacttcggtgggcaggagagctcgcccaggtgttagtgggttggtttccaccctgggatttttctgggataggctgatttgctgtggaggcctgtttgggacatgcactccctggggtttccccctaatcttttttgggaattcccttttgtttattccaatccttgttcatttcgggtatgtgtcacctgggtgttggcaggttcagttgttccctgcacctcattctctttgcagaaaacaaacagttaaccacagtgatgaccttagcaaaagcagcagcagtggtaactttccctgagccactcccattctctgtgctctggtcacctcttgtgacttgccctggcatctgcctgggggccatgttttaccaaggaagggggctgtcccttgaaagcagacacccccagtggacactagccattttggggtgctctgcacagctgaaaccagcagatgcccccccagcacttccgactcgcaggtcctccatgagggagagggtgtggctgggcccttggagccaccctgtcctgctgagggtgtgcaggtcccccccaccacccagctggctcaagacctctcctttctcagagcctggcccaggccccccactgcctgcagctcccttccggacattctgggtggtcagtgtcgtcctgggatcccttcttggtcttctccttctgggcctcatgg

SEQ ID NO: 19923 - DNA, 1234 bp, Artificial sequence
  DNA replication origin
ggcagagttgcttcagcctgcaggctgatctcacttagggctcattttattggccagagagagtggcagacatctgcatcagcctccagccctcaagactgagctcaaccctagaaggttcccccaggcagcacattggggcccactgggaagcatcatgtggtttgctggcaagggacggtggccagggatgggagggcactgggagtctggctatgttgccgtggtccctccatcccagcccacagcatcctgcctctttgctgcctggctggggttcctgcctggagttgctgtcctcccttgcctgtggccacatccacactgagggcctgtgtgtgaccatgctcaccttgcctcaggtctgggaagatccgaggtatctcctggagaagccatctatgatgtcattggggaaatgccgccagcaggactgtacgaggaaatcatggaggccgaggctgtgctccaagatgaggaggacggaagtgtggtgaaggtggacacagaagccgcaggtgggtttgtgctccagctcaggggtgagctctggggtgggctacggatgctgaccacaagatgcagtggaaagggactctgaccacaggagcctggcttcagaaggctgctgaccacagggctcatggatgcaaagggactcgtgggcaggggagagcagggccacacccatgagggcagagtcagtggctggagtccccatcggagaggcctgccctgtggtgggagaagagggctggtcgggtgtgctgggagccgcgggtctggcaggggcatatgctgcagctcactcagcctcagtttcatcacctgtgggagctgtgctgctgtcacaggctgcttggggtgcttcaatgtcaggatgccttgaacattgccaggtgctttctggttgacatgtttatgcgttcctgtcttacgggctttgccaaatgtgctctggggacaacttgcacgtgtgctgatttggtcacgcggtgtctcttgcgccagtttcaggggaggtgtctaacctcctggagggacagtctatacgtgcggagggaggacacagcagacctgtttctcagggatatgacgaggctgcgtttcctctggaggagatgacgttgtaaagcaacctgaggatgagatacaccagctggctgtcgaaatcacagctcttcattttcttgtacaattgtagtggatttcgtgagaacaccttggatgcctt

SEQ ID NO: 19924 - DNA, 1490 bp, Artificial sequence
  DNA replication origin
aaaggttaccctcccagaagaaatttccaaaacactttcattattctctgctcttgacatgaagagaactgaataagccatcatcaactgagataatggatgccaaaacatccagtaaataacctcatagagcttagctctcactaagtttttggagcattttccagtaattcaaaggacctggggaaccttaagcactgcttaggatgctccataaacatcttctgcgtgggtaggggagtggatggatggctggatgggtgggtggatggacggacggatggatggatggatggatggatggatggttggatggatgggtgggtggatggatggatgggtcaatggatgtgtggatggatggaagggtgggtggatgggtggatggttggatgtatagatgggtggatgggtggatgcttggatggatgcgtgggtaggtggatggagggatggctggatggatgggtgggtgggtgggtgggtggatggatgggtggatgggtggttgggtggatggatggataggagggtggataaatgggtggatggatggatgggagggtggataaatgggtggatgggtggatggttggatggatgggtgggtgggtggatggatgggtggttggatggatgggtgggtgggtggatgggagggtggatggatgggtggttggatggatgggtgggtgggtggatgggagggtggatggctggctggctgggtgggtgggtggatggatgcatgggtggatggatggaggatggatggatggatggaggggtgtatagatggaggggtggatggatgtgtaggtgggcagatggataaaagcgtgattgaatagatgggtggatgatgggtggatgcccaactggccaggaaccaatccctgaaatttgtcccattcatatcttggcagagaagctccatgaagaaattgacagggtgattgggccaagccgaatccctgccatcaaggataggcaagagatgccctacatggatgctgtggtgcatgagattcagcggttcatcaccctcgtgccctccaacctgccccatgaagcaacccgagacaccattttcagaggatacctcatccccaaggttaagcaatgagcctgcagcacacagcatgaacaccatcctatcagctaatcgccttcctgccagggagcaggatgggggccccaagacccttccctttggcaggggtcactgaggggaagggctggccccactcccaccctgtgggatactgcatctccaggagtgctcacattggcctggtgaccagagaggtggaggaaatctggaaaagagcctcagcagatagtgcctgggactgtagtgaattctaatgccaggaacaaactatcacaaccagccctggggttaatcctgtgagaagattagggctttcatcttcatttagacctgacccctgactgctttctatctaatccttcactaagcaactcct

SEQ ID NO: 19925 - DNA, 1689 bp, Artificial sequence
  DNA replication origin
cacaccgccgcgggagtgcacgggccccagcgagtgaaatctgcggcagcccccgctgggcccgctgttcctgcgcgcgcagaggagcgtagcctgcccctaggccgcgttcccgtgagctccatgcccacagtggccgaggccggccacaagcccacggtcccttctgcacggtccctgccgcgctggggccaccgtggaggcccggagggccctgggaggagggaggaggagcagaggctttcgggagaacccagcccttcaccggccaggggaggccgcgatgcatcgcgactggttgtgaagagccaggggaagaactttaccgtgcaggtgagtgggagacatcagaacacctgcctgtcctaaatacgaagcctcgaatcctaacctataaaaggttaccttagggtttagggttagggctacagattagagctagggattaaggttagagttggggttggggttagggtttaggggttagaagttagttttggggttaggagtggggttagaattagggtttggggttagtgttaggggtaggggaaggattggggtagggttagggttgggctagggtcggggtaggggtagggttttacggttagggtcagggttttagtgttggggttagggtattggggttagggtttgggggctaggggattagggtcaggggtgggggttagggtttgggatttggctaaggtttgtaagggttagggttttagggtaggggataggggttagggttacgtgttggggttgggattagggttaggggttacagtttagggtaaggggttagagttaagggttagggttagcattaggagttacagttgggttaagggttaggggttaggcttagtgttgttagggttagggttagggttagcattaggagttacagttgggttaagggttgcaggttaggcttagtgttgttagggttagcttcagggttcggtgtcagggtttggggtggggtagtggtaggtttaggggtagcgttgtgtgttaggatttgtggttacggttcgggctagggttttaggggtaggcataggttcgagtttgggtttgggtgttaggtttatggctagcattagggtaggggttaggtgtaggagtaggggttgaggttatgagttgaggttagggttaggggtcaggggtccggtcaagggttggtgttggatttagggattagggctagaattaggggttagggttaggggtttgtgtcggggttgggttggaggcttgggttcagggtcaagtttagggttggggctagggcttagggttatgggttagtgttagcagttagggttaaggtttaggcttagggtttagtgcttgaggtgggggttaggtgttaggggttagggttaagggttagtgttttgcgttagtggttagggttaagggttatggttaagggtcagcgttagggtcaggggttaggggtaggggttgtgcttagttttagggttagggttcctggacggatggttttcctgcttgggaatgttcctgggctgtgagatccactcttctgggcaggtggttagcacctaacgttttccccttacttccccccaaattcttaagtcctttggtccatttcattacttcttttggggagggcctgattcctcagggcctcagtggcagaac

SEQ ID NO: 19926 - DNA, 1450 bp, Artificial sequence
  DNA replication origin
tccgctccacccgccgtgcttcctgcccctccacaccctcgtccccacccgggcccatccccctgtgagccctggtgccctgggatgagggccgaggtcctgagcggagagggtgcttgtaccagccccatggtggctcgagcccaccccgcggcccctcccgtggcaggtgcggtttctccaccggttgtcagctgcggggccgggcggagacctcctcaacctccggccttgtttcagggaggatggggtcgacccttgcgatccccagaggccccccatggctccttctgggctggctgtcttcctcctgtgggttctgatgccacctgggccgacggcgtcttctcagcccagggcggccgcgcctccggtgagtttcagctgagggcgcgcggccagctccgagcctggctccgggtgcagcaccggcctgggacctctgctgtcccgtgtaggggtgccctgcaaatatgtgatgaataagtgaagaaatacgttttatcttctaacttgccggatgttagaaggaaaccaagcttatgcttctcatttatagctaccgttaaggattggacagaagcttagctttttgggtgagacggacaacagtgtttttagaacctttggcaaggaagagctggaaagaacatgtatttgaaagtgactgacaggtcttctggccctagggggccacctgagcaggtgcacccagcttccctccaagacagaaaataaattaacaaggagagcaggaagggccccggcagactccagacgggagggggtgctgcccatcaggcagaaggagcttggaagggaggggccgtggccatgggacgtggaggtgggagcgggggtcatcataggtctgcacactcgggttgagtcccccttccccatcacacacaggacagccagcagtgagctgcttaccccaaggagtcaagggggttcttgggcaacccctggtgctggagccggcagtggacagcaccgcagccagaccttgcttatttttggctcatgaggaacatctgtgaccgttccctcccctggccctgggaggggatgtgtgacctccactcaagacagccatgcggctcctccggctgcgggcggggagggcatgtttcccagcacaggcccaggactgccagctgagaggctgggaggggcccctcacccctagactttgcatgtgaagccaagcgtggagcctcacagggaatctgagatgggagccagtgagatgggggcaggacccagaggggagaagaggtcctggggatgctgtggatctggatccagcgtgcgggagctgaggttccggagtgaaacactgcctttcatggaagcacgtcttcctgtcacccatcggcttcattttaaaggatgaaaatgtatcagacattcaaggagagctgcatcacataaaagaaagaccagg

SEQ ID NO: 19927 - DNA, 1676 bp, Artificial sequence
  DNA replication origin
cttctcctgggctggaggctcctagctgctgtggcaaggagctgtcctggcagtgctgaggcccaggtctggcatctctgcccctccactgctcaaggagatgcttgcctgtggccactctgtgctcttggcaactctgggtgatatgggcgagggcaggacttgctgactgccctggtgggagagggctatggctgccttgggtggtcaccagtgtctgtgagcacagggaaggaggaagagggattgggcagctctccctcctgcagctctaaaggggaagggcctggaggagtttggccagggcctccctgatgttgcagttcccaggcagtagatgatgggtttgagcagagggatcccaaccaagtagacccctgacaccagcttgatgaggttagaggagccgccaccccaggtgggaggcataggtggggaaggcctttagctgctgggcctttctggaatcctcagcgatctggccaggatgtgggtgtaggagaccgtggttgcctgcagggaagccgcaaggatcacctgggctgcctgagtccgcatttctatggtagtggtgctggagcaagagagccctagcgggggtgggatatcacagaagtggttgaggacatcggggctgcggagcctcaggctggagttgagagccgtggacacaaaggaggctgggaagctgctgagctgggcgctgatggccaggtgcaggcagagccagctgcatggagtccatgatgggctgggtagtgcagcaggtggcagatgactgggtgccagtcacagtccatgttggccgggaggacgcactcagaggagctgagtgagaggaagaggagcagccaggtgaggtgccccgagaaggagatagatggtcgtcgctcgtgctgggagtccggccaacagctttgggacggtgaccgaggtgtacagagtctccagcaccgagagttgggccaggaagaggtgtgtggatatgtgcaggtggtggctggctctgatggtccccacgacagccaggtcctctaggatggtcaccacatagatgatgaggagtgaccaaatagcagcccttgaagatggtgcagctctgggaagctcagaaacacaaactctgtcaccacagtattgctggaattgtacgtggccctcctggtcaggcaagtcacttctcagcactccagaacagtggggagactaggctgtggtgtgtgatggggtcacagccctgctccactggtgagagctaggtaagagcgctgtaagccctcctgggatcttagggcaggggctcaggctcacagactgtcccaccatgcacctttgggacctgctgcaatacttatctgtcatccccacctctcagcccaacatgcccacttacccagagctaacgcctggccaaggggccttgggacctgtacacactcatatgatcaggtataccccctcttacacctatacgccctgaggtgcataatcttccctgccccaacacacaggtacatggccaggtgcacacatatacactcagtgcacgtccctccccagctgcacacacaccctggtgcacacacatgcacccaagtgcacacccccagatgtacacacagcgcaagggaagacccattctgcctggcgtgccttctcggggctgtgtgccttgg

SEQ ID NO: 19928 - DNA, 883 bp, Artificial sequence
  DNA replication origin
gaaaatttgcaatgagagacttccaggatggggagcagatagggggtggggagggcaaggtcacaaaggaaccgaataagaaacaccagcggaggcaggtagaggcggggccgggggagacgcacctgcgagggaggcggggcccgccgtgaccttggtctccacgcgaagacctgggggaggctgcgcggatgcacccagggccccagccctgagccccaaggtgcctcgctggctggtccacgtcgcccggggtgctgtgggactgggggggggggtggacgggggcgctgcagagggtcctcagcgctgagccttcgtcggcccagcccctccccgcagccgcccacgctgcacccagggcggggcccatgcatctcctgaggctggccagtggcgccccccagcactccgtcctcgcccccgccatgggtaggggtctctgaagtcgtctcaccaggtgggcctggagcagccgccagctcagacccccgagcaccggtgaggaaggggtggtagaaggctgggtcaagggtcacccaggaattccacttgtccacggggacccggccgctgcccaggcgcagacagacccagaggcagagtgcgaggtaggggtctggggcttacatcccccgagaggggcggggacctcccagaggagctgctgcacaggcctgcggagctccttctcccaccactgtcccagctcaccctccaacccccatcctgccctcagacacccaactgcaggcaagtccaggaaccagaaccccacgccacacagacccattggaggctctgagtggacagctcccgcccttccctcgtccgcccctttgctggctcagaaagtacaagataaagatgtcaggacctaaaa

SEQ ID NO: 19929 - DNA, 928 bp, Artificial sequence
  DNA replication origin
gccttcctccccccgtccccggctccctcccgcccgcccccagtccctgcgtcgctctgtctttccctccgttcctccctgcctccctgcctccctgcctccctccctccctcctaacgtccctccgcccatccttccgcccctctaggtctcccgttcctctctccatctctgcccgccttccctcccgcctggaacgctcagcgtccccggtgtgcgccgggcctggggtctgcgttccgcctccaggcgctccgtgctggcacctgggcggctgcaggggcccgggcgggcgggccacggtggcgcgggggcgcagaggaggcgagccgccggagcggtgtcaggcccggacgctgcgcggggcccggtgtttcgcgggacgggggtctccacccagcccaggggacgacgcgttttccgggggcggggggtgggggtggggagggggcggtcaggcggtggggtgggctggtggagaggcaggagagctctgcccgggctgctcccacagcccaggcggctgcccgcaaacccgcgcgtgcgcagtaggcggcccacctgctggtacctgggccggctctgggatccccgggatgcccaggaaagaatggcagttctccgctgtgtggagtctctcaccgggcctaggcctagaaggcaggaatcccaggccggtcagcccggtggagggggcggggcggagacacgcccctccgtagccagccaggcgttccccgcgaaagagaggccaccgccctgccccgaaccacccgaccccgtcccaaccccgcgtcctaaagctcctccagcagagcccggtattcttcctcgctgaggggtgcttccagcgaggcggcctcttccgaggcctccagctcccccggggcctccgtttctaggagaggttgcgcctgctgcagaaact

SEQ ID NO: 19930 - DNA, 1093 bp, Artificial sequence
  DNA replication origin
gcggggagggtgctgtccgaaggtgtcgggagggccatcgcggtgagccccggccgcaatttcacggacggacgcgggcagagagaggccggcgggctcccgtgcacctcagccggactgtgcactgcggcaggtgcagccaggaggcctgcccggacagccagccagccagccagccgcccttgtaaaggcccacgggcaggcaggctccaccccttcatgaatggcggtgagcccccctgggacagcccgccccaccccggaagggacccagggcgtcgaggcctggggccggccggcggggtggtggtggtggtggtggtggtggtggtgtggggtggggggggtggtgggggagggcgtggtggcggtggtggtggtggggccggagagacgaagaggaagggggagaggggggaggggggaggggggcgcgtttcgggggccggctctccggacctctccagggatcccgcgggaacgggaagccgctctctgggctcccacgcgtcggcagcagggagaaaccagcctgggagggtggaggggagtgtggaactgaacctccgtgggagtcttgagtgtgccaggccctctctccgtgaaggaggcaatgcctgtgggcgtcgccgttgccgggacggtctcgcacacgcaggcgtgtggctctcgttcatttccacgtagaagaccagagcgagaccccagagaggagatgcctccccggcgtgatggcctgacgatggattcccgcgtgcggcaacgtggggagtctgcagtgtggccggtttggaacctggcaaggagagcgaaggcaccgtgccgggcttgcaccctcccctgcatgtttccgggtgcccgcagagctccgggagcaaacagtcggcatggccagcctttcgggggccggagagacgtgagcaacaggccgccttgcagagggcaaagccacgcggaaaccaaaatcacgcctccgtcgtcctgcgtgtggctcctccgtggccggggctgtcggcctcgcgccgcgttgcagggctcagcctggggatgtgcggtctgtgaaccgcgcgggtgaaaacccgacggcaacccg

SEQ ID NO: 19931 - DNA, 1101 bp, Artificial sequence
  DNA replication origin
ggtggagctgccccggcttggggttcccacgccgccccggcgacctggggaccccggccccagccccaccacggactcccctgggacgtgggtggcgcaagcaccccttggccctgcggccccgcttgagcgggcccaggctgtgccaccgcgcaggggcccggcaggccgtcgcgctgcgggtcccggtcctcccggcttttgcccgggtgcggaggccaccgaggagcctgagggtgggagagcgccccgtccggaggagccggggcggcgtaggcgaaatccccgcgcgccggggcaggttgggagatcccctctgccggcgcggcctggctgggctgcagcgcgggggcggccctcgctgcctggctcacgaaagccccctgtgggagagccccaggcgcgcagggcacgtggggtgcgggaagccccgttccccacgcgccggtgtgggcgaaggcgacccacgagggagcagggtgacccccgccgggggccgcgttgcacaggccgcctgcctgcgcgggcgccctgccaccctgtcccgggtgcctggcccttcgattctgaaaccagatctgaatcctggactccgggaggcccgtctctctggccagctcctcccgggcggcgatgcctggaaagcgatccttctcaaaggctcggaggagcagggcggtctgggatccggtgacggcggtccgctttcgccggccttctggcgggccgcgtctcccgggccagggccgagattcccgccggtgctgcctcagctggcgtgacctctcattctgaaaccaaatctggaccctgggctccggaatgccgatggcctgggccagccgttctctggtggcgatgcccgggtacgggttccgctcaaagcaggctcgcagggcctcgctttggctcggggtccaaacgagtctccgtcgccgtcctcgtccccgggcttccgcggggagggtgctgtccgaaggtgtcgggagggccatcgcggtgagccccggccgcaatttcacggacggacgcgggcagagagaggccggcgggctcccgtgcacctcagccggactgtgcactgcggcaggtgcagccagg

SEQ ID NO: 19932 - DNA, 929 bp, Artificial sequence
  DNA replication origin
ccgcttttcctccctgccttcctccccccgtccccggctccctcccgcccgcccccagtccctgcgtcgctctgtctttccctccgttcctccctgcctccctgcctccctgcctccctccctccctcctaacgtccctccgcccatccttccgcccctctaggtctcccgttcctctctccatctctgcccgccttccctcccgcctggaacgctcagcgtccccggtgtgcgccgggcctggggtctgcgttccgccgccaggcgctccgtgctggcacctgggcggctgcaggggcccgggcgggcgggcgacggtggcgcgggggcgcagaggaggcgagccgccggagcggtgtcaggcccggacgctgcgcggggcccggtgtttcgcgggacgggggtctccacccagcccaggggacgacgcgttttccgggggcggggggtgggggtggggagggggcggtcaggcggcggggtgggctggtggagaggcaggagagctctgcccgggctgctcccacagcccaggcggctgcccgcaaacccgcgcgtgcgcagtaggcggcccacctgctggtacctgggccggctctgggatccccgggatgcccaggaaagaatggcagttctccgctgtgtggagtctctcaccgggcctaggcctagaaggcaggaatcccaggccggtcagcccggtggagggggcggggcggagacacgcccctccgtagccagccaggcgttccccgcgaaagagaggccaccgccctgccccgaaccacccgaccccgtcccaaccccgcgtcctaaagctcctccagcagagcccggtattcttcctcgctgaggggtgcttccagcgaggcggcctcttccgaggcctccagctcccccggggcctccgtttctaggagaggttgcgc

SEQ ID NO: 19933 - DNA, 783 bp, Artificial sequence
  DNA replication origin
acgcctggctggctacggaggggcgtgtctccgccccgccccctccaccgggctgaccggcctgggattcctgccttctaggcctaggcccggtgagagactccacacagcggagaactgccattctttcctgggcatcccggggatcccagagccggcccaggtaccagcaggtgggccgcctactgcgcacgcgcgggtttgcgggcagccgcctgggctgtgggagcagcccgggcagagctctcctgcctctccaccagcccaccccgccgcctgaccgccccctccccacccccaccccccgcccccggaaaacgcgtcgtcccctgggctgggtggagacccccgtcccgcgaaacaccgggccccgcgcagcgtccgggcctgacaccgctccggcggctcgcctcctctgcgcccccgcgccaccgtcgcccgcccgcccgggcccctgcagccgcccaggtgccagcacggagcgcctggcggcggaacgcagaccccaggcccggcgcacaccggggacgctgagcgttccaggcgggagggaaggcgggcagagatggagagaggaacgggagacctagaggggcggaaggatgggcggagggacgttaggagggagggagggaggcagggaggcagggaggcagggaggaacggagggaaagacagagcgacgcagggactgggggcgggcgggagggagccggggacggggggaggaaggcagggaggaaaagcggtcttcggcctccgggagtagcgggacccccgccc

SEQ ID NO: 19934 - DNA, 1106 bp, Artificial sequence
  DNA replication origin
gcagggcctcgctttggctcggggtccaaacgagtctccgtcgccgtcctcgtccccgggcttccgcggggagggtgctgtccgaaggtgtcgggagggccatcgcggtgagccccggccgcaatttcacggacggacgcgggcagagagaggccggcgggctcccgtgcacctcagccggactgtgcactgcggcaggtgcagccaggaggcctgcccggacagccagccagccagccagccgcccttgtaaaggcccacgggcaggcaggctccaccccttcatgaatggcggtgagcccccctgggacagcccgccccaccccggaagggacccagggcgtcgaggcctggggccggccggcggggtggtggtggtggtggtggtggggggggggtggtggtgggggagggcgtggtggcggtggtggtggtggggccggagagacgaagaggaaggtggagaggggggaggggggaggggggcgcgtttcgggggccggctctccggacctctccagggatcccgcgggaacgggaagccgctctctgggctcccacgcgtcggcagcagggagaaaccagcctgggagggtggaggggagtgtggaactgaacctccgtgggagtcttgagtgtgccaggccctctctccgtgaaggaggcaatgcctgtgggcgtcgccgttgccgggacggtctcgcacacgcaggcgtgtggctctcgttcatttccacgtagaagaccagagcgagaccccagagaggagatgcctccccggcgtgatggcctgacgatggattcccgcgtgcggcaacgtggggagtctgcagtgtggccggtttggaacctggcaaggagagcgaaggcaccgtgccgggcttgcaccctcccctgcatgtttccgggtgcccgcagagctccgggagcaaacagtcggcatggccagcctttcgggggccggagagacgtgagcaacaggccgccttgcagagggcaaagccacgcggaaaccaaaatcacgcctccgtcgtcctgcgtgtggctcctccgtggccggggctgtcggcctcgcgccgcgttgcagggctcagcctggggatgtg

SEQ ID NO: 19935 - DNA, 1050 bp, Artificial sequence
  DNA replication origin
gccccagccccaccacggactcccctgggacgtgggtggcgcaagcaccccttggccctgcggccccgcttgagcgggcccaggctgtgccaccgcgcaggggcccggcaggccgtcgcgctgcgggtcccggtcctcccggcttttgcccgggtgcggaggccaccgaggagcctgagggtgggagagcgccccgtccggaggagccggggcggcgtaggcgaaatccccgcgcgccggggcaggttgggagatcccctctgccggcgcggcctggctgggctgcagcgcgggggcggccctcgctgcctggctcacgaaagccccctgtgggagagccccaggcgcgcagggcacgtggggtgcgggaagccccgttccccacgcgccggtgtgggcgaaggcgacccacgagggagcagggtgacccccgccgggggccgcgctgcacaggccgcctgcctgcgcgggcgccctgccaccctgtcccgggtgcctggcccttcgattctgaaaccagatctgaatcctggactccgggaggcccgtctctctggccagctcctcccgggcggcgatgcctggaaagcgatccttctcaaaggctcggaggagcagggcggtctgggatccggtgacggcggtccgctttcgccggccttctggcgggccgcgtctcccgggccagggccgagattcccgccggtgctgcctcagctggcgtgacctctcattctgaaaccaaatctggaccctgggctccggaatgccgatggcctgggccagccgttctctggtggcgatgcccgggtacgggttccgctcaaagcaggctcgcagggcctcgctttggctcggggtccaaacgagtctccgtcgccgtcctcgtccccgggcttccgcggggagggtgctgtccgaaggtgtcgggagggccatcgcggtgagccccggccgcaatttcacggacggacgcgggcagagagaggccggcgggctcccgtgcacctcagccggactgtgcactgcggcaggtgcagccaggaggcc

SEQ ID NO: 19936 - DNA, 962 bp, Artificial sequence
  DNA replication origin
tcccggaggccgaagaccgcttttcctccctgccttcctccccccgtccccggctccctcccgcccgcccccagtccctgcgtcgctctgtctttccctccgttcctccctgcctccctgcctccctgcctccctccctccctcctaacgtccctccgcccatccttccgcccctctaggtctcccgttcctctctccatctctgcccgccttccctcccgcctggaacgctcagcgtccccggtgtgcgccgggcctggggtctgcgttccgccgccaggcgctccgtgctggcacctgggcggctgcaggggcccgggcgggcgggcgacggtggcgcgggggcgcagaggaggcgagccgccggagcggtgtcaggcccggacgctgcgcggggcccggtgtttcgcgggacgggggtctccacccagcccaggggacgacgcgttttccgggggcggggggtgggggtggggagggggcggtcaggcggcggggtgggctggtggagaggcaggagagctctgcccgggctgctcccacagcccaggcggctgcccgcaaacccgcgcgtgcgcagtaggcggcccacctgctggtacctgggccggctctgggatccccgggatgcccaggaaagaatggcagttctccgctgtgtggagtctctcaccgggcctaggcctagaaggcaggaatcccaggccggtcagcccggtggagggggcggggcggagacacgcccctccgtagccagccaggcgttccccgcgaaagagaggccaccgccctgccccgaaccacccgaccccgtcccaaccccgcgtcctaaagctcctccagcagagcccggtattcttcctcgctgaggggtgcttccagcgaggcggcctcttccgaggcctccagctcccccggggcctccgtttctaggagaggttgcgcctgctgcagaaactccg

SEQ ID NO: 19937 - DNA, 1152 bp, Artificial sequence
  DNA replication origin
gcagggcctcgctttggctcggggtccaaacgagtctccgtcgccgtcctcgtccccgggcttccgcggggagggtgctgtccgaaggtgtcgggagggccatcgcggtgagccccggccgcaatttcacggacggacgcgggcagagagaggccggcgggctcccgtgcacctcagccggactgtgcactgcggcaggtgcagccaggaggcctgcccggacagccagccagccagccagccgcccttgtaaaggcccacgggcaggcaggctccaccccttcatgaatggcggtgagcccccctgggacagcccgccccaccccggaagggacccagggcgtcgaggcctggggccggccggcggggtggtggtggtggtggtggtggggggggggtggtggtgggggagggcgtggtggcggtggtggtggtggggccggagagacgaagaggaaggtggagaggggggaggggggaggggggcgcgtttcgggggccggctctccggacctctccagggatcccgcgggaacgggaagccgctctctgggctcccacgcgtcggcagcagggagaaaccagcctgggagggtggaggggagtgtggaactgaacctccgtgggagtcttgagtgtgccaggccctctctccgtgaaggaggcaatgcctgtgggcgtcgccgttgccgggacggtctcgcacacgcaggcgtgtggctctcgttcatttccacgtagaagaccagagcgagaccccagagaggagatgcctccccggcgtgatggcctgacgatggattcccgcgtgcggcaacgtggggagtctgcagtgtggccggtttggaacctggcaaggagagcgaaggcaccgtgccgggcttgcaccctcccctgcatgtttccgggtgcccgcagagctccgggagcaaacagtcggcatggccagcctttcgggggccggagagacgtgagcaacaggccgccttgcagagggcaaagccacgcggaaaccaaaatcacgcctccgtcgtcctgcgtgtggctcctccgtggccggggctgtcggcctcgcgccgcgttgcagggctcagcctggggatgtgcggtctgtgaaccgcgcgggtgaaaacccgacggcaacccgagtcc

SEQ ID NO: 19938 - DNA, 1075 bp, Artificial sequence
  DNA replication origin
accccggccccagccccaccacggactcccctgggacgtgggtggcgcaagcaccccttggccctgcggccccgcttgagcgggcccaggctgtgccaccgcgcaggggcccggcaggccgtcgcgctgcgggtcccggtcctcccggcttttgcccgggtgcggaggccaccgaggagcctgagggtgggagagcgccccgtccggaggagccggggcggcgtaggcgaaatccccgcgcgccggggcaggttgggagatcccctctgccggcgcggcctggctgggctgcagcgcgggggcggccctcgctgcctggctcacgaaagccccctgtgggagagccccaggcgcgcagggcacgtggggtgcgggaagccccgttccccacgcgccggtgtgggcgaaggcgacccacgagggagcagggtgacccccgccgggggccgcgctgcacaggccgcctgcctgcgcgggcgccctgccaccctgtcccgggtgcctggcccttcgattctgaaaccagatctgaatcctggactccgggaggcccgtctctctggccagctcctcccgggcggcgatgcctggaaagcgatccttctcaaaggctcggaggagcagggcggtctgggatccggtgacggcggtccgctttcgccggccttctggcgggccgcgtctcccgggccagggccgagattcccgccggtgctgcctcagctggcgtgacctctcattctgaaaccaaatctggaccctgggctccggaatgccgatggcctgggccagccgttctctggtggcgatgcccgggtacgggttccgctcaaagcaggctcgcagggcctcgctttggctcggggtccaaacgagtctccgtcgccgtcctcgtccccgggcttccgcggggagggtgctgtccgaaggtgtcgggagggccatcgcggtgagccccggccgcaatttcacggacggacgcgggcagagagaggccggcgggctcccgtgcacctcagccggactgtgcactgcggcaggtgcagccaggaggcctgcccggacagccagccag

SEQ ID NO: 19939 - DNA, 934 bp, Artificial sequence
  DNA replication origin
ttttcctccctgccttcctccccccgtccccggctccctcccgcccgcccccagtccctgcgtcgctctgtctttccctccgttcctccctgcctccctgcctccctgcctccctccctccctcctaacgtccctccgcccatccttccgcccctctaggtctcccgttcctctctccatctctgcccgccttccctcccgcctggaacgctcagcgtccccggtgtgcgccgggcctggggtctgcgttccgcctccaggcgctccgtgctggcacctgggcggctgcaggggcccgggcgggcgggccacggtggcgcgggggcgcagaggaggcgagccgccggagcggtgtcaggcccggacgctgcgcggggcccggtgtttcgcgggacgggggtctccacccagcccaggggacgacgcgttttccgggggcggggggtgggggtggggagggggcggtcaggcggcggggtgggctggtggagaggcaggagagctctgcccgggctgctcccacagcccaggcggctgcccgcaaacccgcgcgtgcgcagtaggcggcccacctgctggtacctgggccggctctgggatccccgggatgcccaggaaagaatggcagttctccgctgtgtggagtctctcaccgggcctaggcctagaaggcaggaatcccaggccggtcagcccggtggagggggcggggcggagacacgcccctccgtagccagccaggcgttccccgcgaaagagaggccaccgccctgccccgaaccacccgaccccgtcccaaccccgcgtcctaaagctcctccagcagagcccggtattcttcctcgctgaggggtgcttccagcgaggcggcctcttccgaggcctccagctcccccggggcctccgtttctaggagaggttgcgcctgctgcag

SEQ ID NO: 19940 - DNA, 1057 bp, Artificial sequence
  DNA replication origin
cggggagggtgctgtccgaaggtgtcgggagggccatcgcggtgagccccggccgcaatttcacggacggacgcgggcagagagaggccggcgggctcccgtgcacctcagccggactgtgcactgcggcaggtgcagccaggaggcctgcccggacagccagccagccagccagccgcccttgtaaaggcccacgggcaggcaggctccaccccttcatgaatggcggtgagcccccctgggacagcccgccccaccccggaagggacccagggcgtcgaggcctggggccggccggcggggtggtggtggtggtggtggtggtggtggtgtggggtggggggggtggtgggggagggcgtggtggcggtggtggtggtggggccggagagacgaagaggaagggggagaggggggaggggggaggggggcgcgtttcgggggccggctctccggacctctccagggatcccgcgggaacgggaagccgctctctgggctcccacgcgtcggcagcagggagaaaccagcctgggagggtggaggggagtgtggaactgaacctccgtgggagtcttgagtgtgccaggccctctctccgtgaaggaggcaatgcctgtgggcgtcgccgttgccgggacggtctcgcacacgcaggcgtgtggctctcgttcatttccacgtagaagaccagagcgagaccccagagaggagatgcctccccggcgtgatggcctgacgatggattcccgcgtgcggcaacgtggggagtctgcagtgtggccggtttggaacctggcaaggagagcgaaggcaccgtgccgggcttgcaccctcccctgcatgtttccgggtgcccgcagagctccgggagcaaacagtcggcatggccagcctttcgggggccggagagacgtgagcaacaggccgccttgcagagggcaaagccacgcggaaaccaaaatcacgcctccgtcgtcctgcgtgtggctcctccgtggccggggctgtcggcctcgcgccgcgttgcagggctcagcctggggatgtgcggtct

SEQ ID NO: 19941 - DNA, 1086 bp, Artificial sequence
  DNA replication origin
ggggaccccggccccagccccaccacggactcccctgggacgtgggtggcgcaagcaccccttggccctgcggccccgcttgagcgggcccaggctgtgccaccgcgcaggggcccggcaggccgtcgcgctgcgggtcccggtcctcccggcttttgcccgggtgcggaggccaccgaggagcctgagggtgggagagcgccccgtccggaggagccggggcggcgtaggcgaaatccccgcgcgccggggcaggttgggagatcccctctgccggcgcggcctggctgggctgcagcgcgggggcggccctcgctgcctggctcacgaaagccccctgtgggagagccccaggcgcgcagggcacgtggggtgcgggaagccccgttccccacgcgccggtgtgggcgaaggcgacccacgagggagcagggtgacccccgccgggggccgcgctgcacaggccgcctgcctgcgcgggcgccctgccaccctgtcccgggtgcctggcccttcgattctgaaaccagatctgaatcctggactccgggaggcccgtctctctggccagctcctcccgggcggcgatgcctggaaagcgatccttctcaaaggctcggaggagcagggcggtctgggatccggtgacggcggtccgctttcgccggccttctggcgggccgcgtctcccgggccagggccgagattcccgccggtgctgcctcagctggcgtgacctctcattctgaaaccaaatctggaccctgggctccggaatgccgatggcctgggccagccgttctctggtggcgatgcccgggtacgggttccgctcaaagcaggctcgcagggcctcgctttggctcggggtccaaacgagtctccgtcgccgtcctcgtccccgggcttccgcggggagggtgctgtccgaaggtgtcgggagggccatcgcggtgagccccggccgcaatttcacggacggacgcgggcagagagaggccggcgggctcccgtgcacctcagccggactgtgcactgcggcaggtgcagccaggaggcctgcccggacagccagccagccagcca

SEQ ID NO: 19942 - DNA, 945 bp, Artificial sequence
  DNA replication origin
ttcctccctgccttcctccccccgtccccggctccctcccgcccgcccccagtccctgcgtcgctctgtctttccctccgttcctccctgcctccctgcctccctgcctccctccctccctcctaacgtccctccgcccatccttccgcccctctaggtctcccgttcctctctccatctctgcccgccttccctcccgcctggaacgctcagcgtccccggtgtgcgccgggcctggggtctgcgttccgcctccaggcgctccgtgctggcacctgggcggctgcaggggcccgggcgggcgggccacggtggcgcgggggcgcagaggaggcgagccgccggagcggtgtcaggcccggacgctgcgcggggcccggtgtttcgcgggacgggggtctccacccagcccaggggacgacgcgttttccgggggcggggggtgggggtggggagggggcggtcaggcggtggggtgggctggtggagaggcaggagagctctgcccgggctgctcccacagcccaggcggctgcccgcaaacccgcgcgtgcgcagtaggcggcccacctgctggtacctgggccggctctgggatccccgggatgcccaggaaagaatggcagttctccgctgtgtggagtctctcaccgggcctaggcctagaaggcaggaatcccaggccggtcagcccggtggagggggcggggcggagacacgcccctccgtagccagccaggcgttccccgcgaaagagaggccaccgccctgccccgaaccacccgaccccgtcccaaccccgcgtcctaaagctcctccagcagagcccggtattcttcctcgctgaggggtgcttccagcgaggcggcctcttccgaggcctccagctcccccggggcctccgtttctaggagaggttgcgcctgctgcagaaactccgggctc

SEQ ID NO: 19943 - DNA, 1096 bp, Artificial sequence
  DNA replication origin
ggtgctgtccgaaggtgtcgggagggccatcgcggtgagccccggccgcaatttcacggacggacgcgggcagagagaggccggcgggctcccgtgcacctcagccggactgtgcactgcggcaggtgcagccaggaggcctgcccggacagccagccagccagccagccgcccttgtaaaggcccacgggcaggcaggctccaccccttcatgaatggcggtgagcccccctgggacagcccgccccaccccggaagggacccagggcgtcgaggcctggggccggccggcggggtggtggtggtggtggtggtggtggtggtgtggggtggggggggtggtgggggagggcgtggtggcggtggtggtggtggggccggagagacgaagaggaagggggagaggggggaggggggaggggggcgcgtttcgggggccggctctccggacctctccagggatcccgcgggaacgggaagccgctctctgggctcccacgcgtcggcagcagggagaaaccagcctgggagggtggaggggagtgtggaactgaacctccgtgggagtcttgagtgtgccaggccctctctccgtgaaggaggcaatgcctgtgggcgtcgccgttgccgggacggtctcgcacacgcaggcgtgtggctctcgttcatttccacgtagaagaccagagcgagaccccagagaggagatgcctccccggcgtgatggcctgacgatggattcccgcgtgcggcaacgtggggagtctgcagtgtggccggtttggaacctggcaaggagagcgaaggcaccgtgccgggcttgcaccctcccctgcatgtttccgggtgcccgcagagctccgggagcaaacagtcggcatggccagcctttcgggggccggagagacgtgagcaacaggccgccttgcagagggcaaagccacgcggaaaccaaaatcacgcctccgtcgtcctgcgtgtggctcctccgtggccggggctgtcggcctcgcgccgcgttgcagggctcagcctggggatgtgcggtctgtgaaccgcgcgggtgaaaacccgacggcaacccgagtcccggtct

SEQ ID NO: 19944 - DNA, 1053 bp, Artificial sequence
  DNA replication origin
gactcccctgggacgtgggtggcgcaagcaccccttggccctgcggccccgcttgagcgggcccaggctgtgccaccgcgcaggggcccggcaggccgtcgcgctgcgggtcccggtcctcccggcttttgcccgggtgcggaggccaccgaggagcctgagggtgggagagcgccccgtccggaggagccggggcggcgtaggcgaaatccccgcgcgccggggcaggttgggagatcccctctgccggcgcggcctggctgggctgcagcgcgggggcggccctcgctgcctggctcacgaaagccccctgtgggagagccccaggcgcgcagggcacgtggggtgcgggaagccccgttccccacgcgccggtgtgggcgaaggcgacccacgagggagcagggtgacccccgccgggggccgcgctgcacaggccgcctgcctgcgcgggcgccctgccaccctgtcccgggtgcctggcccttcgattctgaaaccagatctgaatcctggactccgggaggcccgtctctctggccagctcctcccgggcggcgatgcctggaaagcgatccttctcaaaggctcggaggagcagggcggtctggaatccggtgacggcggtccgctttcgccggccttctggcgggccgcgtctcccgggccagggccgagattcccgccggtgctgcctcagctggcgtgacctctcattctgaaaccaaatctggaccctgggctccggaatgccgatggcctgggccagccgttctctggtggcgatgcccgggtacgggttccgctcaaagcaggctcgcagggcctcgctttggctcggggtccaaacgagtctccgtcgccgtcctcgtccccgggcttccgcggggagggtgctgtccgaaggtgtcgggagggccatcgcggtgagccccggccgcaatttcacggacggacgcgggcagagagaggccggcgggctcccgtgcacctcagccggactgtgcactgcggcaggtgcagccaggaggcctgcccggacagccagccagc

SEQ ID NO: 19945 - DNA, 937 bp, Artificial sequence
  DNA replication origin
agaccgcttttcctccctgccttcctccccccgtccccggctccctcccgcccgcccccagtccctgcgtcgctctgtctttccctccgttcctccctgcctccctgcctccctgcctccctccctccctcctaacgtccctccgcccatccttccgcccctctaggtctcccgttcctctctccatctctgcccgccttccctcccgcctggaacgctcagcgtccccggtgtgcgccgggcctggggtctgcgttccgccgccaggcgctccgtgctggcacctgggcggctgcaggggcccgggcgggcgggcgacggtggcgcgggggcgcagaggaggcgagccgccggagcggtgtcaggcccggacgctgcgcggggcccggtgtttcgcgggacgggggtctccacccagcccaggggacgacgcgttttccgggggcggggggtgggggtggggagggggcggtcaggcggcggggtgggctggtggagaggcaggagagctctgcccgggctgctcccacagcccaggcggctgcccgcaaacccgcgcgtgcgcagtaggcggcccacctgctggtacctgggccggctctgggatccccgggatgcccaggaaagaatggcagttctccgctgtgtggagtctctcaccgggcctaggcctagaaggcaggaatcccaggccggtcagcccggtggagggggcggggcggagacacgcccctccgtagccagccaggcgttccccgcgaaagagaggccaccgccctgccccgaaccacccgaccccgtcccaaccccgcgtcctaaagctcctccagcagagcccggtattcttcctcgctgaggggtgcttccagcgaggcggcctcttccgaggcctccagctcccccggggcctccgtttctaggagaggttgcgcctgct

SEQ ID NO: 19946 - DNA, 1065 bp, Artificial sequence
  DNA replication origin
gggcttccgcggggagggtgctgtccgaaggtgtcgggagggccatcgcggtgagccccggccgcaatttcacggacggacgcgggcagagagaggccggcgggctcccgtgcacctcagccggactgtgcactgcggcaggtgcagccaggaggcctgcccggacagccagccagccagccagccgcccttgtaaaggcccacgggcaggcaggctccaccccttcatgaatggcggtgagcccccctgggacagcccgccccaccccggaagggacccagggcgtcgaggcctggggccggccggcggggtggtggtggtggtggtggtggggggggggtggtggtgggggagggcgtggtggcggtggtggtggtggggccggagagacgaagaggaaggtggagaggggggaggggggaggggggcgcgtttcgggggccggctctccggacctctccagggatcccgcgggaacgggaagccgctctctgggctcccacgcgtcggcagcagggagaaaccagcctgggagggtggaggggagtgtggaactgaacctccgtgggagtcttgagtgtgccaggccctctctccgtgaaggaggcaatgcctgtgggcgtcgccgttgccgggacggtctcgcacacgcaggcgtgtggctctcgttcatttccacgtagaagaccagagcgagaccccagagaggagatgcctccccggcgtgatggcctgacgatggattcccgcgtgcggcaacgtggggagtctgcagtgtggccggtttggaacctggcaaggagagcgaaggcaccgtgccgggcttgcaccctcccctgcatgtttccgggtgcccgcagagctccgggagcaaacagtcggcatggccagcctttcgggggccggagagacgtgagcaacaggccgccttgcagagggcaaagccacgcggaaaccaaaatcacgcctccgtcgtcctgcgtgtggctcctccgtggccggggctgtcggcctcgcgccgcgttgcagggctcagcctggggatgtgcggtctgtgaaccgcg

SEQ ID NO: 19947 - DNA, 957 bp, Artificial sequence
  DNA replication origin
ggccgaagaccgcttttcctccctgccttcctccccccgtccccggctccctcccgcccgcccccagtccctgcgtcgctctgtctttccctccgttcctccctgcctccctgcctccctgcctccctccctccctcctaacgtccctccgcccatccttccgcccctctaggtctcccgttcctctctccatctctgcccgccttccctcccgcctggaacgctcagcgtccccggtgtgcgccgggcctggggtctgcgttccgccgccaggcgctccgtgctggcacctgggcggctgcaggggcccgggcgggcgggcgacggtggcgcgggggcgcagaggaggcgagccgccggagcggtgtcaggcccggacgctgcgcggggcccggtgtttcgcgggacgggggtctccacccagcccaggggacgacgcgttttccgggggcggggggtgggggtggggagggggcggtcaggcggcggggtgggctggtggagaggcaggagagctctgcccgggctgctcccacagcccaggcggctgcccgcaaacccgcgcgtgcgcagtaggcggcccacctgctggtacctgggccggctctgggatccccgggatgcccaggaaagaatggcagttctccgctgtgtggagtctctcaccgggcctaggcctagaaggcaggaatcccaggccggtcagcccggtggagggggcggggcggagacacgcccctccgtagccagccaggcgttccccgcgaaagagaggccaccgccctgccccgaaccacccgaccccgtcccaaccccgcgtcctaaagctcctccagcagagcccggtattcttcctcgctgaggggtgcttccagcgaggcggcctcttccgaggcctccagctcccccggggcctccgtttctaggagaggttgcgcctgctgcagaaactccggg

SEQ ID NO: 19948 - DNA, 1091 bp, Artificial sequence
  DNA replication origin
ggtccaaacgagtctccgtcgccgtcctcgtccccgggcttccgcggggagggtgctgtccgaaggtgtcgggagggccatcgcggtgagccccggccgcaatttcacggacggacgcgggcagagagaggccggcgggctcccgtgcacctcagccggactgtgcactgcggcaggtgcagccaggaggcctgcccggacagccagccagccagccagccgcccttgtaaaggcccacgggcaggcaggctccaccccttcatgaatggcggtgagcccccctgggacagcccgccccaccccggaagggacccagggcgtcgaggcctggggccggccggcggggtggtggtggtggtggtggtggtggtggtgtggggtggggggggtggtgggggagggcgtggtggcggtggtggtggtggggccggagagacgaagaggaagggggagaggggggaggggggaggggggcgcgtttcgggggccggctctccggacctctccagggatcccgcgggaacgggaagccgctctctgggctcccacgcgtcggcagcagggagaaaccagcctgggagggtggaggggagtgtggaactgaacctccgtgggagtcttgagtgtgccaggccctctctccgtgaaggaggcaatgcctgtgggcgtcgccgttgccgggacggtctcgcacacgcaggcgtgtggctctcgttcatttccacgtagaagaccagagcgagaccccagagaggagatgcctccccggcgtgatggcctgacgatggattcccgcgtgcggcaacgtggggagtctgcagtgtggccggtttggaacctggcaaggagagcgaaggcaccgtgccgggcttgcaccctcccctgcatgtttccgggtgcccgcagagctccgggagcaaacagtcggcatggccagcctttcgggggccggagagacgtgagcaacaggccgccttgcagagggcaaagccacgcggaaaccaaaatcacgcctccgtcgtcctgcgtgtggctcctccgtggccggggctgtcggcctcgcgccgcgttgcagggctcagcctgggga

SEQ ID NO: 19949 - DNA, 1005 bp, Artificial sequence
  DNA replication origin
ccccggccccagccccaccacggactcccctgggacgtgggtggcgcaagcaccccttggccctgcggccccgcttgagcgggcccaggctgtgccaccgcgcaggggcccggcaggccgtcgcgctgcgggtcccggtcctcccggcttttgcccgggtgcggaggccaccgaggagcctgagggtgggagagcgccccgtccggaggagccggggcggcgtaggcgaaatccccgcgcgccggggcaggttgggagatcccctctgccggcgcggcctggctgggctgcagcgcgggggcggccctcgctgcctggctcacgaaagccccctgtgggagagccccaggcgcgcagggcacgtggggtgcgggaagccccgttccccacgcgccggtgtgggcgaaggcgacccacgagggagcagggtgacccccgccgggggccgcgctgcacaggccgcctgcctgcgcgggcgccctgccaccctgtcccgggtgcctggcccttcgattctgaaaccagatctgaatcctggactccgggaggcccgtctctctggccagctcctcccgggcggcgatgcctggaaagcgatccttctcaaaggctcggaggagcagggcggtctgggatccggtgacggcggtccgctttcgccggccttctggcgggccgcgtctcccgggccagggccgagattcccgccggtgctgcctcagctggcgtgacctctcattctgaaaccaaatctggaccctgggctccggaatgccgatggcctgggccagccgttctctggtggcgatgcccgggtacgggttccgctcaaagcaggctcgcagggcctcgctttggctcggggtccaaacgagtctccgtcgccgtcctcgtccccgggcttccgcggggagggtgctgtccgaaggtgtcgggagggccatcgcggtgagccccggccgcaatttcacggacggacgcgggcagagagaggccggcgggctc

SEQ ID NO: 19950 - DNA, 938 bp, Artificial sequence
  DNA replication origin
ccttcctccccccgtccccggctccctcccgcccgcccccagtccctgcgtcgctctgtctttccctccgttcctccctgcctccctgcctccctgcctccctccctccctcctaacgtccctccgcccatccttccgcccctctaggtctcccgttcctctctccatctctgcccgccttccctcccgcctggaacgctcagcgtccccggtgtgcgccgggcctggggtctgcgttccgcctccaggcgctccgtgctggcacctgggcggctgcaggggcccgggcgggcgggccacggtggcgcgggggcgcagaggaggcgagccgccggagcggtgtcaggcccggacgctgcgcggggcccggtgtttcgcgggacgggggtctccacccagcccaggggacgacgcgttttccgggggcggggggtgggggtggggagggggcggtcaggcggcggggtgggctggtggagaggcaggagagctctgcccgggctgctcccacagcccaggcggctgcccgcaaacccgcgcgtgcgcagtaggcggcccacctgctggtacctgggccggctctgggatccccgggatgcccaggaaagaatggcagttctccgctgtgtggagtctctcaccgggcctaggcctagaaggcaggaatcccaggccggtcagcccggtggagggggcggggcggagacacgcccctccgtagccagccaggcgttccccgcgaaagagaggccaccgccctgccccgaaccacccgaccccgtcccaaccccgcgtcctaaagctcctccagcagagcccggtattcttcctcgctgaggggtgcttccagcgaggcggcctcttccgaggcctccagctcccccggggcctccgtttctaggagaggttgcgcctgctgcagaaactccgggctcgcc

SEQ ID NO: 19951 - DNA, 1122 bp, Artificial sequence
  DNA replication origin
ccaaacgagtctccgtcgccgtcctcgtccccgggcttccgcggggagggtgctgtccgaaggtgtcgggagggccatcgcggtgagccccggccgcaatttcacggacggacgcgggcagagagaggccggcgggctcccgtgcacctcagccggactgtgcactgcggcaggtgcagccaggaggcctgcccggacagccagccagccagccagccgcccttgtaaaggcccacgggcaggcaggctccaccccttcatgaatggcggtgagcccccctgggacagcccgccccaccccggaagggacccagggcgtcgaggcctggggccggccggcggggtggtggtggtggtggtggtggtggtggtgtggggtggggggggtggtgggggagggcgtggtggcggtggtggtggtggggccggagagacgaagaggaagggggagaggggggaggggggaggggggcgcgtttcgggggccggctctccggacctctccagggatcccgcgggaacgggaagccgctctctgggctcccacgcgtcggcagcagggagaaaccagcctgggagggtggaggggagtgtggaactgaacctccgtgggagtcttgagtgtgccaggccctctctccgtgaaggaggcaatgcctgtgggcgtcgccgttgccgggacggtctcgcacacgcaggcgtgtggctctcgttcatttccacgtagaagaccagagcgagaccccagagaggagatgcctccccggcgtgatggcctgacgatggattcccgcgtgcggcaacgtggggagtctgcagtgtggccggtttggaacctggcaaggagagcgaaggcaccgtgccgggcttgcaccctcccctgcatgtttccgggtgcccgcagagctccgggagcaaacagtcggcatggccagcctttcgggggccggagagacgtgagcaacaggccgccttgcagagggcaaagccacgcggaaaccaaaatcacgcctccgtcgtcctgcgtgtggctcctccgtggccggggctgtcggcctcgcgccgcgttgcagggctcagcctggggatgtgcggtctgtgaaccgcgcgggtgaaaacccg

SEQ ID NO: 19952 - DNA, 1036 bp, Artificial sequence
  DNA replication origin
gaccccggccccagccccaccacggactcccctgggacgtgggtggcgcaagcaccccttggccctgcggccccgcttgagcgggcccaggctgtgccaccgcgcaggggcccggcaggccgtcgcgctgcgggtcccggtcctcccggcttttgcccgggtgcggaggccaccgaggagcctgagggtgggagagcgccccgtccggaggagccggggcggcgtaggcgaaatccccgcgcgccggggcaggttgggagatcccctctgccggcgcggcctggctgggctgcagcgcgggggcggccctcgctgcctggctcacgaaagccccctgtgggagagccccaggcgcgcagggcacgtggggtgcgggaagccccgttccccacgcgccggtgtgggcgaaggcgacccacgagggagcagggtgacccccgccgggggccgcgctgcacaggccgcctgcctgcgcgggcgccctgccaccctgtcccgggtgcctggcccttcgattctgaaaccagatctgaatcctggactccgggaggcccgtctctctggccagctcctcccgggcggcgatgcctggaaagcgatccttctcaaaggctcggaggagcagggcggtctgggatccggtgacggcggtccgctttcgccggccttctggcgggccgcgtctcccgggccagggccgagattcccgccggtgctgcctcagctggcgtgacctctcattctgaaaccaaatctggaccctgggctccggaatgccgatggcctgggccagccgttctctggtggcgatgcccgggtacgggttccgctcaaagcaggctcgcagggcctcgctttggctcggggtccaaacgagtctccgtcgccgtcctcgtccccgggcttccgcggggagggtgctgtccgaaggtgtcgggagggccatcgcggtgagccccggccgcaatttcacggacggacgcgggcagagagaggccggcgggctcccgtgcacctcagccggactgtgcactgc

SEQ ID NO: 19953 - DNA, 970 bp, Artificial sequence
  DNA replication origin
tccccccgtccccggctccctcccgcccgcccccagtccctgcgtcgctctgtctttccctccgttcctccctgcctccctgcctccctgcctccctccctccctcctaacgtccctccgcccatccttccgcccctctaggtctcccgttcctctctccatctctgcccgccttccctcccgcctggaacgctcagcgtccccggtgtgcgccgggcctggggtctgcgttccgccgccaggcgctccgtgctggcactgggcggctgcaggggcccgggcgggcgggcgacggtggcgcgggggcgcagaggaggcgagccgccggagcggtgtcaggcccggacgctgcgcggggcccggtgtttcgcgggacgggggtctccacccagcccaggggacgacgcgttttccgggggcggggggtgggggtggggagggggcggtcaggcggcggggtgggctggtggagaggcaggagagctctgcccgggctgctcccacagcccaggcggctgcccgcaaacccgcgcgtgcgcagtaggcggcccacctgctggtacctgggccggctctgggatccccgggatgcccaggaaagaatggcagttctccgctgtgtggagtctctcaccgggcctaggcctagaaggcaggaatcccaggccggtcagcccggtggagggggcggggcggagacacgcccctccgtagccagccaggcgttccccgcgaaagagaggccaccgccctgccccgaaccacccgaccccgtcccaaccccgcgtcctaaagctcctccagcagagcccggtattcttcctcgctgaggggtgcttccagcgaggcggcctcttccgaggcctccagctcccccggggcctccgtttctaggagaggttgcgcctgctgcagaaactccgggctcgccaggagctcatccagcagcaggccgcaggggagtgcagac

SEQ ID NO: 19954 - DNA, 1149 bp, Artificial sequence
  DNA replication origin
gagtctccgtcgccgtcctcgtccccgggcttccgcggggagggtgctgtccgaaggtgtcgggagggccatcgcggtgagccccggccgcaatttcacggacggacgcgggcagagagaggccggcgggctcccgtgcacctcagccggactgtgcactgcggcaggtgcagccaggaggcctgcccggacagccagccagccagccagccgcccttgtaaaggcccacgggcaggcaggctccaccccttcatgaatggcggtgagcccccctgggacagcccgccccaccccggaagggacccagggcgtcgaggcctggggccggccggcggggtggtggtggtggtggtggtggtggtggtgtggggtggggggggtggtgggggagggcgtggtggcggtggtggtggtggggccggagagacgaagaggaagggggagaggggggaggggggaggggggcgcgtttcgggggccggctctccggacctctccagggatcccgcgggaacgggaagccgctctctgggctcccacgcgtcggcagcagggagaaaccagcctgggagggtggaggggagtgtggaactgaacctccgtgggagtcttgagtgtgccaggccctctctccgtgaaggaggcaatgcctgtgggcgtcgccgttgccgggacggtctcgcacacgcaggcgtgtggctctcgttcatttccacgtagaagaccagagcgagaccccagagaggagatgcctccccggcgtgatggcctgacgatggattcccgcgtgcggcaacgtggggagtctgcagtgtggccggtttggaacctggcaaggagagcgaaggcaccgtgccgggcttgcaccctcccctgcatgtttccgggtgcccgcagagctccgggagcaaacagtcggcatggccagcctttcgggggccggagagacgtgagcaacaggccgccttgcagagggcaaagccacgcggaaaccaaaatcacgcctccgtcgtcctgcgtgtggctcctccgtggccggggctgtcggcctcgcgccgcgttgcagggctcagcctggggatgtgcggtctgtgaaccgcgcgggtgaaaacccgacggcaacccgagtcccggtcttttgtcccgga

SEQ ID NO: 19955 - DNA, 950 bp, Artificial sequence
  DNA replication origin
accgcttttcctccctgccttcctccccccgtccccggctccctcccgcccgcccccagtccctgcgtcgctctgtctttccctccgttcctccctgcctccctgcctccctgcctccctccctccctcctaacgtccctccgcccatccttccgcccctctaggtctcccgttcctctctccatctctgcccgccttccctcccgcctggaacgctcagcgtccccggtgtgcgccgggcctggggtctgcgttccgcctccaggcgctccgtgctggcacctgggcggctgcaggggcccgggcgggcgggccacggtggcgcgggggcgcagaggaggcgagccgccggagcggtgtcaggcccggacgctgcgcggggcccggtgtttcgcgggacgggggtctccacccagcccaggggacgacgcgttttccgggggcggggggtgggggtggggagggggcggtcaggcggtggggtgggctggtggagaggcaggagagctctgcccgggctgctcccacagcccaggcggctgcccgcaaacccgcgcgtgcgcagtaggcggcccacctgctggtacctgggccggctctgggatccccgggatgcccaggaaagaatggcagttctccgctgtgtggagtctctcaccgggcctaggcctagaaggcaggaatcccaggccggtcagcccggtggagggggcggggcggagacacgcccctccgtagccagccaggcgttccccgcgaaagagaggccaccgccctgccccgaaccacccgaccccgtcccaaccccgcgtcctaaagctcctccagcagagcccggtattcttcctcgctgaggggtgcttccagcgaggcggcctcttccgaggcctccagctcccccggggcctccgtttctaggagaggttgcgcctgctgcagaaactccgggc

SEQ ID NO: 19956 - DNA, 1086 bp, Artificial sequence
  DNA replication origin
ctttggctcggggtccaaacgagtctccgtcgccgtcctcgtccccgggcttccgcggggagggtgctgtccgaaggtgtcgggagggccatcgcggtgagccccggccgcaatttcacggacggacgcgggcagagagaggccggcgggctcccgtgcacctcagccggactgtgcactgcggcaggtgcagccaggaggcctgcccggacagccagccagccagccagccgcccttgtaaaggcccacgggcaggcaggctccaccccttcatgaatggcggtgagcccccctgggacagcccgccccaccccggaagggacccagggcgtcgaggcctggggccggccggcggggtggtggtggtggtggtggtggggggggggtggtggtgggggagggcgtggtggcggtggtggtggtggggccggagagacgaagaggaaggtggagaggggggaggggggaggggggcgcgtttcgggggccggctctccggacctctccagggatcccgcgggaacgggaagccgctctctgggctcccacgcgtcggcagcagggagaaaccagcctgggagggtggaggggagtgtggaactgaacctccgtgggagtcttgagtgtgccaggccctctctccgtgaaggaggcaatgcctgtgggcgtcgccgttgccgggacggtctcgcacacgcaggcgtgtggctctcgttcatttccacgtagaagaccagagcgagaccccagagaggagatgcctccccggcgtgatggcctgacgatggattcccgcgtgcggcaacgtggggagtctgcagtgtggccggtttggaacctggcaaggagagcgaaggcaccgtgccgggcttgcaccctcccctgcatgtttccgggtgcccgcagagctccgggagcaaacagtcggcatggccagcctttcgggggccggagagacgtgagcaacaggccgccttgcagagggcaaagccacgcggaaaccaaaatcacgcctccgtcgtcctgcgtgtggctcctccgtggccggggctgtcggcctcgcgccgcgttgcagggctcagcct

SEQ ID NO: 19957 - DNA, 1092 bp, Artificial sequence
  DNA replication origin
cgggctggggaggtggagctgccccggcttggggttcccacgccgccccggcgacctggggaccccggccccagccccaccacggactcccctgggacgtgggtggcgcaagcaccccttggccctgcggccccgcttgagcgggcccaggctgtgccaccgcgcaggggcccggcaggccgtcgcgctgcgggtcccggtcctcccggcttttgcccgggtgcggaggccaccgaggagcctgagggtgggagagcgccccgtccggaggagccggggcggcgtaggcgaaatccccgcgcgccggggcaggttgggagatcccctctgccggcgcggcctggctgggctgcagcgcgggggcggccctcgctgcctggctcacgaaagccccctgtgggagagccccaggcgcgcagggcacgtggggtgcgggaagccccgttccccacgcgccggtgtgggcgaaggcgacccacgagggagcagggtgacccccgccgggggccgcgttgcacaggccgcctgcctgcgcgggcgccctgccaccctgtcccgggtgcctggcccttcgattctgaaaccagatctgaatcctggactccgggaggcccgtctctctggccagctcctcccgggcggcgatgcctggaaagcgatccttctcaaaggctcggaggagcagggcggtctgggatccggtgacggcggtccgctttcgccggccttctggcgggccgcgtctcccgggccagggccgagattcccgccggtgctgcctcagctggcgtgacctctcattctgaaaccaaatctggaccctgggctccggaatgccgatggcctgggccagccgttctctggtggcgatgcccgggtacgggttccgctcaaagcaggctcgcagggcctcgctttggctcggggtccaaacgagtctccgtcgccgtcctcgtccccgggcttccgcggggagggtgctgtccgaaggtgtcgggagggccatcgcggtgagccccggccgcaatttcacggacggacgcgggcagagagaggccggcgggctcccgtgcacctcagccggactgtgca

SEQ ID NO: 19958 - DNA, 932 bp, Artificial sequence
  DNA replication origin
ttcctccctgccttcctccccccgtccccggctccctcccgcccgcccccagtccctgcgtcgctctgtctttccctccgttcctccctgcctccctgcctccctgcctccctccctccctcctaacgtccctccgcccatccttccgcccctctaggtctcccgttcctctctccatctctgcccgccttccctcccgcctggaacgctcagcgtccccggtgtgcgccgggcctggggtctgcgttccgccgccaggcgctccgtgctggcacctgggcggctgcaggggcccgggcgggcgggcgacggtggcgcgggggcgcagaggaggcgagccgccggagcggtgtcaggcccggacgctgcgcggggcccggtgtttcgcgggacgggggtctccacccagcccaggggacgacgcgttttccgggggcggggggtgggggtggggagggggcggtcaggcggcggggtgggctggtggagaggcaggagagctctgcccgggctgctcccacagcccaggcggctgcccgcaaacccgcgcgtgcgcagtaggcggcccacctgctggtacctgggccggctctgggatccccgggatgcccaggaaagaatggcagttctccgctgtgtggagtctctcaccgggcctaggcctagaaggcaggaatcccaggccggtcagcccggtggagggggcggggcggagacacgcccctccgtagccagccaggcgttccccgcgaaagagaggccaccgccctgccccgaaccacccgaccccgtcccaaccccgcgtcctaaagctcctccagcagagcccggtattcttcctcgctgaggggtgcttccagcgaggcggcctcttccgaggcctccagctcccccggggcctccgtttctaggagaggttgcgcctgctgcag

SEQ ID NO: 19959 - DNA, 1138 bp, Artificial sequence
  DNA replication origin
ccaaacgagtctccgtcgccgtcctcgtccccgggcttccgcggggagggtgctgtccgaaggtgtcgggagggccatcgcggtgagccccggccgcaatttcacggacggacgcgggcagagagaggccggcgggctcccgtgcacctcagccggactgtgcactgcggcaggtgcagccaggaggcctgcccggacagccagccagccagccagccgcccttgtaaaggcccacgggcaggcaggctccaccccttcatgaatggcggtgagcccccctgggacagcccgccccaccccggaagggacccagggcgtcgaggcctggggccggccggcggggtggtggtggtggtggtggtggtggtggtgtggggtggggggggtggtgggggagggcgtggtggcggtggtggtggtggggccggagagacgaagaggaagggggagaggggggaggggggaggggggcgcgtttcgggggccggctctccggacctctccagggatcccgcgggaacgggaagccgctctctgggctcccacgcgtcggcagcagggagaaaccagcctgggagggtggaggggagtgtggaactgaacctccgtgggagtcttgagtgtgccaggccctctctccgtgaaggaggcaatgcctgtgggcgtcgccgttgccgggacggtctcgcacacgcaggcgtgtggctctcgttcatttccacgtagaagaccagagcgagaccccagagaggagatgcctccccggcgtgatggcctgacgatggattcccgcgtgcggcaacgtggggagtctgcagtgtggccggtttggaacctggcaaggagagcgaaggcaccgtgccgggcttgcaccctcccctgcatgtttccgggtgcccgcagagctccgggagcaaacagtcggcatggccagcctttcgggggccggagagacgtgagcaacaggccgccttgcagagggcaaagccacgcggaaaccaaaatcacgcctccgtcgtcctgcgtgtggctcctccgtggccggggctgtcggcctcgcgccgcgttgcagggctcagcctggggatgtgcggtctgtgaaccgcgcgggtgaaaacccgacggcaacccgagtcc

SEQ ID NO: 19960 - DNA, 1032 bp, Artificial sequence
  DNA replication origin
ggccccagccccaccacggactcccctgggacgtgggtggcgcaagcaccccttggccctgcggccccgcttgagcgggcccaggctgtgccaccgcgcaggggcccggcaggccgtcgcgctgcgggtcccggtcctcccggcttttgcccgggtgcggaggccaccgaggagcctgagggtgggagagcgccccgtccggaggagccggggcggcgtaggcgaaatccccgcgcgccggggcaggttgggagatcccctctgccggcgcggcctggctgggctgcagcgcgggggcggccctcgctgcctggctcacgaaagccccctgtgggagagccccaggcgcgcagggcacgtggggtgcgggaagccccgttccccacgcgccggtgtgggcgaaggcgacccacgagggagcagggtgacccccgccgggggccgcgctgcacaggccgcctgcctgcgcgggcgccctgccaccctgtcccgggtgcctggcccttcgattctgaaaccagatctgaatcctggactccgggaggcccgtctctctggccagctcctcccgggcggcgatgcctggaaagcgatccttctcaaaggctcggaggagcagggcggtctgggatccggtgacggcggtccgctttcgccggccttctggcgggccgcgtctcccgggccagggccgagattcccgccggtgctgcctcagctggcgtgacctctcattctgaaaccaaatctggaccctgggctccggaatgccgatggcctgggccagccgttctctggtggcgatgcccgggtacgggttccgctcaaagcaggctcgcagggcctcgctttggctcggggtccaaacgagtctccgtcgccgtcctcgtccccgggcttccgcggggagggtgctgtccgaaggtgtcgggagggccatcgcggtgagccccggccgcaatttcacggacggacgcgggcagagagaggccggcgggctcccgtgcacctcagccggactgtgcactgcgg

SEQ ID NO: 19961 - DNA, 984 bp, Artificial sequence
  DNA replication origin
gaccgcttttcctccctgccttcctccccccgtccccggctccctcccgcccgcccccagtccctgcgtcgctctgtctttccctccgttcctccctgcctccctgcctccctgcctccctccctccctcctaacgtccctccgcccatccttccgcccctctaggtctcccgttcctctctccatctctgcccgccttccctcccgcctggaacgctcagcgtccccggtgtgcgccgggcctggggtctgcgttccgccgccaggcgctccgtgctggcacctgggcggctgcaggggcccgggcgggcgggcgacggtggcgcgggggcgcagaggaggcgagccgccggagcggtgtcaggcccggacgctgcgcggggcccggtgtttcgcgggacgggggtctccacccagcccaggggacgacgcgttttccgggggcggggggtgggggtggggagggggcggtcaggcggcggggtgggctggtggagaggcaggagagctctgcccgggctgctcccacagcccaggcggctgcccgcaaacccgcgcgtgcgcagtaggcggcccacctgctggtacctgggccggctctgggatccccgggatgcccaggaaagaatggcagttctccgctgtgtggagtctctcaccgggcctaggcctagaaggcaggaatcccaggccggtcagcccggtggagggggcggggcggagacacgcccctccgtagccagccaggcgttccccgcgaaagagaggccaccgccctgccccgaaccacccgaccccgtcccaaccccgcgtcctaaagctcctccagcagagcccggtattcttcctcgctgaggggtgcttccagcgaggcggcctcttccgaggcctccagctcccccggggcctccgtttctaggagaggttgcgcctgctgcagaaactccgggctcgccaggagctcatccagcagcaggccgcagg

SEQ ID NO: 19962 - DNA, 1106 bp, Artificial sequence
  DNA replication origin
ctttggctcggggtccaaacgagtctccgtcgccgtcctcgtccccgggcttccgcggggagggtgctgtccgaaggtgtcgggagggccatcgcggtgagccccggccgcaatttcacggacggacgcgggcagagagaggccggcgggctcccgtgcacctcagccggactgtgcactgcggcaggtgcagccaggaggcctgcccggacagccagccagccagccagccgcccttgtaaaggcccacgggcaggcaggctccaccccttcatgaatggcggtgagcccccctgggacagcccgccccaccccggaagggacccagggcgtcgaggcctggggccggccggcggggtggtggtggtggtggtggtggggggggggtggtggtgggggagggcgtggtggcggtggtggtggtggggccggagagacgaagaggaaggtggagaggggggaggggggaggggggcgcgtttcgggggccggctctccggacctctccagggatcccgcgggaacgggaagccgctctctgggctcccacgcgtcggcagcagggagaaaccagcctgggagggtggaggggagtgtggaactgaacctccgtgggagtcttgagtgtgccaggccctctctccgtgaaggaggcaatgcctgtgggcgtcgccgttgccgggacggtctcgcacacgcaggcgtgtggctctcgttcatttccacgtagaagaccagagcgagaccccagagaggagatgcctccccggcgtgatggcctgacgatggattcccgcgtgcggcaacgtggggagtctgcagtgtggccggtttggaacctggcaaggagagcgaaggcaccgtgccgggcttgcaccctcccctgcatgtttccgggtgcccgcagagctccgggagcaaacagtcggcatggccagcctttcgggggccggagagacgtgagcaacaggccgccttgcagagggcaaagccacgcggaaaccaaaatcacgcctccgtcgtcctgcgtgtggctcctccgtggccggggctgtcggcctcgcgccgcgttgcagggctcagcctggggatgtgcggtctgtgaa

SEQ ID NO: 19963 - DNA, 865 bp, Artificial sequence
  DNA replication origin
atctctgaactaatcatccaggagatgtaactctaatccaggtttgcctagacagcctcggaaggtggggggagagattcagccagaatttcacggacgaacaagggcacagagaggccagcgagctcccttgcacgtcacccggggtgcgcactgcgcgcaggtctagccaggaagcgggcaaagacagacagaggtatgcttttgaccgccaggcgctccgtgctggcacctgggcggctgcaggggcccgggcgggcgggcgacggtggcgcgggggcgcagaggaggcgagccgccggagcggtgtcaggcccggacgctgcgcggggcccggtgtttcgcgggacgggggtctccacccagcccaggggacgacgcgttttccgggggcggggggtgggggtggggagggggcggtcaggcggcggggtgggctggtggagaggcaggagagctctgcccgggctgctcccacagcccaggcggctgcccgcaaacccgcgcgtgcgcagtaggcggcccacctgctggtacctgggccggctctgggatccccgggatgcccaggaaagaatggcagttctccgctgtgtggagtctctcaccgggcctaggcctagaaggcaggaatcccaggccggtcagcccggtggagggggcggggcggagacacgcccctccgtagccagccaggcgttccccgcgaaagagaggccaccgccctgccccgaaccacccgaccccgtcccaaccccgcgtcctaaagctcctccagcagagcccggtattcttcctcgctgaggggtgcttccagcgaggcggcctcttccgaggcctccagctcccccggggcctccgtttc

SEQ ID NO: 19964 - DNA, 1681 bp, Artificial sequence
  DNA replication origin
ttttatatattttgaatacaaattctcagatctgtattttgcaaatattttcttcaatatgtggcttgtctttttgttctcttaacaaggtctcttccagagtataaactgtaaatattaagaaatccacattgtcatttcttctgtgtatatcaaccttctgtgtcatttgttaaaattcattaccaaacgcaaaggcacatagcttttcctctatagtttcttctagaaattgtatagttttgcatttttagtgtaatgatgattttgagtgattatttgtgtaagttgtaaagttttcgtctacatgcatatcatttcttatggtttccaattaatcattccctcactatttttgggaaagacacaggatagtgggctctgttagagtagatagctagctagacatgaacaggagggggagctcctggaaaagggaaagtctgtgaaggctcacgtggagggaccaccaaaaatgcatatattagtagcatctctagtgctggagtggatgggcacttgtcaattgtggttaggagggagaagaggtacctacgcagaaacaccctagaacttctcttgagatgccccaatcatcattcactctgcaataaaaatgtcagaatattgctagctacatgctgataagaaggagaaaggggacattcttaagagaaacctggcaccataagtacagattagggcagagaaagacattcaaaagaggcagctgcagtagatacaaacgtgaccgctgtcagcctgcctggtatggcaggaaggaggctggtgccagagtggattcgggttgatcaccacacatgtacctcaatcaacagtgaggaggtcccacaaggctaagtggggcaagtcggggacctaaggcagtagcaggaaaaccaaagaaaacaggcggagacttgagacagaggcaggaatgtgaagaagtccaaaataaaaatccctgcacaggactcttaggctgttatcatgcactatcagcctactcctccctatttttgtacaataagctctttacactgtatttcttttcaatgaagttatcttccatctttgtactgcctcttggtgaaaagctgtcttccaagttaataactgggacatcagctctccgcagtaatagctccttttcagttttaatttggagaactgatggggattaataactggcgctctgactttaagtggtgcaggaggcggccagtaggggacgccagccgttacgccgggagcaagagggccctgcgtagtccccatctgcctgcatgtggcgtgcagccacgacaatggcagcaagagggtccggcagtgtgcccagctgccagcaggcgggtgtgctgccactataatgtgaggaagagggccctgcaatgtccctagctgccagcaggcggcgtgccaccactatactgcgagcaagagagccctgccgtgccctggcgccagcacggggcgctggacaccactgtaagcaagagggccctgcagttgtcctagtcgccagtagcggacgcaatggcagagcaccgtgggcaagctggtcctgtagtgcccggctgcaagcagggggcgcccgaaacgggcttttcagattactcaggttccactcgtctctgcgccgccggggacgtgtgtctctgcgcgtgcaccgcgccacccc

SEQ ID NO: 19965 - DNA, 914 bp, Artificial sequence
  DNA replication origin
gctgcaagcagggggcgcccgaaacgggcttttcagattactcaggttccactcgtctctgcgccgccggggacgtgtgtctctgcgcgtgcaccgcgccacccccgcgctccccgcccggcggcgcgcgactgtgcgactgcaacactccccgccaccctcagcccagcgacgtgcgtctctgcgcctgcgccgcgcctcactcccgcccgcccagcgacccctcccctccggggaggcgccggcgtgcgtctacgccctgctccgcgtctccccaacagcggcgcgcctctctgcgcctgcgccggcgccccgcgcctctctgcgcctgcgccggcgccccgcgcctctctgcgcctgcgccggcgcgccgcctttgcgagggcggagttgcgttctctttagcacacacccggagagcatcgcgagggcggagctgcgttctcctctgcacagacttcgggggtattgcgaaggcggagcagagttcttctcaggtcagacccgggcgggcgggctgagggcactgcgagggcggagctgcgttctgttcagcacagacgtggggggcaccgtaaaggcggagcagcattcttctcagcacagacgttgggggtactgcctgcctttgggataactcggggccgcatcgacggtgaataaaatctttcccgtttgctgccctgaataatcaaggtcagagaccagttagaacggtttagtgtggaaagcgggaaacgaaaagcctctctgaatcctgcgcaccgagattctcccaaggcaaggcgaggggctgtattgcagggttcaagtgcagcgtcggaactcaaatgcagcattcctaatgcacacatgacaccctaaatataacaggcatattactcatggagggttagggttcaggttcgggtacg

SEQ ID NO: 19966 - DNA, 1171 bp, Artificial sequence
  DNA replication origin
tcacgctgacctctgtccgcgtgggaggggccggtgtgagacaaggggctcacactgacctctctcagcgtgggaggggccggtgtgaggcaagggctcacactgacctctctcagcatgggaggggccggtgtgagacaaggggctcgggctgacctctctcagcgtgggaggggccggtgtgaggcaaggggctcacgctgacctctgtccgcgtgggaggggccggtgtgaggcaagggctcacactgacctctctcagcgtgggaggggccggtgtgaggcaaggggctcacgctgacctctgtccgcgtgggaggggccggggtgaggcaagggctcacactgacctctctcagcgtgggaggagccagtgtgaggcaggggctcacgcctctgggcagggtgccagaggcatgagttgggcatcaacaggccaccgtgagggaggagctgggccgcacgcgggctgctgggaggcaggcagggacttggccccgagaggccgccgtgggggcaagagctgggcctggagaggcccctgggaggcaagggcggggcctgcagaggctgttctccaaccagtgctagaactgtacaggccaccaggaggcaggaggtgggccctcagagcttggctggagaaagttcggggcctacaaaggcggttgggagctgggcaggagttgagccaaaagagcttgcttacttgctgggaggcagggccgggagagcccgacttcaggacaacttgggcctgcggcagtcgccgggaggcccaaccttggcgtggaggagcccaccgaccggagaccatttggggcctggagatgccatcggagggcaggagctcatcctggagaggccaccgtgaggcctgacctgggcctggggagcttggcttgaggaagctgtgggccgaccaaggccgccaggagatgggtaggcactgagtccaaagaggttgttgagaggcaggaatcgggcctggagacccaaccaggaagaagagctgggcccggagagaatgcacggagggtgcaagtgggtctggagaggccgacttgaggaggttctgggcccggagaggccgccggaagggaaaaactgggcctggaaaggccgttgtcaggaatgagccccatgggcctgaagaggccactggcaggcg

SEQ ID NO: 19967 - DNA, 1470 bp, Artificial sequence
  DNA replication origin
cagtagacagaagttgggcaaaagcctgatttgaggaagttttgggcttcaagagtcagccacgaggcaggcactaggcctggaaatggcctcacagtcatgagttgggcctaaatgggccactgtgagggaggagctgtgcctgttgaggctgctggcaggcaggcagaaatttggcctggggcagctgccatgaggcaagagctgggcctggaaaaagcccctgggaggcaagagcagggcctgcagaggctgttctcaagtcaaagctgggcctgttgatgccaccgggaagcagaaggtgggcctggagagtttgacttgaggaagttttgggcctacattggccgccatgagctggacaggaactgggccaaaaaaggctgttgtgaggcagcagttgtgcctgtagacccagccaagaggaagaggtgggtctggagaagcccccatgaggcagaggttgggcctgtagacgctgacaggaggcaggagctgggcctggacaggtcaacttgaggagattttgggccttcataggccaccaggaggcagtagttgggactagagagtctgacttgagtaagttttgggcccggagatgacgtcctgggacaggagttgggcgtggagaggccaccgtgaggcataagctggatgtagagaggccagtgtgaggcaagacctgggcctgtctaggctgctgggagacaggcaggaatctggccagggaaggttgccatgagacaaaagttgggcctggaaaggcccttgtgaagcatgagcttggcctaaagaggccactgggtggcaggagctgggtgtgtagaagctgctgaaaggttgggagcttggcttggggggtccacagtgaggtagatgctgggcgtgaagaatctgctgtgaggcagacgttgggactgtagaggctgacgggaggcagaggctgggcctggaggggccaccaagatgcaggagctgggcctggagaggctgcaaagaagcatgacctgggcctggtgaggtcgacttgagaaagttcagggcctggagagaaggctgggaggcaggagctgggtctaaagaggccattgtaacgatggagctgtgcctgtggaggctgttgtgaggcagtagcctcatctgtggaggctgccgtgacgtagggtatgggcctaaataggccattgtgagtcatgatcttggtctgtagaggctgactggagaaagttctgggcctggagaggctgccgggaggtaggagctgggccaaaagatgtaagcacatttgcatttattaggcactttatttccattattacactgtaatatataataaaataatcatagaactcaccataatgtagaatcagtgggcgtgttaagcttgttttcctgcaactggatggtcccacctgagcgtgatgggagaaagtaacagatcaataggtattagattctcataaggac

SEQ ID NO: 19968 - DNA, 942 bp, Artificial sequence
  DNA replication origin
tataaactttaaatattaagaaatccacactgtcacttcttttgtgtatatctaccttttgtgtcatttgttaaaattcattaccaaacccaaaggcagatagcttttcttctattgtttcttctagaaattgtatagttttgcatttttagtgtaaggatgattttgagtgattatttgtgtaagttgtaaagttttcgtctatatccatatcatttcttatggtttccaattaatcgttccctcactatttttgggaaagacacaggatagtgggctttgttagagtagataggtagctagacatgaacaggagggggcctcctggaaaagggaaagtctgggaaggctcacctggagggaccaccaaaaattcacatattagtagcatctctagtgctggagtggatgggcacttgtcaattgtgggtaggagggaaaagaggtacctatgcagaaagaaacaccctagaactcctctgaagatgccccaatcattcactctgcaataaaaatgtcagaatattgctagctacatgctgataaggccaaaggggacattcttaagagaaacctggcaccataagtacagattagggcagagaaggacattcaaaagaggcaggcgcagtaggtacaaacgtgatcgctgtcagtgtgcctgggatggcgggaaggaggctggtgccagagtggattcgtattgatcaccacacatgtacctcaaccaacagtgaggaggtcccacaagcctaagtggggcaagttggggagctaaggcagtagcaggaaaaccagacaaagaaaacaggtggagacttgagacagaggcaggaatgtgaagaaatccaaaataaaattccctgcacaggactcttaggctgttttaatgcacgctcagcccactcctccctatttttctacaataaactctttacactg

SEQ ID NO: 19969 - DNA, 1323 bp, Artificial sequence
  DNA replication origin
gtgggtgcctggttgaggggacctggtgaaagaaacatggtgagggggcctggtgaggggtggtctggtgagggaacttagggaaacctggtgaggaggacctggtgaggggacatgggggggaccttggtgaggggacctggtgaggggacatagggggaccttggtgagcggacctggtgaggggacatgggggggaccttggtgaggggacctggtgaggaggacatgggggggaccttggtgaggggacctggtgaggggacatgggggggaccttggtgaggggacctggtgaggggacctggtgaggggacatagggggggaccttggtgaggggacctggtgaggggacatgggggggaccttggtgaggaggacctggtgaggggacatgggggggaccttggtgaggggacctggtgaggggacatgagggggaccttggtgaggggacctggtgaggaggacatgggggggaccttggtgaggggacctggtgaggggacatgggggggaccttggtgaggaggacctggtgaggggacatgggggggaccttggtgaggggacctggtgaggggacatgggggggaccttggtgaggggacctggtgaggggacatgggggggaccttggtgaggggacctggtgaggggacatgggggggaccttggtgaggggacctggtgaggggacctggtgaggaggacatgggtggggagccttggtgaggggacctggtgaggaggacctggtgaggggaacatggtgaggggaacatggtcagggggacttataggggtgtcctgttggggggacctggtggtgagatctggtgaggggatcaaaggcagaagccattgtcttggtcacatagacagaatctagaacctgtcatcccacagagccacattctagagtttagagtgggggacctctccccaattctgtaagcccatgaggagagaggaaggcctttctctccatgctccttttgcgggaactccctggcaccaaggccaggggggaaaggacagtctctgatgaggatgggtctctaggctgctctgagtgctgtccctgcactgaagaagttatagttccctcccaggcggccccctccctgcccctcagctcagcctcaatcaagaagttccccatctttgaccactccaagtaggagaaaccggcccagggctcccttagagccgagaacagtggtgagttaagggccagcatggacagcaactctgggttacagttaagctggtgaggagctcacagacccatgcagaaagctcctactgtccctgactcc

SEQ ID NO: 19970 - DNA, 1077 bp, Artificial sequence
  DNA replication origin
tcggccctaagccggaagtcagcgagcccgaagcggaaggggctgggctatctaggggcgtggtcggtgcggaggcggggccatcgctagctgggggcggggccggaagctctttccccgcgactgcgccacgtctgaggcggctgtggccgcgtcggtgtccgcgtcgaggagccggggcagggcacgatggcggactgggctcggggtgagcgcgggagagcggagccgttgggggcagggccgggccgaaaccgacgccgctgcctgtagagccgcgtgcgcctgcctctggcccagctggggtgacctcggccgagaggaccctgtcaggggggcggattcggatccttccgggtccgagcagggccgggtttcggccggcactgccgttaggaccgaaggcgcgcgtggcggcccagcagctccagcgaggggtcgcgcagcagcggggtctccccactccccgccgccccctgtgagatcgttctgcatgggttcggggtgagcgggagtcggcattcgacaggtcccgaggccaggccctaggagtagaggctgtgctccgctggtgtccaagcaggactcttactttggcctcggtggccccatttcccctcctggagcccgtgttcttgtctgcaaagtgggatattgatgcctgtctctgtgaggtgttatgatgattaaaggaatttataaatatgaagtggctggaaggacgctggcatcccttcctgacactgaagctagggaggaggtggttctcacgcacctgatgtgacagaacttccttatcccctggcccagcctgtcacaggccaggcctctgcgagcactctgccctgggtgttgcaggaagccccatgcgggatgcagaccaaggatcccgctcctggtcgacctcagctcccgtctcggggaaattgggaactttgctcagccattttctgtgcggtaaagggccttcccaatgttctgtcctggttccttgccacctcttcaggacctagctcaaaggtcgtctctgcaggagcctttctgctgccttgctgggtacttttcccaagtcttttc

SEQ ID NO: 19971 - DNA, 984 bp, Artificial sequence
  DNA replication origin
cagccccttccgcttcgggctcgctgacttccggcttagggccgagggtggggaactgccgggcgcggaagcgatgggcatatctgtggcttattttcagcactgtcgcgcagacagtggcgcgatctcagctcactgcagcccccgcctgccgggctcccaaggtgctgggattacagcagcaccgcggatgtgacgtttggtgttcctgtgaacgtggggcggggcggggccgtttgcttgctcagtgcctagacgatggtggtggaaagacgcttctgtgggttaggtcctaacggttaggaaggattcacaggcgggtcatgaggaaggagcagacccctcgggcagaagcccgcgaggagcactgggtgtggtgggggcaggggtgcctcctctgtcaagtggagatcggcgcctcgctcgtgcctgcgagtgcgcgccgcgtcgaatacagccgtacagaacgcactacaggaaagtgaagccgggagagagactgggaggcggcgcggggactgggggccgtagacgcctttgctcccgggcacttgttagaagagcgagtggatcgcgcttcctgtgcgtcactgaatcctcatgacggccactgaaacggacacgcaggatctttgcttttcaagagggaactgagtccaggccagactgggttgctcccctttctctcggcccctccacctttgcaagtgctgctccttctgcctggagtggctcctccagtcttttcccggctcacttcccaccgtccggtgtcagcaaaaacagcacttcctcacagcccgttgcagcccagcagtcgccttttgcttcttttgaagcacagccctgtgaccgcctcgtgtccttttgtttttccttgtcccccttcccctctggaacataagctccacaaaggcagggacctgggaatcccgttcgcctgcattccccagcaaacgcctaacgaacccaatggcccaggac

SEQ ID NO: 19972 - DNA, 1442 bp, Artificial sequence
  DNA replication origin
tctacatcccatcggttctgtggagctcgaggggcgtcactgtgtgtgtggcagggcacggtgggggctgagatcgtttcctgttggaacttctggcccaagaagcgcgggtcacaaggagaggggtcagttcggttcagagcgactcagcccctcgactcgggtcttaaaacctccgagccgccagttctgcctcaggccgcgcccccttaaagcgccaccagacgctgcgccccgttaaagcgccaccagacgccgcgccccgtcccggcctcccccgcgcgctggcgcggggctttctgggccagggcggggccggcgaactgcggcccggaacggctgaggaagggcccgtcccgccttccccggcgcgccatggagccccgggcggttgcagaagccgtggagacgggtgaggaggatgtgattatggaagctctgcggtcatacaaccaggaggtaagcggccgcctgaggccggggggcgggcacggagggggtggggcagggtcgtgcgcgggtagcagggagggcgtgggtgaggcagaggctgtgtcagcaagcgtaggggacgcggcggggtgcggggggcaggtctgggatgcagtgttgcggggagagtgggggtgcacccgttgggtggcaggcgtgtagggatgggggcgagtgccgaccctgccatccgttctgagcagtggctgctgcctgagttagaggccaataggccgcccgcatcagcggacgcggatcctacccctctgtggatttgaattcactagttctctctgcagcactcccagagcttcacgtttgatgatgcccaacaggaggaccggaaggtgggtgctggcccaaggggtaaaggggcagggacgggtggccccaggaagaagggcctggtggagccgctcttctccctgcccacagagactggcggagctgctggtctccgtcctggaacagggcttgccaccctcccaccgtgtcatctggctgcagagtgtccgaatcctgtcccgggaccgcaactgcctggacccgttcaccagccgccagagcctgcaggcactagcctgctatgctgacatctctgtctctgaggggtccgtcccagagtccgcagacatggatgttgtactggagtccctcaagtgcctgtgcaacctcgtgctcagcagccctgtggcacagatgctggcagcagaggcccgcctagtggtgaagctcacagagcgtgtggggctgtaccgtgagaggagcttcccccacgatgtccagttctttgacttgcggctcctcttcctgctaacggcactccgcaccgatgtgcgccagcagctgtttcaggagctgaaaggagtgcgcctgctaactgacacactggagctgacgctgggggtgactcctgaagggaaccccccacccacgctccttccttccca

SEQ ID NO: 19973 - DNA, 1949 bp, Artificial sequence
  DNA replication origin
gtgttagatacgctagatgcctgccgaagtaattatgggtgaaacatatgatgtccaagatttgcttttaaaggctccaatacctcctcccagattccggagggctgtgaaacaattagctatgaaaactggtaattcctgaagctgggtacatgggggttcatgatccctctctcaccttttttgggggagaatgtttgagactttaataagaacttgttgccttttccttttacagggtgttgcaggcatcttcctcaggcctgttttctctgttttccaggctgacgtgatggcagacagggttccccgctgcccggtctgcaccggcgttgtgaagcccgacattgtgttctttggggagccgctgccccagaggttcttgctgcatgtggttgatttccccatggcagatctgctgctcatccttgggacctccctggaggtttgtcagcaggcctgtgcagggaggaggctggagggcaggggaagggaggggtacaggagtcatctcatgggctgtcggcaggcctgtgcagggaggagtctggagggcaggggaagggaggggtacaggagtcacctcatgggctgtcggcaggcctgtgcagggaggaggctggagggcaggggaagggaggggtacaggagtcatctcatgggctgtcggcaggcctgtgcagggaggaggctggagggcaggggaagggaggggtacaggagtcatctcatgggcccttccagggctggtgccactttgggaaggtgaatggattcagctggggttccaggctgagggagcagcagcctgtgcaggagacaggaaggtgggaagctgctgggctttggaggtggtataggtgtgggtggggcaccacgtgtgaggagaagggagaaggatgggggtgtgggggcgaggtggaggggcagggcctcccaggtcagatcaggaatactgatgctgcagtgggaggagtgataaatccacagggactggcccggggacgtagctgcacccttggggtcagggaggcctttggggagtggagagtggagcaagcagtgccaggaggctggtcctggagaaggtggagctgtggtcgcctgagggatggcgaggagggggactggactcgcagtctgtgatgttttggggacgtgagaaggaggcgtctggcttggtctgtaaggtcagggcacttgctggtgaggcgtgatttgggagggaggatgcccagctcggttctgtgtgtgtctgaggtgtcgggaaacatgccctggatgtgttcaagcagctgttctgcgtctgcgtctgcagctcaggaaattcctaaaagctgtgatgagagcaagaaatgagaccatgaagtcagtgtgtgcgtgactggatgtaggcaccgaggacagaagggccagaaagacctgtgctcagaggggcccagggcagccacaggggcccagagcatgtgtttgttcaggcattcattgtgtgctgggccctgctccagtgctttggacatacacggtcagatgtcagtgtaagaagttatatagtttgttaggagatgattgatgttatgagaaagataacaagtaggatagaaaggctagaagggttgggaaccagctgcagtgtcaagtcaggcaggtggagttggatctaagagtttaccgaggtgaggagggtctggcaggggacactgcacaggtgacaagcagcaaggagggtggggcgaagtcagcattgatggccacggggctggagcagagaagaaggtggggcacaagtgtcatctcatgggaggctggcgccacctcagaaggtgaatgggttcagcttgggttccaggccagagtctgaagttgagaggactccgttgggtgctgggctgtgagcccaccatgggggcaagactgggagcagcagacccagcagggcccttgtaggt

SEQ ID NO: 19974 - DNA, 707 bp, Artificial sequence
  DNA replication origin
ggggcgccgggggcggggcgagtccggaggactccttggactgcgcggaacatggcgttctggggttggcgcgccgcggcagccctccggctgtggggccgggtagttgaacgggtcgaggccgggggaggcgtggggccgtttcaggcctgcggctgtcggctggtgcttggcggcagggacgatgtgagtgcggggctgagaggcagccatggggcccgcggtgagcccttggacccggcgcgccccttgcagaggcctcccagacccgaggtgcccagggcattccggaggcagccgagggcagcagctcccagtttcttcttttcgaggtattttgggcaaggacaagcacttcttgcgtgttcgttgtcgacacctcgcccactctttctcaccttgccgtgtttcctttgcggcatgtctgggagtttacgtgcgttccaacaccggggcctccgtctttatgctgatctgtggacgtcacttatgggggttttgtcgtttatttcaccattccctcattgaaatacgttctaacctttagttattgtgcatcatgctgtggtgaataaccttgttggcacctcactgtttgcataaattcctagtactgggattgctaggtccaaaagtatatgcatttaacgctttaatgatccctcataaatgttgtgcggttaatactcccactggcatgtgatcgt

SEQ ID NO: 19975 - DNA, 791 bp, Artificial sequence
  DNA replication origin
agtgttttgcgaggattaggtgtaaatataatgcctgaccatagtaaaagcgctcagaaagtattaactatcaccgccatccgggttgaaaaaggtgtgagcgcagggtacagaaatgctggctccaggtttgacctccggggcgagagatgagacaccagactagggaacttcctctactcgcctctacgtctacctgggcgcgccggaggcgtcggcaaggaggcgggggcggggcgcggaggcgggaccggggcgccgggggcgggggcggtaggcggaggcggggctggggcgccgggggcgggggtgggaggcggaggcggggccggggcgccgggggcggggcgagtccggaggactccttggactgcgcggaacatggcgttctggggttggcgcgccgcggcagccctccggctgtggggccgggtagttgaacgggtcgaggccgggggaggcgtggggccgtttcaggcctgcggctgtcggctggtgcttggcggcagggacgatgtgagtgcggggctgagaggcagccatggggcccgcggtgagcccttggacccggcgcgccccttgcagaggcctcccagacccgaggtgcccagggcattccggaggcagccgagggcagcagctcccagtttcttcttttcgaggtattttgggcaaggacaagcacttcttgcgtgttcgttgtcgacacctcgcccactctttctcaccttgccgtgtttcctttgcggcatgtctgggagtttacgtgcgttccaacaccggggcctccg

SEQ ID NO: 19976 - DNA, 802 bp, Artificial sequence
  DNA replication origin
ctcttattcctcgaccctgccactcaaggttcctcagcaaaccttgccggcacagccggtcgctacacgtccccgtttccccccaacttgggtctgggcgccctcagcccatcaagggtccgctcctccgcccgcctgccccctccgtctccctctatcgccggggcccagggcccgtctgctcggcgctcacttcttcgtgtagagctcctccagacggtgccacacagcgggctgcccgggcccggagttctggctctgctgtaggaagcccggtacgtccttcatgacagcaggaagacccccggcacagaagaacaaccgggatgtcagcaccgcggggatggctgccggaaatgctcactcacttccggcgccgagcggcgcggggcaggctgggagcgccgtagcaggccgggggcgggccccgctggttgctcggttacagcgcgtctctgcgctccggacaaaactctccggcgtttgcagcccacttcccgcgcacttggctgtgccattgaggcgtcaaagagtgtgggcgcctgtggtcgaacccgctacggactagctttgtggtgtcagcctttgtgacccggaattgctcctgtcaaatgaggatcttcccagtagtgttttgcgaggattaggtgtaaatataatgcctgaccatagtaaaagcgctcagaaagtattaactatcaccgccatccgggttgaaaaaggtgtgagcgcagggtacagaaatgctggctccaggtttgacctccggggcgagagatgagacaccagactagggaacttc

SEQ ID NO: 19977 - DNA, 1108 bp, Artificial sequence
  DNA replication origin
gccaagggcggggcgcggtggctcatatctgtgatcccagcactttgggaggcagaggcgggcggatcacttgaggtcaggagttcgagatcagcctggccaacatggtgaaaccccgtctctactaaaaatacaaaaattagccaggcgtggtggcgggcatctgtaatcccagctactcgtgaggctgaggcaagaaaatagtttgaacccaggaggcagagattgcagtgagcagagatcacgccactgcactccagcctgtgtgacagagcgagactgcgtctcaaaaaacaaaaacaaaaaacaaacaaaaacagtgccaaggacagagcagagcggagagaggagaataaacgagggggcaggtccgcggtggggacgcagtcaggtgcagggcagggccgtggtctggcaggagctggcccactcaggacacaggaggcctgggtggctgggagagccaggggggccgaggagcgggcaaggctccctgggctgctgtggggctggggagggtgtgagggagggagacgtccggctctcctgaggggaagggaatcagagaggggccacgctctgcacatgcgtaaaaagggtggatcccatgtggcgtgtgagatgagaagggctgaggcaagaggagggatggaagtggggaactagagcgaggaacagggtttgcaggtaacgcccaaggcccaggtatcctagtttgagaagcctatttaccagggagctgggatggccgggaccaacccgggcagcagccgtgcagcccctcctagtcaccacccccagcccaaggagggacaggtgaggacttcaaagggccaagccctccagcgtcctcatcagaagctcaggtgagggcacacaacgtgaatttaccgttgcacagtgcaagctccagcaagtgaggctcagcagtgcccttgcagaaggaagtgttttcccccagccttgtccccgctgcggtgattcccctcagggcaaaaaatcactccccggaggctcccgcagtcccccagaaccattcactgccccatctcttccgggtccaccccacgaagcttgatccactctcttcaccctcccggctcccaaa

SEQ ID NO: 19978 - DNA, 1604 bp, Artificial sequence
  DNA replication origin
tggcgccggagaacccaccgcgggcagggcctcagggagtcccgggccaagcatcgtctggatccatggggtggcgggagggggcaacggggagtgaccccagacttttccctcccccgtccccggacccgggtcggggcgtcttggtgttcttcgccctctgagggtgaagtgggcactggccgccgctgatctgagctctggggggcaccttcctcccctgcacctccctttctgcttctgtccttccacaccccaggacaggtcacatgccccgagggaggtatttccaaggaaccctgagctctctttcctcgctttccttcttttccctctcttcccgatcccggagcagaactggcctctttggcagcagacactgccaggcccaggctgtattcctgggcccccacccctgccacactttggtggggcccagcttggggccttgcaccagggcctgaatctgagcccctggtggggaacagactccacaaatgccctctgtggggaggcagtgcttggctcctgagcctgggagtgagggtgggggaaggatgtggacaagggtggagagcctgaggaagtcagcgggtgaggtggaggccccagagggctgagaccagccggttcccagtgaccaccctggggccagcactcacctggagcagggggcctctggctggtccatggggtctcttcctccctgggtctagcactccggggcagaggtggggatcagagaggtgattccttcacaggctgagctggagccaagtcttagaggttgtccagcccggtccattccccgggtccacacaccgcagctcagctggcacgagatgctgttgggcaccgtggcacacgcagagcattgccctttaagggctccgtttggtgacctttgattttcttactcctttatcccattaatgttccccaagaacccctgggtgtggcatcggggcatggctgtgagcaggcagcttcagagcaaggtgggttgtgtgaaggaggtggctggctcagagccaggccttcagctgaggcctggggagaggttagactctgaaggcaggggtgaggaaagacttccaggtagagggaacaggggggacagccagcagcacgcaccatatatgggagggaaggcagtctccagggagacgccgggcaggggtctgcactgcagcctccccacccgacctgaacagctggcgggcagaggctggacgtcaggggtgttcgagacccctgggaccaaatgtgagagtgtgtggaacgggggggttaatatgtggaaatgagaggtgctgggtaaaataaggctgagacctactgggctgcattcccaggagggtagacattctaagtcacaggatgagacaggaggttgacacaagatacaggtcataaaggccttgctgataatggtgtaaagaagctggcccaaaaccaccagaaccaagatggcaatgagagtgacctctggtcatcctcacagctcattactctagttacagtacattagcacactaaaagacactcccaccaacacgatgacagtttataaatgccatggcaaagtcaggaagttaccctat

SEQ ID NO: 19979 - DNA, 853 bp, Artificial sequence
  DNA replication origin
ggggaccgcgccggggcttctccgggaagcgggaaggagggcagcccagcctctgcccagacaggagggacctcccgcgcagaactcacgctgcagccgccgctcctggagctgcgccgccacgtcgcgcgcgtccgccctcttgagggtcttgcgggccacctccagggcaggctccgggccgtagaactgggccagctgctccgcgaggtccacggcgtccgcgcgctccagccgcccccacgggatgctgcgtccgtccgggcccacgtcgcgcagcttgtggcggaagcgcttcagctgctcttggctcagttcctccagcgcagccaggagcagctcgcgggccaccgcgaggcgcggccccgtgctggaggcgggcgggcgcgggtcatcggggagcggccctcgggtgacccccgcccgcccccgactctggcgccggagaacccaccgcgggcagggcctcagggagtcccgggccaagcatcgtctggatccatggggtggcgggagggggcaacggggagtgaccccagacttttccctcccccgtccccggacccgggtcggggcgtcttggtgttcttcgccctctgagggtgaagtgggcactggccgccgctgatctgagctctggggggcaccttcctcccctgcacctccctttctgcttctgtccttccacaccccaggacaggtcacatgccccgagggaggtatttccaaggaaccctgagctctctttcctcgctttccttcttttccctctcttcccgatcccggagcagaactggcctctttggcagcagacactgccaggcccaggctgtattcctgggcccccacccct

SEQ ID NO: 19980 - DNA, 2351 bp, Artificial sequence
  DNA replication origin
ttcgcgctgtgcttcgtgcccttcgtgtgctggatcgtgtgcaccgtgctgcgccagcagctggagctcggtcgggacctgtcgcgcacgtccaagaccaccacgtcagtgtacctgcttttcatcaccagcgttctgagctcggctccggtagccgacgggccccggttgcagggcgacctgcgcaatctgtgccgcctggcccgcgagggcgtcctcggacgcagggcgcagtttgccgagaaggaactggagcaactggagcttcgtggctccaaagtgcagacgctgtttctcagcaaaaaggagctgccgggcgtgctggagacagaggtcacctaccagttcatcgaccagagcttccaggagttcctcgcggcactgtcctacctgctggaggacggcggggtgcccaggaccgcggctggcggcgttgggacactcctgcgtggggacgcccagccgcacagccacttggtgctcaccacgcgcttcctcttcggactgctgagcgcggagcggatgcgcgacatcgagcgccacttcggctgcatggtttcagagcgtgtgaagcaggaggccctgcggtgggtgcagggacagggacagggctgccccggagtggcaccagaggtgaccgagggggccaaagggctcgaggacaccgaagagccagaggaggaggaggagggagaggagcccaactacccactggagttgctgtactgcctgtacgagacgcaggaggacgcgtttgtgcgccaagccctgtgccggttcccggagctggcgctgcagcgagtgcgcttctgccgcatggacgtggctgttctgagctactgcgtgaggtgctgccctgctggacaggcactgcggctgatcagctgcagattggttgctgcgcaggagaagaagaagaagagcctggggaagcggctccaggccagcctgggtggcggcaggtgcgtctccagggcagagatactctcttgtgtgtgaggtgtgtgtgccggtgcaaacctgtgcacctcagtgtccatctggcatggggcgcacctccagaccagaccctggctccccagatggggaggctttgaccacctccttgcaaggcaaccactgaattcctatcttcttccccagggtgtcctcaccatgcccaccgtcagccacccacaacctatgaaaacttcctagtatggccctacagctctggcccagcccttcttcccattttactttctgacaataagctctggaacacacgatgccctctgtccagagcctctgcacttgcccttccctccacctagaatattctgtttgctgcctgtcctgcaagtctgccctggctcccccagctggctggggacccaactggctccagaagtaccctttcgaccaccctgctgtgacatctgccccacacctccaccagaccctcggctcctccagggcaaggcttttgccagagttcctttgaatatagctccaattcagcccctgcccaggggcttggcatctgttgagaggatgaatgtcacggtgttggcaggggctgggcctggggacccaaagacccatgtagaggatgtgggtgataccgtcccactgacctcactcagacaccccagtgggatgatgcctgggccacagatgagtggttttgctctgggtttggttgggggagtgtgaagggggtggctcagcaaggaggtgaggaggaggggcagctctgagaccccaggactacagatagacaggagtcctttccggcaggcactgtgaggagcagggtgggcttcaccttcctctctctcccagcagttctcaaggcaccacaaaacaactgccagcctcccttcttcatccactctttcaggcaatgactgacccactgtgccatctgagcagcctcacgtgagtggccacacccccagctcttcccacggagcgggctgagagcaggatgccctgggcagagacggaagtatgacctaggaaagaaggctgaggggtcagaccagagcctgaggcctgtgggtgctggagatggcaggctctgcccacacagagcagagggaggaggggatgagggtctggggcttcattaccaggttaggtactggtaggaaaaggttggtcctggtgagtggaaagcagctaagcacactgagggagggattaaagaagacaagagtgtattttccttctgaagggaggctgccgttggaaactgctgggttctcagaagcagtggaggaaggtgttcaagcgcaggctccaaggtcaggctgtctgcaaatgctagccggcttctgcgtgcccagtagcaagtccatctgtccgag

SEQ ID NO: 19981 - DNA, 2102 bp, Artificial sequence
  DNA replication origin
aagcaaaaaccgcaattacttttgcaccaacctaatatgattttgccaccacactctggcctgggccacagagagagaccccatcgctaataagtaataaataaatgtgtatctgatacataactacacaccacaatcaataggcctgtgatgtggccgggcgcggtggctcaagcctgtaatcccagcactttgggaggccgaggcgggtggatcacgaggtcaggagttcgagatcatcctggctcacacggtgaaaccccgtctctactaaaaatacaaaaaaattagccgggcgtggtggcgggcgctgtagtcccagctactctggaggctgaggcaggagaatggcacgaacccgggaggtggagcttgcagtgagccaagatcgcgccactgcactccagcctgggcgacagagcgagagtctttctaaaaaaaaaaaaaaaaaaaaaaaaaaggcctatgatgcatcaacaagtaacaatgtaataaagattcagaggcggggcggataaatgctgcggaggaaagttaggcagaaccaggggctggtgggaatggatggagcgcagggtttcctgttgcatgaaacgggggtctgaggaagtctaactgacgactgggcatttgaaaacccgaaggagtgagggggcaagccccaaagaggtcttgagaaaaagggcttcaggcaattatgctgccagagcaagccaggcggggagcttggaaagctccagaagcagcaaggaagccaggtagcgacagcggagtaggggagggggaggagatgaggtcagggaacccaggcaggtgcaggaaggggtttgcgggtggagcttgcgtgcttggaaagctccagaagcagcaaggaagccaggtagccgcagcggagtaggggatggggaggagatgaggtcagggaacccaggcaggtgcaggagggggtttgcgggtggagcttgcgtgcttggaaagttccagaagcagcaaggaagccaggtagccgcagcggagtaggggagggggaggagatgaggtcagggaacccaggaaggtgcaggagggggtttgcgggtggagcttgcgtgcttggaaagttccagaagcagcaaggaagccaggtagccgcagcggagtaggggacggggaggagatgaggtcagggaaccaaggcaggtgcaggagggggtttgcgggtggagcttgcgtgcttggaaagttccagaagcagcaaggaagccaggtagccgcagcggagtaggggagggggaggagatgaggtcagggaacccaggcagttgcaggagggggtttgcgccgggtggagcttgcgtgaggagcgcttttggatcgtcctccgtgagttgggcgccatggctgccttctgggcagagtgcagggcctgccttaaatgttgtgggggttctgttctcaacaaaggcgtaagttgggagcgactgagccactccaggaggaggtgtgggcccacggcgtgttggaggtggagccacaggacctgtccataggttggatgctgtgtgggtgacagagagaaaccggggctcacggcctgggcagcgggacgggcggagtcgtcctcacctgtgctggggaccctgtgggagcagcaggcttccgagcacgtgctggaccccggcgtctccggctgcaccgagtggtcaggacattgaggccgggtcagggagcgtgagataccgggacgagcgggcccagggctgagcccagcggcgtccgggtgggcggtggcgttgagatgggaattgggaattgcaccggtggtctcaggaggatggaaaacccaagcagcagctgcaccaggaccgaggcaaagggaccgcagtttaacagaaaacccaaaacgagagcgagaaaacggccaaacacccgtgcgagtgagacgtccatgagccttcccggcaaaacgcccaataagggagaaggggcaggcgcggcgggggccggggttccctgaagtccccttcgtttccagaatccctaaagatcattccgccccccagggaggaaacccaagctccgccgagcgcggcgggtctgtgccttcgcttcgcttccagcct

SEQ ID NO: 19982 - DNA, 1505 bp, Artificial sequence
  DNA replication origin
cccaccacgtccaagccacattctacccagagctgggcccaggcctgtgcgtgagccgtatacagagctcccctggcctgcagctgcagggcctcagtgaggcaggcctgagcctcagcctggctgccgcccactgctgtcaggaagtcccacgtcctagcctcctcaccttccccaagggtcaggtctgggggtgctggtgtccacagcatgtgtacctcttgctgtggccccccgggctgctcaggggtgagggtgtggccatacaggtacctgtgagagcgtggccatgcctcagggatgagctccctccctggactccctggctgcaaatccagccccctccttaccgggctccctggaagtcaggaccctgatgcaggtccaggtctgggctttctggggagaaggctgaccgcaggagcagcgtgatgggcccgctccccggggccaggcgggcgatggacactcggaaagccagcacgtggggcagcgtgcgatgcgcatagatgcactgggaggcccggaagcgggggccctccagggtgtgaagaaaggagcctggggaggcagaagcgaaggcaggtgggttgccaagctatggcctctctggggcaggagtggaccacccgaccgctgcctctccccacaatgaggcggatccctctgggccctcggctgctcgttcccgctacagctgcacaggaggcctccaggtggagggaaggggggaccctgcgggcctctggggcctcctgtcttagtgagacttcctgtgtaaactcaggaggtgctggtgggattcgatgctgtggttgccccaccgacctggaacaatgcctggggcaggggtgaggcaggccaggtggcgctacctgtgttggtgtccagggcgaaggtctcggtcagctgctcccccatccctgcaggggcctccagccggacgttgagggggctgggcagcatggcccggtgcgtgtccccgccagccccattgtacacgccgctcacgtgcagcgtgtcgtgaaacactcgtgtgcccaggtatgcgttggtcacagtggccaagagacgggggtcactgggcagagagtgggcagcaaacgtggtggggtcctcgccggcgtcctccatggagctgctgggcctgagcggcctgatggggtgtcaggggccgcgggactggctgggcctccctcttgagaccgtctgtaatcccctgaagcctccctcagaactggggggagttgcggaaccagctgggcagccccgattttcctgaggcccctcctagacggggcctcgcaggaaaggagctcgactctcagaggggctcagaccccaaaggttgatctccaggaacccagctgagcccctgagtgtgtctctccctcctgctaccttagaattccagtcctaaccctgctttccaaacgcaccccccacaaccccggtcttgcccccaccctctgtggtcgggacctgcgtctgttggtggcacgtgg

SEQ ID NO: 19983 - DNA, 1220 bp, Artificial sequence
  DNA replication origin
ccgagtgtccatcgcccgcctggccccggggagcgggcccatcacgctgctcctgcggtcagccttctccccagaaagcccagacctggacctgcatcagggtcctgacttccagggagcccggtaaggagggggctggatttgcagccagggagtccagggagggagctcatccctgaggcatggccacgctctcacaggtacctgtatggccacaccctcacccctgagcagcccggggggccacagcaagaggtacacatgctgtggacaccagcacccccagacctgacccttggggaaggtgaggaggctaggacgtgggacttcctgacagcagtgggcggcagccaggctgaggctcaggcctgcctcactgaggccctgcagctgcaggccaggggagctctgtatacggctcacgcacaggcctgggcccagctctgggtagaatgtggcttggacgtggtggggcccctgcagctgcgccaggccctgcgtggctccctctactacctgctcagtgccctgccccagcccaaggccccaggatacatctgccatggcctcagtcctgggggcctctccaatgggagccgtgaggaatgctactggggccacgtcttctgggaccaggtgagcactgtacacccagcaccagccacacagcaggcgacacatggaggtccacggtctctgccctccctgggaccagggctatggttggggaagcacagggactgtggcaaaagggaagaggcctggaaggtgtgcaggagtttggtagaggagtgatctaggtgaggggaatggaaggtgcagagaccagagctgagagggcctgaggcactttccagagcgtggggaggggcctccaccaaggcgagaagggctgcaggtccagatcaccagcgtttgtagacagtagtgtggcgcttggagtttacctgagggccagtggagctccagggacctatcaggacggggacctgtggggactgggaaggcctgtggggctgcgtggagcccggtactggaggccgacgggggtgacggggacgctgagggcacagagcggaggggcatgatggctgctgggcgtggaggtgtcgagagtgactgtgctggggctgctccatcgttgtctgagcctcccggtgctgccgctgtggccgtttctttgatgaggctctcagaggccgagtcattcactgccagcc

SEQ ID NO: 19984 - DNA, 959 bp, Artificial sequence
  DNA replication origin
taggaactccacagccccagggtgctcacccaggtcatggcggggccctggggggacgtcacagcctcgtaaatctccagatttttcctgcgaacatcaggactcagggagaaggggactgggtatcccaggagcacgacgtctgcctgcttcaccacctctcctacagggaggtgccgctgactggaaggtgttccaggacagactcgagggtctcgacggcaggggaggagcccttgaaggggtccactcaccaggctcatacccatcgaactccgggtggaagttctgctccacgtcaaagggtaccttgatcttgtcagccaccgccagccactggctggggatgggaagacccaggtcctgggccagggcagcagcaaagcgcaggctggaggtggaggtaggtgggggaggctgcaacccctacacttccagctgctgcctgcctagtgggggcaccggggcaggtctccagctggggcgggggtggggtgaggtgaggggatcttgtgtctgacctgttctggaccaggacgttggtgtacacagagttgttgacccctgaatggtactcgtcgggggacatgactcctggacacacaagtccaagatggtgctcagtgcagagtctcagaggccttccctccacgccggtggtcagcgtggggctggcacacgtgaggtgtctgaaaatcatctgctgagtctgggagcatccacccttcctccccgagcccctccccaccatggcctcacccctcaggtggtacttttcctccctggggctccactcaacacgactgcaccaaaactcggccacagccctgaccacgtcccagccaccagcctctcgaaatagctgcaggtcctggggagcaggaggaggcacagaggccagggccccagtcactctcattcctagtggcctgtctgtgcccagaagcaaggcctggcat

SEQ ID NO: 19985 - DNA, 1205 bp, Artificial sequence
  DNA replication origin
aaatacaaaaacaaaacaaacaaacgaaaaccaaaactcatctgatgagaatttaccatttgtaggtaaattccccagacccctttgataggaacttgggcaagataaaaaagtcagagtttagtcctcacgagtaaggtgtacattgcttctgccaggaaaggcaagacatctcaaaggggtgtggtcacaggtcacagtgataccagtgggcttggggaggtccccaattgccagtgggacctggacccccacgggtgtccaggctcttggcacaagaagaaaattcaaggacgagaccgaaaatagtgaaagtagggagatttgttgaaaagtgaaggccaggcgcggtggctcgcgcctgtaatcccagcactttgggaggctgaggcgggtgtatcacctgaggtcaggagttcgagatcagcctggccaacatggcgaaaccctgtctctactaaaaatgcaaaaattagccgggcgcggtggtgcgtgcctgtgatcccagctaatcgggaggctgaggcaggagaatcacttgaaccgggtaggcagaagttgcagtgagatgagatcgcgccactgcactccagtctgggcgacagagcgaggctccctctcaaaaaaaaaagaaagaaagaaaaaaaagagaagtgaaaagtacacactcaagaaagggccgtgtgggcggagactcgagagagtcacttgcaaggggtttgggtgggggttccatctttcagggtttctttcaccaagcgggggagtatcatgaagattcttgcaagaaggtgacgatttctcagaactgaggtgccttgcattttttttttcaagacaacatagagggtctttattggatagcagctgagagaccatgcctcagtcctcttgagggacgcctttccccccggcgtaccacttctttcccacgtttcccttctctgcaggctacagcttgatgcaaaagaaagggatcgtcctacaggtccttatacacaacctttgagggcacagtttggaggtggagtggcagaggacatttgtaaaagtgggacagcaaagtttcactgtagcccacgaggaagtagaacttgcgggcaggcaagtgcctcgggaccagggcacagatctccaaccggttggcccagcactgtaaaaccagcgggtcagccaggcagcccgggaaggcaccccacatgaac

SEQ ID NO: 19986 - DNA, 992 bp, Artificial sequence
  DNA replication origin
cagtttggaggtggagtggcagaggacatttgtaaaagtgggacagcaaagtttcactgtagcccacgaggaagtagaacttgcgggcaggcaagtgcctcgggaccagggcacagatctccaaccggttggcccagcactgtaaaaccagcgggtcagccaggcagcccgggaaggcaccccacatgaacttgcgacggaaagcatcctccaccgttcgctccgccgcatggtcctccccaccagggttccccgcgtgagcgacctctggccctcacggcgggcgacgaagtgcggcgcgtgtgcgtcctcataggtcaccggcttgtccccctggcctcggcggactcgggccgccggttcttgttacagaccgcggaggtgtgcggggcccgccccgcgcaaggcagctctcggccccgggacggcacccggggccacccgccacccgccacccgccgcacgcggaggccgccatcttggccgagcgcccgccatgtttacagcagatctgtgtgttcctggaagtgtcgcggtgcgggtgggtgtgggccgagtacgttcctatgaggaggtcctaggggacgcataggtcgcattcagcgccgtggtggctctggtctgtcttagccagcttggcccacactgcttttgaaggtctcatcggcccctcgcttctgcagcaacctcaacagtctcttttgctagtcatgcgaggctgctgcttagaatgttctgttctcccgcagccgctccatattattctgtctcattttgtggatttaaagattttctgatgggcagctggcttaaagagttcagctttggggccgggcgcggtggctcccgcctgtaatcccagcactttgggaggccgaggtgggtggagcacgaggtcaggagatcgagaccatcctggctaacacggtgaaaccccgtctctactaaaaatacaaaaaattagcaggacttggtggcgggcgcctgtagtc

SEQ ID NO: 19987 - DNA, 975 bp, Artificial sequence
  DNA replication origin
gggcgctgtaaccaggtcggggcgggggtgtctgtccgggggctcagacccgggtagaggtaacttagatgagggtcgctccactctcctgcgccgcccccaccacgggggagcagggcccatacccgctggacgggagggggcagctgccacgaagcagcacctggtcacccaggaggggctgcgaggcccggggctccttcagctgctgccctgggcacaaagccccctccctcccacgggccctgagctgcccacatctgcaggactggctgctccagacagctcggaggcaggcagcgcggtgccccctccacccccgaggaactaaagccaggtccccagcaccacagagcagggcctgggagcagctggggagccggtgccaccttgcccctccctggccctgctgggggcttaacccttccctctgtcctgagccgacagcctggattgccgacaggccgcgagcgtggccttgggcccagggtgtcccggactcagcactgacgttcccggaaagagcccacgttgagtaggagctgagacctgcaggacacaggaactcctcccagggtcctggatccagctgctgctcacggcaggaggcccgaaaccagaaggcctgagcacttgccccgtccccaagagatgcacagaggctggaaggggcagtgcaggggctgaccaacctgctcatgaaaggagggtccagctgggcttcctgggtcgagtaggggttcagaaagctgtgaaacactcatttcctgcatcaggacttacttcggtcctggatgaagagtactgaagatacatgcctaaaatattcctaacaccaggatttgtgcatgtgtttccttccccaagaaagctataaacagcaaaaattctgctgtaagcttccctgtgtcctctctccctctcttccttccccctcccctaaaactaaaaggaatgttaaaagaccctttttct

SEQ ID NO: 19988 - DNA, 1257 bp, Artificial sequence
  DNA replication origin
ccagccccggagccgcgctctcaccccaggggcggcaagggcgatggacgcggaggaagcgccctctccccctcgggggtctcccggaggcgagtcccgaagggggcgaactccgaagtgggtcccgggtgggaggcgcgcggccccgcccggcggggagggggaagcggcggaggcgggtgctcagcggcgcccctggcggcggccggcgcaggtgcaggtcccggaggaggctccgcccgcagcccagacccccgcggggtgggcgggacgcggaccctgagacccgcagcgccggacccggacgggagcccctctcctccccctcgggcacgtccccggccgagccttcccgccctcctctggggctcccacctccccttcacccgcgggggacccgatttccgcgtctcctgggcccctccctgggcagggggtccagccggaatccaggagtgacctgctggaggacttggtggccagggagtcaccctgggagcccggtcctgtgaccccttaatggattctctgcgctcctgggcgggccccttggtcgcatcggggcaggggaatcgcaataaggaaagtgtaattcacgcagagccggctgcgggggagacgggagttttattattactcaaatccttctccccaaaaacgtggggatccgagtttcgaaggatgatatggtgggtaggcggccagtgagtcaggagcgctgaccggtccggttggagatgaagtcttggggagtcgaagctgtcttcccaaccctaacccagctcctcggtgggggccacaggaccacatgagcaagattgtggatttaggtggtgccagctgatccattgagtacagggtctgtaaagtatctcaaactctgatcctaggttctacagtagtgctgtgatccccgggagcaatttaggggtggcggggtcagaatcttgcatcctccagccgcgtgactcctaaaccataatttctaatcttgtggctaatttgttagtcctgcaaaggcagtctggtcctcaggtaggaagggggcttgttcagccttgatctataaactgtttctctccagattagtttaggctaagcccagggatgagcaagggcagcttggaggttagaagccaggcggagtgggttagggtcagacctccttcactgtcatcatattctcagttatgacttttgcaaaggtggtttcagttccatgcctgcccctcagaatcctgtctccctcttgtgccc

SEQ ID NO: 19989 - DNA, 1446 bp, Artificial sequence
  DNA replication origin
cagcgagacctccgtgcccgaccatgtcgtctggtccctgttcaacaccctcttcttgaactggtgctgtctgggcttcatagcattcgcctactccgtgaaggtgcgtatggccctggcggaaatccagggggtgccggtgagcctggggctccacctgcccacatgctgcctggggtggggacttgtgtgtccctgtgactgtgagtttgtgtgcacctctgccccgtgtgtgctcacgtcagtagctttgtctgtgtgatctgtgtgtgtgtgtggctttggggaatctgcccagtgcaggtctaggaggaggctccaggaggctggctggctggctcagagtctgtccctggctatccattagcccagagcaattctccctatagcccagtaagaaattacaccctcaccttccagactggcacccaggctctcccagaaagtgagaagggaactcacaggtgacttcaccccatggtggggagaacagcctgtgctggggccaaggcagaaggaggatgagccccgaggctcctggagagtctgagcccgggtgaggaaggggaggaggtggtccctgatctcagggcggggaggagacggagccatagcacgcggctctcagctgggggatcctggtcccctcaccatctcctctcccccagtctagggacaggaagatggttggcgacgtgaccggggcccaggcctatgcctccaccgccaagtgcctgaacatctgggccctgattctgggcatcctcatgaccattggattcatcctgttactggtattcggctctgtgacagtctaccatattatgttacagataatacaggaaaaacggggttactagtagccgcccatagcctgcaacctttgcactccactgtgcaatgctggccctgcacgctggggctgttgcccctgcccccttggtcctgcccctagatacagcagtttatacccacacacctgtctacagtgtcattcaataaagtgcacgtgcttgtgatgatgctgtgacttcatctggagtgggggccctgctgaggggtcccggcctagtcctgagacagcccagtgctcagcccctgcacagccgtatccctcctctgtgaagctctcaggggagcagggatatgctcagaatctgctggtttccgcctcctgctgtgggcagcatctggaccaggaacgtggggtgggcatttctctgacaccaaggtaaggacacactgtccagaatacctttgggccaggacaacctgcctctgagctggctgggcagctggtcttgcagatgtgtgcaccttaggccctgtgggaggggcaggggctttgttcctagggtagcagctgaaggaacctcagggctgcagcctctcctgggtgatccaggtgtgctggatcctagcagctgcctcctccagtccagccgg

SEQ ID NO: 19990 - DNA, 1193 bp, Artificial sequence
  DNA replication origin
ccctctccccctcgggggtctcccggaggcgagtcccgaagggggcgaactccgaagtgggtcccgggtgggaggcgcgcggccccgcccggcggggagggggaagcggcggaggcgggtgctcagcggcgcccctggcggcggccggcgcaggtgcaggtcccggaggaggctccgcccgcagcccagacccccgcggggtgggcgggacgcggaccctgagacccgcagcgccggacccggacgggagcccctctcctccccctcgggcacgtccccggccgagccttcccgccctcctctggggctcccacctccccttcacccgcgggggacccgatttccgcgtctcctgggcccctccctgggcagggggtccagccggaatccaggagtgacctgctggaggacttggtggccagggagtcaccctgggagcccggtcctgtgaccccttaatggtttctctgcgctcctgggcgggccccttggtcgcatcggggcaggggaatcgcaataaggaaagtgtaattcacgcagagccggctgcgggggagacgggagttttattattactcaaatccttctccccaaaaacgtggggatccgagtttcgaaggatgatatggtgggtaggcggccagtgagtcaggagcgctgaccggtccggttggagatgaagtcttggggagtcgaagctgtcttcccaaccctaacccagctcctcggtgggggccacaggaccacatgagcaagattgtggataaacctgaccacgtttcaggtttttttctatctactgggagactgcctttccttggcgctggttgctaccaattattattttagagaaacagtgcaacaaccacctgaccatcacctgaggggtcgcctgacattcctggttgtgggtgggaagcgctctcctgtcctgctcaagccggaggagctacctgctgtaacagtatcagtgagaagaattattataactgtgagctgagctagcccacccacaatcttgcctttcctttaattattcctggtttttggggccaagctgactttgagagacatttaggctatagtttaaatgacaacaggccttgtgtgaaactcagcagctcatcatgattgaggactaaactctgattttttatcttgcccaaattcctacctaaggggcttggggagtc

SEQ ID NO: 19991 - DNA, 1784 bp, Artificial sequence
  DNA replication origin
cgggtgaaggggaggtgggagccccagaggagggcgggaaggctcggccggggacgtgcccgagggggaggagaggggctcccgtccgggtccggcgctgcgggtctcagggtccgcgtcccgcccaccccgcgggggtctgggctgcgggcggagcctcctccgggacctgcacctgcgccggccgccgccaggggcgccgctgagcacccgcctccgccgcttccccctccccgccgggcggggccgcgcgcctcccacccgggacccacttcggagttcgcccccttcgggactcgcctccgggagacccccgagggggagagggcgcttcctccgcgtccatcgcccttgccgcccctggggtgagagcgcggctccggggctgggggcgggaaagggtggggagggcgagtagatccagacctggagtcgcgggtggacggcggggcgggggcgcgcatggccaccccagctcccaccgcggccgcccatggggcaccccacatgcgcacaccggagaccgaaccggggaagggcgctgtaaccaggtcggggcgggggtgtctgtccgggggctcagacccgggtagaggtaacttcgatgagggtcgctccactctcctgcgccgcccccaccacgggggagcagggcccatacccgctggacgggagggggcagctgccacgaagcagcacctggtcacccaggaggggctgcgaggcccggggctccttcagctgctgccctgggcacaaagccccctccctcccacgggccctgagctgcccacatctgcaggactggctgctccagacagctcggaggcaggcagcgcggtgccccctccaccccgaggaactaaagccaggtccccagcaccacagagcagggcctgggagcagctggggagccggtgccaccttgcccctccctggccctgctgggggcttaacccttccctctgtcctgagccgacagcctggattgccgacaggccgcgagcgtggccttgggcccagggtgtcccggactcagcactgacgttcccggaaagagcccacgttgagtaggagctgagacctgcaggacacaggaactcctcccagggtcctggatccagctgctgctcacggcaggaggcccgaaaccagaaggcctgagcacttgcccggtccccaagagatgcacagaggccggaaggggcagtgcaggggctgaccaacctgctcagtctcagaaccacgctccgaaccctcagccagacccctccccaggtgaagtcgcagcagcaccagaaacacgtgcactttattgaatgccattgtagaaaagcgtgtgaggataaagggctgatacaggactcggctccgggggcagggcgaggaatggaagttggagtacgtgggatacaggtcatgggcagagctcctggcctcagtgatgcctcctgatctatccataggcctggaagatcagcactgggatgacgatgagcagaatggtcatgaggatgcccagaatcagggcccagatgttcaggcacttggcggtggaggcataggcctgggccccggtcacgtcgccaaccatcttcctgtccctagactgggggagaggagatggtgaggggaccaggatcccccagctgagagccgcgtgctatggctccgtctcctcattggctctccccgccctgagatcagggaccacctcctccccttcctcacccgggctcagactctccaggagcctcggggctcatcctccttctgccttgacc

SEQ ID NO: 19992 - DNA, 985 bp, Artificial sequence
  DNA replication origin
acggggcggggcgctcctccgcgtgctgcgtgtctgggggcccgaaacgcagacccgcccccccaccgttggaacgagcccccccaccgttggaacgcgccgccccccccttcccccgctccaggcggctccctggagagcagctgggaaacgccccacccccatccattcctggccgcgctttcagggctgttttcctcgggctgggaaacgccccgccccgttccattcccggccgtcggttcgggaatgttttcctggcgcacagccctgggaggcctcccgggcgccgagggcagcgctggtcaccgtcccgcgtggcagccagtgtctgggggcagagtgtccaggaagctgcgcccccgggctcgtgtcctgccgccactcactgcgtggcacgggtccccgggcccctccaggccttctgcgggagctggggcttgggaagccgccgcagaagcggttcccttggccacctccctgcctgagaagtcaaccgtccttgcctctgacccaggggctctgtcttctgttggcctccggggatctgtggccggttcaccccctagctggcgaagctaggcgtttgaaccagagcaattccatcttgattgggagctgggtaaaatgaggctgaaatccactgggcagcatttccagacggtgggagctcagaccctgcccgtttgtgcacaggaagcacccaccgggctcctgaagtccacgcgagctcccttccctgagctccaggccaagcttggagttccctccgccccttagacctcaggccgactcggcttccagaatgccatcctccctggactgcagttaaattaacttcctgtgttctgagccatctgttcccttcctaccctgttttccaccccaaattgttcttaaccccattattcagggcatgtgatagtgtgggcggaggattacccaggtgcggaggcaaaagactgaaggcacatggcgggcgcct

SEQ ID NO: 19993 - DNA, 2145 bp, Artificial sequence
  DNA replication origin
acagctcagaagaggccgggtgtgttggcggggtgcccctgctgagattcgcctgctctttttgtcatgaggaggctggggttataggtttcttggaagaagattccagaggtaaagcagcatctgcatccatcctaacatcgccggtgcgactcataactcgacgcctgcctcgtcttctgcagagacagagcccgtcaggctcctctgtgcaaaccacgatggatcagctccatcggtttctgcaggtggagccgcgcggaaggagcccagcccttcccaccccgcgctctctggaaggacggccctgcgccagcccacgtcgaggggctgggaggggctctgctcctccttaggggcagtgtctacgccattggtttagaattcttctgcacgggagatttgtctcttctcccccatttataaatttatatcgccatgcacttgtaggtatttacagcacactttgggttaggatgtagaatgaggtgttgctcaaattgtgggagttcactcagttggaccctgggtccacgggcatatttacattgtgtgtgtatgcgtgtgcatgtgtatgtgtatacgtgtgtatgtgtacgtgtgtgtgcatgtgtatgtgtttagtgtgtgtatgtgtatgtggtgtatatgtgggtatatgtgtgtatgcatggtgtgtgtgtatgtgcgtggtgcctgtgtgtacgttgtatgtgtggtgtgtatgtgcatttgtgagcatggtgcatatctgtgatgtgtatgtgtatgttgtctgtatgtgtgtgcatggtgcatgtgtgtgtggtatatgtgtatatgtgtggtgtatatgtgtggtgtgcgtgtgtgtatgtgtttgtggtgtgtgtatgttgtgtgtggtgtgggtgtatgtatggtgtgtgtgtgtaaaagtgtgtatgtatgcgtgtttgtggtgtgtgcattgtgtgtgtttatggtgtgtatgtgtgtgttgtgtgcatgttgtgtgtttgtggtatgtgtgtgttgtgtgtatgtgtatggtgtgtgtgtgtatgtatgtttgtggtgtgtatgtacatggtgcctttgtgtgtggtgtgtgtatatgtatgtgcatggtgcacatatgtgtgtttgtggtgtgtgtacatgcatggtgcctctgtgtgtggtgtgtgtagtctgtgtgtatatgtgtgtgcatggtgcatgtgtgtgtgtatgtatgtgtgctgtgtatgtgtgtgatgtatgtatgtgtgtggtgtgtttgtggtgtgtgtatgtgtgtggtatgtatagtgtgtgtgtaaaagtgtatctatgtatgcatgtttgtggtgtgtatgtatgtgttgtgtgtgtatgtgcatggtgcttgtgtgtgagtgtatgtgtgtatgtatgtggtgtgtatgtgcatggtgcctgtgtgtgagtgtatatgtgtatgtatgtttgtggtgtgtgtgtacattcatggtgcccgtgtgtgtggtatgtgtgtatatgtgtgtgcatggtatgtgtgtgtatgtgtgtatgtatgtgtgctgtgtatgtgtgtgatgtgtgtggtgtgtttgtggtgtgtgtgttgtgatgtgtatgtgtgtatgtgcatggtgcatgtgtgtatgtgtgtgtgctgtgtgtatgtgtgtggtgtgtatgtatgtgcactgtgcctgtgtatgtgtgtgtgacatatgtatgtatgtggtggctgtatatgtgtgtgcatggtgcgtgtgtgtgtggtgtgtatgtgcatggtgcatgtgtatatgtgtggggtgtgtccgtgcatgatgcatgtatgtgcgtggtgtgtatatgtgtgtgcatggtgcatgcgtgtgtatgtatgtttgtggtgtgtatgtgtgtgcatggtgcatgtgtttgtggtgtgtgtgcatgttgcatgtgtgtatgtgtgtcacgtgtgtatgtggtttgtgtatatttgtgtgcacggtgcttgtgtggtgtgtgtgtatgtccatggtgtgtgtgtgatgtgtgtatgtgtgtggtgtgtgtatgtatgtgcatggtatgtgtgtgacatgtatatatgtggtgtgtgtatatgtgtgtgcatggtacgtgtgtgtggggtgtgtatgtgcatggtgtgtgtgccccgcc

SEQ ID NO: 19994 - DNA, 2024 bp, Artificial sequence
  DNA replication origin
ctggtgaaatcccatctctaccaaaaacacaaaaattagccgggtgtggtggcgggcacctgtactcccagctgctcaggaggctgaggcaggagaatcgcttgaacccaggaggcggagcttgcagtgagccgagatcactctaccgcactccggcctgggcgacagagcgagactccctctcaaaaaaaaaaaaaaaaaaagcgaaactgactgtgttgtcatgccccctcctccctaattgtgaaaggcacaattaggtgttgcagtgggccctggaaatggggtctctgccggccccagcatggcaggactggggtggcacctcatgtctacagacaggaggtgtggcccaggcgggatcagcatggctccacctgcagaagcccttggagctggctgagccatcaaggcacccctaggcatgggggctgcctgctgaagcctcacttgatctgtgtcatcagaaaaactctaggtgtggtggatagaagtgagtcagtcagctcagtctgccattacaaaacaccacagaacagaaatgtattttctcacctttctggctgctggaagcctgagatcagggtgccagcgtggtcaggttcagaagctccaactcactgtgtcctcccagggcctttcctcagcacgtgcatgtcaggggagagacagacagaaagagagagagaaagagacagagggagagagagatgggggagagacagagacaggacagagagatgggggagagatagagacagagagggagagcgagagaaacggagagagagatgggggagagacagagagagggagagagagatgggggagagatagagacagagagggagagagatagagggagagagatgggggagagatagagacagagagggagagagacagagggagagagatgggggagagatagagacagagagggaaagagagagaaacggagagagagagacagagggagagagagatgggggagagacagagagagggagagagagatgggggagagatagagacagagagggagagagacagagggagagagatgggggagagatagagacagagagggagagagagagaaacggagagagagagacagagggagagagagatgggggagagacagagaggagagaaagagatgggggagagacagagacaggagagagagatgggggagagatagggagagagagatagagggagagagataggggagagacagacagggagagagacatgagggagagagagacagagagagatggggagagacagagagggagagggagatgaggagagacagagacagggagatagatggaggacagagggagagagagacatggggagagagagagaatttgtggggagacagtgcatgagctctggactcccctgttatcagggcatcaaccccatcctgggggcccagcctcaggacttcatctgaccctaatcacctcccaagggccccctccaaatgccgtcacacaggcttagggcttcaacatacagatttgttcagtccacagcaagaagcctgggttcctcacaacagagctgtggcccctctgccagtttccattctgagccagtccacggagccaggccctgaggaaggacccaatgacattgccgaggattttactgtaaatctccttcctggacttcccatgggcccctaagaaccacgcaccagatggctatgaagggaacgagagatacagacttttcagggacctggctgtgcacggacgttaattccacggtggtatctgcctggcaaagcaggggcttgtggccgtcaggtgatccgtgagttctagctcagatctgtctctcggcgaggccagtgacctgctctctggttttggaatgcatcagtggcacagacatcctcagaatcctacattggtccctgacccatggggtgaggggtctcatgttggaaaaggccagatggaggccatagagctgcctctacccaggaaaacagtcaa

SEQ ID NO: 19995 - DNA, 1305 bp, Artificial sequence
  DNA replication origin
cggggcggggcgcggggtgcggggcggaggaggcggggcgaggggaggcggggcggggcggggggtgcggagggtgcggggcggggggtgaggggtgcgggacggacagggatgcggggcgcggggcgcgcgtccacctgggccacggagcgcgggggcgcggcacacagacgcggggctgggaagcgctggggctcggggaccgtggggggcggcgggggatgggcacagcctgactgtggggcggggcggcctcccgagaacagtgacccgaaggactgcaggcggacaacacggaggagggaggggagggacccggggtcctggggggcggggaatgggggcgggcgagagaggccggggggcgggggggcccaagcaccggcttcagcccaggggtgggagtcgttgcgggatctcagcctgcagggctggggccgcagggggccgagctgtctgggcggcaggaggggcctcagctggtggcccccgccccaccgagcgcggcctgaggcaggtgacagtgtcgtgcctctcaccgggaccttgtcccacttcgtgccctttctcacctggtctgcaccaacccctgccagtccctctgtccccccagtacttcccttgtccagctgccagcgtgaccctactcttctccctctgtctgctcagctgtctctgggtgtgtagcaaaccgcccagcttcagtgctgtccaacagcagcgttcctgtgttcctgtgtcctgtgggtcaggaactcagggcactcggggacagctcctctctgctcctcgaggtgctggcctccggtgggaagacgtgagtggtggggccggctccgcgggacaggctggagccatccagagacttctgccccaagccagtgcaccctcggcaggaatggctgggctcaccccgggtggttggccagagcgcctgcaggctcagctgccaggggcagcctcccggtccagcacacagagtgaagcatcttggagtcacccctcaggtttgccacatgccgcacggccacccaagttcgtgggttgtggggacgtggaccccacctcacaatggaagattgcccagaagttgccttcttaagacctcaactccttccctccttcccctccatcctcctcccctaacttctgagcacagaagcaagctggttacatcctgctgttcataccggcccttaaacaacacccggtctctcaaaccttcccccaccccatcagctcctcatctcctgcctcctgcagtccacttttcatatttctgttatctgcatattcattaaaata

SEQ ID NO: 19996 - DNA, 1396 bp, Artificial sequence
  DNA replication origin
tgtagtctctcctgaaggatttgagctctcaaagtctggactgaggaacaggcatggatgctgacgcccaggcatggccctggagcagagggtggccctggattgagtgtccttgggtaggaggaccaggaggggcagaattggggtgaagagaagcatccctacagatgctcagatcccagggcgtggaaccccctggggctgcagtggggatgtctaggtcctcagcttagggaggtccaggaagtggagagggctggggtgcagagctggcctgcccaggcttgtggggaggcagtagagatgtccacaggcagatctgggaagggtcccccagggctcccctgacttgggccccaggtcccccgacagaacagtctgctcactcgccctctccctgggcagctgttgggctcctctggtcctggccctagcctcagaggtagcaagtgtacaggtgccctggggcggagctggcttagcctcaaggggtccttggaagaggggtccctatgcctccgccccctcctggttgggcttagacccctgcgctgctcagaaaaccacagaggagcctgcagagggggctggttttgttctgtgtcactgggccagctgtggatcctgccctgtctgctgatagctggggtggggctttttagggattcagcagtatcgggggtctcttgagggtgtggaagctgtgaggtatgtgggttgggacaagccccagacccttggcctgtgtgggtccaggcgtcccggtacaggaagagaacacaggggctttggcaggtggagtggcccaggagtccccagccagtatcattgttctgccccctcaggacacctggctccctggaaaaggctcagaggcagccagctggggtctctcctggtctgggcatggcactaacctccctcctccagagggggcattctgccccaccttctcccccaaccccaccgccaggctttcatctgcgccttcctgtctggaatgctctttcccccaaaggtgtatgtcaaagatcaccatctccaggaggccctaccccggctggctcaccgtgaccccatctgctttgtttgtgggttggggttgggagagtttacgccaggctccccaagctgggccccatccctacgcatggacccccacaacactggcacagttcaccgaaggcgcccccgccgggaagcgtcccagctgcaccggccacttcagcaagccccggcccgggtccccagcacacagggaaactgaggccctgctaagcgggcagggggtggaggcgaggcctgagaaggcctcttggaagcctcagcagggtctaggggcagagacttccccaggagcccaccgtcagcccctcactaccggatccaagccaga

SEQ ID NO: 19997 - DNA, 894 bp, Artificial sequence
  DNA replication origin
gcgtggaccccccggccgtcggtctcactggtcagcttctcaccatctgcaggtggcacatgaggcctgtctcgggcccaggctctctccaaggccattctgcctgctgctgggttcagctgggccagggacccacatggccagagcagggcaggcaggctgtggtgtctctcactaaagcctctccttctcatctgcttcctctgccaccagatgcccctccccccagcaaggcaacttcttctacaccccacctctggtggggcagcccaggctgagccttccagcaggctcttcccaacctccagcaggtgtgagggaggaaagccgggtgggccagctggcgtgtgtaggcacccacatgcacctccatctggccattcttgttgagtggctctgcctccaggaagaccccaggactgccctgtgccctcagcactttctctgtgtgctggagtgttccacgtctgcctcccttaccagaactgagaactcagggttagtgccagggactgtagtctctcctgaaggatttgagctctcaaagtctggactgaggaacaggcatggatgctgacgcccaggcatggccctggagcagagggtggccctggattgagtgtccttgggtaggaggaccaggaggggcagaattggggtgaagagaagcatccctacagatgctcagatcccagggcgtggaaccccctggggctgcagtggggatgtctaggtcctcagcttagggaggtccaggaagtggagagggctggggtgcagagctggcctgcccaggcttgtggggaggcagtagagatgtccacaggcagatctgggaagggtcccccagggctcccctgacttgggccccaggtcccccgacagaacagtctg

SEQ ID NO: 19998 - DNA, 914 bp, Artificial sequence
  DNA replication origin
cacacctgctggaggttgggaagagcctgctggaaggctcagcctgggctgccccaccagaggtggggtgtagaagaagttgccttgctggggggaggggcatctggtggcagaggaagcagatgagaaggagaggctttagtgagagacaccacagcctgcctgccctgctctggccatgtgggtccctggcccagctgaacccagcagcaggcagaatggccttggagagagcctgggcccgagacaggcctcatgtgccacctgcagatggtgagaagctgaccagtgagaccgacggccggggggtccacgctgcgccatccacacagagggctgaggactccagtgagagccgtgaagaggagcaagcggtgagcagagccctggggagaacacgtgtgcacggagacgagaccccgaagccacttgtgtgttggtgtcttgagaacctgtccattctggaggacgcagcagggggcatgagacacaggacatgtggggcacggcacagcttgtctgtgtgagctccagcaccagccatcctgtctggagctctgtgtctgggggctgcagcaggtgcatgaatgtgccggccggtcagtgtgtggggtggccaagcatctgcttgggctagagtgaccagggtgtctgagtgtatgtgccaggtgccacaggtcagggtttgcatggctggggctcacgggcatttagggctgtgtggatacatgttggaaggggtctttgtgaaggtttgtcttggtgtgtgtgacctcctccctgcccttccaaccctgaccctgttgccttttctctcctgcagcccgaaggtcgggacctagacatgctgtttcctgggggggctgggaggctgccactgaacttcacccatcagacacccccatggcgggagg

SEQ ID NO: 19999 - DNA, 1046 bp, Artificial sequence
  DNA replication origin
ccaagttcagctcccaggtgtccaagcccaggcggtgagtgactgtggggtgcatgtgcgtgcacttgtgtattcgtgggagggggttacgcgctgtctccttatcctgtgcacacttgcgcacactctgcacgagcacccgcccggccaagctgccatcctcctgagggccagccctgaggggtgtgggagccacctgcccccttccctgcctccactatttgagcgtcctgtgcatggcacgacccttgctcctcgtgtccccaggctcatggcctcccggaggtactactttgagttgctgcacaagcaggacgaccgcggctcggaccacgtggaagtgggcgtgagtgccttcctcccctgggggcttctggagactccactccccccacctccctgcaggacaaccgcaatggggtccccgtcccaaagttgacaaagcagatggtcagggccatgggcctgaggtcaggagggtctgctctgccctcctggggggctcggtgaggcttcactaggagtcacctttgagtagagtcttgagaggatggagaccttcagtagggagatgtggggggcagagaatttggggtggggtgtacggcggatgaattccacaccacaagaacagcgaaggaacagacccagcagaggaaccgggtcttcgagactaggaggggtctggtggccagatcaggcggggcctgagcagcactctggacagataggcctttgtcctgagaatgaggccattggatttgcattccaggaaaaaacccctggccacaaagcggagagagcctgggggaaggatttttactgtggcctttggtcctcaaacccagggaggtggctgtggggatggacgggggaaggcggaaggggttatacagcaaggcagagggcctgcagcctggtgggtgtggggggcagcacgatggtgcctgtgtctggtgtgtggagggcacgtttcaccccagctcagctgggcagagggcccagactggagacaggggtttggggtggtctgtggaggccccagg

SEQ ID NO: 20000 - DNA, 1289 bp, Artificial sequence
  DNA replication origin
gggagggaggaggaagggagggaggaggaagggagggaggaggaagggagggaggaggaagggagggagggaggaggaagggagggagggaggaggaagggagggagggaggaggaagggagggagggaggaggaagggagggaggaggaagggagggagggaggaggaagggagggagggaggaggaagggagggaggaggaagggagggaggaggaagggagggagggaggaggaagggagggagggaggtggaagggagggaggaggaagggagggaggtggaagggagggaggaggaagggagggaggtggaagggagggaggaggaagggagggaggaggaagggagggaggaggaagggagggaggaggaagggagggaggtggaagggagggaggaggaagggagggaggaggaagggagggaggaggaaaggtgaggaagggagcatggtggggtctggccctgctcccagggtccctcagctttctgggcttccttccccagcttccctgctgccccttcttggaacgccccggacccctctgccatctcctctcctgcatcctttaagggattggtcctattagtcccccggccctgagccagggtagaccctttcttccctggacccagccaccgccctgtccctgacccccaccctctctgccccgcagtggcgagctttcctgcccggcctgaagttcgaggtcatcagctctgctcacatctccctgtacacaggtgcgagcggacgcctctggggatgtggggctcctcgggatgggctctgggtgtgagtgggaagagtggaggagggggtctgagcactccctggaactcttctgcccccagatgagtcagccttgaagatggaccacgtggcgcacgtcccccagtctccagccagccacgtgggggggcgtccgccgcaggaggagaccagcgcagacatgctgcggccagatcccagggatacctttttcctcagtgagagggggcccgcgcgggggcgagggcgggggtgcctgccccagccaccctgtgaccgcacctcctgcagctccacgcatggaatcttcgagcctggagaacgtgctggagccctgcgcctacgcccccacctacgtggtcaaggacttcccgatcgccagataccagggcctgcaatttgtgagtgcggctggagaccccgtctcccgtccgggactccgcggagccttctccagccccttgggaggccgccccgggaggtccgcgccctgagccctgcgcccccccaccc

SEQ ID NO: 20001 - DNA, 2330 bp, Artificial sequence
  DNA replication origin
cccccaggccacacagccgaggcccccagcccgggcgcaggccacccaagggggccgggagggccaggcgcgcacgctgggacctgcggcgcccacagtggactcaaacttgtcctccgaagcgcggcccgtgacctccttcctgagcttgtcccaggtgtccgggccgcagctgcccggggagggcgaagaggaggaggaaggggaggacgatggggccccgggcgacgaggccgcgtcggaggacagcgaggaggccgcgggcccggcgctcggacgctggcgtgaggacgccatcgactggcagcgcacgttcagcgtgggcgccgtggacttcgagctgctgcgctcggactggaacgacctgcgatgcaacgtttcggggaacctgcagctgccggaggcggaggccgtggacgtgaccgctcagtacatggagcggctgaacgcgcgccacggcgggtatgggggcggccgaacgcgcgccagggcggttttggaggcggggacagccggggagaggaggtcctggccttggcggactcctcagaccttccccagggcccagtggtgtaccggcctgggggctgaggcaccgcgccccaccccagggaagccccagcttctctccttccttcctggcgtcctgactgcccgggcacttgtccagcctcagggacctccctggagccccacccagggctggcgccccatccttgcacctgtgtaccccacttctgtcatcctggacctgggcccagggatgagtccaagctgcagagatcagcgtcagtcgcatccagttgctgcgcagacagccccattccgggggggccaggcagagacccttagggcaaagctcaagacccctgggcccctcctcctctcccctcgcagtgcccctgggcgttcccagactgtcaggacccgactgcagaggaaggtgcagggcttctgccccattggcccctctggtctccctgaggccccaggaatctagtgctgtctgccctccctgcaggctggtgggcaggagtggggagtctaatttggccttggggaggcctgtggagttctaagaagaggcagtgtctgctgtgcccagccttgaaggcgagttaggagttgcacagtgatgacaggcagaggcaggggcagaggatggaggcagaaccgggactgtttctcctgtgcgtgatggaaggttgcgagcagagcaaagccaggggcagaggatggagacagggccaggactgtttctcatgtgtgtgatggaaggttgcgagcagagcaaaggcaggggcagaggatggaggcacagctgcatgtgactgtttcttgtgtgcatgatggaaggttgcgagcagagcaggaattccaccggtttgggtgcagacaggtatgcctctgcctggaggggaagggaaggtggtggtggtgactgacagcctggagccctgggcggtgggtgctggattctaggtggctcagagggcacgcctgccccggctctaagcttcctgagagcagctcgtcatttcttgggggcctcatgggaagatcatggttgtggccccaccaatgcccacctgggtatggctcaaggagcaacagtgtagagagaccaagagcatttggggcaggaggtccctgacactcagggctttggggtggggaaggacaggagttggagggaggccttggaccctcagctgtcacacaggtgggcgtcccccagtgaaaggcacagactgccaagggaggacgtgaggccgactgaagagaaaccatcgtctagggcagggtcctgttttctccagatgaggagagcagagtggagggaaactgaggttcttggccgagtggaatgaggaggaaggggccaggaacgggctcccagcatggaagcagcctcctccactcagggatcaggacaggagcggaactgctgcctgggggaaaggggtgctgtgaaggcacgattgggggcttctcagaagaggtgacccagggcctggaagaggagtggctgggaggactggggcaaacatcccaggcaggggactcctcaggacaaaggagaggagacagtggctgtgcctgaggaggagtctgctaccccagtatgaggggaaggttgaaagccacaaaatcaaaactgcttaaggtcctagaatgccacaaaagccccttggaaccttgtcctatgggcggtggctaactcctgaaggtttctgagcaagggggtaacaggacaggcgggcatgtcataaacgtcacctgggacgtgagtggtggccaggaggcccgcgaggaggtgaggatgggcc

SEQ ID NO: 20002 - DNA, 1736 bp, Artificial sequence
  DNA replication origin
cgctccacatgcccctcttggagtggtagtggtgatagaaattccgcagtcggagccgctccacctccagccctgcctgcaggaccctggggccgggggcagagaggtggtcaggaccccggggttggggacggagaggtggtcaggaccccggggccgggggcggagaggtggtcaggaacccggggccgggggcggagaggtggtcaggaccccggggccgggggcggagaggtggtcaggaacccggggccgggggcggagaggtggtcaggaccccggggccgggggcggagaggtggtcaggaacccggggccgggggcggagaggtggtcaggaccccggggccgggggcggagaggtggtcaggaacccggggccgggggcggagaggtggtcaggaccccggggccgggggcggagaggtggtcaggaccccggggccgggggcggagaggtggtcagtaccctggtccaggggctgggggtgtcagggctgcctcgagcctgcatggccccagtgggatgatggggactcagggccacccagggcctatgggatcgggggcagagctggttcagggatgtccctgaccttgcaggaccctgggggtgggacagggtttcagaagtgatgtgggtggaggagtctctccaggcctacaggatactgggaagaccgggaagggcagagttctctcagcatgtgggcgccgtggggggcataaatcccccttccccattcagaggaggaggacgcaggggtcagggtgtcacctctggggagtggggaggtggtcacctgtccaggagctcccagtcttcacccccccactggtctcggaactcctccgtgttcattcctccaacccggtcaaagtccgacttgtagatcccaaaaaggccaaagccgttcacctcccagtaacctggggcgggagggtgaggggtgctacccttcagaccaggtcctgcaaggtccccccggcaaagcgccgctaggagacctcgggaggggtcaggtgccgggtcccatcaccacgggggcttccgggagtcgtccggtggtactgggtcatgaccctggagcgcggtgcataaacgcgggatactggaggaggttcctggggcccctggcatggccctgggtgtgctggtgcggggggactggggctctgggcactacggggagcactgatggactcccaggcctcccctgggaattgagagaggccccgggttcctggactttaccgcggcggttggtgggaaccctggtatcacagggtgggacgctcggggcctcaccgtgggggtcccggggcgagctcccgcagctcaggcgcatgaccacgggcgcgaaggccagcctgccctccacgcagtgcttgcggatgccgtccaggatgttgggtgggaagtggatgtgcaggtcgcagaggaacacgatgctgctggcgtcctggggggtgcgggaggtctgagccccgccctccgctcctccccgggcacgccccgttttgctccccgacccccatggggccctcggacctctaccgcgtccactcccgcctgcagcccggcggagcgctcgaagttcccggttcgtctcaggtactggtacctggggagggcgagtcacaggcacgatctctgggggtggggtcaggaaaacccatctcccggggaggaaagctgcgctgggtccgcccaggtggaagtaggggtcgttacc

SEQ ID NO: 20003 - DNA, 1120 bp, Artificial sequence
  DNA replication origin
ccacctggggccctgcaggggccaggctgggcggcatgagggggaagccagcctggagggcctctgcagcccagtcaggccgaagggctcacaagaggactcagtgaaggggcttccgtgcggctggagctatgatgggaacgccggtaccccgcggcctgcagggcccccagggccgactctgcccaccttccctcctccccttggcagagagggctgtgggtgcccccccccagagctgcggcgcctccctgaggatgcgtggtgcccgccaggcacagttttggcaaagccaggaatctggggtgcaccttccctcactgcggccgggccagacggatggcgatgcctgctaggccaccgctgcagcttccagctccaggctcggcggagtctcatctgatccctgtgaccagccctgagggtcgcactctccctggagccagctcctgacacaggagccctggaggggggcttgacggtaggcttcctggaggaagcggttgtctgtggggcccggaatctgcacggagcctcgggccgcttgggtgcacaatcaggttgagagcctggaacctgagggcctcgaagggtgagtgagcgctgctcttagatgggtcctgggtggggtgtggcctgtcagtcacctcccaagaggcggtgggagagggcgcaggagggcttcggggcatggtgggctcagcgtggggggcacgggaggcgctcacagagaaggtcggctgggcccaggtcgtgggcagagctgccaggtgcgtgcccggagttgtgggagggcacagaagacaaacctccagggcagagcctgcgtgggtggagggggttggggtggtcgtcttaaggagcagaagggggaggatctggggagaaaggtgtgaggacgttggaagcaaaatatagtcaaagccgaattcaggagtgagccggtgcacagagaggcttgggaggctgcctcaggtcccaccgcctgcaggggcggggttcggagtgcattaggggagccccttggtggttgatggacccggcgtgggggcacagctcacccagaggcaagcgtcctggcgcttcctgttggcgcccacgcttgcaaaccttctgactt

SEQ ID NO: 20004 - DNA, 977 bp, Artificial sequence
  DNA replication origin
gagctttagggtccaacgggactccatggaggccctggccctggtccttggaatccagcgagccccctccgcaccaggaagcatgtggatggaccggccctcccccgaagcctgcagaccctggaactcacccccaggaccccctcaccccctacagaggcctccaaaaccctctctggcttctgggaccctggcaccactgctcctgcaccccaggccctggggtgggaggccgttcccagcacatgagtcagggtgcaggggggcggggccgccccagggggttgactcagagggcctgcactcctgtcagcgcatgtcaggctggggcaggagcgggtgtgcagggaagaaccaggggtctggaagagcagaggcctggatggagagggagcgagggtggggggcccctggtgggggtggggtagtggggggcccctggtgggggggccctggaccaagcagggcttgtgcccagaaggtctccttctagcaccacagccagcaaatgggctctgaggccctctagcctctgggacaagcccctggtagatgggggtggggataagcctaggagggctgggggtgggagctgaacatctatgacaacctctgggcttctctcacgagctcatcggacagcctctgcttctccctggaccctggaccctggctctgggctctcctccagggcagacccttgccccctagctccgtccctggaagatttttgccttaatggggctggggcaggggtctggcgtgagggccgggtcagggttaggaggcagcattaagggtgaggtcagttctgaggggaggaagctggagagtaggagtcggaggtcagcgtggggggttaaagggggaggggaaggtccactgaaaggatgggtgaggcccgggctggggccaccaggtggggtcggggtggtggggaaggggtgggagacctacccggctcgtggtccggatcc

SEQ ID NO: 20005 - DNA, 1278 bp, Artificial sequence
  DNA replication origin
aggcggcggcccctccctcccacctggccaggtgtccccgcccccagctgcgctcagggctgggcaggcgtctgtcttcaggcggctctgggtgaggctggctgggcggggacttcagggagagggcctcgagggacaggacgtgaagatagttgggtttggaggcggccgccaggcccaggcccggtggacctgccgccatgcaggacggtaacttcctgctgtcggccctgcagcctgaggccggcgtgtgctccctggcgctgccctctgacctgcagctggaccgccggggcgccgaggggccggaggccgagcggctgcgggcagcccgcgtccaggagcaggtccgcgcccgcctcttgcagctgggacagcagccgcggcacaacggggccgctgagcccgagcctgaggccgagactgccagaggtaggcggtggggacagcggcggggatggcggtggcggggagaggtggctgcgggcggacgtgatagtgtgagggcagaggccgcagtgaggccggctcctgactcaccaggcctcacactgagtcacacaccccgccccaggggcgtggggagaagccatgggtggggctgccctgtccaagcagggaccccggggtcctccaaagactgagcctggccaggccccacctgtgcctggagtcctggagccatccctgtgggggatgacagggaaggttggcacatggcaggcgggccaggccactcggtcggcaaacccggaacacgcacgcgcctggccccggtagcacagactcacatagggtctcagggacacccagacacccacgctcctcccatacctcacgggaatgagcagaacgggaaagcggggagaggtgtgggggtgctggaagtcctggaggaaagccaggcctgtctggaccaggggctccctgaggaattagaggggagggcccggctggagtgacctagatttctctgtgggaacagcaggtggaggagcacccctcggtgccagccagacccacctgtggcggaatcctggccccactcacgcgagtgtgtgtgcatgcgtgtgagtgtgagtgacaggagcacagacgctgtgagttgaaggcagtggttctaggaacgccatttcctccttcccaggctacagcaacagggattaaggttagacagtaagatggacctcccagaatgccagggacccagatgccagttcatcatggtccacttggtgtttagaggggccttccccaggactggcctccagccactgg

SEQ ID NO: 20006 - DNA, 915 bp, Artificial sequence
  DNA replication origin
tctccaccactccatcgctattggcaaccctaggagcagcctccaatccagggcagggaggccaggggggcaccagggccagtgcctccccattcctgccatggcttggtctcctcacatgtcagccctggtggtccatcttccacagcccaccccccagctgtgcctcctctacccgagagggcagatacgctcacccactgacctcctggtcgccaggaggaatgtgccagggcctctgacatcagttctccaatccttgccatggtacagtgcccagcctcctccaggaagccagcctggcctgccccggcccacactgactccttttgagcccctcctgtgcccaaacctcatctgtgcccggtcacaggagagtgacactgtctccctggaccagtatgccctgttgcagtgccctgtcccacccggcagagcctgaggcaggggccacacccaccccgtccagccacacacacgccaagggcagctgcgtcagcccgactccacagtgagtggacagacaggtgggtgggcagagggtggagggcggagggtggatggagggacaggcaggaggaggatgggagggctgctgtgactgctggaaggatggacagagtggtggatggaggggtgggacagccgtcgacgacagggtcccatggttggatggtgagtgggcagagggatggactcgtggatgggtgcagagaggatgggctgatggtgggggcatgagaaggcccaccagagcgacctggctgaggggctcagggtggggtgcagggaaaggggccgtggccctcccacaactctgcccagagctggatgctctgtgggggacacccccatggcagaggccccaggttcaccctggttaatggggcttctgggccggggctattaaccctc

SEQ ID NO: 20007 - DNA, 2343 bp, Artificial sequence
  DNA replication origin
tgtgggggtggggtggtgagcaggcctggcagtgcaggcggctccaaggagacaaaaccacaggacagggtggccgggggtccaggaaagaggcgggcagtggaggcccaagtagaaacacggccggcaaaaggtacaaagggacggaggggaaccgaatgaggtggaggggtcagaacggaggagagaggacaggcagaggagggacaggaggagggggacaggcagaaaagggggacaggtggagggggggacaggtgggggataggcagagggggcaggtggaggaggggggccaggtgggggggacacagagggaggacaggaggagtaggggacaggcagagggggcaggtggaggagggggcaggtggaggagtggggcagatggcgggcaggtgggggggtaaggcagagggggggaggaggagtaggggggcaggtggcagagggggcaggtggagaaggggggcagatggtgggcaggtggaggggggcaggtggggaggaaggcaggggggataggcagaggggcgcaggtggaggaaggacaggtggaggaggggacaggcagcacctgtgacatttttgcgaagctcatcatcctgctcccgcagtgtccgcagcagctcgaagatcccgttctcctccaccagggccagcttgttgtcagcgttgtcgtagatgaggttgcgcatggcacctgtggcatggcgctgcacttcctggttggcgtggttgaagagcttcaccagcctaggcacggcctgaaggctgcgggcctgcgggcacaggcatatgggggtgcacagacgcatgtggatggatgcagactatgcacctgtgtgcagctgtgtccaggtgcgtagatgtagatatgcaggggatgcagccgtatagggaggtgacggaggtgtgtgcggcggtagggaggtgacggaggtgtgtgcgggggtacggaggtgacgcaggtgtgtgcgggggtacggaggtgacggaggtgtgtgcgggggtacggaggtgacgcaggtgtgtgcgggggtagggaggtgacgcaggtgtgtgcgggggtacggaggtgacgcaggtgtgtgcgggggtagggaggtgacgcaggtgtgtgcgggggtagggaggtgacgcaggtgtgtgcgggggtagggaggtgacgcaggtgtgtgcgggggtagggaggtgacgcaggtgtgtgcgggggtacggaggtgacgcaggtgtgtgcgggggtacggaggtgatgcaggtgtgtgcgggggtagggaggtgacagaggtgtgtgcgggggtacggaggtgacgcaggtgtgtgcgggggtagggaggtgacgcaggtgtgtgcgggggtacggaggtgacgcaggtgtgtgcgggggtagggaggtgacgcaggtgtgtgcgggggtacggaggtgacggaggtgtgtgcaggggtacggaggtgacgcaggtgtgtgcgggggtagggaggtgacgcaggtgtgtgcgggtgtacggaggtgatgaggtatatgtgggggtagggaggtgacgcaggtgtgtgcgggggtacggaggtgatgaggtatatgtgggggtagggaggtgacgcaggtatgtgcgggtgtacggaggtgatgaggtatatgtgggggtagggaggtgacacaggtgtgtgcgggggtacggaggtgacggaggtgtgtgcgggggtacggaggtgacgcaggtgtgtgcgggggtacggaggtgacgcaggtgtgtgtgggggtatggaggtgatgcaggtgtgtgcgggggtacggaggtgacggaggtgtgtgcgggggtatggaggtgatgaggtatatgtgggggtacggaggtgacgcaggtgtgtgcgggtgtacggaggtgatgaggtatatgtgggggtacggaggtgatgcaggtgatactggtgtatccaaattgtatccttctgctcttcctctgctgagggggctccagacagagtggggtctacccagtcagcttggggatcatgaggggtgctcagtgagcagaggacagtgggaggtggtggggcccacgaaggaggtcaccagggggcagcgagtgggtggtcggggtggtcacctgcttcttggcggctgcatcgctgtagcacttgtgctggatgtaggccgctcccagcacctgcaggttggggtctgaagccatgaggtacttgactgctgagggcaggtcaatgtcatcaaaactgcggagccaggggtcaggggtcaggctaactttgggttcaggctgggcccgtggtagaagccccctccctgagccgggcccagccgctcacccgctgctgagtctc

SEQ ID NO: 20008 - DNA, 1107 bp, Artificial sequence
  DNA replication origin
gcgaccctccagccgctgcagcgcggacggcggcatctcgtcgtagaggcggtaggacaggttccgcaggacgcacaccgcgttctccacgctctgcgggcgggggcgcggggcaggggcgcgggtcagagcggcggcccgggggcacggcccctcctccacaccgcgcccctcaccttgtcctcgcatttgcccgcgtccagggcgtggttgatagaggtgaccagggcgtccaccagcccgtggcactcccgcatcttctggcgagtggcctgagaggctgagctgaggttcctggggaccgaggtggatcagagccccccagggaccccgcatcccgggccttgccccaacccatcgtgggccctcgcacgcccatccccagcgcgaggcgtgcggtgtgtgggctgcgaacgccaggccaggcggagtccccacagtgacccgcgcctgcaatccccaccccgctgcccgaggctggcgcacctgaggaagccggtggcgttgtagaagatctctgcctccgaggcgttctgctggatgagggggggacccccagcccccgacagggggctcaacaccaggtctgtgagctgctccagcgtgtctctggccaggcggtccttcaggtggtcgctggatgaaaggttccacaggatccctggaggacgggggaggctgctatcagcgtctgccctccaaccccctccgcgtttctggggatggtgtgaagaggtcccgcctctccccaggggctggcctggtgttctgtgcctcacccacgagccccactggggagaccctggggtggcatttgaggtgatagagctgggaccaagcaagaggggacaagatgtgggggtggggtggtgagcaggcctggcagtgcaggcggctccaaggagacaaaaccacaggacagggtggccgggggtccaggaaagaggcgggcagtggaggcccaagtagaaacacggccggcaaaaggtacaaagggacggaggggaaccgaatgaggtggaggggtcagaacggaggagagaggacaggcagaggagggacaggaggagggggacaggcagaaaagggggacaggtggaggggggg

SEQ ID NO: 20009 - DNA, 1728 bp, Artificial sequence
  DNA replication origin
ccccgctcaccccgggacccgctcaccccgaccccgctcaccccggaccccgctcacccccgccccgctcaccccggaccccgctcacccccgacccccggccccgctcacccccgccccgctcaccccggaccccgctcacccccgccccactcacacccgacccgctcaccccgacccgctcaccccgacccgctcaccccgaccccgccgactcctccccgccctgcgcagctgcccctcgccgccgatgcgctcaccttcgcggaggtgtccaaggaccccaagggcctcgagtggctgtggagcccccagatcgtggggctgtacaaccggctgctgcagcgctgcgagctcaaccggcacacgacggaggcggccgccggggcgctgcagaacatcacggcaggcgaccgcagggtggggcacccaacccagacccgagggggtcccaggggttcatgcggttgagggggggacagaggagggagagggaggggaggaggaaggggacgcccagggtccgcggagcctcggaggtcagcgtcccggtggcgcaggccttgggccttgggaggatggaagtcctgccctgggtttgaagggaggcacctgatccgggctgcggctgattccccccggctggggggcaaaggcagaagcagaggcccccctgagggtggcgagaggatgcagcgaccccattgtggcaggaccccctcaggtgagggtctgaggcctccgggtcacggctcacaccctccctccccacagtgggcgggggtgctgagccgcctggccctggagcaggagcgtattctgaaccccctgctagaccgtgtcaggaccgccgaccaccaccagctgcgctcactgactggcctcatccgaaacctgtctcggaacgctaggaacaaggacgagatgtgtgagtcgggcagcccctcgtccctgccctgctggacccacatgtcaattttgtctttaagtgtgggcttcagaccactggggccagtccagctccctgggggaggcaggggaccccaggtgcccaggtggccaggagtaggggtgcagactgacccccggcctcccacagccacgaaggtggtgagccacctgatcgagaagctgccgggcagcgtgggtgagaagtcgcccccagccgaggtgctggtcaacatcatagctgtgctcaacaacctggtggtggccagccccatcgctgcccgagacctgctgtattttgacggactccgaaagctcatcttcatcaagaagaagcgggacaggtaggggccgacccagccgtgcagcagcctggtcaggggtcctcccagtccaccctgctttctggctgtgtgtcccctcctgactgccctccaccctcagccccgacagtgagaagtcctcccgggcagcatccagcctcctggccaacctgtggcagtacaacaagctccaccgtgacttccgggcggtacgtttcccgagcccagggcaagcagggacccgggtgcagggcatgggacgccgggggagggtcagtgaagaggcccatgggaggatggagaccagggacccagagaggaagggtccgggccacacccagcacactgcaggagggacagcgggcagagggccacatgggcagacatgcaccctgaccttgggcctctctccactgtagaagggctatcggaaggaggacttcctgggcccataggt

SEQ ID NO: 20010 - DNA, 1999 bp, Artificial sequence
  DNA replication origin
agcctggtcaggggtcctcccagtccaccctgctttctggctgtgtgtcccctcctgactgccctccaccctcagccccgacagtgagaagtcctcccgggcagcatccagcctcctggccaacctgtggcagtacaacaagctccaccgtgacttccgggcggtacgtttcccgagcccagggcaagcagggacccgggtgcagggcatgggacgccgggggagggtcagtgaagaggcccatgggaggatggagaccagggacccagagaggaagggtccgggccacacccagcacactgcaggagggacagcgggcagagggccacatgggcagacatgcaccctgaccttgggcctctctccactgtagaagggctatcggaaggaggacttcctgggcccataggtgaagccttctggaggagaaggtgacgtggcccagcgtccaagggacagactcagctccaggctgcttggcagcccagcctggaggagaaggctaatgacggaggggcccctcgctggggcccctgtgtgcatctttgagggtcctgggccaccaggaggggcagggtcttatagctggggacttggcttccgcagggcagggggtggggcagggctcaaggctgctctggtgtatggggtggtgacccagtcacattggcagaggtgggggttggctgtggcctggcagtatcttgggatagccagcactgggaataaagatggccatgaacagtcactgccctgtgtccttccatggctggcccgaccctgtggctggcagcatgatcctgggactcaaggtgtccccaggcaccccctgcccctgaggacacccaccccctgggctcacacacaagcctcccaagatcagaggacataggacatggagagcccagcagagggacagctggcacctcagggccgagaggggacagggtggacagcgggtgcaccacaggcacagacggagcagagctgggggcctcgagagtagaggggtgactggagtaggaacagggtggctgcctcgtgggctacactcatgcggcaaatgaacccaactcctccgccgcccaccctgggcctggagttgcctggaccaggggctctcacactggctgcctgaggtttggggtccagtgggctctcggacacccccatccatctcacccagagccaggccatttagttgtgaagttactgtggatattcttaaaacagaaagtttctgtgaagctcagaacttgaggtctctaaggagcctgcccccatccaggatctgcctgcatgggaagggtctaggaagagtcacgtccccaaccagggaccaggcaaggaggcccaaggaggctactgtaagcacgggacacgcctgagctggcttaggaagggggatggagagagggcagatttggtgatttggcgggtggggatgagagagggaggggtggggatgagagaggaggggtggaaggctgagagagccgcagagggaagccgaatccgaaaccttccgccgcaagggaggagaccgaggccccagcagaatccaaaaggactttattttctggcactgggaggcgccctgaggccacagccttttcccagggctgctggcagggtcccagggctgctggcaggggttgtggtcctgttgagcagaggagcgacgccgctgccctggcccccgctgtccctatgatcctgcactctggggtgggagctacatatcatccttggacaccaggcagtagaagtctgtgcgggcactgtagtttcgcgagccgagatccgagacgtccacttcgctgctccggctctctcccagcgagaccccactggtgtgcggtggagctgatggctctccaaagacaggcccccggacacctggggtggggagaccgagacgcctgaggtggccacccacagccttggcccagacccactgccaggggctgcccctgctcaccccctgctgtgatggcct

SEQ ID NO: 20011 - DNA, 1350 bp, Artificial sequence
  DNA replication origin
gtgcgcggggtcgcgcctctggccctcgaaggtgatgaagatgggtctgcgggtgagctccagcagccggcacaggccctccctgcggggcgggaccgtcaggggggtgggtgctacgctggggcccacccaaccccgcgcgggacccaccggaagctgtggctgcaccaggcccggctcaggaaggcgtccgaaagcaccacgatgaggcgtcggcagcggctcaggttcaccaagaggtcggcggagggctctgcgggagggcgggcgtcggcggcgcaggggcgggggcgggggagggcggggccggaggctcaggggcggtgccggacgcagagctctaagggaggggcggggcctgcggggtgggcgggtttttgaggcggggcctcgggtgggcggggatgggggcggagctcgatggtgggggtggggccccgggtgggacggagcatggggcggggcggggcgggccctccgggtgggcggggcacggggtggggcccgggataccagcgcgcggcaggaggtcgcggtcgtccaggaagagcttgtagccccgacgccgctccagctgcggctttaggatgaagttcacgaacttgcggtcctcggggcagtcgctgtaggagacgtaggcgtcgtagagcttcccgtctgcggacggcggccagtcaccccgatggctcccgaggcctcacaccagccctcggggtccccaacacccctaaccatctcccacgtgcacaggggcagacccgccccggactttaaccccagccgggccgcacagagcacccgggggctaacccctccccgccgcacgcctccaaagccgagctcagcagcgcactctcagggaggccgtggcgacccctcctcgcgcccacgcgggccccacgcaccgtttatctccacctccccatacgcgtcctggtaccagagcagcacgttgagacggcacttgacatagagcagggcggccagcagcagggccagcaggaccaggagggaggccagcaccgcagccacgtggcttgtagggcctgcggatgggttgcctgagccgctgcccctccagcagcccccaagcctcaagatccctgggcctcactaggtctaggtccccttctaccctccaccttggggaacccccatcaccagctctctgaagagtgaaggaggagaagctgatgttctggatggagcaggtgaaggccccatagacttcagtgctggtcacgttgacccccaggacactggacacaagcacctctgacaggttggccttgaccctggggataccaagccagggtcagggtcgactggggataccagtggacacccccg

SEQ ID NO: 20012 - DNA, 768 bp, Artificial sequence
  DNA replication origin
ctctgaccatgtctggatgcagtcggggggtgcccagctctgaccatgtctggatacagtcggggggggggtgcccaactctgaccatgtctggatgcagtcggcgggggtgcccagctctgaccatgtctgaatgcagtcggggaggggggtgcccagctctgaccatgtctggatgcagtcggggggtgcccagctctgaccatgtctggatacagtcgggcgggggggggtgctcagctctgaccatgtctggatgcagtcggggggtgcccagctctgaccatgtctggatacagtcgggggggggtgcccagctctgaccatgtctggatacagtcgggggggggtgcccagctctgaacatgtctggatacagtcgggggggggtgcccagctctgaacatgtctggatacagtcggggaggggtgctcagctctgaccatgtctggatacagtcggggggggggggtgcccagctctaaccatgtctggatgcagtcgagggggggtgcccagctctggcccacgtctggttacagtcaggagtgcacgtgagcacagacacctcgaaacacctcgggaaacacctcgggaaccctcagcttagcctcgccctgcggttgtgaggccggagggtgaacagcgcccggtggggatggaggtctcgggtcccatgtcctttcccagcccgtagcagcagccacacacacctcaagtctcccaaagctcctcagtgaggtggctgcagggagaagcccagagcc

SEQ ID NO: 20013 - DNA, 2324 bp, Artificial sequence
  DNA replication origin
tctgaaggccctgttccccggggtcagaggtcaaagacacatgggggagcaaaccggccccttggctcctgagtgtgagctctagtagcgtctggaaggcatgccgcgcggtccccggtcctccttgtatgtgtgcagggtggccctggcgggggtctcctggctggaggaccccccatgcattacccctggaacctgcccctttgagcaccccccaccccacaacacacacgcacacacacaaacgcacgcacacgcacatactgcacacacattgcacacacgcagacacactgcacacacacacacacacacacacacacacacacacacacacacgctgcacagaggaaagtgccgtgcctgggtgggttggggcgggctccagaggaaggagccgcttgactcagagctacaggaagagccggggcaggcggggtgagaaccaccaactgcccgtcctcccgcccgcctagggaaggggtgggtgcctgggtggggtttagggttaggagaggatgtgactgcaaggccaggaagctacagggaaagttctgatcaaaatacacaaagacacaagccaggtccccaccgcgcttggcgatgcatccatagcagccttggtgctgtggacactccctggggcccagcgaaggggagagtttgctcccaaaggcgcaccaatgaccaacatttgccccccggaggaaagaactggaaccaggtgactgccttccccgctgctctgagtgagcctgtgtcagggcctggctgagaggaggcccacggcgcccaagacccatatgcatgtgtgtgcatgtgtgtgtgagacagagcgaggggcagcaggaggctgtgtcgcatcagcggccaagggtgggtgtcaggtgcagtgtgtgtgctgtggggtgcctgtggtcctaggctctgtgacaagcgttgcaatgggtgttgtatatactcaacagttgtgtgaggggtctgcagcctaagctgtgtgcagtggtaatgggaggtgtgtgtggtaggaagtgtgctgtgtaggaggtgcaagtgtgcacacgggctgagactgaagctctgtgcaggtgcacatgggccagagggctgtgtgtatgtgatgtgtgcaggggaggaggggcagaggagagggtgcaggggaagttagggaggggagggggtacaaggaaaggtgtgcaggggagagggtgcagggaaaggtggggaggggagagggtgcaggggaaggtaggcagaggagagggtgcaggggagagggtgcaggggaaggtgtgcagggaaaggtggggaggggagagggtgcaggggaaggtaggcagaggagagggtgcaggggaaggtgtgcaggggagagggtgcagggaaaggtggggaggggagagggtgcaggggaaggtaggcagaggagagggtgcaggggaaggtgtgcagggaaaggtggggagggagagggtgcaggggaaggtaggcagaggagagagtgcaggggaaggtgtgcaggggagagggtgcagggaaaggtggggaggggagagggtgcaggggaaggtaggcagacgagagtacagggaaaggtagggaggagagaaggtgcaggaggaggcaggcagaagagagggtgcaggggaaggtggggaggggagagggtgcagggggaggcaggcagaggagagggttcaggggagagggtgcaggggaaggtgggcaggggaaggtggggagtggagagcgtgcagggggaggcaggcagaggagagggtgcaggggaaggtgcgtaggggagagggagcaggggagagggtgcgggaagagggtgcaggggagggtttgcagggagagggtgcaggggagagggtgcaaggagaggcaggcagcggagagggtgcagaggagggtttgcaggggagggcacctgctttcttgctgtgctcgtatcctggcagtctgcccttgacttccagaaggctctgaggctgcttttggagggaggactttgaggtctgagcttggggcggtcacggaagcactgcaggagatgccaggggttctgctgggctggcggtgtgacctcccgggcttgctgtgaggggttggtttcctgggaagtgtgtgctttaaggaccctcagtgggtggttcccctgggtcaaggactttccttggagtgtcctccaccgcaaaggacttcttcaaggaccccctggccatcccccatgggtgtgtgcctcatgctgtatcggttcccgaggaaactgccaaacagtcaaacctggggcctctggctgtgcttcacccatggagagg

SEQ ID NO: 20014 - DNA, 916 bp, Artificial sequence
  DNA replication origin
cctgacctgcagtgtggggagaaccttcttgaggggcttccaaggacccacttcaaggaggggctggtaccaggctctgtgggggaaggggtgctgtctttgggaccctgagcccaaggcccaccatcacccaaggctgagtaccgggacaaaggaaggtcctagcagggctgggactcagtcagacaagtacctgtagaaagcctgctgctgagagggtgctcagccagggccgggaggctggatggcagccctccacaatgaagccctgcccccatgtggctgagggcagggccagggtccaaaggagacccttgtctgattctgtgggcaataccagccaccggtcactgggtccccagtcccaggtcaacctggggagtgtcagtttggtgacaacaggagatgccatctgcccctcatctgctctgagccaggagcctcggccacctgtgtttgctccttatttggaaaagggggcgctgccctcccaccccagcctgaagggaaggtccacaagatgccatagtcccttgtaactgctcacccatcgggggagctatgtctgggagagggacggggagagggcggaagagttctgctggagccccattgttgaccgggagtttctgaaggccctgttccccggggtcagaggtcaaagacacatgggggagcaaaccggccccttggctcctgagtgtgagctctagtagcgtctggaaggcatgccgcgcggtccccggtcctccttgtatgtgtgcagggtggccctggcgggggtctcctggctggaggaccccccatgcattacccctggaacctgcccctttgagcaccccccaccccacaacacacacgcacacacacaaacgcacgcacacgcacatactgcacacacattgcacacacgcag

SEQ ID NO: 20015 - DNA, 1209 bp, Artificial sequence
  DNA replication origin
tctgcccgacgtggtcagcggctttttggtgaccctcgcgcagaacagagcggggctaggagcgccgaggcgcgcagggatcccacctcggtcgcccaagcctggatcccagctcgaggcttcctgaggcgccgagggcggaccaagagtcaggctggggcccgagctcgcccggcgccgggtggagcttccgccatccgcgcgcctctgccccggccgagcgccccgagccgcacccccgtgcccgcctcccgcgcgcgtcctcgttctccgccctcctcacttggagggcgcccagggcgcaggtgggcgcggggtaggggagcgaaccagagcccctcggcctgcggggccgcagccttttacccacgttcctgcttcaggacaggcgctgggggcccagcgcgcacggggagcggaggggcggcgcgtccgagctgagcgggagtcgcccgcagggtgctgggtgctgagcgtcgaacccaccgggcaggggcggccgcggaccgaggacgctggctgggtctgagggcgggaggagctggcgctttctaagaacctcaaggtgcccagcagagtgcggtgggcagtgcgaggcgaccagggccaggcttggactgagattctgggcgcctcggaagagctgtgcgggcgagggtcggagactttgtgggtgttcatgctcaccctggacggtggacctgggggctcgggggtgcaggacgttagcagagagagggaaggagagggtgccaagccagccctgagagatggtgacgctgagaccgggtgcacagagcagccgccgagccggggcttcacagttggcggctgaccccagggcctgtgctggaggccctgctcctgcttcctgcgggggtgccctgggccctgctgtgcctgcttcctgacctgcagtgtggggagaaccttcttgaggggcttccaaggacccacttcaaggaggggctggtaccaggctctgtgggggaaggggtgctgtctttgggaccctgagcccaaggcccaccatcacccaaggctgagtaccgggacaaaggaaggtcctagcagggctgggactcagtcagacaagtacctgtagaaagcctgctgctgagagggtgctcagccagggccgggaggctggatggcagccctccacaatgaagccctgcccccatgtggctgagggcagggccagggtcc

SEQ ID NO: 20016 - DNA, 2275 bp, Artificial sequence
  DNA replication origin
ggaaagggccaggacgcgggcgagctcgggcttccgggcgacgcgggaacctccccggccccgagccatttcctgagagaccgcgcccagggacaagcagcgccccgggccccgactccaggcctgcagcggctctgggaggactgcgacctccactcaccttcgcgggtctgatggcgaccgccactcacctgctgccaggacctggggctcgcgccgggcgggggcggggcagctcacctgagccaggtgcgcagcggcaacagccccggcggcggcgtagccccggcagcggcagcaggtgcggccccgccccgcagtcagggcgggggcggaccccagcgtcccgctctgcgcccaaggctggcgctggaggctgcgctgctgcccgggagccgctgccgcacgggcctggggccagtggccaaaccagcccaaccagcgcgcagagccccggagccccagagccttggggactcttcggagcgtccaccgccctcaaggttttgcgcgtccgcccctatctcttccctttcctccaggaagcctgccttgacccccaccccaccctcaagtggccccgatgtcttctcttgcctccctcaacaccccaggtgcagggacggggagaggaccccataggcgcccctcccttggaagcccatggaaaactggagaagggacaggcggcctgaggcggcctcacctggttccagacgttccacactccgggtctgtttcccatctagccctgagggcagatataatccacccgggacccagcgaggccaggaaagcaagacagacaggcttaattttactgcagaaacgggttggctgaagggaacaggccagcgaggtgggctcaggacacccccaacagccaggatgggggcacggcaggatctggcgcccagaagtcagagggaggcccaggaaatttgcgccagttttcctgccttgtggctgcctgaggagccctcactcccagttctgtgggtgcccagggtcacccagagttcaagtcagggctgtgccaagcctgagagcccccacaaagacggagcaggcggaatagggtggcagctcacagccctgaacatacaggggattcctgcggccccacatgggcacagccttctcacagcacccctcaacacgcacagcggtgggcttgtgggaggtgctggtggtggcactgtctcagctcctggtggcctctggacgggctctggccctacacgtctgtgctcctggcactgaagatggatgctggggtgggatgggcaggcattgggggccgagagcctgcccccaccccacccagcctctgccttccatgccacatcttctcacgcagcctctggtacttcacctccagaaccttgttcttcaccgactgagggatgtcgggcacgaaccaggcggcgatgagcttgatgcacaaggccacgtgctagcggcagcacaggagaggcccagcacggtcaggtgccagctggcatttgggggttcagggccggggagaaggactggggagagcactgcccagacccactccgaggcctctcccggttctggctcacctcaaagaggatgacgaaggccaggcggatggccaggaggaaccagaactgctcggagaagttgtaatcggggggattgcggtagtccctgtatctggggtaaggaagtacctgaggtcaggggtcaggagttcagagggcattcttgggggatggggagttccaaacctgcacagagtcacgttttctgagccctcaatcccatcagggtcctggaagtccttggtgtggaagacggacaggctgtggttgacgtagcccttgaggcagctggggagaggggagaggagtgtggggtggggtgggcttccagggcggccccttcaggccccagagtgcttctagcctgcgttgtggagcaaacagtgaggtgggggccacgccacagactgcgtccagtgggacggggctcccgggccaagcacatcttcacatccgggggccttgtggggactgtggggactctgggcatcaccagccactttccctgccagagactggccctggggacccagtctgcagtttggtggctcctcgaggtcagagagctggataaatcagaagaggacatgcggaacctcacatcgggagggagccgttctggcagggcctactcaggaggcagccaggtctgggaacttcacccccaactgcggtcctggccagttatccctgacctccagcccagg

SEQ ID NO: 20017 - DNA, 1847 bp, Artificial sequence
  DNA replication origin
cctgcagggcctgccccgcctgttctgtgtctttcctacccgcttctgtcctgctgcacccaccctgtcagaggcagggcgctgcccgcagtgccccagacttccccttcctccccaggatcaacggccaccccgggaagtccacgcgcctggcgggcttgtggaagctggaagaggtcagtcacccccaggcttcatgccctgtccctgagccactgctcccctgaccgtcccccaggacccctccctgatctcctcctgtctggccccgcagtgccacgccagcggctgcatgatggacctcttcgtgcagatggccatcatcatgggcctgaagcagacgctcagcaactgcgtcgagtacctggtcccgtgagtgccgacccccgcccagccccgggagccccaggcccctccgccccctgcgccctccctgccacgcagctctccccgcaggtgggtgacccacaagtgccgctctctgcgggcctccgagtccgggcacctgccccgggaccccgagctcagggactggcggcgcaactaccttctgaacccggtcaacaccttcagcctgttcgacgagttcatggagatgagtgcgtgggcgctgcggggcgggggttcgcggagacgaatgcggggcgggggtccgcggacatgagtgcggggcgccggtgagcctgacccccaccgcgcagtgatccagtacggcttcaccaccatcttcgtggccgccttcccgctggcgccgctgctcgcgctcttcagcaacctcgtggagatccgcctggacgccatcaagatggtctggttgcagcggcgcctggtgccgcgcaaggccaaggacatcggtcagaccgggcgggcgcaggatgggcgggaactgggcggcctcaggcctgtgggcttcccgctggccaggccggctcacctggaaaaaataatctctcggatctcaggccgcagacagcccccagcccttctccgacggcctcggatgcgggttgagcctgggtgggagggtaccaggagtgggcggggccgagcgctttgtaggctcctcccacaaaccgtcaggatctcagaggggcttgacgcccccaagggggacccaggttctgccagtggctggggctggaacagagcagccggcctctgtcccaagactggccacgctgagacggacaggcagcaggggagcgacgggagctggggcgctggatgtggggaaagggagagaggtgttagggaggcccccagtctcgggcccaggttacaaggtcttaccctggggtgggaacccaggaggtggagtggctggggggcacagctgagaagttcaggaagatggaggatgaggattcccaggttcctccctgtccatgtcagggtgaggggtgcaggagcgcagaggccatgctctgccatggctggggacttccttgtgaatactgcagccctagggctgcaaggggacaccacgcacagagacacggcaggccccgtgttggccgggggtgggggtgagggcagaaccagccgagggacgctgagtcagaccgcttgcccactgctctggtgcagggacctggctgcaggtgctggagaccatcggtgtgctggcggtcattgccaatgggatggtcattgccttcacatctgagttcatcccccgagtggtctacaagtaccgctatagcccatgcctgaaagaaggcaactctactgtcgagtaaggcctcagggtgtctggagacccctgggagaaactggccctaccacagccaagccctgggggatccagaccctttctcctgggaatggctggacctgttggtacccct

SEQ ID NO: 20018 - DNA, 1573 bp, Artificial sequence
  DNA replication origin
gccgcccagttcccgcccatcctgcgcccgcccggtctgaccgatgtccttggccttgcgcggcaccaggcgccgctgcaaccagaccatcttgatggcgtccaggcggatctccacgaggttgctgaagagcgcgagcagcggcgccagcgggaaggcggccacgaagatggtggtgaagccgtactggatcactgcgcggtgggggtcaggctcaccggcgccccgcactcatgtccgcggacccccgccccgcattcgtctccgcgaacccccgccccgcagcgcccacgcactcatctccatgaactcgtcgaacaggctgaaggtgttgaccgggttcagaaggtagttgcgccgccagtccctgagctcggggtcccggggcaggtgcccggactcggaggcccgcagagagcggcacttgtgggtcacccacctgcggggagagctgcgtggcagggagggcgcagggggcggaggggcctggggctcccggggctgggcgggggtcggcactcacgggaccaggtactcgacgcagttgctgagcgtctgcttcaggcccatgatgatggccatctgcacgaagaggtccatcatgcagccgctggcgtggcactgcggggccagacaggaggagatcagggaggggtcctgggggacggtcaggggagcagtggctcagggacagggcatgaagcctgggggtgactgacctcttccagcttccacaagcccgccaggcgcgtggacttcccggggtggccgttgatcctggggaggaaggggaagtctggggcactgcgggcagcgccctgcctctgacagggtgggtgcagcaggacagaagcgggtaggaaagacacagaacaggcggggcaggccctgcaggtgagcggggcacaggtgctcacacccagatgaaccgcacccgcacgtgggcacgcacacacacacacacacacacaggggaggccacaggctcccagatgaaccgcacccacacgtgggcgcgcgcacacacacacacacccccacacaggggaggccacaggctcccagacgaaccgcacctgcacgtgggcgcacacacacccacacacacacaggggaggccacaggctcccagatgaaccgcacccacacgtgggcgcgcgcacacacacacacacccccacacaggggaggccacaggctcccagacgaaccgcacctgcacgtgggcgcacacacacacacacaggcaaggccacaggctccaacacacgctccagacagtgtctgttacgagtggcctcggtttctccccgtggaaacggcacgatgggttattttgtgtttaaaatcacctgctttccataatatgagaaatacatgaactatcttaaaccaaaagtcaggctcatggtcagtggtgaaatcccaaaagcattcctattgtagctcacgacaactggtatttaacacggttctggaattccttgcaaataagcaagagaaatatgaagtataaatagtatacatttgcaaagaaaaaaatgactcttttagaaaacatgattatgtacct

SEQ ID NO: 20019 - DNA, 1340 bp, Artificial sequence
  DNA replication origin
tgccaaggtttgtcgcctccgggtccaccccagggcctgcggaagatgggaacggtgcatccacccgaagcgggggagatcaaggcctggagccctgcagagctgctcagctttccccacagggctgacggggaggcccagccccagcccacccgcccatttcctcagcccacctgcccccttccccggctttcctgcctccctccctggctcacctgcccccctccccagctcacccacctcctctccggcccacctatcacccccccagctcacccacctctttgacaatgatggcacggtggtgttcgccatcttcatggctctctggggtgagttgctgcgggacgcctctgcggggccaggggaagtgccagcccaagctccgaggtccacctggcgtagtgcagtgatgcccctccttgcccccgccgcagccacggtgttcctggagatctggaagcggcagcgcgcccgcgtggtcctgcactgggacctgtacgtgtgggacgaggaacaggtgaggtggagctggcagcgcagctgaggccgacccgagcaggggctgttggcgcccgatgccctgcacggcccacatatgcctgccgtgtctgaggtgtgtgtcccgagtctgtctccccacatgtggggcgtgtgtcctggtctgtccacctgtgaggcgtgtccctgtgtctgtctccccacgtgtggggtgagtgtcccgtgtctgtccacccgtgaggcgtgtcgctgtgtctgtctccccacgtgtggggtgcgtgtcccatgtctgtctccccatgtgtggggtgagtgtcccgtgtctgtccacccgtgaggtgtgtccctgtgtctgtctccccacgtgtggggtgagtgtcccgtgtctgtccacccgtgaggcgtgtccctgtgtctgtctccccacgtgtggggtgagtgtcccgtgtctgtccacccatgaggcatgtccctgtgtctgtctccccacgtgtgggatgagtgtcccgtgtctgtccacccgtgaggcgtgtccctgtgtctgtctccccacgtgtggtgtgagtgtcccgtgtctgtccacccgtgaggcgtgtccctgtgtctgtctccccacgtgtggggtgcgtgtcccgtgtctgtctccccatgtgtggggtgagtgtcccgtgtctgtccacccgtgaggtgtgtctctgtgtctgtctccccacatgtggggtgagtgtcccttgtctgaggcttgcccggtgctctccccaggaggaaatggcacttcagctcattaactgccccgactacaagctccggccataccagcactcctacctacgcagcac

SEQ ID NO: 20020 - DNA, 773 bp, Artificial sequence
  DNA replication origin
actcaccccacacgtggggagacagacacagggacacgcctcacgggtggacagacacgggacactcaccccacacgtggggagacagacacagggacacacctcacgggtggacagacacgggacactcaccccacacatggggagacagacatgggacacgcaccccacacgtggggagacagacacagcgacacgcctcacgggtggacagacacgggacactcaccccacacgtggggagacagacacagggacacgcctcacaggtggacagaccaggacacacgccccacatgtggggagacagactcgggacacacacctcagacacggcaggcatatgtgggccgtgcagggcatcgggcgccaacagcccctgctcgggtcggcctcagctgcgctgccagctccacctcacctgttcctcgtcccacacgtacaggtcccagtgcaggaccacgcgggcgcgctgccgcttccagatctccaggaacaccgtggctgcggcgggggcaaggaggggcatcactgcactacgccaggtggacctcggagcttgggctggcacttcccctggccccgcagaggcgtcccgcagcaactcaccccagagagccatgaagatggcgaacaccaccgtgccatcattgtcaaagaggtgggtgagctgggggggtgataggtgggccggagaggaggtgggtgagctggggaggggggcaggtgagccagggagggaggcaggaaagccggggaagggggcaggtggg

SEQ ID NO: 20021 - DNA, 1023 bp, Artificial sequence
  DNA replication origin
ggagacagtgccaggctccaggcgtcgccaaggcaggacagccgtgtggtctcagggcaggggccacaggtgtgagacccactggctgtgtgagcctcagcttccccatcccattaaaggatcacggtggttctcaacgctcagagcattctgagggctccgtgtggctgcctgtgttcctggggacacagtcacagccagccttaggggttgggcaggatttgcagaggcccaggggcccctcctggatcaaggccagtgtctcttgaagacccctcctctccagttccgatgccccttcctggacaccgtccctggcctccaaggcaaagacccagaggcccagcagggacaccctcctcgctccctaaggccctgcttctccccagtcctccagcccaggagggagcctccaagcctggccctccatgcccccatgacctgcccagccccatccaggccccgcagggctcagccagggcctgcttggtggaccggccaaggacactcctggcattggttacgaggcagtggagggcacccgtgaagagagctatgggtcttggggagtcgcgaggcggcatcaaaggaggggaggtggcttgagggggctgacgggagcaggcttggggggcgcatacctgcgacgtgccctggggtgtccaggagccatgtctgtaggcacagggggaggctgggagcccggctctgccgtcggacgcttggctgtgccgcttcatggctgtgtggccttgggacgttccctttcctgagccccagtctctgctctgcacagtggaacagaacagctccagggtataaggagggtgtgtgcggatgcaggctggggtgtgctctggacacatggggcccgcaggtgggaggtgtggttgcaggtgcgggctgtggtctgggcttctgggagggacgggctgggaggagaaggagcccccagcccagcctcatcctggacgccgtggggcaggccaggccctgggagcactttaaggagggtgcggggtg

SEQ ID NO: 20022 - DNA, 1319 bp, Artificial sequence
  DNA replication origin
ccatgtggtccgctgcagggacccgccaatgaggggcatctagcccccaatcacatcctcctatccctttctctgcccccaaacccccagggcgaagagagcctccggatcctggtggagcccgaaggggacagcttcccgctgatggagatcagcacctgtgaggtgggtgtccgggggcccctcccgggccccacctggccctgctctgccccttcacctgcgcctggccccatgcctcctccctgcagaccgaggcctccgagcagtgggactatgtcctcgtggcccaacgtcacacccagagagacccccggcaggcgcggcagcaacagttcctggaggagctcaggagaaagggcttccacattaaggtgggcgggtgcccagcgaggggcagggccatggggccggggcgggtgtccagcgaggggcagggccatggggctggggcgggtgcccagcgaggggcagggctgtggggccggtcatggcggcacggagggccaggcttggaggctctctcctgggctggaggattggggagaagcaggggcgtggggagcgaggcagctccgtggctctgggccacagcggcagatgaagggagggttctgaggcggaatagaggggggagggttctgaggtggaatagaggggggagggttctgaggcgggatagagcggggagggttctgaggtgggatagaggatcccatgtgcccccaggtgatccgggaccagaaacaggtcttctttgggatccgtgctgacaacagtgtctttggcctgtaccgcactctcctcctggagcctgaggggcctgccccccacgccgagctggccgcgccgaccaccatcccggtcaccacgaggtgagaggctgcacccagagccgtggccaggagaaccccttgccacctgtgtgattggtccagaccgggcaggagacagtgccaggctccaggcgtcgccaaggcaggacagccgtgtggtctcagggcaggggccacaggtgtgagacccactggctgtgtgagcctcagcttccccatcccattaaaggatcacggtggttctcaacgctcagagcattctgagggctccgtgtggctgcctgtgttcctggggacacagtcacagccagccttaggggttgggcaggatttgcagaggcccaggggcccctcctggatcaaggccagtgtctcttgaagacccctcctctccagttccgatgccccttcctggacaccgtccctggcctccaaggcaaagacccagaggcccagcagggacaccctcctcgctccctaagg

SEQ ID NO: 20023 - DNA, 1245 bp, Artificial sequence
  DNA replication origin
gcgtggggggcaggcccctcaggctccaggaggagagtgcggtacaggccaaagacactgttgtcagcacggatcccaaagaagacctgtttctggtcccggatcacctgggggcacatgggatcctctatcccacctcagaaccctccccgctctatcccgcctcagaaccctcccccctctattccacctcagaaccctcccccctctattccgcctcagaaccctcccttcatctgccgctgtggcccagagccacggagctgcctcgctccccacgcccctgcttctccccaatcctccagcccaggagagagcctccaagcctggccctccgtgccgccatgaccggccccacagccctgcccctcgctgggcacccgccccagccccatggccctgcccctcgctggacacccgccccggccccatggccctgcccctcgctgggcacccgcccaccttaatgtggaagccctttctcctgagctcctccaggaactgttgctgccgcgcctgccgggggtctctctgggtgtgacgttgggccacgaggacatagtcccactgctcggaggcctcggtctgcagggaggaggcatggggccaggcgcaggtgaaggggcagagcagggccaggtggggcccgggaggggcccccggacacccacctcacaggtgctgatctccatcagcgggaagctgtccccttcgggctccaccaggatccggaggctctcttcgccctgggggtttgggggcagagaaagggataggaggatgtgattgggggctagatgcccctcattggcgggtccctgcagcggaccacatggtcacacaccgtccctccccacaaggagaacagcaaagagtcccgaggagatggctgtaggcgggtgacaggccagagggcctgctacaaacaaccgacgaaggactgtggaaacagaagcgcgtgaggggctcctacaaatgcaaaagggaagacgcagcccacagaggccaacgggattgcacagaagaggagcacgctgagcagcccacaggggaagcgacgggaactccagaacagccaaggaaacgcaggtcagaggaccaggagaccaatgcacgggagaagccacaggcgcccctgcacactcccagtgctgcgcgtatcagagcacgggtttggaaacctgttggactgtttttaaaattgaacgctcccaacccctggcctagcccgtccacccctggagg

SEQ ID NO: 20024 - DNA, 925 bp, Artificial sequence
  DNA replication origin
aggatagcatagtatagcatagcataacataatacggtatagtctagtctagtctagtctagtctagtatagcatagtatagcataatatggtatagtctagtatggtctagtatggtctagtctagtctagtatagcatagcatagtatagcatagatgccccagtgattgcatgggacacgcctacaccaaaaatgttgtttatgtgacattgtgacattcagcttgactgggtgtctgtttcttttttttttcttttctttcctttttttttttttttttttttgagacagagttttcctcgtgatgcctaggctggagtgcagtggtacaatctcagctcactgtaacctccacctcccaggttcaagcgattctcctgcctcagcctcccgcgtagctgggattacaggcatgcgccaccacgcccagctgattttgtatttttagtagagacagggtttctccatgttgggcaggctggtctcgaactcccgacctcgggtgatccacccgcctcggcctcccaaagtgctgggattacaggtgtgagccaccacgcccggccctgtttcttattttgttttgctaagtctgcaaccctagtccaggtctggcctccagcccccaccccacacacacacaccaggagctacgggttctgggacagatctccctattctctctaccgtctcaaccacagaagccaggaaatgcatccaaccaaccacagaacagaaggctctcaggcagggggttggtccacggctagtaccagtccttggccagttaggaaccgggccacagagcaggggtgagcagggagtgagcagggagtgagcaggaggtgagcagggggtgagcagggagtgagcagggagtgagcaggaggtgagcagggggtaagcagggggtgagcagggg

SEQ ID NO: 20025 - DNA, 965 bp, Artificial sequence
  DNA replication origin
ccttggccagttaggaaccgggccacagagcaggggtgagcagggagtgagcagggagtgagcaggaggtgagcagggggtgagcagggagtgagcagggagtgagcaggaggtgagcagggggtaagcagggggtgagcagggggtgagctgggggtgagcagggggtgagcagggggtaagcagggggtgagcagggggtgagctgggggtgagctgggggtgagcaggaggtgagcagagggtgagcagggagtgagctgggggtgagcggggagtgagctgggggtgagcagggggtgagcagggggtaagcaggaggtgagcagggggtgagcggggggtgagcaggaggtgagcagggggtgagcagggggtgagcagggggtgagcagggggtgagcagtgggtgagcgggaggtgagcggggagtgagctggagatgagcggggggtgagcggggggtgcgtggggggtgagctgggggtgaatgttcccacctgggctccatgtcccatcagatcagcggcggcattagatcctcacaggaggaggaggaagaaccccattgtgcactgcgcatgcagggatctcggctgctccttatgagaatctaatgcctgatgatctgaggtgagacgatttcatcccaaaaccatcccaccacacccacagctgtgggaaaattgtcttctgcgaaactggtccctggtgctgaaaaggttggggagcactgcactaaggcatccgacgccccggtcacagggagatgggctcaggtagacaccatctgagcacccagtgccacactgcagcctccctgcggggggaagttcttgccctagttggcccacggggctcacctggcccttctgtcctatcctagaccagtagttcttcctgcctcaatcaacccttcctctgactccctccttggccttcccgacagcccacggacagatacc

SEQ ID NO: 20026 - DNA, 1993 bp, Artificial sequence
  DNA replication origin
cgccgctggcagccactctcctggccgccaaaccccagctggaactccggccacagccagcatgcaggtgagtcctgcgctcaaaagggtccacaccttcaaggcccccagccacgcccacacctggggcccccggccccagccccccgccagccccacctggaaggcgcctgtgtgtgtggggggggtccctgcaggctgcccggtcaggcgagggtgaccgcccggctcagctaagctgcctcctggactcctggggcacgctgggggttggaagtgctggaggcgggcggcgttcctccctccagcccgggattctgagggcaccagggctgggctctcagctagtgtgtggggccaggaacctctaccagagtcctgaacacgagatggagagggcctgcccaccgaggcgggggctgctgctgaggaccccagacctggcagctttgccttgcagctggcccctaagggggagcgggctgtgggcaccaggcaggctgccccagggttgggagctgcagagtggccggcgggctgtgggctctctgctccccaaggaccccgcccagcacaggtgggggccgactgctgctgctggattccgattctgggggtgggcgctgactgctgctgctggattccgattctgggggagggagtgcaggtgaacacgtagaaagacatcctttctcccctctgccagtgaagaggtcacctggggccagggccaacacctgggcaggtcagcacctggtcggcccagggaggaggcagtggtgaggtgtggagtgaaaccagcctccctctcggcctgccagggcctccacgtgtgggctgcgccggcggcctcttgctccatctccgcccagggctctcctcggccctccacatccaggtctgacaccctggctgctcagcccagcacctgatgccccttagcctgagctcagggtcccctctgccagccccttcctcccatgctgggggttagaggagagacttggggctggccaggggttgggttgggagaagcagcacctggtttgttggaagtgagagcatcagtccttcaaaaaagacagttgcagccgggcctggtggcgcatgcctgtggtcccggctactccggaagctgaggcaagaggattgcttgaacccgggcgtcgtggcatgcacctgcagtctcagctactcaggaggctgaggcaggaggactgctcgaacccgggcgtggtggcgcgtgcctgcgctcccagctactcgggaggctgaggcaggaggactgctggaacccgggcgtggtggcatgagcctgcggtcccagctactccggaggctgaggcaggagggttgctcgagcctgggagttctgggctgtagtgtgttaggctgactggctgtccgcacatcagtatggtgacctcccaggagcaggggaccaccaagttgcctaaggaggggtgaaccggtccaggtcggaaacggagcaggtcaaaactcctgtggtgatcaaaaaggacagttgcagacatggggaggacttgctagtcccagctccaggctggatctgggcgtgcctttcctctgctctaaccccttccatggctccccactgccccctgctgaagtccaagctctccatttggccaagaagcctagcagcctcccctgattggcctctgccaacctccagcctccccttctggcagctcccttcttgccctttatgcttctgcaaagctgaagtaccaaggactgagtccctggactcagtttccgtaggtgccgagtgctgagtcaccaggagtagtagctaccaagtcctccttggaggtgctgagtgctgagtccctgggaggtgctgactgctgagtcccagacaccaactgcaccctgattctcagggcgtgcccacacatgttctttctcccgggaatgctgcccccattttctcaccttttgccaacctcttgccctacaatgccaagct

SEQ ID NO: 20027 - DNA, 999 bp, Artificial sequence
  DNA replication origin
cagctttcagaagcagactcctcgccacacacgctgcagataatgtgtgccagcccacggcctgggcccccactccccgcagcccttccctcctcagggcactccactggacggtcactctcaggacacccagagcctgcccagctgccgccctcagcccaggctgcacagaacgtgctcagggactggggatgcggggtggagggctcctcctccgttgtctacacagcctggggccagccacgtgtccccaggactccaaggattccccagtggggcccagaaagcaggggcttgggtaggagcagacagtttctttgggagtctgtctcgtcgtcagtcctccttgccccagtttctcctctaagggaatcagcactggacctgtggggtggggggccgtggcccggggtggggggccgtggcccggggtgggggaggccgtggcccggggtgggggaggccgtggcccggggtggggggccgtggcccggggtggggggcatggcctggggtgggatgcttttggagggaacatggggatgtgtgagcgggggtgagagaggcaaggcaagtgggggcgttggtgctggctctgtcaggggctctgtgccatcctgcttccccctaggaccaggtgtcatgagacccatctcacagtggaaacccccttcccgggaactccagcctaggaattcccctctggcccctgacccgccatctgggctccaggaaggtgtcccaggctccaggggctggggtactctcctggcctggatgctggctccgccccgactacacccaggcgcggcagctgcaggacgctggaggaggaggagggaggggcgagccccacgcggaagtcaggtaggagcacccgccgctggcagccactctcctggccgccaaaccccagctggaactccggccacagccagcatgcaggtgagtcctgcgctcaaaagggtccacaccttcaaggcccccagccacgcccac

SEQ ID NO: 20028 - DNA, 993 bp, Artificial sequence
  DNA replication origin
gctctggtttccccaaggggtaacatggtcccacccatgtttctccttgggggacctcctggcaggctgggatggcagcagagaccacagctttgccactttggcaaagacaagcgagtgaagtggtggccgaggacctgtgagctcagatggggcaaatccaaatggaacacattcagatctgtgtgcaaaatggtggtggcttaaacaagctgtgtatttctcctataagtgaaatctggagttggccgggcgcagtggctcatgcctgtaatcccggcgctttggcaggccgaggcgggtggatcacctgaggtcaggagttcgagaccagcttgcccaacatggtgagaccccgtctctactaaaaatacaaaaattagccaggtatggtggtgcacgcctgtaatcccagctactcgggaggctgaggcaggagaatcgcttgaacctgggaggcagaggttgcagtgagccaagatcacaccactgcactccagcctgggtgacagagtaagactctgtctttaaaacaaagcaaaacaaaaatctggagttggctagtcctggactagtatggccgaactatagtcatcagagacccagaatgccttcagcttgttgctctgccaccttaaatacatggtcccagcacctggtccaaaatgactgctcaagctccagtcatcacatccacgttccagccagtgggaagaggaaagggcgaaggagggaacctcacccttcacatggttagtcacgtgaccacactctatggcaaggaagcctggggcatgtgagctcttttcccatggaagaaagcagggtaagcgggagagggaacatccggcagtctcaccagggggtcacagctgccaagttagatctagttcagaaacagaatgtgcaaggcttgttgagtatgggaggaactcacacgcaagatccacgttcccagcccctgcaccgtccgtgacgggtgtcgctccccag

SEQ ID NO: 20029 - DNA, 1432 bp, Artificial sequence
  DNA replication origin
ggagctcggtccggccgctccccgggacccggggggcggtgctgccacaccctcaaacccccggccacagtcctggactccaagacggcgagagggcgctgccggggacccccaggccagcggtgccggaacccccaggtcgagggcaccctcgccgccccgcggccgcccactgccctcaccagaagaaggtgttggtgccgtcgtcgtagacctcggactcggtgctgcggcggccctcgcccggcccggtggcttggccggcagacggcccgtcaggcggctcctccagcgaggccctgcccgcgggcaccggggactcgggccgcggacctccggcgtccctgcgctcgcccctccgcatggcgtttcggcccggagccactccgcccggcgcctcgaccccacgcacaccgggtcaccggcgagaggacgcgccgcacacagcgcgaggagcgctgggaaggggtcgcggcgctggcccgcggggtcttaggagagcagcgcggggccggccagtaaagggtgtgcggtgcattgtggggcttgtagtccgcgcggggcatgctgggccttgtggtccgacgtcgcgggttggacgcagtgcttgctgggaaggatgacgcctggttgctgggaaaccggagccggaccgccctgcggctgaggtcgcaggaaccaagctgcggatggcgcgggtctcgccaaggcctccagagcttggaggtaaccacagacatccccggcggcctggcccgagtccctccaccccttcgccccttcctcgccgacggatcccggagcccagccccgttctccttttggggcgcttcccgacccttcaccccatgcgacccgggtcattcctttttgagacggagtctcgcactgccgcccgagctggagtgcaatggcgcgatcccggctcactgcaacctccgcctctcggattcaaacgattcttctgtctcaagcttcccgagtagctgggattacaggcggccgccatcacgcccggctaatttttgtatttttagtagagacggggtttcactatgttggccaggccaatctcgaactcctgaccttgtgatctgccgcctcggcctcccaaagtgctgggattacaggcgcgagccaccgcgcccggaccggtctgggtcattctttcgcaggatcgcgtgaaattgggcgggcgaaaatggtgcggacacgctgattttagttgacccaaattgttgacatggtaccctgcaaaaaaattagctcctgagccactctgaaaagcaatgtggcagctcctcaaacctggaaacaagtgtccacgccaaatttacacactagcgctcctagttgcagcattttgataatagcggcatgttattagccatagaggagcgaagcatgcgcatgctacagcacagctggacct

SEQ ID NO: 20030 - DNA, 3093 bp, Artificial sequence
  DNA replication origin
acccggtgtgcgtggggtcgaggcgccgggcggagtggctccgggccgaaacgccatgcggaggggcgagcgcagggacgccggaggtccgcggcccgagtccccggtgcccgcgggcagggcctcgctggaggagccgcctgacgggccgtctgccggccaagccaccgggccgggcgagggccgccgcagcaccgagtccgaggtctacgacgacggcaccaacaccttcttctggtgagggcagtgggcggccgcggggcggcgagggtgccctcgacctgggggttccggcaccgctggcctgggggtccccggcagcgccctctcgccgtcttggagtccaggactgtggccgggggtttgagggtgtggcagcaccgccccccgggtcccggggagcggccggaccgagctcccgacgccgggtcgggcggagggcggcgctgtaggtgggggagaccctgggcagaccctccctgcggccgctttgcgtctctctcgccgccctccccacccctgcccgccttggctctgaccgcgcggttctgcgatccagaccccttccccgccacccgcctccagcgtcaccccagaaacgctttctctgtcctgctgtcgaagcttcacctgtgtcccccgtcattctgcctgtggttgctcctcagtgcttgcggctgcacgaaatcatcttgtgtgtcgcgcccgaccccacgtggcgatcgtgttgattagcagagtgttgtgcgtgcttcaggaatgtagtcggtgttcgtcgaatccaggctctgtttctctcctcagttgcccctagcggggccagcgcctcctccctgcacaactcagccctagctacaccttggggtccccctgtccgccactctgcctttaatgggggtggaaaaggaagaggcccccgggagcagctggagtgtggcactctgtgtccagacaggctccaggtgccgctcctactcccgacagctgcgaccctgggctggccctttgccgatgctcctctgtgagaaggatcaagccgtcgacctgaaagcaggcttcgtgagaggagggtttggctcttcttgactgcaaggtgcccagttcccatcctgtggaaggcccgggggcacaggggcagtagaggtggggtcagccccaggaaaacgtgtgggagacaggcgcctgcggccagcagtggaaggaaggctttatggacgcttccaagagaaccatgctgtgggatggtcggagagcaaatctgaggggcgaggagggcctgatggaggagtaagggacttgtcaggggaaggcgccaccacagacagggacttaaccggtcctggcctgtcaccgcagccgaagctctggagagagactgtccaagtggtgggaaagcaggttagggtggaggaggccccacgcagggtcttccgtgaggtgtgggcagctgctgttgcagggagggcatccgagctctcctttggggagatgagtgtaccgggtggctgcggggccctcgggagggagaggagatggggtgcctgccacgtggaccctctggcttccgggccctgtggacatcaggcctctccatcaggtgccctgccacaccccttcaggctgtcctcccgcagcacagctggggaccaccggagtctctgaggtcctggagcaaggagaccagactggctcttctgaggtcccggagcaagaagaccagacgggctcctctgacatcccggagcaaggagaacagacgggctcctctgaggtcccggagcgaggagaccagactggctcttcttgtttctcatttggccgttcagcacattgtggggacccctactgcctgtcagttaccgttctacgggacatagcagagaactaaacaagaagcttagattctggtgcaggcatggaacttcagaaggctcaaaatgtgctggctgggtgctgagtgtggcaggagccagggggcacatgcaagcctgcgcagcccacccagtaccagggaagcaggagcagcagcccaaaggtaggagggggccggtctctttagaagcccagaccagtggtccctgcccacaaggggtgtttgggacacagacggctgggcgcagcagagcttgcctgtcaggaggccaagggggtcaggagggctctccaggagcgggtgcagcggggctggctggtccaggtacctccttcctgggtcttctgggtgggtggctctggctctggctttcccctcgaccctgtccctgtagagacgcatggggcaggttcttgctgtgcctcctcccttccctgtgcagaggaaggagcttcacgcttctgggtggcaggtaactcaatgcctgcctggtgagaattcattacctgcagagcctcacactgacctcctgagtccacctgcactgacttgctgtgctggcatttttttaactctaattttgtgttttagagagttttactttttattttttattcatttttatttatttatttatttttaatagagggtccccctgtgttgcccaggctggtcttcaactcctggcctcaagtgatccttccgcctcagcctcccagattgctgagattacaggcatgcaccaccacatccagccagggcgttcattttcaaggatgggtgcacttcctcgggccagtgacggcggccatgtgtgaattttgtttctctgtgactgcttgtcagccatagggatagggcgtgcggttcgattcagggcttgactggccctgggagcacgaggctgagctctccttctctggattcattcagggtagcaaggacaattatggggaacatccagaggaaaacgtttagatccacagactccgagaagccctgtgcgaagatgtggcagctcatgcggtctggaaattgtttgggagaacacttggggaccccttaccctggcgaggtgcctgtgaacgttgccgcctgtctgtgggagacgctgaagcagcttcggatgaccacacttgctaaccagttcccgagctgggggccactgtgatgttctgagagtttttattgtatgcttgtgtcttggaatggggtgcctc

SEQ ID NO: 20031 - DNA, 1632 bp, Artificial sequence
  DNA replication origin
aacctgtagaactggacaacacgagcagaccgtgtgcagattttaaacattcattgaggagatgggggtcccggcggggaaggccgactgacaagaatcttaactactgcagatgcattccgtgaccttcctgaagggtgttcagaggaaggtgctgagtaactttggaaatgagcagtgtctataaggccagaggcaaaaggaatggcacagacgctgctctagtcgataaagttttgctgcacagaggtgctgactggcagctctgtcactgtggtgtgtatgatggctgtgggaggggagtctctggataatcagagaaggaggggagtctctgggtaatcagagggaggaggaggggagtctctgggtaattggaggaggggagtctctgggtaatcggaggaggggagtctgggtaatcggaggaggggagtctctgagatggaggggagtctctgaataattggagaaggaggggagtctctgggtaatcggagggaggaggggagtctctgggtaatcggagaaagaggggagtctctgggtaatcggagggaggaggaggggagtctctgggtaatcggaaggaggaggaggggagtctctgggtaatcggaaggaggaggagggcagtctctgggtaatcagagggaggaggaggggagtctctgggtaatcggagggaggaggaggggagtctctgggtaatcggaaggaggaggaggggagtctctgggtaattggaaggaggaggagggcagtctctgggtaatcagagggaggaggaggggagtctctgggtaatcggaaggaggaggagaggagtctctgggtaatcggaaggaggaggagggcagtctctgggtaatcggagggaggaggaggggagtctctgggtaatcggagggaggaggagggcagtctctgggtaatcggagggaggaggaggggagtctctgggtaatcggagggaggaggaggggagtctccgggggagtctctgggtactcggaggaggagggcagtctctgggtaatcggagggaggaggagggcagtctctgggtaatcggagggaggaggaggggagtctctgggtaatcggagggaggaggaggggagtctccgggtaatcagagggacgaggttggagtggccgctgtgatggtggattaccattgcacgtttagcccagaagagacaaagatggttaaacagtgtgtgcgcagtggttaatggatacacacagatcttgttgctgtacaagctgagggggcctagaaccagctatgcttgcagcagtgagcacacccaggcccagatcctggttcctagtgccctccagtccacggggccagggctctgaggagaaatggctgattccagcaccggggcaggaaatgcccaggatcagctgatcctggcagttccagaaagtgaggagctctgtaaacaaaaccccacagtcacgggattgcgtcccagtgaaagagcctcccagtggccaaagagcaacaaaataataaagtagtattagaatataacccagagtagaaaataaacatccacgagcccatagtgatataagtgattgagtaaataaacagagggaacaagaccaaccttccct

SEQ ID NO: 20032 - DNA, 1624 bp, Artificial sequence
  DNA replication origin
aaaatgcaatatatttgttttccttttaaagcacttccctcattcttacccaacgggacacaccttctcaagtacttaagtaattcttttttttttttttttttgagactgagtcttgctgtcacccaggctggagtgcagtggcgcgatctcagctcactgcaacctctacctcccagattcaagtgattctcctacttcagcctcccgagtagctgggattacaggcgtctgccaccacacctggctaatttcttatatttttagtagagacaggagtttcatgtcggccaggctggtctcgaactcctgacctttaatgatccacctacctcagcctcccaaagtgctaagattacaggtgtgaaccactgtgcccggcaagtaattcttatgaacaaattagccttataaagttgtcataaacattatgtgatgtgtggccaggttagagtcctgtgtgacccggtctgagctggcctctgggcagcatgccgtgtgggggctgccacaagctgattcagggagcaccggcctggggtgacgcacgcctgtcgggcggagggcggcctggggtgacacggatggtggcctgggatgacacgcgcctgtcaggcggagggcggcctggggtgacacgcacctgtctggtggatggcggcctggggtgacgcgcgcctgtcgggcggatggtggcctggggtgacgtggatggcggcctggggtgacgcagatggtggcctggggtgacgcggatggcggcctggggtgacgcagatggtggcctggggtgacgtggatggcggcctggggtgacgcggatggtggcctggggtgacgcggatggtggcctggggtgacgcgcacctgtctggtggatggcggcctggggtgacgcgcacctgtcgggcagatggtggcctggggtgacgtggatggcggcctggggtgatgcagatggcggcctggggtgacgcggatggcggcctggggtgacgcggatggcggcctggggtgatgcgcgcctgtcgggcggatggtggcctggggtaacgcggatggcggcctggggtgacacagatggtagcctggggtgacgcggatggcggcctggggtgacgtgcgcctgcaccgggagcagcttcccttggccagtgcccatgttcctcttttcatttttatcttttctggggagggtagggggacgttttactgtctttccactgaatgttatgaccctccccacgccccttggaggcacagctgaggtggggcctatgtctggctccagggggccctgaaaggtactttttacacctcccacccctcagcactgagagacctcgggaggggtaccggtgacagggacgcgggccccaccttgctgaacccagcagcgagggcatctctgcctctgtccctggaggctgacagcggtagtgtgggagctggggcctgggtggagaccgggtcagaaactcaggtttcgcctgggtgggccatgaatgtcctgccgagggtgagaccctcagggctctgggtggagagcagcacctgcccagaagcagtagacccttgtcccggctgcaccaggggccagcgaccttgtgccctcctccatcct

SEQ ID NO: 20033 - DNA, 1345 bp, Artificial sequence
  DNA replication origin
agggactgggtggtgcagcggccagtggatctcagaccctgagctgagcacgactggagaggatgggtgcatccgagcgtctgcagagcacagagcgcgtccgcagagcgggtccacaccttgggtgcagcgagcggatgtgagcagtgtgcctgtgaccagggctgtctgcacatccgccggcctaagctgctgctcaccgaaacccactgggactctggctgaggccggccccaaggagctttgccgaggagggagcaccttgcccctgcccagagcggtccctcgcatcctccttcccgtgaacctgcatctttggttgcagttacagctctcacgcttccatcttatgaatcacaggagtcccgttggttttggatgagttgacaccaaaaagacacaggagctctctagagacacttcctgggggtcctgccgcgttggagcagggaggcagtagctcctgacgccttccctcctacgtgggctttgtgatcactgatggtcacatgcggggcattcggtggcctctgtgtagagccagtgtcttcctgatgtgacactgggaaccaccagcagcccaagcacagggaccttctcctggccactgggcgggctgcaaatgtgagggcgaatgttgggtgcagggtggtggaggtagctgggccttccctgccgcggaggaggcaaatgtgagcgcgaatgtccagcccagggtggtggaggtagctgggccttccctgccgcggaggcggcaaatgtgagggcgaatgtccggcccagggtggtggaggtagctgggctttccccgcggcggagtcgcccagctctgcccgaggccccttcctcccgccccagcatcaggggctgttccacaatgggtgtctgggggtccctgcagcctcccacctccctcctgggagaagcctgcacacactgaggggctgtttgttctttatttgcagaggtattgtggccagtattttggttttcttatgttttggagtcacacaagctaaagacgggccattttccagacctcatccaggtaacttgccatttccttttccgtgtgcccctgtggcatttctgttctgagcggccactctgtgtctgtgctgctgggtgtgagtgtcctgtcctcccctccgcctggcccctccccgaggcctccgaggccacttcccacatggacaagggcgtggggttctgagctggccgtgtgctcctcctccaaccaccgagggtctctccaggccttctctggccctttcactcttccctgtccagggctctccagcccttctcttcctgcttctgcctcctctttccacagaccagagtg

SEQ ID NO: 20034 - DNA, 2445 bp, Artificial sequence
  DNA replication origin
aggcgagtgtaaacagtgcacgggcgcgtgtgctcaccgtgtgcgcaggcgtgtaaactgcacgggcgcgtgtgctcactgcgcaggcgagtgtaaacagtgcacgggcgcgtgtgtgctcactgtgcgcaggcgagtttaaacagcgcacgggcgcgtgtgtgctcactgcgcaggcgagtgtaaactgcacgggcgcgtgtgctcactgcgcaggcgagcgtaaacagtgcacgggcgcgcgtgtgctcaccgtgcgcgcaggcgagcgtaaacagtgcacgggcgcgcgtgtgctcaccgtgcgcgcaggcgagcgtaaacagtgcacgggcgcgcgtgtgctcaccgtgcgcgcaggcgagcgtaaacagtgcacgggcgcgcgtgtgctcaccgtgcgcgcaggcgagcgtaaacagtgcacgggcgcgcgtgtgctcaccgtgcgcgcaggcgagcgtaagcagtgcacgggcgcgcgtgctcaccgtgtgcgcaggcgagtgtaaacagtgcacgggcgtgtgtgttcaccgtgtgcgcaggcgagtgtaaacacagctggtgccctggtgcgtgtgtgctgtgagcacaggtgtctgtaaatgatgtaaacctcccttgacgtcaggcccaaaagcctgccttgccctaaggtcaagaggtgtatctggctgatgccagcgtctgggtgaggaaagagcaggttccacaagggcgactcctgtgagggtgttggcctgagcgcgcatgcggggaggggtcggggtgggggcggcgcgccgcagtaactcagggccccatcccgctcccgtctgtccagcggtcctagacccccatgtcctgaagcgcacctgtgcccacctggccccggggagcgcaggtgtggagatggggtgtcgtgcctgggggttccttccccacgcgctgccccaccaggatttccctggggtggggagggctgctgagacagggcgctgccctcctccagggtgactgagatgcagtttacaaccatgatctcctggccgggcgtggtggctcacggctgtaatcccagctctttgggaggccgaagtgggcggatcacgaggtcaggagatcaagaccatcctggctagcacggtgaaaccccgtctctactaaaaatacaaaaaaaaaatactagccgggcgtggtggcgggcgcctgtagtcccagctactcgggaggctgaggcaggagaatggcgtgaacccaggaggcggagcttgcagtgagcccagttcacgccactgcattccagcctgggcgacagagcgagactccatctcaaaaaaataaaataaataaacaaccatgatctcccgtttcaagttgccaccactaactgtagccccgctgacgggggcactggccttgcagactgtccaggacggccggcagtttctaaagtatgttgaccccaagctgggagtcccactgccagagagagactacgggggaaactgcctcatctacgacccagacaatgagactgacccctttcacaacatctgggtaagacgccgggggccctgaggcgagcccctccccaggtgtggccccgtgccggaccaggcgccatccacgctcctgcctcgcacccctcagcccacacttggggtctcctggtgcagagatgtgctgaggccctgtccgtctggatggtgctcatggtgggcagggggcccctgctctctaggctgtcgtggacgtggtctccacaggccacggcagcacctgtgagtccctggccttcttcccggggtctggcaggtgctgctcaggtgtgggctgatctgccggtgtggggagtgggggtggctgtgccccagggtcaagggtcataccctgtcgcccacaggacaagttggatggctttgttcccgcgcactttcttggctggtacctgaaggtacggcacctcctcttcccggcctccccgccccggttctgaggcctgccgtgggctctggaccgtttctgtccatggagttgagctcagggtgctctgagtgtggtgggagggtgtcgcactgcagccacccagaggttcgagaagccgtggggctcccggacctcccagaagccctgatcctggtcgggtccccgctccgtcctcagggtcggggcggtggaaagaggcggcagggcaggaagtcccgcccctgcctgggcttgggcactgccccatcccacttctgagggaccctgtgctacctatggggctaagagcagtgcctgcttgaccctgcagcccaccctggcagagtttggtgtcaggccccgggcacggggatgctgccttgtttgctgacagtcgtacatcgaggctgctggaggggcagccacccaccccacgctcaccctgagacctcactgggggccctgccagtgctgtcgactccaagaatgctgcca

SEQ ID NO: 20035 - DNA, 3888 bp, Artificial sequence
  DNA replication origin
gtcgggtccccgctccgtcctcagggtcggggcggtggaaagaggcggcagggcaggaagtcccgcccctgcctgggcttgggcactgccccatcccacttctgagggaccctgtgctacctatggggctaagagcagtgcctgcttgaccctgcagcccaccctggcagagtttggtgtcaggccccgggcacggggatgctgccttgtttgctgacagtcgtacatcgaggctgctggaggggcagccacccaccccacgctcaccctgagacctcactgggggccctgccagtgctgtcgactccaagaatgctgccagccggggtgggggctgcacgcacccgtgggcagggccgggcgtggcctgcgtcccatactctggctgccagccgggtgggggctgcacgcacccgtgggcagggccgggcgtggccggcgtcccatactctggctgccagccggggtgggggctgcacgcacccgtgggcagggccgggtgtggccggcgtcccatactctggctgaccctggcgcccacagaccctgatgatccgagactggtggatgtgcatgatcatcagcgtgatgttcgagttcctggagtacagcctggagcaccagctgcccaacttcagcgagtgctggtgggatcacgtaggtgccagcacagcccccggggcagtcggtgcaggctgaggggcattctcggaacccctgtgcccagcgcggcccctggaccccctcattctccccggggggcagtgggtgcaggctgaggggcattctcggttcccctgtgctcttccggggtcctcctcggggggctcgttacccctcacccctgcaacgagtgctggcccctccctgcagtggatcatggacgtgctcgtctgcaacgggctgggcatctactgcggcatgaagacccttgagtggctgtccctgaagacgtacaagtggcagggcctctggaacattccgacctacaagtacgtcgtgggggctgcgagggcagggccgggtgggggttacctggaggcagcctcagcgtccgtgctccagcagaccccgagcaccaggcccgtccagtgtgcggctcaggaggggtgaccgtggggctttgcctcctggaacctccctctgacctggtgtcactcaagcccggccgcccctcacagtggccatggcgtctgacccacgtacctccctcctcaatccctggccggcctggcgcaggggctgtgggatcattccgtgcttctccctcccttggttgctttggttatgaaatagttgcaggtactttgtcattatgactttggaatttaaaaaagaaacagaagtctaaggaaaggcctgggggacgggggtctcccctcctgcctgtgggtgccccggctctgcctggctctgcagacatggctagctcacggcaccgtggagcgccctctgaggcgctgcagccactgctcaagctggaagagactgaacagcagagggccgtggagaagcagggcttgtagctgggtggccagacctcggagaacagccgggcagcagctgggtaaccaggaacagagtctgtggcccgatggcacagggcggggcggggtgaccaagagcagagctcgtccgatggcacagggcggggccgggtgaccaggaacagtctgttgcccgatggcacagggcagggttcggtgggctgccttcctcaggctgccggctctgtggttcccaggggcaagatgaagaggatcgccttccagttcacgccgtacagctgggttcgcttcgagtggaagccggcctccagcctgcgtcgctggctggccgtgtgcggcatcatcctggtggtaaggccgggctgcctcgcgacggcgcggcgggcggggggccagagctggtgctcaccctctcctcccctagttcctgttggcagaactgaacacgttctacctgaagtttgtgctgtggatgcccccggagcactacctggtcctcctgcggctcgtcttcttcgtgaacgtgggtggcgtggccatgcgtgagatctacgacttcatggatgacccgtgagggctgcggcagtccgggtggagacacccccggggggcaggggccggagggctggggagcagagcctgggaggccggagcctgggcaagtccgcctggaggaccctgcggggcccgggacgctgaaccccctgctgcccctgcaggaagccccacaagaagctgggcccgcaggcctggctggtggcggccatcacggccacggagctgctcatcgtggtgaagtacgacccccacacgctcaccctgtccctgcccttctacatctcccagtgctggaccctcggctccgtcctggcgctcacctggaccgtctggcgcttcttcctgcggtgagtcagggcagggcgcgtatgttctgaaggagggccgctgtccgggtcccttggcacaggcactgtgggagtttggtgtcgttggtgtctcactgtccctgcttcaaccctctggccgcctctgcgggaggcgcctttcctgacccagccctcggggccttcgctctgcactgacagatccaggctcctcagggctccagtctgccacggctgccgtcccagggccagggtacccggcacccacccagtccattccggacctccacagggactaggtgccagctgtccatggggcctgcagtggggctggtgtgggggcaggtggtgacgctgcatcccgctccccagggacatcacattgaggtacaaggagacccggtggcagaagtggcagaacaaggatgaccagggcagcaccgtcggcaacggggaccagcacccactggggctggacgaagacctgctggggcctggggtggccgagggcgagggagcaccaactccaaactgacctgggccgtggctgcctcgtgagcctcccagagcccaggcctccgtggcctcctcctgtgtgagtcccaccaggagccacgtgcccggccttgccctcaaggttttttgcttttctcctgtgcacctggcgaggctgaaggcgaggggtggaggaggccccagcacagcctcatctccatgtgtacacgtgtgtacgtgtgtatgcgtgtgtgtacgcgtgtgtacgcgcgtgtgtacacatgcgtggccgcctgtggtgtgcacgtgtgctctgggctccgaggcttctccagagctgggagctggctggcgtggcaagggcatgctctggggcagtgtgtccctcaggaaccagggtcctccctcccctttctgcctggtcagccccgtggcctctggcccaccaagctccctgtcacccagccatggtgtggtccaggcagggacatctcggtaccctttctgcactccgtgggccctgggtgcgctgaggcctggaggcgtctacactggctccacatccacttcccccgcagctcgtgtgggcgctcgtccacaaacactccgtggctgagaggcagcggatccaggcagcgatgctgagccacctcctccgagccttcctttcacacagaccaccccggaggacacgtggatgatggggtcagagatcactgagctgcccctcaagggggcctggaacccgggtgctggggtcatgctgcctccgtggctccaaggtgagggtcatcttcacgagcaaagagaaccaataaagtgacaacgaacgtctgaggcttccagccctccccccagctccccgtgtcctgctttggggtccagtgcagccctccagcctgccctcatgcccagtgcccacttggggaaaaccacacagaggacaggaggcactcagcctctgcacctgagcaaagacttggcgcctgccccgccccacc

SEQ ID NO: 20036 - DNA, 1878 bp, Artificial sequence
  DNA replication origin
acactttataatcattaaagcactttcttggcaggagaggctcttgtccttcctggggtccttgcgaggcgctggcattggagacgacaccaccccacttggcttctctccctgcctaagggaccccgcaccagggaagcagcccaaggccctggctgtgctcagctgggtcccctgagctgcacccacccacactggggagcacagggcaggccctgcccagggtggagggatgccccttggctctgttgcccgtgcagggtgacgcctgctgggagctgcctgcaggcccagctgctcccgcagcttccaccccggagcctcaggagcccccagcactgccctgactgccccccagcccagcccagcccagcccagcccagcccagcccagcccagcgcggcccagcgcggcccgggttcctgcccggagcccagtgctcgccccagctctgtgtgggatgatggggcagcccatcttgcccacgggtggacagctgaccaaggtgggccagcccggggtgccctgccctgccaagccaagagggggacgctcaccagctttcaaaggtccgatgctgagtcagcaactacaagttcattgcaaagaagctgcctggcaatccccctcttttggacagggtctctctcttgcccaggctggagtgcagtggcgcaatcttggctcactacagcctggacctctgggactcaaaccgtcctcccacctcagcctcccaggtagctaggactacaggcatgcaccaccacacctggctaatttttgtactttttgtagggacagggtcttgccatgttgccgaggctggtgtttggtcttggcctcccaaagtgcgggtattacaggtgtgagccattgcacctggctataaagccctttaaagtgacccaggggctgggcgcggtggctcatgcctgtaatcccagcactttgggaagctgaggtgggcggatcacttgaggtcaggagttggagaccagcctggccaacacggtgaaaacccatctatactaaaaatacaaaaattagctgggtatggtggcgcatgcctgtaatcccaggtactcgggaggctgaggcatgagaatcgcttgaacctgggaggtggaggttgcagtgagctgagctcacgccagtgtactccaaccagggcgacagagtgagactccgtctcaaaaataaataagtaaaataaagtgacccaggatcttagtttcttaactatgacctccagtggggaacagagctccttggggaaatgggtgacgccaggcctggggcgagagatgcccaaggtgagtccggagcatctcagcgcgtgaggaaccagagcccctgggcgctgtctggggttgagttgctgccggaagggctcccaggggctgcctttgggacacgggcgccggaacacaggactttaatcacaagccctgcctcgccctcctcgggaagagcagatggagaccgtgagcggggcgccacccccacctgctaccacctggctcagagcatcagcggggatggacagcgtgggtggagtgacaggacccgcagcgcgtgagggggggagtgggggcccctgcagtggggagatcaggtggcagttcctcctgagcgatcaaagctgccacctgcaaagagcagaatgctaaggccccatgtgtcctgcagcacgcagggcagggcagctggaagaactcatccgtgcagggccacggaggccaaagctgtgagtggccgtgactggaaagaggactgctaggcgcggtggccacaccggacgtcttcctgctgagccccagaggctgctcttgtgtgtgctccacattacagcccttgacttagagggcttgaaat

SEQ ID NO: 20037 - DNA, 938 bp, Artificial sequence
  DNA replication origin
ggtgtggctctctgggtggacgacatctctctcctgtcctttctcctccctgcagaagatctcaggcgagtgaggctgcttgtgcctcgcttgtctgtgccttccttgtccgtggtggggaacctgcccagggccacagggacggtgagccttggggacggccccacctgagggtcctgagttgccgagcacaggtgtccgtcgcgccccccaggcccaggcctgctctgccggtcagtgcggtgccaggcacgcccggcaccctgacccccgccctgcttcacccaggttggccgactgcgatgtgagtgacagcagctgcagcagcctcgccgcaaccctgttggccaaccacagcctgcgtgagctggacctcagcaacaactgcctgggggacgccggcatcctgcagctggtggagagcgtccggcagccgggctgcctcctggagcagctggtgtatgtgcacgcgctgggcgggtggtgcggccagggctgcccagggaggaaggcgggggtgggggaggacacgggcccatgcctcccttctggcctgtgtgcagcctgtacgacatttactggtctgaggagatggaggaccggctgcaggccctggagaaggacaagccatccctgagggtcatctcctgaggctcttcctgctgctgctctccctggacgaccggcctcgaggcaaccctggggcccaccagcccctgccatgctctcaccctgcatatcctaggtttgaagagaaacgctcagatccgcttatttctgccagtatattttggacactttataatcattaaagcactttcttggcaggagaggctcttgtccttcctggggtccttgcgaggcgctggcattggagacgacaccaccccacttggcttctctccctgcctaagggaccccgcaccagggaagcagcc

SEQ ID NO: 20038 - DNA, 2085 bp, Artificial sequence
  DNA replication origin
aggccggtcgtccagggagagcagcagcaggaagagcctcaggagatgaccctcagggatggcttgtccttctccagggcctgcagccggtcctccatctcctcagaccagtaaatgtcgtacaggctgcacacaggccagaagggaggcatgggcccgtgtcctcccccacccccgccttcctccctgggcagccctggccgcaccacccgcccagcgcgtgcacatacaccagctgctccaggaggcagcccggctgccggacgctctccaccagctgcaggatgccggcgtcccccaggcagttgttgctgaggtccagctcacgcaggctgtggttggccaacagggttgcggcgaggctgctgcagctgctgtcactcacatcgcagtcggccaacctgggtgaagcagggcgggggtcagggtgccgggcgtgcctggcaccgcactgaccggcagagcaggcctgggcctggggggcgcgacggacacctgtgctcggcaactcaggaccctcaggtggggccgtccccaaggctcaccgtccctgtggccctgggcaggttccccaccacggacaaggaaggcacagacaagcgaggcacaagcagcctcactcgcctgagatcttctgcagggaggagaaaggacaggagagagatgtcgtccacccagagagccacacccacccccttgtcacctcgacaccgtctggctgcgtgggcttcaaaggagaagccagccagagactgaggagcagctgtggggaaacgagggtatggagggtaccaagacaagaacagagtggacaacagactttaggctccagagagagacaagagaacgggtcagacaaaagaggatgggatagagaagacccaacacccacttcccggggtggagccgccacaggccggacagcagggccaaggagttgcactggacctctccaaggtgggggccagggaagctgcaggacccccaccctgtgagtggctcagggggaacaagtctgcagtgaccaggacccaaggttcctctccacatctggaacacccacaaggtcctggcagccaggatggtgtcccctggcagggaactgaaaatcccccatcaggaggaagccctcgagaaacgcagccatgactcggcctgcagggctcactgtccagggctcccgggcctcactctgcacctggtgcccagcccaggatgaccagccacccacggaaagcccctggcgagaggcacacgggaaacagcaaacaaaagacaaaacactgagggtggaaattcagtagactggctggtaaatgagaacatctcccaaaaataaaacaaaacatcgaaaagaaaatttggagaacataattagagggtcactccacaagacatcaggacaggctcatgggcacaccaaaaaagaaacataagaaaggagagagaaaaaaatcaccaaaggtatattttcttagtagaaccaagtatccagcacaaagaaccaagacccccatcaaggccaagcacatggaacccctaacacagtgaacaaagagagcttgaaaagctgccaacgagaaaaagcagatcgtgcacacaaggtcacagtggctcacgcctgtaatcgcagcactttgggaggctgaggcaggctcatcacttgaggtcaatagttcaagaccagcctgcccaacatggtgaaaccccatctctactaaaaatacaaaaattaggccaggcgtggtggctcacgcctgtaatcccagcaatttaggaggccgaggcaggcggatcacgaggtcaggatatcaagaccatactggctaacacggtgaaaccccatctctactaaaagtacaaaaaattagcctggtgtggtgacgggcgcctgtggtcccagctactcgggaggttgagacaggagaatggcatgaacttgggaggcggagcttgcagtgagccaagatcgcaccactgcactccagcctgggcgacagagcaagactctctcaaaaaaacaaacaaaataaaattagccgggcataatggtgcatgctatacccggctaaatgatccaaggac

SEQ ID NO: 20039 - DNA, 1718 bp, Artificial sequence
  DNA replication origin
agccagagacctcccaggatgccaggatcctggacccggccacagtgtccgaagcaagacagagcaggggggcggccacttggggtgtcagcttccatggcccccttctggggttggggactctgcaccaggctacagcacatcccctgccccacggcacactagcccagaggctgggctaccaggcaagctgggtgggtcagcctgggatgggcacagctgctacaccctgaagcctccccaggcacaggccctgaatatggaaggaggttcctgaggccctgagagcacagctcaggtacccgccaggggcctggggaaagtggtcaggcagagacagccaccccaaaccttggttggtggatacattccctgagcacctgccaagcactggcctggggactacagcagggcaggaacctggagaggaggcttggatggccaggaaggctccctggaagcagcagcactgatgccacaatgcggggaggggtgggtggggtggggagagggctctcatccagaagccccagaaagttggcaggatccacttggggaaatgatgcaaccccagctgcccttcagaaagacggccaacaggaccgcttgagaggctcctggtgccctgacacccccagcttcctgagtctgtgtgcctggcactcctctccccggggctgcttcagaggcggctggtccactctgcatgagtggaggcaagaggcccctggtaccaactgggaggaaagacgcaaggctgggctcgggtccacacgcctgggcgcccggcctgcaaggacagtggcaaagggtggtgacatcccacggccccacatggaggaactgaatccaaccgacccgaagcacgtgagcaaaaccgaccagggtgtggtcacccaaattctgactccagaatctagtcatcaggaggcactgtgggcgggagggcgggtggaaggagagcctcagggggctgcccagggtgcacacgctccccaaatccagcctgacactcctgtgtcctctgcagccagatgaaaggtggccccagggtgtcctcctcctgggaaagcttggtgggagctcagggtggccagtgctcccgtgaccatctgcaactagcgctgcgggagtagccccgtccctacccctcaggcttggccagaccctgttgtatcccagaaaggcccttctgaatctctgtgggtcacggatcccactgaggaccccatgaaaatgcgggagtaaacgcccttctctgtgactggagaagtccctggctccctacacagccaaagctaaaagcacattcaggaacccactaccaccagctggcagcctgctttggttgaggcagggatctgaacagaggccctaacggtcccttatccggagaccagactttctcaaccttacggagggaggtctccgcagcacccaaggcctgggccccaccctggggagccacatgggaggggccgtctggaggccaattcaggtccttatgttccgacgtgacgggggcgcggggccaccctctagggagacacgggccacgctcaggcgacgcgcaaaagttcccggtccctgggacccccgcccgcgcccgcgtcgagtccctcgaacctgctagttctggacaccctgctgcagactaaagggctgggaggaaacctcacaaaaacacgaagggggtctcccctgcctctctgcccccg

SEQ ID NO: 20040 - DNA, 955 bp, Artificial sequence
  DNA replication origin
ccgaggacagtttggcagtgtttcagaagggccttagaaccaggcaggcccccttctaggatggtggaaagcctaaagatctgaaaacggtctcaagtgtcgtcttagcgattggctgactaaaccgaatgcaagccggagactgcacacgatgttgccgttaacagttacactgggccgggcagtcagaggcaggcggatcacctgaggtcaggagttcgagaacagcctggccaacatggtgaaaacccgtctctactaaaaatacaaaattagccgggcgtggtggcaggcgcctataatcccagctacttgggaggttgaggtaggagaatggcttgaactcaggaggcggaggttgcggtgagccgagatcgtgccactgcactccagccggctgacaagagcgaaactccttctcaaaaaaaaaaaaaaaaaaaaaaagttacattaggctgggtgcgctgcagcctgtaatcccagcactttgggaggccgaggcgggcggatctcttgagcccaggagtttgcgaccaacatactgagtttggccaaaatagtgagacccccgtctctacaaaagatagaaaaaattagccagttgcggtagtgaacgcttgtagtcccagctacttgggacgctgagggaggaggagcacttgagccctggaagaggaggctgcagtgagctattttctcatccctgctataacgaatttgtcacaggctgttttataggcctggagctcagaagcccgaagtgagttttaggaggttaaaatcaaggtgttggcaagggtagttccttctggagtttcccaaggagaatctgcttcttttcctcttccaacttctagaggccaccttcttccatcttcaaaacctactgtctctgcataagaactctcatgattatatgccggccgcccagacaccccagggtagccttcacatc

SEQ ID NO: 20041 - DNA, 1449 bp, Artificial sequence
  DNA replication origin
ccgggccccgccccgaccccgagactactcccgccaggccccgcccccgcgccgagccccgcccagtagtccccgcccacgcacctgaccacgcccacgagccggctcgaacacgcccgcgccgctgactggcgggtggggttgtcgacacgttcaacccgttctgctggctcgagaacgaagtaggccgtctcgctctgggtctccaggcccgcgaccgtccgccagtcgtcccgaggtcagtagctccagcggtgcgtcagcgtctagccaggcctcgcccacgccggccttggtcgggcttcttgtagacgcgggcctggcgctattgaggccgttgctgcgcgggcgagtggcgcgctcccgtggcggggcggggtcgggcggggcaggggtccggggctatcgaggcggggccgaggttgcgctgggcagctgcgccgccgggcggacgtggcgcgccttgaggacgtcatcgcggtgcacgctcccctttggggcttgccggaagtccttgcccggggcgcggggctgcgcctgcgtggttcgtcctcacgtggccgtcaagccctctagtgccttagattccagcgagctacgcaagcaatcctggcccagccgagcttgcttccccaaatcccgtaatccttgaccttattcccccaaagaagcggcctcccgggaaggagcgccctggcggagaagactcgaacggctcccacagccgggcgttgggggaaaggtgggcggtcttggtcgtgcgaggtcggggagggagggtcctccgctctccattgcggagcttcgctccgggaccaccgggggaccggacgccgggccgcgaagctgccgcctggggctgcggggaggagagcaacataactggaatggcacttaggggccggtgtcagggttgtcaccggggttggcggaaatgacgaaggggccccaggcacgtcgtgttactgggcgaggttccagccaaggtgcccacgcgccttgggggaaaccagaggacttctgcaccgtttcccgaggacagtttggcagtgtttcagaagggccttagaaccaggcaggcccccttctaggatggtggaaagcctaaagatctgaaaacggtctcaagtgtcgtcttagcgattggctgactaaaccgaatgcaagccggagactgcacacgatgttgccgttaacagttacactgggccgggcagtcagaggcaggcggatcacctgaggtcaggagttcgagaacagcctggccaacatggtgaaaacccgtctctactaaaaatacaaaattagccgggcgtggtggcaggcgcctataatcccagctacttgggaggttgaggtaggagaatggcttgaactcaggaggcggaggttgcggtgagccgagatcgtgccactgcactccagccggctgacaagagcgaaactcct

SEQ ID NO: 20042 - DNA, 1311 bp, Artificial sequence
  DNA replication origin
tacaggcgctcgccaccacgtccagctaattttttgtattttttagtagagacggggtttcatcgtgttagccaggatggtctcgatctcctgacctcgtgatctgcccgcctcggtctcccaaagtgctgggattacaggcgtgagccacctcaccgggctgtaattgtttttgaaaatatctcttggctgggtgcaggggctcacacctataatcctagcactttgagaggttgaggtgggccagttgcttgagctaggagttcaaggccagcctggaaaacatggcaaaatcccgtccctgccaaaaatacaaaaattagctgggcacagtggtgtgtgcttgtagtcgcagcttctcgggaggctgaggcaggagggttgcttgagcccaggtggttcagactgcagtgacctgtgatcatggcactgcactccagatgcctgtctcaaaacgcacaaagcaaagggtaggaacaggcagaaccaagcggaagtatgcctgactagtacttggtgaaatgccagctagacccatggtgagttaccatttcatattctcatgactagggtggggacagggaggcctgaggcagtcgaaccagtggctagtgaaggtctggagcggggagggagcctgtgccctggggcgggagcgtaaattctgagagccaccgctggggggcgattgggcctggcagggcgtctgccccgtgtctgggcacacagaggtccggagtacgctggcggtggcagtgtttgcataaagtcagacaagacgagagcatcggtgagtaaatgccggtgttcaggcagcggagtagtcaacagcagctgagatgaataaccgacgcggtctcaatatggacaattcccaccccaattctgttgaatggaaccagcagctggcgggtgggtgcgcattgtgcagcgtttccaaattgttcagaggcgcaggaaaggccctcgccatctgggaaggcgtaggggtgagcacggcctcagggaacagaaaggacggagacagaactcaggcggcagaggcctccaggagaccctggatggaggggagagggcgactcggggggctctgagcatgtgtttaaggggagaggtcaggcatggggctcattatttttaaaaaacctgtttgtatgtttgaaatattcaatactaggccgggcgcggtggctcatgcctgtaacgccaggactttgggaggctgaggtgggcggatcatttgaggccaggagtttgagaccagcctggccaacatgatgaaaccccgtccctactgaaaatacaaaaaaa

SEQ ID NO: 20043 - DNA, 2038 bp, Artificial sequence
  DNA replication origin
catgtcctggatgccgctgcgcctgcagcccccgtagccagctctcgctttccacctctcagggagcagatcaaacgggtgaaggactcggatgacgtgcccatggtgctggtggggaacaagtgtgacctggctgcacgcactgtggaatctcggcaggctcaggacctcgcccgaagctacggcatcccctacatcgagacctcggccaagacccggcaggtgaggcagctctccaccccacagctagccagggacccgccccgccccgccccagccagggagcagcactcactgaccctctcccttgacacagggcagccgctctggctctagctccagctccgggaccctctgggaccccccgggacccatgtgacccagcggcccctcgcgctgtaagtctcccgggacggcagggcagtgagggaggcgagggccggggtctgggctcacgccctgcagtcctgggccgacacagctccggggaaggcggaggtccttggggagagctgccctgagccaggccggagcggtgaccctggggcccggcccctcttgtccccagagtgtcccacgggcacctgttggttctgagtcttagtggggctactggggacacgggccgtagctgagtcgagagctgggtgcagggtggtcaaaccctggccagacctggagttcaggagggccccgggccaccctgacctttgaggggctgctgtagcatgatgcgggtggccctgggcacttcgagatggccagagtccagcttcccgtgtgtgtggtgggcctggggaagtggctggtggagtcgggagcttcgggccaggcaaggcttgatcccacagcagggagcccctcacccaggcaggcggccacaggccggtccctcctgatcccatccctcctttcccagggagtggaggatgccttctacacgttggtgcgtgagatccggcagcacaagctgcggaagctgaaccctcctgatgagagtggccccggctgcatgagctgcaagtgtgtgctctcctgacgcaggtgagggggactcccagggcggccgccacgcccaccggatgaccccggctccccgcccctgccggtctcctggcctgcggtcagcagcctcccttgtgccccgcccagcacaagctcaggacatggaggtgccggatgcaggaaggaggtgcagacggaaggaggaggaaggaaggacggaagcaaggaaggaaggaagggctgctggagcccagtcaccccgggaccgtgggccgaggtgactgcagaccctcccagggaggctgtgcacagactgtcttgaacatcccaaatgccaccggaaccccagcccttagctcccctcccaggcctctgtgggcccttgtcgggcacagatgggatcacagtaaattattggatggtcttgatcttggttttcggctgagggtgggacacggtgcgcgtgtggcctggcatgaggtatgtcggaacctcaggcctgtccagccctgggctctccatagcctttgggagggggaggttgggagaggccggtcaggggtctgggctgtggtgctctctcctcccgcctgccccagtgtccacggcttctggcagagagctctggacaagcaggcagatcataaggacagagagcttactgtgcttctaccaactaggagggcgtcctggtcctccagagggaggtggtttcaggggttggggatctgtgccggtggctctggtctctgctgggagccttcttggcggtgagaggcatcacctttcctgacttgctcccagcgtgaaatgcacctgccaagaatggcagacatagggaccccgcctcctgggccttcacatgcccagttttcttcggctctgtggcctgaagcggtctgtggaccttggaagtagggctccagcaccgactggcctcaggcctctgcctcattggtggtcgggtagcggccagtagggcgtgggagcctggccatccctgcctcctggagtggacgaggttggcagctgg

SEQ ID NO: 20044 - DNA, 765 bp, Artificial sequence
  DNA replication origin
ccagccacttccccaggcccaccacacacacgggaagctggactctggccatctcgaagtgcccagggccacccgcatcatgctacagcagcccctcaaaggtcagggtggcccggggccctcctgaactccaggtctggccagggtttgaccaccctgcacccagctctcgactcagctacggcccgtgtccccagtagccccactaagactcagaaccaacaggtgcccgtgggacactctggggacaagaggggccgggccccagggtcaccgctccggcctggctcagggcagctctccccaaggacctccgccttccccggagctgtgtcggcccaggactgcagggcgtgagcccagaccccggccctcgcctccctcactgccctgccgtcccgggagacttacagcgcgaggggccgctgggtcacatgggtcccggggggtcccagagggtcccggagctggagctagagccagagcggctgccctgtgtcaagggagagggtcagtgagtgctgctccctggctggggcggggcggggcgggtccctggctagctgtggggtggagagctgcctcacctgccgggtcttggccgaggtctcgatgtaggggatgccgtagcttcgggcgaggtcctgagcctgccgagattccacagtgcgtgcagccaggtcacacttgttccccaccagcaccatgggcacgtcatccgagtccttcacccgtttgatctgctccctgagaggtggaaagcga

SEQ ID NO: 20045 - DNA, 1409 bp, Artificial sequence
  DNA replication origin
ggtccccacgccggcgtacccgggagcctcgggcccggcgccctcacacccgggggcgtctgggaggaggcggccgcggccacggcacgcccgggcacccccgattcagcatcacaggtcgcggaccaggccgggggcctcagccccagtgccttttccctctccgggtctcccgcgccgcttctcggccccttcctgtcgctcagtccctgcttcccaggagctcctctgtcttctccagctttctgtggctgaaagatgcccccggttccccgccgggggtgcggggcgctgcccgggtctgccctcccctcggcggcgcctagtacgcagtaggcgctcagcaaatacttgtcggaggcaccagcgccgcggggcctgcaggctggcactagcctgcccgggcacgccgtggcgcgctccgccgtggccagacctgttctggaggacggtaacctcagccctcgggcgcctccctttagcctttctgccgacccagcagcttctaatttgggtgcgtggttgagagcgctcagctgtcagccctgcctttgagggctgggtcccttttcccatcactgggtcattaagagcaagtgggggcgaggcgacagccctcccgcacgctgggttgcagctgcacaggtaggcacgctgcagtccttgctgcctggcgttggggcccagggaccgctgtgggtttgcccttcagatggccctgccagcagctgccctgtggggcctggggctgggcctgggcctggctgagcagggccctccttggcaggtggggcaggagaccctgtaggaggaccccgggccgcaggcccctgaggagcgatgacggaatataagctggtggtggtgggcgccggcggtgtgggcaagagtgcgctgaccatccagctgatccagaaccattttgtggacgaatacgaccccactatagaggtgagcctggcgccgccgtccaggtgccagcagctgctgcgggcgagcccaggacacagccaggatagggctggctgcagcccctggtcccctgcatggtgctgtggccctgtctcctgcttcctctagaggaggggagtccctcgtctcagcaccccaggagaggagggggcatgaggggcatgagaggtaccagggagaggctggctgtgtgaactccccccacggaaggtcctgagggggtccctgagccctgtcctcctgcaggattcctaccggaagcaggtggtcattgatggggagacgtgcctgttggacatcctggataccgccggccaggaggagtacagcgccatgcgggaccagtacatgcgcaccggggagggcttcctgtgtgtgtttgccatcaacaacaccaagtcttttgaggacatccaccagtacaggtgaaccccgtg

SEQ ID NO: 20046 - DNA, 1111 bp, Artificial sequence
  DNA replication origin
gggcgatcccaggggaaggtgacgcgccaccaactcgagttgggtgggcgcaggcgcgtcaggtgccagcttcctgcggctccgtgcctgggccgtcgcgatgcacgtgtcgcgtttcctcgcgatcctggcgcttcccacgcggggcgggtaaaggcggtctctgctggaggctcgcgcccacctttcccaggtggaagggtcgcccctggggccgaggcctgccgtcctgaccttcggttggaagtgaggccgacggcaaaaggaagcaccgggggaagcgcccccgaggaccaggaaacacacaccggacgccggagcgcacccgagtgcccggcccgcgggacacgctgccgcccgccgtccagtcgccgcttctcactcgcgttcatgcgtgtccgccccgagccgagctctgactgcgaccgcgcggtggacggacggcaggcgggacccccgggaccgcacgtgggtggagccccgggtcagcagcgaccggcgcaggagggcgaggcgggcgctggactgggcagaggcagggtttgcctgactgtaaaacgccttttttgttttgagacgaagtagcgctctgttgcccagtgcagtggcgcgatttcggctcaccgcaacatccgcctcccgggttccagcgattctcctgcctcagcctcccgagtagctgggactacaggcgcgcgccactgcagccgactaattttttgtgtttttagtagagacagggtttcatcatgttggccaggctggtcttgaactcctgacctcaagtaatccacccgcttaggcctcccgaagtgctgggattataggcgtgagccaccgcgcccggccctttttgttttttaatgaggatgtatttctgattcctttgcaattttaaaaaatgttaaaaacatgtctttttgggtttgaaagagctaggatgtgcgtctatgtgcttggggtgagccctgggcacttcgctcccctgtggcaacttgtgggtacggtttaactggaccacgctgagcttctgcagcgttggaacctcaagtttggggggactgggcgggcagggtcgcctgccacgcaggcccgagaaagaggagagtgg

SEQ ID NO: 20047 - DNA, 1793 bp, Artificial sequence
  DNA replication origin
cccgccctagcgaccgttgctaaggggcgtggctcagccgcacggaacccgagcccccggcgacttataaatatttgcgtattcaaatgaggcctggctcccgttgctatggcgcccaggccgcaaccccgcggcggccggaagaacagcctggagtaggagacagcgcctggaggtggagggcgcccagggccgagctgccagggccggacacctaggctgagccctcaggtgagagccgagcgcacccttggggtgggagccgcaagcctcgccctatgaccggtgccaggagggaacctgcgccgaggcgtgggcgcggggacgaagcagcacagccatcggggacccagtgatggccccgcatgtcagatctggtcccctgaggacccttgcctccaccaccccctggccctgcactgaaagggctccctgtcaggagacaggaggggccccaagccctgcccctgagggagactcagaggcaatgacccagggtgctcagggttccagggtggggctcaggaggggagcgggctctgccttccgagcccccatggtgaaggggcgagggcagcaggggacccagaggtgatggctacccaccagggaatggcactagcaggggtgtggagacaggccccccagttaccaatttggggagcatgggggcttgcagaggggacacagggtgggagcagggccgtgaagtgtgtggatgggttcaggcctgggtgagaacactaggtgcagtgtctgaggtgggagttcaatggggtctttggatcccacagcctccaaccccttgcacccccaggccttggggctcagaccagtctgatgcttggggctcttgggcacagaggagacaagggtagctgactcagcccttagtgtcacccataggtgtccaggggctgcccgtgaccccgccagctcacgccctccatgaggctcgaggctggcaggcctgggatggaggtggccagagtctttggggggatgcagtgttggggtcctgctgtgaggcctggggccttgcactggctggagaaaggcaggcagtgggggagatttgggctggaaactccatgagattctgctttgggcttcacttctttgatccttggtgcatggtcaccttccagaccaggccagtgaggcacccagagcctgagccactgccccgctccaacactcccacccaccacctctgtcaacagccggccaactcgcctggcacaggggcagctctagacgggatggagaggatgcatcttcagtgtccacacgtggtcaacagataaaagccatggccagaacgttctaagtggctacatgtgcatctgcctgttcacggattccttcgacaaatatttgagcatcccctcctgcgactgtggacagcagaggagcacgcaggccacgtgcaggccacgtgcagcccacagctctggggcgaggcaggccctcaaccgaacacgtagtaagacacacagggctccgaagggaactcgtctcatcaggaagataaatctgggaaggctgggtggggagtgcagtcaggggatcagtccaggtccagactgaagacacatgaaggtggtcagggaggaggacactggacgctccgagcacacttgtcactccacgcctggagctcatgattccagggcctggggccgaggcagatgtctgcatctttgtttgtttgtttgttttttgagatggagtctctctctgtcgcccaggctggagtgcagtggtgccatcttggctcactgcaagctcca

SEQ ID NO: 20048 - DNA, 1999 bp, Artificial sequence
  DNA replication origin
atcgcactgcatttaagggaatgtcctccctctcaggaaatacacactgaagtgtcagtagataaaggggtgttgcatgtccaactctcaactagttcaggaaaaagaacagtggcctgacgcgctgtgcacgcacgggagggagcaggggccagcaccaccgtgaacacggcgaaagagaaggaacctggcggagggcggggagggagtgttttttttttttttttttttttttgcgacagggttttgctctgtcgcccagtctggagtgcagcggtgcaatctcagctcactgcagcttgacctccccacctcctatgagtagctgtgactacaggtgccatcatgcctgtctaattttttatttttagacacaggggtcttgctatgttgcccaagctgatctcaaactcctgggctcaagtgatccatccaccttggactcccacggtgctgggattacaggcgtggcccctgtgcctggctgagattatttcaagatgagtttcaggagacaccaagtggcactcagcaccattttggcctttgttcctctgtgatgctggcgtgggtgtgtggggcactgagcgtgccgggggtactggcgtgggtgtgtggggcactgagcgtgccgggggtactggcgtgggtgtgtggggcactgagcgtgccgggggtactggcgtgggtgtgtggggtactgagcgtgccgggggtactggcgtgggtgtgtggggtactgagcgtgccgggggtactggcgtgggtgtgtggggtactgagcgtgccgggggtactggcgtgggtgtgtggggtactgagcgtgccgggggtactggcgtgggtgtgtggggtactgagcgtgccgggggtactggcgtgggtgtgtggggtactgagcgtgccgggggtactggcgtgggtgtgtggggtactgagcgtgctgggggtactggtgtgggtgtgtggggtactgagcgtgctgggggtactggtgtggtgtgcggggtgctgagtgcattgccctctgcctgtacctgacacagacctcaggtcagaggccaaccctaaggaagccgatacgcggcccgagaggtgaggacagctttgtcgtcataaccaggaaacgtgtgttgtttacagggaggcgtggccgtggccgtggccatggcggggtgggaagaggctcaccaaagttccccaggctgccctcacgagtgtccacacacatctccagcgtcctcaccagccgaaggtcatccacccgggccagggcctgctgtagaaaccaaccgggggtcagcgctggtcctggctctccccactttagttccatccttgcttctggctacaggactctggggctcccgctggagcaggcaccgacgtttccctgcctgggccatgttggccctggcctgggtggtgggatgggagtggatgtgacaggagcagagcttgtgctgcacttggctggggggtcattgcgggagaaggacctgccctgggggctgcccgtctccagagagactcccagggcagacacaccacacccggcacccagagcccggaccgcgccgggccctgccctgagctttgagccatctggtctcccgcttgagtgaaggacccccctctttggttggaggataatggatgctcagcccctacttgtgggttctggcctggctcagtcctgtctgtgacccaaatgcctggggacgtctgtgtcactgagcacctggtgttgctggtgttttggggcctggtaggggtcccaagggcagagtgggtggagcagacccagctgcaggggctgggctgaggccaaccatcagcaggcaagaccagcaggagggggacagagggcaggctggaccatcagcaggaaggagccctgggatgtcaccccacggaggcctctgtggccacagcccccagcgcccacactcaccagccgggcaggggacaggtactcttccaccagctgctctccaag

SEQ ID NO: 20049 - DNA, 1277 bp, Artificial sequence
  DNA replication origin
gtctgagcttccctgctgtgtggacacccctccatgctgtgctgcattcaggctggctacagacgaggggcgcggagccgtgaggctttgggggctcagggccactgagccagaccctctaccaggccccatagaatcagcagacccctttggtggccagaggagcccgcagccctggagcagttcctgggtgccacgtaacccctcctgtggtgtggagggaggcttgtgaggctggcccacgagcagtgaggggccgggggtgctgatgcctaggggtgaaggagggtgcagaggtgggcggggtgaggggccgggccaacctcctcctcctgtggccatacaggggtgcacctgcccaacctggaccaactgaagctgaacggcagccacctgggctccctgaggtgagcgcctgaggggggtgggctggggccctgccatgagggggtccgatgggacaggccctgcagggatggggggagaacttggtgggagtggggggacttgggctgggaccagggacccaggggtctagagagctccatcctgctggctgcctgaccccacgtgaccctgtggagggtggatgggcaggtggggggagcctgggacattcaggcaggtgtgagggggtctctgagagggtctttgttgaaaggacgaggtcctgggccagcctgactcccgggggtcctgcctatgccctgtggtctctggctcagcccagatgtacccccacttgccgtgtgacccctacacatggagctcttgtgtctgcaatgggtgggagcccctgctgcaggtagcacctcactcagagctggggccagggccaaggcagtcatgccaggtcgtgtggccagcaaactccacaaaggtgcccctgacctgggcccagagctcccaccttgaggtgtccctggtgaacaccccaaagccaaccaaggactgggggccttctggcccccgcacggctcattgcagcccaggactttggctgcaccatgaggccacgagcttggggtttgggcaagaacggcaaccaccagccagaacctgcacgtagaacccagaccagacggcagcccctgggagaggcacagccagagcctgtgtaaagaacccagaccagacggcagcccccgggagaggcacagcagagcctgtgtacagaacccggaccagacggcagctcccgggagaggcacagcagagcctgtgtacagaacccggaccagctcccaggagaagcacaggaagctccgtgccccaca

SEQ ID NO: 20050 - DNA, 1432 bp, Artificial sequence
  DNA replication origin
ctgcaagtagcgcacctgccccaggtcctccacgctgttgccctccaggtccagcacctccaattgttccagcaggcacagtgggctcaggtccgagatgttgttgtaggaggcgtagagttcctgggcagcgcggggctctgagccagggcccggcccagcccaggcctccccagcccagggtgcccagactcaccttaagtgctggcaaagaggcgatgccatccaggtcagcgaggccacagcgagccagccacagcacctgcaggtggcccagagacgtgcccaagtccctgcagaaggcagggtttggtggtcaacatgtgcccagccctgtgctcagccaccacctgcctttggctgtcttcaggggtaggggcaggtgtgaccacctatggtggcctctagactgaggaaggggctctctgccttggccttctggctctggtgtgggtacagtgtcccccaccttctccaagccctggagggcctggcttggggagctgccctcgtgaccggtggctcagctgtgcccaaggcgctgccctcatagtgggtggctcagtcccctccctggcaggctgcaggcatcacctttctctttctaattgtctcctcagtagcgtttggggcactcgaatttggagtaagggtctggagtgctgcctgggagcctgagcccctggacaccgatgtggggggcttcgctggaggctgaccccgtgctgagctggcagcttttgtggggaccagctgctggaggtggcggtgggtcagggcggcttgatgtgtgcagggacaggttgcttcctgccgggcccaccctgttcccactgtagccacagtgacttcaccatgcgctgtccccagggaccctgcacctgcccctctcggctgggaggccgtcccttcagcgctgctacgccatctctgcacctctccttgtgaaagggccacctgagctcacaggctttccctgaggagccacagattcctccagggctgggtgatttcttcggaaatcttctttctgtccagttcacggcacccgtaggctgtgactcacctgggcttcattccgcccactgtgttttcagcttccttctgtgggccctcaggtgcattcccggtggtccgtcctttcgcgctgtggagtcagtgtctgtcctcagcctgctgccttcaatggcttttccactccgctctgaattggctgggatttgtgtctagtgatttcttcaagagcagctaatggaaaccccttgatctctgactcacagatgtttgctggctgtgagcttatgcagccattaggctgggtgtcagactctcagttcacgcctcttcccaggaggctgcaaagcctttcgttccagtgtccactgtggcgacgtctaaggagcacttcgttatttctgtccttaaaaaacca

SEQ ID NO: 20051 - DNA, 1176 bp, Artificial sequence
  DNA replication origin
ctgaggctggcctctcacgctgcagccttctagagaggccctcatcttcagaccttcctctccctctgtgggctgctcagagacagtgtcctggcctggggccgggtgtgcacagctctggggaccggggtcaaggctggagaagcgcatgagatgtggctatccgtttctgagaagcctggggtgggggcctcttcctggggggagctggggctcagcagtgggtcctccgggcgcagctgccgtacccagcgggggaaggccgttgcccttcttgatggcctccttcaccgcaagccagtcctggctcagccgcgggggggccggtgggcctgtgtgtgcggccggcacttcgtccaggacctgcagctggggaatgagcttcctcacctctgccctgtagttgtagcccctgggcacctgcagggggagggggagggggagggagggcaggtctgggtccagtgtttccttccggccagctctttccctggctccctttcccagacccaccgtggggcagggcaggggcccagaggtggggatgctgcctaccctgcaggggtgggcttgggtcactctcacaccccagggactgagggactgggctctcacctgctcaggatgtaggaccccactctccagacccaaggccgggtccagggatgccctctggcccatggaactgccctcagctcagggctctggcccacggagcagtagctactgggcactggtagacgctgacctcagcatgtggcagcaccaagcagcagctaatgaggctagcactgtgagctcagggcagatgtgccctgtgtagggtctgtgagctacgccagggcctgcacgcacaggtgtgccagctctgagcagggcacgcagagccccgagatactgcatagggtggtctgtggggcctgtggggctggaggtggctctggacagggcgtacacaggtgtgtgtgtgcacacatccgtgtacacgtggttctttgtgtttccacgtggcttatgtgtggacctcacaggtgcatatgtgggttaagggacatggcgtgtgtgcaggtgaccctgtgggatctagcggggctggtccaggagggtgtcctgggagccgtcagacttccagtgacagaggaggtgaactcatggtgagcaggccatagggtgcgg

SEQ ID NO: 20052 - DNA, 2532 bp, Artificial sequence
  DNA replication origin
catcgctggtcccaaggctcgtggaccatccctgtgtgtcctgtcccgtggggggatcagggctggggctaccttggctgagtcatccccagtcccaaggctcatggaccatccctatgtgtcctgtcccgtggggggatcagggctggagcttctcctcctctccccaccctagccccctcccctataggcacccggagtcccaacaggaaggggctgtagccccctggggcccacggagggtccctgaagagcaagtgcaccaggcagagcccaagactccctccagccccccaagcctggcctcaggtactgagcctgcccgcctgccccccagtgcctgggagtgaccaacaccccacttctataggggggcccttaccccagatcagatgtgtcaacctggccctgcttcctcagccatgctctgagagggactgtaacagggaggcccccttctgggggtggggggctcacgaccaagggaggcccaacccaagtcctctcccaagccacggtccaatccctgtgaccttgtgtgccacccgggctggacgaaagagaggcgttccacaaaagggggtatgaacagagtccagaggagtcgggacagaaagaaggagccaccccagggcaccagcaggcagaacatggccactgggcagctttcagggacacaggcatgagtccgggggctgggaggaaaggcggccagcagccccactgggagaccaaggcaggagggtgctgccgcttcaccctgaagatggcacgcgcacttggggacatagaattaagccatgcagtgccctttacgaaggacactgacttcagtgtgatcacagctgcaaagcagagaggaccctccctcagcgggcaggcaggccgggcagggggcagtgtaagcaggggcgaccccacggtgggcagctgaccctcctctgtgcaggagcctggttaagggggctgggatgggcagggaacagggcaggccaagcctctgctcttccatatggtggtgggtgtctgtggagggggcagacagaggggtcaacagctggttacctagtggccgtgacctgcaggggtggagggagggcaggcagggcggccaggaggaggggagctgcagtggcctcagggcagggtcaggacaaaggcatgccagggctccagacaccggtggaggcgggtgctgggggacccaaggcttgggaaccggcccggggcggtcagccagtgaacaggctctcagggtcaggacacagatgaccgagggtcagagccaggccttgtggtctccttctcagggacaggacacagaggacccagggccagaaccaggcttcgtggcctccttgcctgccccagaggtgggcccgcccatgcgagtcaggggtcacagggctgggaacacagaaagtggggtgcaggggtgctgctgcctgtggacccccaaggaccactgcctcggggctgcagggccacgggtgggctgtggcctccccaccgggtgactcccttccctgacagcctttctgacgtcccatcactctgcttgctttctagagccctccgggacctcgagccagcacctggtcccttcacctcccaagcacccaaggccacgagattctggcagcagctccccgcggtggtcgacagacctgcagtccagggggcgtcggctccgagtcctgggcagctgggggcctggcctgggtgatggggtggctgcagtgcctgtcctgagagccctggaggtggcctcacgcctgagccctcgagcccagggatgtcctggcccaaagccagcaccagatgcagcagctagacctcccagggcagctgaactctctcaccccagccccgtccccacttaatatagcccccactgccaggcttccctgtgctggggccacgacttgcccacatatgtggtcacagagcacagaatacctgggcgggtgtgttggggggtggaaggagtgcctggccctggggaggaccctcttggtggaggggagtgggggactgggaccagccagggaggcagcagaggctggaacccagtttaggcccccaactgggtttggcctggggagggagggtccggctccccagcccttccttagggccaggctttcccgcgggcacgggggtggggggtggtcacccgagcaggcctgtgagaggcctctcctgctagaattgggcatggccgaggggcaggggctggagctgcgagtccaccactcccttgccggccccagggtaagagccacctcctaggccgcagtggcccaaggtcccagctgctcgcctgaggccgccgggggtgcggtccaggcctcccgtctccgggggatctgtagggttcccgcactgcgatagggcggcccgttccctcctcttggcgcaggacgccccggaacccaaaccaacatttccagctctcaggtgtacagaaatgcggtttactttgtaggccacgttggttcaataaatgatgcagcggacacagcccgccca

SEQ ID NO: 20053 - DNA, 2031 bp, Artificial sequence
  DNA replication origin
ggggctcccgcacccggcctttgcgcaggggtcgaggtgggcgcggcggcttgcgggtgtcggcgccgggcccggcctcagggagcgggaagcggtcgatggacaagtcggtgccgtcggcgaagaccctcggggccggagtctcgcggcgtgggatccggtgctcactgaggacctgcggggcgcgtcggtcacccccacaccccagccccggccgccccaccggggacccgcaccgacctcgcccttggggctcaggagcagcgtcgcgcagccgcggatggagaggaggggaacgggctcccggctcgaggacgcgcgcagcggcttcttggcgctgcgggtcgcctcgccccagacctggaggggcgtggagcggcgggtgaggggcggccgggccgggccgtcggggccgggctcccgggccggggcgcaccgtgacgtggtgccgcggggccagcagcgtgcccggcgggaagcggtacaggcgctccgggaagccgcgcaccagctgcttcagcaccatgccgctcaggtcggccgtgctctcctgcgacgggttgaagatgcggacgaacttctcccggcagctcacagccacgatcttcaggcctgtcgggctgggaagagaggagacgctgtgaggagatgcggccggtccacccgcacagctgcgcgccccgcccggaaaccagctccagtccggcgccggaggcttgggtcactcgccccttacctctgcaggagttccgggctccagtggtccgggtctgtgcagggctggggcgacaggaccggctcgccgtgcctgggtgagtgggttttctggagatctagagagagcagcgcttttggggaggggaccctcgaatggagtccccaccggatgttccccgtgaggtcagaacaggcctgcaacgcctggcggggcagggagcagggccagggtcagatggggcaggaaaggtggctggaccttgggggctggagggccacctccagggctctgagtgagatcacagctctgagggggtggagggtgggtgaagggtaaccaggggagacccgccccactgcaccttctgagtccctgctgtagctgccggcctgcaccagcgcttgctcggaggaagcgcggtggtcccggggcgggtgccctatcacctgcacgaaggaaggcaggcccggccggcagctgctggagtcggagtcagcgccccctgagctgctggtgttcagacagggcagggagccccactccacggtcttgtgatgccgctcggaatgctttccagaggactctgggctccctgtgtccagctgtggccagggccggggctgcctgtggaccacgctctgcttgatggccactccagctccagaccccagccctgcccccgtccagcctcacaaggcagtgcagcagggagcccctcttgcctcccagtacccaggctcagttcatggcaggacagtgatggctgcctcaaccccaacgcattctacagatcagagaacgcgcattggaaggtttaagagacttatccagggacactaaatggtcctttagtgtcctgcgtcttcacttgccaaggtgagccctcccttctggcccctggggagtccctgctctgtgcagttacttttgctttgagctgggctccatgttggtgaagaggttgggataccggcgggcaacgctgttccaatccacgtcctccagccgaaagccctggccaggaagcaagaggcacatggtcctcccctcccgcagggctccagataccagaccacacacgtgggaggcctagctcacctccccggtgggggcctgaatgttttcagagaggtcgcttgggtccatcagagtctctgccgtcactacctgcaagaggggaccggaagccagtgggcaggggctgggtgctcccctacagcacctctcctctttgacctcacctgtgctttgaggcctcctgattcctccctgctggagcccagagttccagaggcacctgagcagggcaggct

SEQ ID NO: 20054 - DNA, 1413 bp, Artificial sequence
  DNA replication origin
gagtccctgctctgtgcagttacttttgctttgagctgggctccatgttggtgaagaggttgggataccggcgggcaacgctgttccaatccacgtcctccagccgaaagccctggccaggaagcaagaggcacatggtcctcccctcccgcagggctccagataccagaccacacacgtgggaggcctagctcacctccccggtgggggcctgaatgttttcagagaggtcgcttgggtccatcagagtctctgccgtcactacctgcaagaggggaccggaagccagtgggcaggggctgggtgctcccctacagcacctctcctctttgacctcacctgtgctttgaggcctcctgattcctccctgctggagcccagagttccagaggcacctgagcagggcaggcttccaggcaggccagggcgccccagcagaggcacccgacgagatggggagggctggggagggcagcctggggcaggagggcttgggggacaggctcacctccacactgccagtctgggatcgtagcatgcggcccacccacgaggagcgggccagctgcaggaggcaggacttctgcaagttctgcagctcggcctccatctcctggagcgtgcgggtggtctgcagcagccgctcctccaggtgctccttctcctgctccgagagggcctgtggttggtggtgggggggtgtcttctgcagaaggcccccaggccagccccagcctggctccccaacaccaggaccctgcccactccctgtgcccctgcctcacccactgggctcgctccttctgttccttcaactcctggatcagcttctggacctggttctgcaggagtttctcctgactgtgggagctcctggaggaggggtgacctcagcagcccccaccctgctcaggcaggggttcctaatgtcaggtcagtggcgaaggaggggagaaggaggggctccactgccaccttggccccaagggcacacagtacagccccgctggggctggccagcctccggctggtctggacaagggtctagcacccatccacatgcgcagggttagggtggaggctatagcgtgttaacttaggatcagggtggagggtcagcgcgggcaaggatgagggtaaggatctgcctcagcggttggggttggggtcagacagaaaccaggagtccgggcgaggacagggcggggttgggttgggctggggactgtgctgcagacctcttgggcggaagccccgccacctcttccaggatgtggcagagccgggcgtcctcgccattctggatggcccaccgcaaggcctggatctccagttctcgctgtctccacagcagccgcagtgtgcgagggtccagggactcaagagccaacctgcagcggcagcagaccctgc

SEQ ID NO: 20055 - DNA, 1501 bp, Artificial sequence
  DNA replication origin
caggtgcggcgccgcccccgctctccgtccgggcatcgcggaaaactctccccagttggagtcggcgtccggccggctcgaggcgcgccccgcgctcccaagtaccggggacccggcgcggctcacctgggcgctcgccagcctggagacccgctccggcgccgccgcaacctgccgcccccagcgccgcggcgcacccgggccccgcgcccccattggcccgcggtccgcacgccccgcccctagcacccctattggctgctcagcgcgggcgttccgccccctccccgcgcccattggctgcctctgtcacgcccctccccgacccattggctcgtcgccgcgccccgccccccccgagactacaggtgtgggcgggtcggaggggggcgccgagccgcagtccccgcccccacctcccgcctaccgcgaaaaacgcggaaatgcggtggctgcggcccgcgggcaggcgtcggggtaggtgtctggccccgctcctgggccgacttcctcagcagccttctagtgtggcgggttcccgcccaggaagggtctctggcttgagatcccgcaacccccgcctgcgtccaggggcagcggggccagcccctcccctcgcttcccgggccagcctttggggcctaccgcagctgcagtagtctggacgcgcaggggtcgcggggtcgcagggtcaccagtcccggcgagggaggtggagccctgcggagctggcgggcgcagagtcctggtgcgggaggtgcccgctcagaaggcccggactctagctgaggctcttctccgacaccttcctgccccttttggacccagtgccaggccatgcacacagtgaagctggctggaagccgctccttcaccccctaccctactgtcccgcccagggccccgcagcctcgcggtcagctgtgtgggccattgattgttctgcccagctcagaaagagttgtgggcgtgggcctcctgcccgcctgtctcctgtgctcccccagggagcccttacatagccgaaagttgcagagatgaagggtgaaagctggaatgattgggttttaatgggtcaggtctgggacctggcttttctcctggagcagagggaatacttgtcatggtaatggggtagcccagagggtgtggacacggctgggaaaagtgaggcttcagtttgggggtcaggtaggtgagtgcctgtcactgaggtcaaaggagctgtgggctgggcctggcggtggaggcgggtgcctgtagtttcagcaagtcaggaggcggaagtgggaggatcacctgagcccaggaattcgaggttaacgtgcgctgtcatcacaccgaagcattccagcctggacagcggagcaagaccctgtctctaaagaattaattattaatttaaaaacaggctgtgggcaggagtgtactattgccagttagcgttcagcacagtccccagcttgtcactgttacctgtctgcttcccccacacacccat

SEQ ID NO: 20056 - DNA, 1656 bp, Artificial sequence
  DNA replication origin
caatgggggcgcggggcccgggtgcgccgcggcgctgggggcggcaggttgcggcggcgccggagcgggtctccaggctggcgagcgcccaggtgagccgcgccgggtccccggtacttgggagcgcggggcgcgcctcgagccggccggacgccgactccaactggggagagttttccgcgatgcccggacggagagcgggggcggcgccgcacctgcgcccgccctgcggaacggggacgccctggctcccgccaggctggggtcgcggcgcgggcttcggtgcccgcggcggggaccgggactttcggggcgagcgcagcgattaggcggcagcggcggggctccccgggctggcgggggctgctcagacccggagtctgctccatctgcagggtcgaggtctgggttgcgaccccgagcgcctctgcggcctgagcaggtcggggtggggcgttcccatgccggcggccgcggggcctggcgtgcgggcgcctccgcgccgcccggggagggggcagtgtcctccgagccaggtgaggcgagtaggaaatgctggatctggttaatgattcgccttgttccgggagtgcgagcgtggcaagaggaagctggtgaagtgggggaggatgcgtgctccggagggccgccaccccaggaatgtgtggctggcgggtggggctggcacaggagggtggggcccgtgcggaggggcggcagcccagccgtttctagggcaggccaagaggatgaggagaggaggaccagcctgcgataggagtaggcaggtcctgacccggtgcctgcgccctccccacaggacaggcatgttgttgggactggcggccatggagctgaaggtgtgggtggatggcatccagcgtgtggtctgtggggtctcagagcagaccacctgccaggaagtggtcatcgcactagcccaagcaataggtgagtcctctcggggtcaggcaggccgggcaggtagagctgaagtgggacctggtggtccagctccatggtctcccccaaggagagtggggctggttgctgatcctttttgttcttcccaactcttcaagccaggtggacagagagtcggggggacataggctgaccttctcctcttcttcccaggccagactggccgctttgtgcttgtgcagcggcttcgggagaaggagcggcagttgctgccacaagagtgtccagtgggcgcccaggccacctgcggacagtttgccagcgatgtccagtttgtcctgaggcgcacagggcccagcctagctgggaggccctcctcagacagctgtccacccccggaacgctgcctaattcgtgccagcctccctgtaaagccacgggctgcgctgggctgtgagccccgcaaaacactgacccccgagccagcccccagcctctcacgccctgggcctgcggcccctgtgacacccacaccaggctgctgcacagacctgcggggcctggagctcagggtgcagaggaatgctgaggagctgggccatgaggccttctgggagcaagagctgcgccgggagcaggcccgggagcgagagggacaggcacgcctgcaggcactaagtgcggccactgctgagcatgccgcccggctgcaggccctggacgctcaggccc

SEQ ID NO: 20057 - DNA, 2628 bp, Artificial sequence
  DNA replication origin
gcacagggcccagcctagctgggaggccctcctcagacagctgtccacccccggaacgctgcctaattcgtgccagcctccctgtaaagccacgggctgcgctgggctgtgagccccgcaaaacactgacccccgagccagcccccagcctctcacgccctgggcctgcggcccctgtgacacccacaccaggctgctgcacagacctgcggggcctggagctcagggtgcagaggaatgctgaggagctgggccatgaggccttctgggagcaagagctgcgccgggagcaggcccgggagcgagagggacaggcacgcctgcaggcactaagtgcggccactgctgagcatgccgcccggctgcaggccctggacgctcaggcccgtgccctggaggctgagctgcagctggcagcggaggcccctgggcccccctcacctatggcatctgccactgagcgcctgcaccaggacctggctgttcaggagcggcagagtgcggaggtgcagggcagcctggctctggtgagccgggccctggaggcagcagagcgagccttgcaggtgagcccggggacctgatcccctgtcactcccccacccctgatatgggcagatacggggatcacagggtcccactcgggaggcaggtgagcccggggacctgatcccctgtcactcccccacccctgacgtgggcagatatgggggtcacagggtctgactcgggaggcaggtgagcccgcggacctgatcccctgtcactcccccacccctgacgtgggcagatacgggggtcacagggtcccactcgggaggcaggtgagcccggggacctgatcccctgtcactccccaacccctgacgtgggcagatatgggggtcacagggcccgaccagggaaagtgctccctccggagcacaagggctgtggagcccagtggctgtgcctcctaaggatctcatgtgtccccaggctcaggctcaggagctggaggagctgaaccgagagctccgtcagtgcaacctgcagcagttcatccagcagaccggggctgcgctgccaccgcccccacggcctgacaggggccctcctggcactcaggtcggagtggttctggggggaggctgggaggtgaggacctggcccagccccactccaagctgacttcccaacccacagggccctctgcctccagccagagaggagtccctcctgggcgctccctctgagtcccatgctggtgcccagcctaggccccgagggtatgtctgtgccccacctccccctggggcaccgggccctcctgtggctgcagccacctcagcctgtgtcctcccgcagtggcccccatgacgcagaactcctggaggtagcagcagctcctgccccagagtggtgtcctctggcagcccagccccaggctctgtgacagcctagtgagggctgcaagaccatcctgcccggaccacagaaggagagttggcggtcacagagggctcctctgccaggcagtgggaagccctgggtttggcctcaggagctgggggtgcagtgggggactgccctagtccttgccaggtcgccagcaccctggagaagcatggggcgtagccagctcggaacttgccaggccccaaaggccacgactgcctgttggggacaggagatgcatggacagtgtgctcaagctgtgggcatgtgcttgcctgcgggagaggtccttcactgtgtgtacacagcaagagcatgtgtgtgccacttcccctaccccaacgtgaaaacctcaataaactgcccgaagcagcttgagtgtgtgtggaggctgcgctgggcagggtctgaggtcttgaacttgagcctccatggggtgccactgagcagtaccctgacacacctggggctcaccacagctggagtatctgagaataggatccctcagggtgctcagtagggcccagggctggggcttcctgagctccacattccatctgctctgcctcacctaaccccaggggctctcctgtgagggccccagcctggtgggcctgctggttcagcctggcctgactgtcccaggcatttgtctggaccccctcccacctgactctctgtcatgttgcctgtgccccgccagcagcgggaactgaggacgtcaggacaagctagacccgcccgtcaggtttactgagaacttgtgggggtggatcccacactcaggtcagccagtcccaggctgcttcaccaccccagggagggtatgggtaccagtgggcaggggctgcctcctcttctccaggtgggtgtgaaatgtctgctctgagcttgcagctttgaaatcagggcaggggccaggcatggtggctcacgcctgtaatcccagcactttgggaagctgaggcaggcggatcacctgaggtcaggagtttgagaccagcctggccaacatgatgaaaccccgtctctactaaaaatacaaaaaattggccgggcgtggtggagggtgcttgtagttccagctactcgggaggctgaggcaggagaatggcgtgaacccggggggcggagtttgcagtgagccgagatcgcgccactgtgctccagcctgggcaacaaagcaagact

SEQ ID NO: 20058 - DNA, 1622 bp, Artificial sequence
  DNA replication origin
acgcgccctggccccgccgcgccctcgcagctggcgccccgcaggccccgcccggcaggtgccgcccctccccgggcagacgtgcagaaaagaacgcgccggcctcgcccgcgaagggccgcgcggcggtgggcggggcgtcgcgaacccccctcgcgcccactggctgcgttgcggtagggcgggcccggctaggccggccattggctgagggaccaggtcatttgcatacggggctgggcgtggagccgcggggcccggggccggtcgggtcgggccggggggcgagagggtgccagcggccgcagctgaagttgggccgagagccggcgacggccccgcgccggggtcgcaggtgacgcgcgagggatcccaggttggcgggcggggcgcccctcagaggccgccctcccgcgggggctgcggggggtcgggctgggcaggcgcggcggggctcggacgcccaagttggaggggacgggggtggggtcaatccctccgcccgcccacccggcagtgcctccaggcgcagggcagcccctgcccaccgcacactgcgctgccccagacccactgtgcgtgtgacagcggctgatctgtgcctgggcagcgcgaccctcctggccccgtgtccgggtctggcgggcaggcgagcggccacacggggacgcgagggcagctggataccgtggggagggggtgccctatggacggggtgtgcctgtctggccagcagggacggcgggtgggggtaagcgaaatcattcgggggctttgctgccctccgcttggtggggctgaggctgggccagataccctcttggagggaactttcttttccttgtgtgtccagggtaccagtgtgcggagttcctgttgccaagctgaaggtggccctgggcaggcacaggtgtggtcatatcttcagccaacaggaccatcctccggagggccacctctggggacttcctacgggaagagagtgacagatttggtgcttctgtgtgtttctgccgcttcagtggggccgctgcgggagacagcgggtggatcctccagcagcctgtctgctgagcctgccttctcaagtctactgttaaaatcaggaccgggtcgtgtccgagcctacaggccctgtctccgctccccaggcctgcaggagttgagggctgcacctgctcgctggagagggagaggcagatttagtggacgcctggcatggactcggactggcctttggaagctccctgccctgacggggttgcctgtcaccactgcgaagtgaggcttggcaggacctgcacctgagaaaggctgtgtgtggtcttggggtccacacctgcagagctaacttactgccagacggcgacttactgtgggccaccctcagtgaaccggggtgtcctcagctggccctacagagcacttctgtgctggggatgagtaggaactctgggcgaggagggtcccagcgccgcccctcgatacagcctggctctgccctctgcccgtacttacaccaggtgggatccctgccctgcattgcctggggattggctgggcttgggcccgccctgctgtggaactggatgttttcagggagcccagcctttcctcatgtc

SEQ ID NO: 20059 - DNA, 905 bp, Artificial sequence
  DNA replication origin
cggcacctgccgggcggggcctgcggggcgccagctgcgagggcgcggcggggccagggcgcgtcccccggccgggcggatggtacggcccgaggtggtcctcctcccgccgcgcggtggtatggcccgggctcgcggggcttccgggctgggcgtggggcgcagcctggcgacgggtcctccgcccgcgggtgtgcgtggggcggcagggccggccgggagctgcccctcttcccgcggcgcggtggtacgacccggccgcctccgtgccccgcacccgcgtcccgcgggcccgccccccccaacccgctgggcgcccggcgcacgtatcccgggccgtgacccgggtggggcctgcgcgggcccggacacggcgtcctcgggacgcacgcaccaccccccgggcggcttggggtccccaaaggacgcccgggtccgtcctgctggcgaagagggggctctggctctgcctggtttgcctggcgacccccacggggcgcccttgggggctctgggtccctcctgcgcgctctgtctccgcggaagcctctggagcctggagggggtgcctcaagggctcaggggtcttcgcagccctgtgccggtctttgaggggacgaggcgagagaatcctgtctgtgcgctgaaaacgtgtaaaatcaaaggagccttgacggtttgaccttcgttaggactcgcagggccagcttcagacgtggaagtatcggactccggggtggggctccaaagtggcagccaaaggagatttggccgccggccccccttggcactgtcaccctggtcctcggccccgggccgtctcccctcagctccctggccctaaactcaccgccctgctctttgtcctcccctggccccatgacctccctgcctcggcatccgcg

SEQ ID NO: 20060 - DNA, 1129 bp, Artificial sequence
  DNA replication origin
tggcgacccccacggggcgcccttgggggctctgggtccctcctgcgcgctctgtctccgcggaagcctctggagcctggagggggtgcctcaagggctcaggggtcttcgcagccctgtgccggtctttgaggggacgaggcgagagaatcctgtctgtgcgctgaaaacgtgtaaaatcaaaggagccttgacggtttgaccttcgttaggactcgcagggccagcttcagacgtggaagtatcggactccggggtggggctccaaagtggcagccaaaggagatttggccgccggccccccttggcactgtcaccctggtcctcggccccgggccgtctcccctcagctccctggccctaaactcaccgccctgctctttgtcctcccctggccccatgacctccctgcctcggcatccgcgcaggcctgggccgcagcctgccccctgccccagccccggcggcaaagtgctggggccccagggagcttccgaaccagcccatgtcctcaggggcttgaaggctggggacaaaaattcagatgcagagtctggggtgactcagacatgatcagcaagacatgaccgaggtcttgctgaccccttgacccttggcccccgatagaaccgagtggctccttgcacctgtggctgcctgtggatggggaaggtgcccagaggatcacggagccactcggttctattgggggtcaggggtcagcaagacctcgatcctgtgggtcgtgaaggagcctctaagagtcagtggggtccctgagaaggcccacgtcttcatggcagggcagaggctcctagggcagtcagactaggggacaagaaggggcaagaggacagggcagctctgtgttcctgtcgtgccctgctgacgtgaacccacttctgcccccagtcctgccaatttcacaggcaccttttctcagcatctgtagtgagtgggatggtccctccgccaaaaagaagatatatccacatcctaatacccaggcttcctaaatgtgccctcatcgggagaaagcatctttgcagatgtcattaagggaaacatcttgaaacgagatcatcctggactttctgggtgggccctaaatccaatgatcagtgtcctt

SEQ ID NO: 20061 - DNA, 1545 bp, Artificial sequence
  DNA replication origin
tccgcagccccgcccccaccctcgcagccccgcccccacgccgcaaccccgcccgcagctcctccctagccccgcgcgcggcgggagcacctggggagaagagtcctggcgtcgcctgctaccagcgccgcgctcctctgaacaaacactgccggagccctccgtgagccggctattccagcccagccccgcgtccgcccgtcccgcagcaggcgcggtgaatcgtgcgcgctggcggacgaggcgggctcggcaggacgctgctgtgccgtcccgtgtggatttggctccaggtcgtcctgaggatgccgcgcagaagccgtgtgggcctcgggacgcaggcctgcgtggctgcagcgcaccaggggaggctccggggatcccgagctggcgcggactcgcgagaccccctggccgctctgcggggagcgctggggaggcgtcccgagcgggcgccagagacccgcgggctccccgtgcaggggctgcctgggctggggcccgggtgggtctgcgcaggtgtgggaagtgccggctcccggtagatgctgaaggcggagttgccaggatttgctgcggacttttggagaaatgaggcggggaaggacgagcttgagaaccgacgccggagagacggggaagacgggggaggcctgagcgcgggctggcatggctggggaggttgtgcactgcccaagaatgctcactgaggagcgtgttcacgtctcatcgtgggtgtctgtgtttattatgacaactaccagcagcccccgaggagcagcgacagatggaggtcgggggctctaagctgaacacaggcggtcggtcctccttcccaggagcctcagcgtgtgtgtccgcaggtgcccctttatctagcgcccttgggggaatgggacgtgtcagaggagatgcagtgggcagaggctgcactggatgaagagaactatgtgggaatcgcatgtggggtgtgactggggaccagtgcctgaactctgggactccaacttgaagaggtttggaatctgcaaaggagactaggaaggggcacagggggtgctaggggtgggggccggaggacaaaccaggagaggggcttctggaagccagagagggcgtgcacacacaggcgggggagggagcctgggtgcagcagggtgggccactgcgactcaccgagggccagcggcgctggggccaggggctggagtttggagagtgagcagagagcacgcaggggctgtgaacaccaacttctctttcaggtcaatttgctgcaaaggggaaggtaaaggtggaggtaactaaggagcagggcaagagaggggtgtggttttctgtagggtccagccctacgggggcttagcaggtgtcctccccgtgtgcagagaccagagattgtaataaagacacgagataaagagcagctgggccccgggggaccactaccatcaagacgtggagaccggtagtggccctgagcgcctaggtgcgctgatatttattgcatacaagacaagggggcagggtaaggagggtgaatct

SEQ ID NO: 20062 - DNA, 838 bp, Artificial sequence
  DNA replication origin
tctgcgcggcatcctcaggacgacctggagccaaatccacacgggacggcacagcagcgtcctgccgagcccgcctcgtccgccagcgcgcacgattcaccgcgcctgctgcgggacgggcggacgcggggctgggctggaatagccggctcacggagggctccggcagtgtttgttcagaggagcgcggcgctggtagcaggcgacgccaggactcttctccccaggtgctcccgccgcgcgcggggctagggaggagctgcgggcggggttgcggcgtgggggcggggctgcgagggtgggggcggggctgcggagcagcgggcgtgaggcggggctgcgagggagggggcggggccgtgggcggccgtcccgaggcagggcggggctgcagacgtgggggcggagctgcgggcgcgaggcggggcggggctgcgggggtgggggcggggctacgtgcgtgggggcggggtggggctgcgggcccgaggagggacggggctgcgggcgtgggggcggagctgacgtacaggaagcagctcccattcgctctgggcggtgggcggagatccgggcggtaccagctgtcccggccgcgggggggacggcctggaccagcccatggtcgcgggttaaacagtacgagctcttccaggatattggtctccccgggcggcagtcctgcattaaagagtgtttccaaggtggaagggaggccgtttgaacgcctcgagacccccggctgcaaggagtggcaccttcctcacttcagtcatttctttcccgctctggtctcagtggttccagtcagcgagcaggacagaggagcccggaagag

SEQ ID NO: 20063 - DNA, 976 bp, Artificial sequence
  DNA replication origin
gtcgaagagcgcacggcggcggcagaggcggcggcggccgggcctaggagcgactctcggtcgtgcagcggcggcgagcgctcgcgagcggctgcgggacgcgaggtttccgggtaagtgcggcggccgcgccggccctgggggccctgctcctccgggccgcgggccgcctgtgggcgccacgcgctttgtctgcggcctgcaccgcggggcgaggcctgcgccgcgctggccgcgggccgggagggcgggcgggcgcgcgcgcgctgggaggccccgccgagactgggaggccccgccgagactgggaggccccgccgagactgggaggccccgccgagactgggaggccccgccgagactgggaggccccgccgagactgggaggccccgccgagactgggaggccccgccgagactgggaggccccgccgagactgggaggcccgtggcctgcgggcggacgtcctgggcttgcgaggacgcggcgagagcccactcgcctcgctctgtggcacccacgcccatgccccctgcgagtccgccctgccgcgtttgggagagagctgtgacttcgttgccttgtgtccggcccctgtgcatggttgccgtcgtgggcttctggccttgtctgcatgtccacaggcctgtgtggctggcggttttcctattccttaactcttgcagtcctcacaagagcctctcaggtgtaggtattgttcccgttttacagaggaggggattggagcccagaaaggctaagtaactggccagcgccggcagccggggatccgcgccagccccgactcctaccatgctccttttgacggggcttgtgttgccccttcttcggagtttatgtgctttacttgtttcgacaacagcagaacagcagtcagctgggtgaaccacgttctggccagtggtcaatggacaggctctgaggccgagctgaggtttgacttcgggtttggca

SEQ ID NO: 20064 - DNA, 1095 bp, Artificial sequence
  DNA replication origin
gcacaggtcagcccgagccagggctgctacttggccggcagccacagggggagccgttgggggaggcgtgtggcctgtgagtgtggcacatcagccctggtggttcttcccagatgcgggtcccgtgagtgaggaggaggtctccctgctcttggctgatgtggtgcccaccaccagcaggcttcggcctcgagcaggtaggacccgggcgatagccaggacacggcagagtgagagagtgagagcaaccgtgaaccggaaccggatctccacggccaggagggtccaggtgggtggcccagccctgacgccagtcgtagaaccccagctgcccagagtgatctcggcagtctgggtgggtgggaggggcgtcgtcggcactgtggggtccgcccggccccggtggctcatgttgttcggcctgctgaggggagcagatgagtgcaccccagggtgaccccagcggcccaaggtggggctgcctctgagcacctggagccaggtattgaggggcaggtgaagcctggccctggcggggtgggggctctaggaaaccccccttgttccccaggccccatgccagcaccgctccctctaggcacctgtgagcaccttcctcttgcactggacctggtgctcggtttcaggtgctccctgcagcctccgtcctgacagcagcctttccctgggcattggacaagcaggagggtctgggctgtgggcatgtggtgtgtgcccttggcaagcctaacgctgaatttggagtggactgagaaggctgggtggggagggggctgtccctgtccagtgccctgcccagtacctgcgccacccccgccacagtgactggtgccctctcgtgtgcccctgggatgctgtctgtcccccacccgccttgcccccgtgggagtgcttggcagcctctggcaggggagaggaaggccgggccgtggctgctgcagtggcgggtggggaggctgtcctgcttctctggctgccattgtgggctgtgttctgggctccatttggggtctgtgctggaccggctgaggccccaagggcatctgacggcaccacccctttgcctgtagcaca

SEQ ID NO: 20065 - DNA, 1704 bp, Artificial sequence
  DNA replication origin
gggaccacagcctgggggcccgatggcacgtgagggtgttcacccttgggaggggcgacgcctgccttcaggcgatgaagtcccagccacagcgggaggctgccctgtccgctctgcctagaatcagaaggaaacagctagtaactcttagggtttttaggaatttaggaataatgacagcgcttaaaatctaaatttgtgtcatcttctcaaggcttttttggtgttcttgtttgtttgtttttgagacagagtctcgctctgtcccccaggctggagttacagtggtgcaatcttggttcactgcaacctctgcctcccgggttcaagcagttctcttgcctcagcctcctgagtagctgggattacaggcgtccgccaccaggcccagctaatttttgtatttttagtagagatggggtttcaccatgttggccaggctggtctcaagctggcctcaaatgatctgtctgccttgggctcccagaatgctgggattacagatgtgagccatcaaggggttttactgtcagtcatcagttgaattttttgtttccctctttgtgagttttcacttaatgctactacgacgtgatggtgacactgcaatgcccgagagcctctggtagcctgcaggagcttcacggccgatgtgtgcggcattgttcctgcttgtcggtcatcatgcctgagaagcccattgactttggcttagtattttccggctctagtgttcactgttgctgatgaaggcttcacgtggcatttacagagccctcgtagatgccatccccgtctctctgttcatctttttctttgttactggattcagagtgaagccaccactcgctctcgaatcgcgcggacgctgggcctgcgcaggcctgttcacagcagctgcatcccgtcagtgttgaagccagtggagccctctttggggctgctgagagcggatattggagctgcctctctgtctctgtttggagatccttatgagctggatcccttcgacaggtgagtgaactggtgatggtcctgcctgggcacccgctcctctccctgggggctgtgggcacggggccccgaggtgcatgcggaggcgttaggttttgtgtttgagagtgagggtggccattcctcccaccgccatacggtgcaggtgggtggcgtggaactcagaggtctggttcggggcccgaatcacacgtgccgccacatggccagtgctcggccatcctcctccgtgccgtctccctgggctggggtttctgggagctgggagtcacttgttccctttggcctgtgtcctcccctctagcagtgaagagctttctgcaaaccctctttcccctctgagtgccaagagacgggctctgtcccggtcagccctgcagtcccaccagcccgtggccaggcccgtctccgtggggctttccaggtgtgtgagggcagaggcttctggggaggtgggggcagcagttgggcatcggatgggagttctagggtggggccgtgatagcctggctctctgtggccctgggtggcgtcagcacctcccctcagctgtcatgctcatcagtcggcccttggcgtgaggcagtgctgcagcccatcctgtgtcagaggccacggcctgcctgtgagcgtggactgggagttgctgcagctccacgaggtggcccctctgccccccaccccggcctg

SEQ ID NO: 20066 - DNA, 1149 bp, Artificial sequence
  DNA replication origin
ggcctgagagccaccagcacagggacaccgcctcgggcaggagcagtggccctggtgaataaggctgtcatcagaggtcaccttttggccagttcttttgtttcgccacaagaacaaaaaattaaccaaaaccaacaaaacaggtaaaggtgcttgtctgccccctcccacctgttggtggagttgggggtggcaaaggcaccagaggtgacttctcccaaaaacgcctggtttccctggggccagagctgcgaggtggggctccctccctccctccctctgggaggccccggtgagcacctcttagaacagcagccggagccagggctgtgggggaggcgcaggcccggcccagccccactctccctggctcccgcctgctgcggggctctgcctgggtgcgggccctcaggccgtgggaggcagtgacggcagggccttgggtctgtgcccacaggaggcgcctccctgccgcggtgccagagccagacttggaggaggagccagtgcctgacctgctgggcagcatcctgtcgggccagagcctcctgatgctgggcagcagtgatgtcatcatccaccgcgacggctccctcagcgccaagagggcgggtgagtgccttccctgccacggccccttcctctgtgggctgctggtcctcaggctgttcgcaagcactcagcccatgtctcagtcacggaagatgtagctgaagttggggggaccattcctcagccatttttctgcattgatttcccttcttgagcagtttctcagttagctccgagttcttacccagccccacagcttcatgttcataagaacatgtcctgatggggtactgcccccgcccctggttaatatcgtgtcctgatggcctcaggcactgtactttgtcatccacagagtggctgttgaagcagctctccgggtgtggaaaggcgaggtgtccacctcaacaggcagacaggagtttaaagcgcacgacctcacagaaaaccagttgtgataaaaattaaaccactgacatttaagaagagtgggtgggaaatgattgccattgacttttttgttttttagctccagtttcttttcagcgaaactcaggcagtctgtccagaggggaagaaggattcaagggctgcctg

SEQ ID NO: 20067 - DNA, 1156 bp, Artificial sequence
  DNA replication origin
gtgaggagcgccccaggaggcagcggtccaaggccaagagccggcggtcctccagtgaccgctccagcagccgagagcgagctaagaggaagaaagccaaggacaagagcagggagcacaggcggggcccctggggccacagccggaggacgtcccggtcgcggtcggggagccctggcagctcttcctatgagcactatgagagtaggaagaagaagaaaaggagatcagcgtccagacctcggggaagggagtgctcccccaccagcagcctggagaggctctgcaggcacaagcatcagcgggaacgcagccacgagcggccagacaggaaggagagtgtggcgtggccccgagaccggaggaagcggaggtcccggtccccaagctcggagcacagggcacgggagcacaggcggcctcggtcccgtgagaagtggccgcagacccggtcccattccccagagaggaagggggctgtgagggaggcttccccagcgccccttgcacagggggagccagggcgggaagacctccccaccaggttgccagccttgggggaagcacatgtctcgccggaggtggctacggccgacaaggcccccctgcaggctccccctgtcctggaggtggcagctgagtgtgagccggacgacctggacctggattatggcgactccgtggaggccggacacgtctttgatgatttctcaagcgacgccgttttcatccagctcgatgacatgagctcgccaccttctcccgaaagcacagactcttccccggagcgagacttcccactgaagcctgcgttgcccccagccagcctggccgtggccgccatccagagggaggtgtcattgatgcacgatgaagacccttcgcagcccccacccctgccagagggcacccaggagccacatttgctcaggccggacgcggctgagaaggctgaggcacccagttccccggatgtggcgcctgcggggaaggaagacagcccctctgcgagtgggagggtacaggaggcagcccggcctgaggaggtggtttcgcagacccccctgctgcggtccagagccctggtgaagcgggtcacctggaacctgcaggagtcggagagcagcgcccccgccgaggacagagccccccgtga

SEQ ID NO: 20068 - DNA, 3051 bp, Artificial sequence
  DNA replication origin
tggcgggaatcggggccatgcccggggagctgtcgggagtggcgggaatcggggccatgcccggggagctgtcgggagtggcgggaaatggggggcatcaccatgcctgccgtcgggttcctgcgctgacacctggtctgtgcacctgtgttgctcacagttgaaaactggacacttttgtatgtatattatagagacactgtttccattctaatttatcaaaaatggattatctttagaaacctcttgattgacttactacttggaagataaagcacttggtgatcaagaggggctcctggtggggtggcgcgtccttgataaatctctaggtggcctcccgccaacagctgctgtgtacctttggctctgaattaggaatatctttactttctcttttccaattatgttgtgctcttgtaaataattgctcgagtttgcactcaacaccgttgcctcctggaggcagggtgcagcagtggcagcctgagggctggcgacaggtgtcctgcatggggaaatgctgtccctgcccttggcacagctggtgggagtggctttggcggccactggcctgtcaagggtcttgttctttgagtcaaagcttggctgtgatgtgtgtggtgaagacagaagtgagttggtgtgcagggaggccgtggaggtcccctccctccctgggcctcacccgtgttcagcctggacccaattccccaccagccaagatgccagtacgtgttctggagttctttttattagactgggcggccgcggccagctctaggtgggctgctccagctttctggagttctcattagactgggttctaggcgggctgctccagctccataaggaagcactcgatgtcgtcatagaggctgttggcgctggacaggcagaggctgaggctgctgctatccagggaagacacaccctcacgctgcgtgccctctaggtgcactcggcacagccagggttccagctgccaggagggatcgggcgtctgtcagtgacccggcgtgtgtcctcccctccccctccccaggctctgagggcgtcgggcgtctgtcagtgacccggtgtatggcctcccctccccctctccgaggctctgagggcatcaggcgtctgtcagtgggcctgagcacatggcctcccctccttgaggctctggtctcaccttcaccaggaccaggctcttctccttgggcctcccagctgacaggtcctgcccgaagcccaggtagatggtatagcgtggggagccacggcgctgccgtgcccggaattccaccagctctgaagaaggggactctgctgagtacctggcaggcaggtgctcccaaggacccctggagacagccccccaggcaagggcctcactgaccttggaagaagactctgaagtcgaagatgggggtgtcacagttccgaggcagcaggcaggctggggtggaggggctggcggagcctgggggtccgcccacctcccagtacaccttgcacttgcccatgcgccgggcccacagctgtggcccccgaagctccaggtgcaacccaggggccacgtgccgcagcagttcctccgtgtagcgcagctgcttctggtccgggagctcggcagggctggggaatgctacctgctgggggtctgtggcccggacagctgggtctggggggccgtataggaacgtgcagctcgggtgtcccaccaccttctgcagcaccgtgcggcccttgtacatgatggtcacgtccagcgcccctgggctgggctctgtgtggagaccaagctgtgagtgacgggggtgggcggggacaggctgtgagtgacgggggtgggcggggacaggatgtgagtgacgggggtgggcggggacaggatgtgagtgatgggtgggcggggacaagccgtgagtgacgggggtgggcggggacaggctgccccttcctgggatgcactcaccttgcaccgcggtgcaggcgcttggggagggtgacaggtacggctctgcctggtgcggggactctggggccgcggcctcgcctgcatccggaagggaatcctgtgctggcacctcatccctagcctctccctgtgccccaggcctcccaacccctacccctctcacctgtcgttagtgccgcgggctggggcccggggctgggggtcgtctctactgcccacccgtacagctccccagcagggagccctgggcctgaggaggggaggacagtgggaacggtggtcccctcctaattctccagctccccaatccccagcccccttctaaagtgtccgtccaggtgcactggcccctcccgcgctccccccctccccgggcacgcccacacctccagcacaggccccagtcaggggaagcccttcttgtccctctccaggagccttggttgggactggatctgccccccatgacgctgtcagcagatggtctgccaggcagctctgttgcactgcctggagcaggaggtcccccttgtcaccagctggggcagggagggggcctggggcttggagtccagcatgtgtgtgtgccaggaatggccctgggggcccaccctgcagggaaaagtcagggtgaacgtaagcagctccgcggcctggcaggaggagaggcaggcagagagaagggtacctgtggtggtgggacagctgcgggggcctctgcctcagtctggtccgtgcctgggccttctgagagagaatggggcaggcgttaggccccgacaccagagtgagagatacaaggagagcctggtgtagcccccaccagcttcctggctgtgaacccttaggctgtggcctgaggaggtggggatgtggctctccacctgtcctgggcctgctggcagcctctcccagaacagcttctaaaaccacaaatctgacccagagaatgttcccctttgcccaagcaggacgaatgccaacgcccttggcagccggcgtcgctcacctcgccagcacagctcccggctgagcgcgtacaccttgtgcgggtcggccgggtcccccgagttatcccgcag

SEQ ID NO: 20069 - DNA, 1061 bp, Artificial sequence
  DNA replication origin
gcacagctcccggctgagcgcgtacaccttgtgcgggtcggccgggtcccccgagttatcccgcagcatcacgaagcgacgcgtgctgcgcagtgcgcagcggaagttggttttccagccggcgcgctccgcagtctcagcctcggggggcgggccacctcccctgctgctaggcggccacctgccgcgggccacagcccaggcctgaagagggggacagaacacgtgtgccgggcccgcggggtcctaggcgggctctcccacccggggcggggcggggctggggtccccaccttgaagatgcgcgcgtcggcctcgctcaggtccttgcgcgcgaagtgcttccagggcacgcggaaacaggtgcgggcctcgtccagccactgcagcccctcatagcagccgctgctgatctctccaaggagccactctccgaacagcacgcgtggggctgccctgcgggtgcccggccgcggagagtcagggccggctgcagggcgctcggggactggcatctggagagggtgggccgggctcttacctctcaggagccaaggccattgctccttctgcaggggcagttaggtggcggtcaggtgttataacaggggaggtaagggctcctgtcgcagcagacgccaggccgcggccacaggtcgtgtggccaggtgtcacaggtgtccacaggtgtggactgagggcttgtagccaccgacgctgcctcggtatggatctcttggcagagggggctacaggtgtgactgcaggtgtggccggcgcgcacacatgaagtcacaggtgttgaaccagtgtccaggcctggcgggaaggcgcaggccggaccctgcggagacgggaaaggcgacgtcaggggcgggtcaggctcccgggaaagcgaaacctaaacagtggcgcttcgcaccctcctcgatcccaccccgtccggttctcagctccgcggaaccccgcctccgcctccgcctccctccccgcccgaccctcatctctcaggctcccccagctcttggctctacccctccggggtcacggagcccccacgg

SEQ ID NO: 20070 - DNA, 1008 bp, Artificial sequence
  DNA replication origin
agacgccaggccgcggccacaggtcgtgtggccaggtgtcacaggtgtccacaggtgtggactgagggcttgtagccaccgacgctgcctcggtatggatctcttggcagagggggctacaggtgtgactgcaggtgtggccggcgcgcacacatgaagtcacaggtgttgaaccagtgtccaggcctggcgggaaggcgcaggccggaccctgcggagacgggaaaggcgacgtcaggggcgggtcaggctcccgggaaagcgaaacctaaacagtggcgcttcgcaccctcctcgatcccaccccgtccggttctcagctccgcggaaccccgcctccgcctccgcctccctccccgcccgaccctcatctctcaggctcccccagctcttggctctacccctccggggtcacggagcccccacggaggctctcgctcccggcctgcaccgcgtgggtctggggtccccagtacctgggtgccagagccgccgggacgggaagtttcgtctcgcggggaagcggagggccggcgcttttatggtggccaggcgggagtttccgggaagggcgcgcgccgcctgttcttattattggatgcgaccagcggaaccccgccccggccagcgcggagtagggaggagtggagggcgttgggagtggctgcagtgagccgagatggagccactccactacagcccaggggacagagcaagactcagtctcaaaaaaaaaaggaagtgggtaatgggaggtggacgtgcctcgaaaaaggggcagctgcaccgtttgcgtttctttttttgagatggagtttcgcttttgttacccaggctggagtgcggtggcacaatcttggcccaccacaacctccgcctcccgggttcaagtgattctcctacctaagcctcccgagtagctgggattacaggcatgaaccaccacgcccggctaattttgtatttttagtagagacggggtttctctatgttggtcaggctggtgtc

SEQ ID NO: 20071 - DNA, 1502 bp, Artificial sequence
  DNA replication origin
cggaaccccgccccggccagcgcggagtagggaggagtggagggcgttgggagtggctgcagtgagccgagatggagccactccactacagcccaggggacagagcaagactcagtctcaaaaaaaaaaggaagtgggtaatgggaggtggacgtgcctcgaaaaaggggcagctgcaccgtttgcgtttctttttttgagatggagtttcgcttttgttacccaggctggagtgcggtggcacaatcttggcccaccacaacctccgcctcccgggttcaagtgattctcctacctaagcctcccgagtagctgggattacaggcatgaaccaccacgcccggctaattttgtatttttagtagagacggggtttctctatgttggtcaggctggtgtcgaactcccgacctcaggtgatctgcccacctcggcctcccaaagtgctgggatttaggcgagagccgccgtgcgcagccccctttgggttttttacattgttcagtcaagaatatcagatactctcacaattaaaacatttggaaaggaattaatggtgtatttccattagggaaagtgctgacaagccgcaagggatcccttgatggttctgggcatgggcgcccagcctgggctctggctttgggagcagcgaggggaatgtgtctctcacccctaggcctcctggtctggctcctgctcaggccacacggcgcacccacccccagcgcgcctcagtccaggtcactgggcagggtgtttactgctgcgctccaacccaagcatgtagatttcagaaggggactaggacccccggcaggtgtttgagaccaccggctcccaagtgcgtcgccttgggggtttgcatcggctcctcagcctccccaggcaatctctgtgtagggtcgggagcgggaggtctgagatgagccgggtgcctgagatctccggtgcaggtcgggggaggggagcccccctcgggctgtggttagagcgggagaggaacttcccagactagctggcacagagcctcgggaaggcggcgggcactgcaggtggtttacgggaagtgctgcagccttggggtggggacagcgtggccagacccaccgcctcatctgcacacctgggctcaagcgctaatgacgacaggggactgagtgaatgggacccccatggacccgcgcgcctgccccacgccatggcctgggtttcgggagccttgctttattctgcctcgggtcggaggctgggggagcgagacctccagtgcccgtgcggctgggggagagggtggaggggccacttagatgtaggagtcatcaccaccgggcgcatcgtagggacccccacccctccccgcgccctcgccctcatcgccgctgccggagtcactggcgccatccacgtccagggtgggcgcgttgagaacgaccacgtctgcctccgtcccgatgtcctcgccaaaccagacagccttgtacccgccctccggccgccgc

SEQ ID NO: 20072 - DNA, 3948 bp, Artificial sequence
  DNA replication origin
agcgctaatgacgacaggggactgagtgaatgggacccccatggacccgcgcgcctgccccacgccatggcctgggtttcgggagccttgctttattctgcctcgggtcggaggctgggggagcgagacctccagtgcccgtgcggctgggggagagggtggaggggccacttagatgtaggagtcatcaccaccgggcgcatcgtagggacccccacccctccccgcgccctcgccctcatcgccgctgccggagtcactggcgccatccacgtccagggtgggcgcgttgagaacgaccacgtctgcctccgtcccgatgtcctcgccaaaccagacagccttgtacccgccctccggccgccgctccttggtcaggatggacctcaccgccgtggggcttccgccagctcgggccgctgcggggggctcaggggcaccgcctggggaggcagggccggggggtgcgggctctgcgggcatcggtgcctccgcgggcttggggtcgtgcgtggggctggggacgggcgcccagttggccttgtggtcagggaggaacgcctggttgtcaaagccttggggctggggctcctgcaggcgggagtcgaggcgtcagcggggtccctgggtctctgcagccttggccctgcacaccctcattccacgctggacacccctccgtctccacatctgtccctctgccctcccctctcctgtcccccgtcccccacttcctgcctggtcgcctgccctgttctccatcctgggcctcaccggagctttgccacagcagcacttgagccgggggccatagtgcttgtggacaaggacggcgaggccaaggagagccagcagcagcagcgcacccagcaccccgcccagggccgccatatccaccaccgagaagcgcttgtcctccgaggggccgccacctggcatcgcagtggaaaacgtcatcatccccgcactgttgagtgccccaggcatttcccatgccaacctgtgccaggcttgggacacttgggttccacccaggcctgggctgtctcccaaatctcaggctctgctgaccctggctcaaggggcctgtgtgtcccatcgagaccctgcccaccccctcccccccgggaggccaagctgctcacaggagctcacaagaggtgcagggacttgcagggtgagcggcagccgtgggaatcgtgggattcgctggaccccacatctggcctctgtcctacacacatcacaggttacctcactgggggccttgggcctgtctgtgtctgtcagtcccaaacagactcctctttgggatttcatggtcaggccaggtcagcctggggtggacccttcctacagcgtttcccataccagccaatgaccggagtcagggagggaaggcaacagagtgggtgctacctgaagatggggtgctcttgctgaggggcatcggctgagaggttcctggctctggggtctgtgctgtgcccccaccgggtgtggttggttggtgggaggtgctggttcccataccggggggcatcggctgagaggttcctgcctctggggtctgtgctgtgcccccaccgggtgtggctggttggtgggaggtgctggttcccatactggggggcatcggctgagaggttcctggctctggggtctgtgctgtgcccccactgggtgtggctggttggtgggaggtgctggttcccacaccggggggcatcggctgagaggttcctggctttggggtctgtgctgtgtccccaccgggagtggctggttggtgggaggtgctgttttctgcacccgggggccccccgggtgtggacgaggttggtggcctcagagttgtgccagagggtggatgagggcctgtgcctcccccagagctggtcgtggagggtccctgggagggctcagggggtctggggacctcggaagtggtgctggtccagggcccagttgttcctccagcctctggggatggggggacatctgggggccgggaacagtgcttgggcttgcctctgcccgccccttgcacacctaccgcgggaaaggagccaccgaaggggcttatttggagaaccctgggggctcacctgtggaggggggcttacctgtggaggggggctcctgttcggaaacttgtatctcaatgactgtggttgcggtgccagaggtcaccgtgttgtgggcctcaacctggggcaggaaggggcttgtccctcctagacacatctttaagccccacacccttggagatgcccgcctgccctgccccgcacctctgcgtagaaggctcccgcctgtgccagtgtggtggtggtcagcacaacctctccctccatccggaagtgtgagtggttggtaattcgatatgtgatggccgagttgaggtcctggacagggtctcattgagtccccggccaggctgcctcccacgtacagccctgacccacccacagaggggaggccttggatgcactctctaccgagaactccgggtcctgagcctggatcctcagaggctgagaaggggcagctgcatccttgaccacaacgcccgctccagcgccacgcgccacggtgccacgatacagtctctgggggaagcggggcgggctcccggccgcagccacagcctccacggtgacctgggtcactgagtagcgggcaaggtcggcctgttggccctggaggcgggggaggcagcagtgactagtggggttgaaggtggagctggcgctgaaggctggggctcaggaaaggcaggtgcagacttggcgggggccctgccccggccccccagccctgaccccccgccctaccttccacccttccccctctgccctgccccccatgcaggtgcccacctcaccttcaccagcagaaggaaggtcatggggctggggacactcctggccacggtgaggttgcccgagtctgggtggatgatgaatgtaccattcacgtttcctgggaggatgatggaagtgctcagccccggccccctgaggcccagggacccagccagctctgcccaaggtggggatggagacagggacagagggggtacagggcattgttgagggctgggccccactcacccctaaagatgctgtagatgatgggctggttgatgccgcggtctccgtcctcagcgtagatgggtccgggacgcaggacgaggggagatggcttcagggatggcggaagggagggcacgtcgtggggctggggtggatggccccagcctggcccctctgactccccatcaagggcagggttggctgaggaggggcccagtcccgctggtggccgggcgtccctgcctgcctaggacagtcccttgtcccagcatcacaatcagtaacacccctgtgggtcccttactaatgaatgagtccagtggcccaaagatactgagtcccatttgcacaaggcttgtcttgacgggtaagcaaacatttaggaagtgggggctcccggggtctgcatttctgcctcccatgtactgtttggtggccccaggtgccttggtgccaggaaggtttgcagacagcctgtgtgggcccagtggtgactgtgagcagggcagagatgtcagcatcccttaagagctccagggccccagcccacctccccaggcccctgagaccgcctggctctggggcccacgctcctccctgtgtgttcagggtttgctccctcaccgctcaagatgggaagggttggtttacaaggagagtctgcatttgtttcaaaatcacgaccgaaatcggccccaccccctgaccccgaccccgcccttcctctcctgatcctggccgtccctgtgtccagcctgcctagaaggccctgccccgtgcactgcccctccctccccattaccagtatgtgccccgtggggacagccccgtggtactgagcttgaatgca

SEQ ID NO: 20073 - DNA, 1020 bp, Artificial sequence
  DNA replication origin
acagagaaaagaaaatggattgtctttcctcacctgagattctgctggctgcatccccaagtacctgcattatttttctgtggagcacctgccacctcctggctttataaagtcctttttgtctgttgttataagtcctgccaggacaggcaccaccaggcagagatttgtctcttgtgatctctgaatcccaacgcctagagctgtgcagcccctgtagccccccaacaactgaatgagcgagtggacggatggccgtcgaggggtgcaccccactcacggcggggacgggtggccgttgaggggtgcacctcactcacggcggggacgggtggccgttgaggggtgcacctcactcacagcagggacgggtggccgtcgaggggtgcacctcacttagggcggggacaggtggccgttgaggggtgcacctcactcacggtggggacggatagccgtcgaggggtgcacctcacaacggggaggggctgtgggagaggctgacggccacatcctgcaggtgacccagctaagggtgttcgtgtcagtgctggacgtcaatgacaatgcccccgaattcccctttaagaccaaggagataagggtggaggaggtgaggccagcgaagccgcggggactgggcacgggggtgtgggagcccagggtgagggcaggaggtgagtggtggccgggggctcaaccacagtgggggtccacaggggccaagagtgtggccggaccaagcccctctccctccccaggacacgaaagtgaactccaccgtcatccccgagacgcaactgcaggctgaggaccgcgacaaggacgacattctgttctacaccctccaggaaatgacagcagtcagtgccgcccaccctgccccagcacgagcccctcgcctctgacacccacagccgccctcgccctccaaggctcttaggctctgtcctccctgaccctccccagggtgccagtgactacttctccctggtgagtgtaaaccgtcccgccctgagg

SEQ ID NO: 20074 - DNA, 793 bp, Artificial sequence
  DNA replication origin
agcctgctgtgtgctggtaggtgagggggcctgtgctggcctcaggattctgcaattttccttaataaagccgaaaaaaatgccgccggtcaagaagcaggatgttgggggagcggggctgggatgcaacagggcatagggtggttgggatttctctgaagactgcagtcctgagccggtgagggaggggcgtgcctggcgggagccctgaggctgcagtggagcctctgcacagtatgtctgggtttgactcggtgagaaaggagccgtggagggctggggtgggctgggcagccttggtttacaacatccacaggggctgttctgccacgtggagtggactggggccagcaaagggcaacagggaagccggtgggccagctggaagtttcccaaaatgagtgctggtgtcccggccctgatgggactggaggtggacagactctggatttctgggtcgagctggggcacagccaacagatttaccagtggggggctgtgggggacacgtggggagggagggcgagtgggaaccaaggtggtccccgtgactggcaggataaaggtgcctcccttgtggatggttgagggagtgggtgggagtcttgggcacactggatggggtgtctgctggacaaggggtcagtgacggggactccacagctcagggcagagtctggactggaggaaatgtgggcatcaccctcgggggggtggaatttgaaaccacaccctagctgacgtcatcaaagactggtcctggaccggcagggcagagcccagcagaggtggc

SEQ ID NO: 20075 - DNA, 2288 bp, Artificial sequence
  DNA replication origin
tgcaaagggggtggacaaggctccgagggtcacctcctggccctccgggacgtggatgtccaccagcggctcggtgacatttgtgttctcctctacttcaaagatgtccttgttcacagagcagtctgtaaggttgcagaggagggatcagtgcctcccagcccctggctccccgccgcccgtgccccacctacccctgcccgcacatacactgggcctgggccatggtccccgggggtcggacgagcagcccggtgaacagcaggggaggccacagcagggcccaagaccccatcttggcggctgtcacctggcaggagggtctgagcgggtctggcgtctaggactggcgcagttcctacctcagcgaccttcgccccagccagacgccgcccagtttatgatcctttacgaccggcttctgccaagggggctcccgctggccggctggtccagcccactgccagaaggaggggcagtcgtttggcccaagttggactgagtgcaggggtcaaccagggggctcaggtcacaggcaccgaggcacagggcagaagggactggagagcggctcatgggtgccgtgggggtaggggcagggcaggggcagggctagggtgtgggagagaagctgggggctgggggcgggggctcggcccttggtgtcggggtgtctggaacctgcctccctagcccaggctgccctggcttggctcctcccctaagatctccctcaggcaaagttcctaaggccaccccttgaggctcagaacccgggtgttccccagggagcacctccctccctgcctgacagcaggttctgaaggaaaaggctctcctcactgtgtcctggggacacccctgcctgccccagagacaagtcggcttctcagggcggggctggacagggccttagtgactgaggctaaggcggggctgtgaggggcagctgggagttcctggggggccctggtgcccgacagagggggtgaggtgagactcgacacttgccctgctcttttcattggccccccagaagcccccagctctagggagaggccactgggtagggtcggggcgaggaagtggctgtcgtgaggggtaggtggagttctcctcctccaggcctgtgcgccgaagcttctggcctctcatggctggggctgggctcagtgtcctaaccctgcacggtgccctcatggtcgccttcaagccctgcacgctccgtgctccacaggctctgaggggtcaagccactggtccgaggccacacgagacagagggtccggagtcctcacgccagagtggattcctggcaccccaggtgacacctccaccctcccctcttcctgcccgcctgagcccccctggccccttcacaccctccccactaccccttacagaaacactgaccacatgggcccccgggcaggagctgagagggtgtccgggatcccccgagccccagaatgtttcctaatggatgacaaggggtggggcggggccctgcagtacttagtcgaggtacaggaggtggccctgatgccagagataaggatgaggggccgccgtgcctgcaggtgtaaagggcagctgggtgtggtcagtccctcctgggtggatgggcctccatccatccctcagccccgctacacaggggttgcctcgattacactgagtggacacagacaactcccagcgtctgggtctgattcctcctttattggtgccaagtaccacccctccccctctcccccatcctgccccccaccccaaatgcagctgcgctcctgggccgggcaggtggtgagggggttccttcctcatctgggccgcaaggttccttctgcagcagcgccagctggttctgaaaccataggcccagggggcagccagggagaccaggtcccgtccaggggcatcctgcagagacagcacgtgagggtctgagggctggggctggagaccccggccccgctgctggaattgggcctccagtggccaccagcgctgacccggggaggccaggacagaaggaggggtctggggtggggtctggagtggggtctgcggtggggcgggtgctcaccaggcctgcaggatgggcatgttggaccctgacgggcagagcagacccgcgctgagcctggtccaggccatgctgttctctgcgtcctgctcgctgccccccgccccaaaacagagttagtcctggagctggggggtcgcgcgttgctgctggggcaccacgccaggaccccccaccccacccggcctcacctgcgctt

SEQ ID NO: 20076 - DNA, 1086 bp, Artificial sequence
  DNA replication origin
aaagccacaaagtagcaagtgttggcgaggacaagaaccgtgtccctgctgcgctgctgggaagacagtttggcgtttcctcagaatatttaacacataattactctgtcacccagcaattccctcataactatacaccaagaacgcttgaaaacgggatcgggaagcgccgtttgcacacccacgttcacagcagcgttactcgccgtcgccccaaaggggaggcagcccaggtgtccatcaagatgcccacagatgagcggacgcggtcgatgcggtccctgcacacagcgggacacagttccccacaaaagggaaggagattcccacacaggccaggccgcggcggcgaaggcggaggatgctgcgctgagaatccagccggtctccaaaggacaaatcccgtgaggctccccctgcgcgcagtccctggaagcgctgaatccacagacagaaagtggacggggcgccggggctgaggaggggagggggcgtttgatggggacagagcttcattctgggaggacaggagagtctgagaacggattttgggaggacgggagcgtctgtgaacggattttgggaggacgggagcgtctgtgaacggattttgggaggacgggagcgtctgtgaacagattttgagaggacgggagagtctgagaacggattttgggaggacggaagagtctgagaatggatttttggaggacggaagagtctgagaacggattttgggaggacgggagcgtctgtgaacgattttgggaggacgggagcgtctgtgaacgattttgggaggacgggagcgtctgtgaacgattttgggaggacgggagcgtctgtgaacggattttgggaggacgggagcgtctgtgaacggattttgggaggacgggagcgtctgtgaacggattttgggaggacgggaaagtctgagaacggatggtggggatggatgcaccgaatgatcctgaatcgcgcacttcaaagcagataaaatggcaacaccggccccccaacagtcacgccacgctgaagctggagacgaactcgccccagcaaggtgctccaggggcctccgga

SEQ ID NO: 20077 - DNA, 1443 bp, Artificial sequence
  DNA replication origin
gagaaaccgacaaggatggaggggcggccagaccaggccctgaagcgcgcgggcatcgacgccagcgccatcctacccggcccgtgcgtgcgtcccggccctcgggcgctcaccctagtccacctggtatctggcaaaacctccctcccaggcccgttccgccagacgcagaaagacctgagctcaggctctgcccgcctcccccgcggactcgcctcgacctcgtgcgcaccctccacgcccgctccccctgcccccgactccgcgcccgactcaaccgccgacgcctagctcatcccgccgccccccccccgcagcctctggccctcagcccccgcgaccaccacggtcagccgcggccccacccgttgcacagttgatcctcgcgtggccgcctccgaaactgggcggacagctgagcggtcgaccccgctccctcctccattccctccggcccaagaccgtgagctaggtaggcgcccctctgaccctgggcagggggtcccgggaccggacagtaggttcggctcgcgaggaggccaggagaaagacacgacaggccggggtaggttccaaacgtgcagaagagaaagtgcttgcaaagcgcagcagagaattctatggactcttcaccaaagaggggtgacctgtgacctgagaggtattttctgtagtctgtcactaaggggcctagaagacactaaaagggggcaccactctgtgggaccccaggcggcgcacatcctgatgctctagtctgtttctgggaggcctggagtggaggggctgtgccaggaattgaggcccctgacctcgaaggtctggaggacacgggctagacggaggcgctgacagggcgtgcgttaaagggagaaatgaggactctgagaaggagcaggcaccgtgagcctcacaggacaaggtcacggggctgcgggggaagggcctgcaccagggacaggtgtgcacaggcatcaggtgcggccgcagccaggctcagtccctcttgtgcagatcagtctgctgcccttgtgaacccttgagcaaaagaagtcaccacaggagagaccaccagggacaggtgtgcacaggcatcaggtgcggccgcagccaggctcagtccctcttgtgcagatcagtctgctgcccttgtgaacccttgagcaaaagaagtcaccacaggagagactgggacagtggaagtttcttctctcccaggatggaaccggggagggtggccctggggtctccggctgggcgccaaacggcgagtccagcccagcctctggtcggcttagagttccttcaagtagcccccaagatgtctgcgaccaccaagagtgaaaaccaagctaggcggagaaaggatgtgtgcagcacacatctctgacacacagatccagaaacaatggaaacaatgagaaaagacagacaaccccaatt

SEQ ID NO: 20078 - DNA, 1661 bp, Artificial sequence
  DNA replication origin
ttctttttgttttttgagacggagtttcgctcttgttgcccaggctggagtgcagtggtgagatctcaactcactgcaacctccgcctcccaggtttaagcgattctgccgcctcagctcccccgaatagctgggacaacagccgcagccaccacccccggctgatattttaaaattttttgtagagaccaggcctggtatgtttcccaggctggtctcaaactatcctcctgcctttgcctcccaaagtcctgggattacaggcgtgaatcacggcttctggccttggtctcccttttgttacaaacatgagaacggcctggggaattccctgggggcgggcctgatatcatcgggctcaaagggagcccctccccagcctggggtaggcagggtccccgctgggcctagaagcgaagctggctgctctgttggctaagttctctgtgggagactcgggcacgttaattcatttctgtttcttcatctgtaagacaagggtgatgatagtatccacatcataattgtcttgaagataaattataattaaaaatatgaagaccgtgcccagtgcccagcgtaggactccacgtggagtgactctctccaagggcaaaggagcaggcagcccctctaatccttcccgccgatttggggagattaggagcttaaacgtcgtcactgtgacgtctgcggctcgaaaggagcacaggtcacgcgtgtcccgtgctgctggtctctgccccagccgcctggattcactgtgtccatcaaggggaaacctcgagtccccctcccccacagtcggggacaccgcgtctccagctcagccctaagctgcttttctctggccgcagaggggctggcaccaaggccgacccactcgagggccagacctggtgtggagtgtgggctccatcccccaattccccctcaggcttccccccagggttctcagcaggggcctggtccccacacaccctcccctcccctgggttttgtccagcccaggtctcccctgcgagctgtgagcctccttctgggggtgtgccagcatctgcactaggtgtgtgtggtgggcagtggctgtggcagtgtgtgtgtgtgtgtgtcccacggcagccagggggctgagcctgcatctgcctgtctgtccagctggctgccctggaggtgaaatccagctacggaggggactgggcttgacaaagtcgcctgtttccggggtccctggatagaaggacgggcatctcctggataacagacgccaagacagacggggaaggagaagaggaacgagggtcgggggacagacagcgcagcgggtggaaggtcgcgaggtggcggcggtgggtgtatcgccgagggacaaggcgcagcgcccctgccgccgccccagctggaagctccgcaccagaaaggggccgggtcgcgccgggtcctccgtagggacagggacggggaaccgaggagcaggtgaggatgctcgtgcggccggacgcggctcacctcggagtagacgaagagcggcagcaccaggagagcgaggaggaggtcggcggccgccaggctcacgatgaaggagttggtgggcgtctgcagggcgcgctcggtggccacgctcacgcacacgagcgagttccccgcgagcaccgcgccga

SEQ ID NO: 20079 - DNA, 1210 bp, Artificial sequence
  DNA replication origin
gagcgggcagggtaggaagaaggagcacacggacgagtagaccacgtagtcgcggtcctccaggcggcacacggcggggtcgcggccgcgcacgtcgttgaggccgcacagtacgggcgccgccaccgccgcggacagcagccacgtggcgccgatgagcagcagctgccggcggctcccaccctgccggttgtagcgcagcggcacggccacggccacgaacctgcggggagcgccgagggggcgccggacagcgcacaggccgcggtgagggcggcgggcggggcgcgggggcgccggggcgcgggcggggagggcggcgcacctgtccacgctgatggcgcacaggttgaagatggaggcggtgcacagcatgacgtccatggccatgagggcgtcgcacaggcgggggctcagcagccacgcgccaccctggacctgcgcggcgacaccacaggccctgaggtttcccagccaccgcgggcccttgtgacccgcccccactcttatgggtagttccagggctgaatacggagaagggggcccggctgtgagccagaggccagaggaccgggcagggaaacaccccttccccacgcagatctccctttgttttgagttagggtctcgctgtgtcaccgcggctggagtgctgtggctccatcatggctcactgtagcctggaattcctgagctcaagcgatcctcccacctcagtctccagagtagctgggattacagccgcgcgccaccacccccggctgatttgtttttctttttgttttttgagacggagtttcgctcttgttgcccaggctggagtgcagtggtgagatctcaactcactgcaacctccgcctcccaggtttaagcgattctgccgcctcagctcccccgaatagctgggacaacagccgcagccaccacccccggctgatattttaaaattttttgtagagaccaggcctggtatgtttcccaggctggtctcaaactatcctcctgcctttgcctcccaaagtcctgggattacaggcgtgaatcacggcttctggccttggtctcccttttgttacaaacatgagaacggcctggggaattccctgggggcgggcctgatatcatcgggctcaaagggagcccctccccagcctggggtaggcagggtccccgctgggcctagaagcgaagctggctgctctgttggcta

SEQ ID NO: 20080 - DNA, 2348 bp, Artificial sequence
  DNA replication origin
ttcctgtgaccctcagcccgcctggcccttcctctgaccctcagcccgcctggcccttcctctgagactctacaatggcttttcatccaacccagcagggtctgccattgccgcaaggtggaggcatctcagaggccctgcttggccttgccctgtccaggcaggcgggccgtgggttgacctccatgagacagcagggctgggcctgctcctttgggttttaaccaacataaaggtggcaggcaattgaggacctgcacctcttaagaataatcccccaaagctgagaacaccagcatctctgcagagagcacagctgcaggaagtagctgaacccctgcctggtgggggaggcaccgtgggagccctctggcacagtgacccccgccagcagtgatgccacctggcttcctgcgccaggccctgcaggaatggagtgggggtattccctggaattgtgggggccacttactcttccccaactttccgtaaaacagaagccaagcaccacgcgtctgttgggatcccaggtttccacagctcctcctttccaagcctgggaggctgatggtcagaggtcgccctgccccagggctgtcagcacccccaggacccccagatgcatgtgcacctcccatggcctccagcgctgtcaggcacgtgtggggctgtgggtcctgggacaaagctggcgggagcccctccttcactctcacgggtgtctgagaggaatccactgtgactcagtctgttccgggggtgactgggacaggctggtcctgggaagcaggtagtcggagaaggtgtcctggaggaggcagccgctgaggccatcacagaagtgcgtggtcaccagacgggacggggcagccgcactaaagtagtaattgggcttggtcctctctccacccaatactcgttttcttttcttttttgagacagggtctccgtcacccaggccggagtgcagtggcacgatctcggctcactgcagctttgactccctagctttaagggatcctcctgcctcagcctcccgagtagctgggattacaggcgtgaccaccacacccagcctgcactgagtattttagcaagctgaggttgtgcccaatgctgtagactgcacagcccacagtctgtcagtgttcagatgggagcctggcaccctgactggccaccctggctgcaaacgccgaatccccagcacaggaaagttccagccagcacgattgggaggcggagggtcccccatttctcccacaacctgggcctgggagagagctggatccagtccagggtaggctgttcctgcatggagggccctgggagccgcccctcttcccccagggtcaggggctgcactggttgatggagccagggtgcagacaggcagcttgggtcgctctgcccagcccctggccccgctgccgcctccctgctcccaccccttggcccagccacattggtggacgctgggcagaggttggctgggcaccaggggtgactgagcacggagctccctccagggaagccacttggtggggccccacccatcaccacaggccccttgctgtggggcttggggcatcctctggccagggactggcaggaagctaggctctggcctcaaggcagcttctaaaatgacaggttgggctcccctgccggggtctgctggggcagcatgagcctggagccccctgtgcctggttctcagaggtgggagttggcccgggcagggcctggcggctgacagccccccaccccgcctctccccatttgtttcttcccatcggaactgggcttccccaggagacaccttgccctgctgggtgctgcttcctctcccctgcagagaggggaagctgggccccagcgctgcggaactgagtggctctcgggggccccttcccccctcaccctgagcaggcggccggcttggtggggtctgctctgtgggcttccttggcggggagaaagaggttaactggctggggggcctggggccactgaggcagaaacccctcttccccactccccatcagcccccaggagccttcacagctgagtttgggaaggaatttgtttaattaacgtacaaaagcgccctccccatctccttggtccctgaggcctggccatcaggccggggggcgtccgggggtgcccggctcagcagcaggcacgcagggccttgcggaagacgttgcggaactcggcgttgaagacagtgtagatgacggggttgagggcgctgttgacgtagcccagccaggtgacggcgctgaccagccgcgggggcacggagcaggcaggacacagcgcctgcgtgatgtgcaccacga

SEQ ID NO: 20081 - DNA, 1186 bp, Artificial sequence
  DNA replication origin
ggaggtgcacatgcatctgggggtcctgggggtgctgacagccctggggcagggcgacctctgaccatcagcctcccaggcttggaaaggaggagctgtggaaacctgggatcccaacagacgcgtggtgcttggcttctgttttacggaaagttggggaagagtaagtggcccccacaattccagggaatacccccactccattcctgcagggcctggcgcaggaagccaggtggcatcactgctggcgggggtcactgtgccagagggctcccacggtgcctcccccaccaggcaggggttcagctacttcctgcagctgtgctctctgcagagatgctggtgttctcagctttgggggattattcttaagaggtgcaggtcctcaattgcctgccacctttatgttggttaaaacccaaaggagcaggcccagccctgctgtctcatggaggtcaacccacggcccgcctgcctggacagggcaaggccaagcagggcctctgagatgcctccaccttgcggcaatggcagaccctgctgggttggatgaaaagccattgtagagtctcagaggaagggccaggcgggctgagggtcagaggaagggccaggcgggctgagggtcacaggaagggccaggcggggtgagggtcacaggaagggccaggcgggctgagggtcacaggaagggccaggcggggtgagggacaggcggggtgaggggcaggtggggtgaggtgcagcatctggagcgcgtcctgcagcagcccagacaccttttccagcctccactgctcactggcagcaccaacggtgcagcaccgggcacgcctgagcaggatgatgaaacatcagtgagggcttggcctggctgggcagagactttactaagtaaataggccagggcggtggctcacacctgtaatcccagcactttgggaggtcgaggtgggtggatcacctgaggacaggagttcgagaccagcctggccaacacggagaaaccccgtctctactaaaaatccctaaactagctgggtgtgctggtggccacctataatcccagctactcgggaggctgaggcagaagaatcgcttgaacctgggaggcgaagttgcagtgagccaagattgtgccaccgcactccagcctgggtgacagagtgagactctgtctcaaaga

SEQ ID NO: 20082 - DNA, 1576 bp, Artificial sequence
  DNA replication origin
ataaggagaccccatctctattaactggaaaaaaaaaaaaagtgtggggtgggtgttggtgaagtatttataccaagaaatcagcaaatgcttgaaatcagagctttttctccaggagggctggggttcgcatcgaccgcttgcccctggtacaaggtgtgcatgtggctcctggatctctgtccccaggtgcccttggtgggcagaagtcagaaatgttctcatgtgcacgtgtgcgtgtttgtgctccaaatctgtgtgtgttgaaaaccatgagtttgccccagtgtctctagttccagtgcagaacctcagggtttgtgctagttcctttgtaactttcttctccaattgtaagaaaccccgctgggcgtggtggctcacgccggtaatcccagcgctttgggaggccgaggcgggtggatcacctgaggtcaggagtccgagaccagcctgaccaacgtggagaaaccccatctctactaaaaatacaaaattagccaggcctggtggcagatgcctgtaatcccagctactcgggaggctgaggcaggcgaatcacttgaacccgggagggcagtgagccaagatgatgccaccgccctccagcctgggcgacacagcgagactctgatttagccacttccctcccctggtcattgtccacggcgctgattctgcgaacatttcagggtccagcagccgcattcagatgagttgtacaacatggagctgggtgggtggagcaggaagggatgggacatcctcctgcctgtgttgcctgctggggggatgtcaggctgagtgctcggggatgtcaggtgctggggggatgtcgggtgctggggggatgtcgggtgctgggggtgtcgggtgctggggggatgtcaggctgcgtgctgggggatgtcaggtgctggggggatgtcaggtgctgggggtatcgggtgctgggggatgtcaggctgagtgctgggggatgtcaggtgcttggggatgtcagatgctggggggatgtcaggtgctgggggtgtcgggtgctgggggatgtcagatgctggggggtgtcaggtgctgggggggatgtcgggtgctggggggtgtcggatgctgggggttgtcgggtgctggggggtgtcgggtgctggggggtgtcgggtgccggggggtgccaggtgccccgggggatgtcgggtgccgggggatgtcaggctgcgtgctgggggatgtcaggtgctggggggtgtcaggtgctggggggatgtcaggcagtgatttgttgtttgctggtcagttttttacccgacttcccaacattgcgtgagagttttcttttcttttcttttttgagatggagtctcactctgtcacccaggcttgagtccactggcaccatctcggctcaccacaacttctgcctcccaggttcaaatgattctcatgcctcagcctcccaggtagctgggattatagacgcttccacgcctagctaatttttgtattttttggtagaaatggggtttcaccatgttgaccaggctagcctcgaactcctgacctcaagggatctgcccgc

SEQ ID NO: 20083 - DNA, 1191 bp, Artificial sequence
  DNA replication origin
gaaatgaggaggtgcccagaccccactgccaggaaggagcagcctgactgaaaacacagatcgccacgtggccatgggtcagcttgtgtgtgttctcacacccaccagaaataagccaagtttctgggctgggtgcggtggctcatgcctgtaatcccagcacattgggaggccgagatggtagctacctgaggtcaggagtttgagactacctggacaacatggggaacccaggaggtggaggttgcagtgagttgagatcactccactgcactccagtttgggcaacagagaaagactctgtcaaaaaggaaggggaggggaggggagaggaggggaggggagggcagggcaggggagggcaggggagggcaggggaggggaggggaggagagggcaggggagggcaggggaggggagggcaggggaggggagggcaggggaggggagggcaggggagggggtttccaagtttcttatgtttttactgaagtccttcacaagttttctgtttgctgccattctaacaataactgtgctttcaggccgggtgtggtggctcacacctataatccttataatcccagcactttgggaggtcaaggcgggcacctgaggtcaggagtttgaggccagcctggacaacatggtgacctgtctctactaaaaatacaaaaattagcctggcatggtggcacacgcctgtaatcccagctactcaggaggctgaggcacaagaatggcttgaacccaggaggcggaggttgcaatgagccgagattgcaccactgcactccagtctaggtgacagagcaagaccccgtctcaaaaacaaaacaaacaaataaccactctgctttcaggtatatggagatgatgtcccaggtatgtgaccaaggctgaaaagactacaagtaacaggtgccaatggtcccagggaaaatccctttctggagactggacccaccctggcatctgccacttggaaacaaggttgcctgccctggttgaccagatgtccccagatcgccgaaggccccacacataaaacataaaataagctgataaaacatgatcacaaaagggctctgaaggtggcacagacactatttgaaatgcaactggctttcagcagttttctaagtagacagcagtcaggcgtgggagactgcaccataaatgctacgagaa

SEQ ID NO: 20084 - DNA, 1254 bp, Artificial sequence
  DNA replication origin
tcagctcaccgcaacctcccgcctcccgggttcaagtgattctcctgcctcagcctcccgagtagctgggattacaggcatgtgccaccacgcccggctaattttgtatttttagtagagatggggtttctctatgttggtcaggctggtctcgaactcctgacctcaggtgatccgcccgccttggcatcccacagtgctgggattacaggcgtgagccaccgcgcccggctgcaaacaggcatttttagggcagtttggtgagtgctgggttaatggtatggtcaggactcattcaaccagtatcttttaagcatctgctgtgtgccagagattgccctggacacaggacattctagaactctgggtgacagaagagccacttgcttggcctaggagcatcacaggaagactttgcagaggcagagaggagggtgtgggggtgttggcggcagaaagtgtttctctagaaacactccagcatgtagaggctggagctgcaggacctatctgggatgacaggggcaggaggtggggtgcagctgacctctgtggtaactgccctgtgtgcagatgctgctgaagggcctgtctgcatgccagggggctgagttccatgttgtagggggtgcggtggggtggcaccaagggacataggcaggttagatgtactttttaggaggaaggggtcagagaccaagggcaatggctgtgagcatggggccgaggtcacctgacgatggtggcctgacccctgcggtggaggagaggcaggaatggagctacaagagtgggtccaggaggtgtcctcacctgcggggaggccgagagctcctcgtaggcatagggcacacctgaccagcagaacccacagctgtgccgcagaaggagatagaagccccgtggtggtttgatagagctggggctggctggggtggcgggtttgttgtatgcattttttactgcacgtaaaaggctttactggggaagaatagatttcctctctttttcctggaagagccgaatgacttagacaatggaatagaaatgtaggtcgagcgtgttcatggaagtgttaagatcttcctggttacaagggcacacacctgagggggagtcactttgtttgaagcacctgagcgaggctgttcgctttgtccattctggcttttgttgcttgttaaatgaggctccttctgttgcagaggtgaccacagtgacagtggccaacgtgggggctgctgcagacaatgt

SEQ ID NO: 20085 - DNA, 1982 bp, Artificial sequence
  DNA replication origin
agaatcacttgaacccgggaggcgggaggttgcggtgagctgagatcacaccattgcactccagcctgggcaacaagagcgaaactccgtctcaaaaaaaaaaaaaggcatgtttgctgtctgtctccacgaccagaccacaccaggtgcacggttccctcatcctcgcctctcagcaccacaagccccggcatgcggcgcgcggccacagtgagtgctcaacgccaggcccatggcagccctgggagcagccgcccaaagcctcctcaggcggcagcgtgtcctgctgagttacttaaacctggaaaccacttgacgtcagctgttcgtaatttttaaaaagtattaaagtgcttttaccacatcaaaacacaactaccatatttttcagaagaaaacacacgtcagcacatttctctgacatcatgatgaacagcatcatttttcttttatgcattcagaaaaatacgtgcaaaaatgacaaaaacctgaaatcaacctcatggctccaaatcccaacgtcaaaccagagtttagcgacggacgccaacccctgagagtcacaaagccttccctcacttttttttcttaaccaaccaaacaagcagcagtgacccctttgccttcgagggccactcagctgaccaagggcagcccagacgctgctggcccccacccagcccccaggccgaacaagcacccagagcacacgcaatgccctgacatacccagcacaccaggactgggatccagttcctcaacccgcaaagctccgtaggggaaaagtgcctcacaacgcaacaagaagctcctcccaagggtctcaacactgagctgtgagtccctgggggacactcgggaactccaatggggaagaatacagtgcgttaggaagccagtgggtggggaagtctatgccccacggacacaagggcgggacacaggaggtgggtggacggcaccagccccgtagggcatctgtgagctctgccacgggctcccagtgttttggagcctgagaaggagactgacctgtgtggcaagaaactataagcagcttatataaaaatgtggactggaaagccacagcagcctccccaaaggaagcccgacaggaagcggggcaggaggagcaggtccttagggaaaaaggcaagaggaagagggaggactgggaggggagcctgcacaggtggctccgcagcccccctgggccaccacacagccacgctgacctctggcatcatggcctccagcaggctgcccacccctggctccccagcgctcaggtcatgcctgaactggccctcaggaagtggggggttcctggtgaccacaggtgcccacccaccccagggcttctccaggacaggtggggggagccaggatggacgaaggcagggcaggggcagagctgcacaggggggaccagtaggaggcggggctgccacaaagaaaaggggggcagggggcaggtgtgtgcagggcagggccaggtcaggtgaggctaggcaggtcaccaggggcaggtgtgcggggcaggtgtttggggtaggtggggcaggctggtcacctggggcaggtatgtggggcaggtgtgcggggcaggtagggcaggccgatcacgtggggcaggtggggaaggctggaaacgtcgagcaggtgtgcgaggcaggtatttgtggcaggtggggcaggctggtcacctggagcaggtacgtggggaaagtgtgaggggcgggtggggcaggtgtgagaggcagatgtgaggggtgagctagtcacgtggggcaggtgtgcagggcgggtggggcgggcgggtcacgtggagcaggtgtgaggggcaggtgtgcagggcgggtggagcgggctggtcacgtggagcaggtgtgagggacaggtgtggcgggctggtcacctgggacagttgtgcggggcaggcgcgcggggtaggcgcgcgggaaccggacgaggcgagaggc

SEQ ID NO: 20086 - DNA, 2011 bp, Artificial sequence
  DNA replication origin
tccgcagcgctcacctgcctccggcgccccgcgctcggcctgtcccctcggcgctcgccggtgcgtccgtctgttcgcgcctcggccggggcgccaggtctcccgcgggcgggtgggacgctcggcggggccgggccggggcggggccgggagaggaggaacctgagcgacaggttgcggagtcacccgagagcgggcgggcgcgcgggggaggagggcgtgggatggaggcgcccccgccggcctcggacccagctccgccccgccccctgccccgcctgggctccagccccagccctctgcgtcctccccaacacccgcctggtgtgcccctccgcgggcctagcccctagagctggggcgctggggacaggcggggcgcagggccgcctccgcgggatgagcagggcgaggcctcgagctcttccttgggcagggcctagctgcgccccagcaggccgggggacgggggaacgctgccaatgggacttcgggggcagcgctggcgcattgctggggagggctccagccctggggaggtcagagcctccgccgggccaggtgcacccctcaggtgccccaggcatggggcagagtcacttcccttaccgggcccaccgcaggcccaggggcagaggcttcggtgagtgggtgggtgtcaggcaggacccagccatgcccaccccaggcctggagccctgagttcacagtgcagctgctcctccaggcccccctttctgcccagcctgggcactgagggatggggtgtcaggggaggtggggacacctcaggccctctcaggatgcctctctccttgcactgccccgtggtcaggcccaggccccacctctgcccaccacagtgggactgtctggttccgtcctcatctgcccggcttccaggatggcccttctccccagctgctgtgaccgctcagaacagggccagggtgcagtggacacagcgggtagcaccggctgccacagcagtcaactggacgaggacgaggtgaaggggcacagggcgccccaggcccatgcagggacccaaggctccggctgccggtcctgggtaggggtgggaatgagcgtggccaagagtctgggtccccgggctatggtcccagaggggcagggctagcgtgtttaccctgggctggccggagcacttcctggggaggcgccataggtgagctcggtggagggctggcaggaagtggccctcctccttcgggcccagtgcctgcccctgagcccaggcaagacctggcttcctggtttacagcctttgccgtttgatctccaggaacctgccgtgatcctgctccatgcatgagcttgccctgacccagagctcagggtcacacacgccaacccctcggtgcacccgtgccctcacccttcctggaggcagagctgggagtggccaagtgggaaacaggcgctggagaggacagctggggggtggggtccctctccactcctaaacgggtgcctgtcaacacgattttgagtgcggagcctgccctcaggagacagtccaggctggcctctcgggccccatccactccgggtcacctggagccatggcgttccctgtggaacaggtgaccactgcctttgtgtgctcgctgagactggaggtatcaggatccattaaccatgaaggcaacaggtctccagcttcagggagggggtccttccctggtctgcatggtttgtgggctgggtcctccagatggcaggtgtgcccagctggtcttctgcgagtgcaggcgctggtgagggaggtggcccgaggcgctcaggcgctggtgtgtgaagtgggtcctcagggctgtcctgcagctcaccgtggccactgggggccacagacaggtcaaaggaagtcggcccaggacaactgggtgctcccaccgcttccacgaagacaggcaggaaagactgtccaggtgccacagccacagccaccccagccgagggagccccagtggaggcccaggacagtccc

SEQ ID NO: 20087 - DNA, 1058 bp, Artificial sequence
  DNA replication origin
gctggagcccaggcggggcagggggcggggcggagctgggtccgaggccggcgggggcgcctccatcccacgccctcctcccccgcgcgcccgcccgctctcgggtgactccgcaacctgtcgctcaggttcctcctctcccggccccgccccggcccggccccgccgagcgtcccacccgcccgcgggagacctggcgccccggccgaggcgcgaacagacggacgcaccggcgagcgccgaggggacaggccgagcgcggggcgccggaggcaggtgagcgctgcggacacgggggagcgcgcccgcccgggcctcagtttacccggtggcgatgggacgcggggcttctggttcaggacaccgggacgaacgcggcgtcgcagggcgcggggcacttggagggcggccgggccgagggcgcggggcaaggggctgggggcctggtcgagtccccacctctcctggacgggtcctgctgcagcccggcctgcccccgtcggtcctgggcggcggccggcgagcaaggatatttttaagccagcgatgggtgactcacctgccccgtcctgcccactcccagctctggggcttggtgggggcaatccctgcgtccggagagcgctggtggtagggaggcttctcccggttctgtgagcagcaggaccctcccgagggcctgaccgtggaggtagcactgcacacccactccctgtgggccggagccaggaggcacttcctgggtgtcggagcccagaaggaaaccagtggccgggaagcaccagctgggtcagtctccaggtcagggttgggggtgggagtttcagggaggaggggaggctgggacaggggctgcagaggccctgccaggagaggcaggagggtgggctggcaggagcctgtgggcacgcgaacttcagccatcctagattcctggtccctgcgtccagctgcctggcgttgccccttgctgcggggtgtccctggtggcaggggagggggaggcagggccgggcatgcccggacctctgcccccacccaccccgtgctcagtcctg

SEQ ID NO: 20088 - DNA, 1060 bp, Artificial sequence
  DNA replication origin
cagggctgtcccctgtggcttcagagtttgggtctgccacggtgggggtcaccagccactgctgttggtatggagggtcaagggagtggctcggagcacccgggactttctggtttgaccaggtctggcctagtgggagggtctgggaggcccgggggcactgccgctgacatgaggggctgggtgcaccagggggtatggccacttcctccatccatctatccgtggagaatgtctggaatgttcacgggctcagtggcgagcctgagtgtttgcttaatgggattcctggcgggctccaccaagggcgccaggcacgtgtgtccaggcacacacctgggcgagacaccaacgcacccttgcagactcaggcctgggggcacgcaaacatggagggctgtgacacgcgacccccctggggaaggccaggttcctggccttcggttgcctgcagggcatcggggacctcaggcccaggcagggccgggcagcagtggggtgggtccaggtgtggtgtctgggtctgaagcacatgggtatggggctgcctcctgccctgtgggagccccgcccccctggggaggcttctttggcccactggtggtggggacgaagccctggaggcccaggctgcactttgtactgtggtcattttcccggtgtgaagtgaggcagagcggggtgcccggtcagtcgggctgtggaggggaggaggtcccagcagggcaggagggtagagggacgggctccaagttcaagttccagctccacatgctgagtgaccttggggaggggtcagctgagtcacaggggctccaggctgccctcataggcgctgggtggggccctggaatggggaggcccctcaggccctggccctgtccttgtttggaagctatggcttgagggaggaagggataagctggggaagctgagggtgggaaaggagaccgaggcaggcggagaaggcccggtgggagagctatgccaacaaggcctgggtgctaagcaggcccgggagaggctgggacccaggaggggccgcgaggggaggaggggc

SEQ ID NO: 20089 - DNA, 1636 bp, Artificial sequence
  DNA replication origin
gtgtcttgggtggcggccagcgggagaagggcagacctcagtgtggccccggtctgaggccagtgcctgtcccacacctgggtggacagaagggctgcgctgacacttcctccggcctggctggttcctcccctccttccctgggccagatccctgactggcctggcctgggtgggggtcccttggggggcagagcccctgcccgacatcccagttggccccacgtcccagttggccccacgtcccagttgacagtcgatcagcctcgtcatgcctcagaccctaggtgctccacagggaccccccagaggctgactgggaggctctgacaagggccctgggggcagaaggcgccttccaagctgggcagcatggagtttaaggccctggtgctgtggggaggggggtgggatgggtaaggggagggggatgaggtgggagtgtggggggaggggggtgcggtgggggttgggggagggcgggtgggagctgcaggatggcaggagaggtgaggctggagttggggtaggtcctgaagtccagagggagcccggctctagccgccactcctgccccaccccaggcctgcaccccaaggggctcctgcacccacatgtggacttgccacccacacatgccacctctgtccaggccccagcaaagaggctggcccttggctctttcctgggcctgggagacctggcagggaagaggctgtgcgggcaggaaaccctggggtccccggggtgcagtgtttcctcacctcgagggcagggatgcggccaggtggccagcgcagaacccctggcagcagccaagcctaggggagggactggagggcaggtgtggtgggggctgagactgggagccagtccagtggccccaacacacagtatcactgcccctccaacgaggtagggtggctatggggcaggtgcctctggcctcccccaggggcagaatcctcagagcctgtctctgggctcctagtgctgacctcttccccgagcattttggggaaactaaggcccagccgccagggcagacaggtgggtctgatttgggctggaccctaggggcttcccggggggatggacagagcctgatggccctgaaccaggctgacttgtcccaaggggactatgccctgtggggacctggctgttctgtggctctgtgatcagctccccacaggtccacaccatctgcctcctgccagggctgcagggctgtcccctgtggcttcagagtttgggtctgccacggtgggggtcaccagccactgctgttggtatggagggtcaagggagtggctcggagcacccgggactttctggtttgaccaggtctggcctagtgggagggtctgggaggcccgggggcactgccgctgacatgaggggctgggtgcaccagggggtatggccacttcctccatccatctatccgtggagaatgtctggaatgttcacgggctcagtggcgagcctgagtgtttgcttaatgggattcctggcgggctccaccaagggcgccaggcacgtgtgtccaggcacacacctgggcgagacaccaacgcacccttgcagactcaggcctgggggcacgcaaacatggagggctgtgacacgcgacc

SEQ ID NO: 20090 - DNA, 1187 bp, Artificial sequence
  DNA replication origin
ctgcctcagcctcccgagtagctgggactataggcgcctgccaccacgcctggctaattttttgtatttttagtagagacggggtttcaccatattagccaggatgatctcaatctcctgaccttgtgatccacccgcctcggcctcccaaagtgctaggattacaggcatgagccactgcgcccgatcttttttttttttttttgagacagagtcttcctctgttgcccagcctggagtgtagtggtgcaatcttggctcactgtaacctctgcctcctgggttcaagtgattctcccacctcagcctcccgagtagctgggattacaggcgcccgccacaatgcctggctaattttttgtatttttagtagagacagggtttcaccatgttggctaggctggtctcgaactcctgacctcaggtgatccacccgcctcggcctcccgcagtgctgggatgatagatgtgagccaccgcgcccggccacacaaacttttatgttttgcgttttgtggttgtctttgactgtcctgtagttcaagttagtgtttatccagctgtgccagcattgtgcaccgaacggccaacccttcgtgggagggttttacttagtgaacacggcagcttggctggaggagggggcctgagccaggcctggaaagaggagaggtgaagggcacagggcaggggccaggctggccgcagatcctcagggatggacgcatcccgcacacacttgtcgagggtcctctgtgcaccaggctttgccctggacctggggacacagcttagcaagtggcaaccggaacagtgccttggagtagcgagcacgctggacgcacagcacaccacgtgcagcgcgacgttgggtctgattcagggaattagggcaggtcgggatggggtgacggctggcattgtagccaggtggccacagaggggacgtctgagaaggaagagagctggggaggctggcaaagctggtgcagtgggcgggtactgagcctgcaccaggaggtgggcgggtgaggatggtggcgcggggccgggcagcagttggaattcctttgaggatagtttcaggacacaagcatggcccctacagatgcctgccaaggcagaatagagactccccccaccaaaggcggggccggtccccgttctagccccctacccagggttgg

SEQ ID NO: 20091 - DNA, 1080 bp, Artificial sequence
  DNA replication origin
acgcacagcacaccacgtgcagcgcgacgttgggtctgattcagggaattagggcaggtcgggatggggtgacggctggcattgtagccaggtggccacagaggggacgtctgagaaggaagagagctggggaggctggcaaagctggtgcagtgggcgggtactgagcctgcaccaggaggtgggcgggtgaggatggtggcgcggggccgggcagcagttggaattcctttgaggatagtttcaggacacaagcatggcccctacagatgcctgccaaggcagaatagagactccccccaccaaaggcggggccggtccccgttctagccccctacccagggttggctgtggcccctcagcccctcaggctgtggcccctgggggctgggctttcgacacaaggagggctctgcccagcagtgaccacctgcccacccccagcacctggccacattcatcatggacaagagcgaagccatcacgtctgtggacgacgccatccggaagctggtgcagctgagctccaaggagaagatctggacccaggagatgctgctgcaggtgaacgaccagtcgctgcggctgctggacatcgagtcacaggtggggcccagcgccacgggggacagggagcacagtgggtagaggcggtggcagccaccggctgcagcccggatgtgcggccggtcctctctgcagggccggccatgccctatcattctggtccctggaagaggatgggacaagggtgggcagagggccgcatagagctgagagtccagggaagtttggaagccggggtcagccttgcggtacagctgcggggtgtgtcccgggcctagtcctcatctttgggagcccattccccagcggcgccagaggggcctgtgctccaggcttgtccacagctccggccactccctgccagagtgcccagaccccgggtgcgagtcgtgtccgcgcgatgtacccgcaggaggagctggaagacttcccgctgcccacggtgcagcgcagccagacggtcctcaaccagctgcgctacccgtctgtgctgctgctcgtgtgccaggactc

SEQ ID NO: 20092 - DNA, 2384 bp, Artificial sequence
  DNA replication origin
tgtggggagctgactggtggtagggcatcccccgggggggtgggctctgaagtggggctgtgcttctgggagtttcttatggactgtcggctcactggactcacctgtggggaaggtgggcgacctgagttagacatggggcggggctgggtcccaggacgagggggcatatgacaggggctgggctaatgtcctgtgactgatgcatcactgagggtgatggagcctgatgcccggtgatgccagcatgggttgcctctcctggcaggggctaggggcagctgagctgtggctgaaggggcggtgggtggaggtgggctggggaggggagctctggggaggggtgggtgtcggggccggggaggggagctctggggaggggtgggtgtcggggctggggaggggagcactggggaggggtgggtgtcagggctggggggggagctctggggaggggtgggtgtcagggctgggggggagctctggtgaggagtgggtgttggggctggggtagggatgggggctgctggtgctctcacctcctcgatgggggcagacgccagcccctccacctcccagggggcctcctgcagcacatccacaggaggctcccagccgctgtggaacttgggcacgtagaggggcacctgtggctcccgcggccactcggaactggggtgagaggtcctgaagtcagccctgcctctccagaactggcccaccaggacccccttgctggcccccatgcagcgctggccccccatgaagccccggcactgctctgccctgccctaccggggccgcatccagctctctcccagtgactcccacagcgacatctccttagggaccaggtggccgcgcaggaagtccacggcatctcgggagagcagtgggcaggagacggagcgtgcgatgtctgggccactgcaggtgttgacgatctggggcacagtgaggttcagaggggactgaggcccacagaccctggcccagcacccccgtagctccacaggctggccctcgggaagggactttggaccccagggagagtggccacacagcgtgaaccgggctgcccaaggcgggcacctgctgccccaaccccgaccccggggagatgctgcagaggcctctgggcccccaccctgcgcgcccctgccgcccggccccaggcaccaggtccagaggcccgaagaggaagtgcacgagctccgcggcgctggggttctggatgtgcttctgcagctttgcctgggggtgggaacaagtgagcaggtgccggggcggggcggggcctccaccctcccctcagcacagacagtggggcagggctggggccaccggacccaccagcaagttaatcgccagcttgattttctggaagcagtcgatgaactcgccctcagaggggggccgtgcccgcagtgtgaggacgccctctggcatgggaggcaccgcgtgagccaggctggccctgatctccccggcccctgcgccttctgtcccacgcagcccatctgtgtgggctggaccttcctccacctccatgagtagcccccatggatgtccctggccccgtccccgtccctgtcccctgcacctgctggccccgtcccctgcacctgccggccccgtccctgtcccctgcacctgctggcgccttcttgcccttcttcttcccctttttccgctggttcagctgcttgaaagcctcggctgccttctgcagccgggccacaaaccactcgatgtcgtccagggcgcagttgaggatttgctggggtcagagggggtcaggggtcagcccctgacactccccaccgccccgccttgctgcagggacagccccacagatgatgggaggagctgggccccacaccttcggaggggcagccacaggctggggactggccggagggacagcaaggaccagtgtccactgctgggggcggggaagagaggggccacctgccgggcccgggcacccaccgtctccttctctatcttctgagccagcacggcccgcggctcctcctgcgactcccgacggcggaaacctgatgggggacacggcggctgctcaccgagccccccacaacgagccctgtggagccccctccagcccctcggcccacctggctcgctgagtggcacctgcgggcccacgcgattcttggcctccggggaatccccgccgcggtgctggaaggggatgggcgccgggccctggggaggaggcaggatggactgccgctgccgaatcttctcctggtgtcccctggagggcgagggggtcctgctcagccccgccgggaacgcacctgaccctccctccctgccgggctcctcccctcccctgccggctcctcccctcccctgcc

SEQ ID NO: 20093 - DNA, 944 bp, Artificial sequence
  DNA replication origin
gaggggaggccatgcttgcttagaagatggattgctggcccctctttaccccaaaattgaatcctggggtgtgggagggtcaggggcttcccatgcagattggaccaggaatgagcacagaagggaagaggagaggcaaggaaagacgggactcccctagtgccataggcttgttctttgtcctctttggaaacaggtggggctgggggtgggaggaggggagaggcttcactagcccagaaccccagtctcctcttttggctctaccagaggttgggcctgaatcagtcccaacagccccaacagggtgccagtgtttggtgaaaccactcaagttcagtggtttagtagtttctaaccttggttctaaaacatacatgtggatgcacagaaaaagctgatatattagggtagagaatttgtgcatgacttttgaaatgtttcctttaattatatatcatgcagttgaaatgaaaaccgcttcaaatctggaaaagtattttaaaccacttgaacaatgcacttgccaccacctggtggcagcgtacccatatgtttttagagactgtaggttctgaagggtttcactttcatgctccctcactttgaggggggcttacctgtgagtatgtggggagctgactggtggtagggcatcccccgggggggtgggctctgaagtggggctgtgcttctgggagtttcttatggactgtcggctcactggactcacctgtggggaaggtgggcgacctgagttagacatggggcggggctgggtcccaggacgagggggcatatgacaggggctgggctaatgtcctgtgactgatgcatcactgagggtgatggagcctgatgcccggtgatgccagcatgggttgcctctcctggcaggggctaggggcagctgagctgtggctgaaggggcggtgggtggaggt

SEQ ID NO: 20094 - DNA, 1070 bp, Artificial sequence
  DNA replication origin
gaggaacaggaggggctgaggcccagtctggtgggggtctcctctgagacctgggcagtggctggggggcagcagcttcccaggtgcacgactggctgcctcttttctgttctggaggtcaccgtggagagaggctgcaggcagcgtcagcccggaatggaaactgtgacagccccagagctttggggccctgcgtggaggcggggcaggcaggaggtgggcgtggcgcaggggcctgtggtacagcaaggctggcccatcccaggccacctcaggggtctccagtccggcaccccaggggaaccagagccaggggcgttcctgggaaacgccagggtcacagctccccgcagctggccagtgagggccagcatgtcttcagagccgtggcccctctgaggactgaacacagcccaaatggtccagtggaggacgggtctcaagctcctctctgtggggtgggacctgcacctcaaaagcgcgggggggctggccctggctgaggggtcctggctttggcatgtagcaggcctgtggctgtcacctggccaggccgtccatcctggtcagtgtggccctggtcatcagggcagctcccgtgtccaggtgctcagggaaatgaagtggccatggactgtcaggacatggccagggtggacagaccaggagctgaagtcaaagggtggaaatgtttttaagtgtggtcctaggccagggaccacgggagccaggctgacactgtgggtgaggggaggccatgcttgcttagaagatggattgctggcccctctttaccccaaaattgaatcctggggtgtgggagggtcaggggcttcccatgcagattggaccaggaatgagcacagaagggaagaggagaggcaaggaaagacgggactcccctagtgccataggcttgttctttgtcctctttggaaacaggtggggctgggggtgggaggaggggagaggcttcactagcccagaaccccagtctcctcttttggctctaccagaggttgggcctgaatcagtcccaacagccccaacagggtgccagtgtttggtga

SEQ ID NO: 20095 - DNA, 1753 bp, Artificial sequence
  DNA replication origin
cagcagctctcaccgtctttgttccccgggaagcttgggggtagcttgtgggtcgggctggcggggccccagtacttctgaccggcctgcgggggcggggggcgattaggctccccacgccccgcccccgcctcccagcacctgcccgggacctccccaccccgccaatccccctacagccccggcctgcggaccagccctttccttctgcccagggagccctgcacctgccccagtctctccagccgcggggctggccttggggcggggctaggcgcaggcggggctgctccaggaagctgggggctgcgaccccagggacccccgcgggctcacctgctcgaacggggcgccggcgtcctccggtcgcgcctcgcctaggatgttgcagggcacgtaccccgcctggccgctgcggctgcgcagcttccaccactgccggccgtcctccagcacctgcggggcgcgccgtcagcccctccccacacccaggctctgcggggctgggaccacccgctggcgccgctttacagaggtcgggagcgccctagggtctcccggagccccgcttcgctccattctctccgcacccctgtttccacccctccatccctcgctgggctgctcctcccccaccctgcctcaaggagtctgggggaccctttttttctcggagacagggtctcactctgccgcccaggctggaatgcagtggtgcaatcactgcccactgcagcctcgacctcctgggttcaggcgatccccccacctcagcctccagagtagctgggaccacaggcacacaccaccacatccagataatttttatgttttttgtagagatggggttttgaggtgttgcccaggcttgtctcgaactcgtgggctaaagggatcctcccgccttggcctcccagtgctgcggttacaggcgtgagccgccgagccaggctgtggatgtggcccactcccccctagcctgctccactttctgtcccccagtgggtggcctggattccggctggcagatgcggccagtgcagatgtgggggctcctgggtgggtgtgaatgacaggcccccgctgagtccacgtggtgcagatgctccccccagcctggcacaggggtctctgcatgcctttggggagccccaagatgggaaggcccctccaacaggctggggatcctgatcagagtccaagggcggggaccctggagaaaggggccagcagctgtgccccgtcctggcatcacccagcctggccctagaccgctccccacctcccctggtagcccctcccttgaagccctgccctgtttccccctcttggaccccgtcctccagcccctcacctctaggacctcatccttgagcaccgatagctcgttggcatttcgggctgtgaagtcatacaggatcttgacgtacttggccatggctggtgttggctggtagcccctgtgaggaacaggaggggctgaggcccagtctggtgggggtctcctctgagacctgggcagtggctggggggcagcagcttcccaggtgcacgactggctgcctcttttctgttctggaggtcaccgtggagagaggctgcaggcagcgtcagcccggaatggaaactgtgacagccccagagctttggggccctgcgtggaggcggggcaggcaggaggtgggcgtggcgcaggggcctgtggtacagcaaggctggcccatcccaggccacctcaggggtctccagtccg

SEQ ID NO: 20096 - DNA, 3147 bp, Artificial sequence
  DNA replication origin
cagacgggccttgttggtggagatatttgcttgtggctactggtggccccactggcagctcaggccacccaccctgaggtctgatgttcaaagccccgccctccctcctcgcccagtgtggactctcccacactcacggccagaccctcggcaaccctggccccaccagggccagcaccagcagaccctccttctttctgtggacctgcctgatggggaagtgggtagggaggccggggagggagtgagtggttaaggacacgttggaactaagagagattgcatgttaaccccagcccctgccccaaactcgggcctcgagcaggtgacctggcccctctacgggtcattcttatccacgcctgcctcacggggctgccactggggcctccggaggccgcgggcagcactcaaaacaccacaggcccccaagagtgatgccctcagggcaggaaggggggcaatcctcacccctggggcgggtggccagagaggacacagagagccagcccacccgatgccaggtgaccctgtgcccatcaccaggccggtgaggtcggtggtcccatctgctcttgaggggggtctcaggaggtggcaggaagccccttggaagaaacgggaggtaatttctggaagcccagaggtccgagcaggcagctggggccagggtgcctcggactcagggctcctggggtgggagcctgcttggggcctagggctgggatctgggggctggagtctgggggtctggcttcctggggctcctcagctgtgcaggtggcagagtggggcacagcaggtagggggctctaaatggggctgggggaggtggacagggagaaggctgaagaagcaggtgtagatctggggccctcagaagctgagcagcccagcctggaggctgcatatgaagcccagaccatcctggtggaggaagggtcctgttgctgggagtggttggggagtgggcagcctccctcacttccaaggactggcatcctggggcccacagaggccccttttggagcagatatagccccggtgcctatccccgtcctgaggtggtggctcagcaggcagcgggagctgcaggttgcagggaggagggccggtgcccccatccctccccttttcctcttggacctgtctctctcactgcagggtccatctgacagggtgggggggcctcttccgggggcctggaggagtggtggtggccatcaagcccgggtcgtggctcagagggcaccagacaatccctgctgccccgaccagacactgtggttaagacttggcctagtgtggcctgagctgtgagtcagggcttctgtggcctggtgtccaggcctggctgggtggtggaccaggcaagggacacgccccccccagcccagccccacagtcgcccctgcccaggccaagaccccaggactgtgtccccggatgctccgcaccagggttgggttcacggctgctatggggacacatggttgtgggttgccccctgccaccaatccagggcgagggcacccctggcggccactcacggcagcacatggagcggccggcagagggcaccaaaggcccctccaagggtgcggctcaggtggaccgcccatctggcggtcaggtgcccctcccacgcagggtgctgagtgtggcctgctcccccttcttgggagcctccgtcagcctgggctaagatctccaaatccagtttcagccttgccctctgactcatggccctcctggggcctgccgaccgtctggccgagctggctctgtccccaccgctcccactagggttgtgcccagcgaaagccgggcttggatgacacgctttgggccttctggtcgctgggcctgggagggccacaggaagagaagtgggcagggtcccctctgggctcaggggcagagcagcctggcggacggccagccctctgcccggcactgcttagaaaaggtgcagtttccgggggctccaggacccactccgactcccagagaactgagacacacggctcctgggagacttaactggtttaattgcttagccctggtgcctcagccacctctcatctgtagggtgagactcaagtccaggcaccaagacacaccagcacccccaacaccatgcggggatcattggcctgaaacttggccagagaaagctccagtcctgggcctgtaagagtgggcgctgggagtgtctgaagccggcacggtgtcccctgcgttgtcggcccttgcaggtgaagtgtgtgtcgttcccccactttcccccgaatggcacccacggcctcctgctggagcccctcccgggcccccctcagggagcagaactctgcgtgtgtgcgaggttcagcctggccagcctggagctccagctcaccctggggtgtggatggatgtagaagtgggtggggatgggggagcatcacaggggccaggaccccccaggtgcacaggggaggccagagaaagaggccccagccccagggagttctgtggcctcaagagaaggtggacaaggggctggcaccaccaagcagcaggtttggctgagattagtcttggtgtgggctgaggccttgggtactgtttggcctaaggatgggcgttgtgcctccagacaggggcagggacctctagccagcaccacaccccctccgtgtccttgatacaaaatacatacacatataaaaataatactccatgcattgtgggtgggcttcccctccgcaggccccagcccaaggcagctgggcctagctgtcctcccccctcctctgattcatggaatgaaacttgttcatgagttcttccagctccgacccactttgctgcttctagggaggagaaatgggggcatcctcagccgggggtcccacgtgtctgggtgccggcctcccccttgctctgcgaccccaggaacgggcgggggagaggagggcgcaggggcaggaggggcgtggcgccggagcgcaggcgggctcacctccaggaaggccttctgcatggtgagctggctgtacacgcggacgccctcctcgccgcacactttcttcagctcctccttgttgagggagaagagctgcggcccggtcaggatgcccaggttctccacgatcctgggggcgg

SEQ ID NO: 20097 - DNA, 2350 bp, Artificial sequence
  DNA replication origin
accaccgtgcctggccctgaagctccttctgataggctcagttagggagcgtgcatgttccttattgaaattggaggggtcagcacttgggggtctgggaaaccccacgaccaaggcgggacattccagcatcactcatgggcctaagagccagtcacagaaggtccacaatgatccagaaaggctatcagggtgcccttccctgttccgactacaaatctggatgaagccagattttcctcacatacttctcctagaacaatgattcccagaggcctaggcaggccccgggaggaggacccctgggcctaggaaaccggcatgatggagattttgcaaacgtggataccagtgccactctgctcactagattttttgtttaacaaagatgtactgggccaggtgcagtggctcacacctgcaatcctagcactttgggaggctgaggcagatgcattatttgagctcaggagtttgaaaccagcctgggcaacatggtgaaaacccgtctctactaaaatacaaaaattatccaggagtggtggcaggcacctgcaataccagctacctgggaagctgaggcaggagaatctcttgaacccgaggtgtggaggttgcagtgagccaagactgcggcactgcattccagccttggtgacagagcgagactctgtctagaaaaaaaaaaaacagacacacacaaaaattagctgggcacggtagcacgtgcctgtagtctcagctacttgggagactgaggcaggaggatcacttgagtgcaggagatggaggttgctgtgatcacaccactgcactacagcctaggcaacccagccagaccctgtctcaaaaaaatgtataactatttatagaagtgtgcaagcgtgaaagcgctggctcccaggacagccacgaagccacgggtcgttgacacagccgagtgggcgccattgccggagcgggaacccgcctgagggtcttcacggggtctgagtgggcgccattgccggagccggaacccgcctgagggtcttcacggggtctgagtgggcgccattgccggagcgggaacccgcctgagggtcttcacggggtctgagtgggcgccattgccggagccggaacccgcctgagggtcttcacggggtctgagtgggcgccattgccggatccggaaccccgcctgagggtcgtcacggggtctgagtgggcgccattgccggatccggaacccgcctgagggtcttcgcggggtctgagtgggcgccattgccggatccggaaccccgcctgagggtcttcgcggggtctgagtgggcgccattgccggatccggaaccccgcctgagggtcttcacggggtctgagtgggcgccattgccggagcgggaacccgcctgagggtcttcacggggtctgagtgggcgccattgccggagccggaacccgcctgagggtcttcgcggggtctgagtgggcgccattgccggagcgggaatcccacctgagggtcttcacggggtctgagagggcgccattgccggagccggaacccgcctgagggtcgtcacggggtctgagtgggcgccattgccggatccggaaccccgcctgagggtcttcacggggtctgagtgggcgccattgccggatccggaaccccgcctgagggtcttcacggggtctgagtgggcgccattgccggatccggaacccgcctgagggtcttcgcggggtctgagtgggcggcattgccggatccggaaccccgcctgagggtcttcgcggggtctgagtgggcgccattgccggatccggaaccccgcctgagggtcttcacggggtctgagtgggcgccattgccggagcgggaacccgcctgagggtcttcacggggtctgagtgggcgccattgccggagccggaacccgcctgagggtcttcgcggggtctgagtgggcgccattgccggagcgggaatcccacctgagggtcttcacggggtctgagagggcgccattgccggagccggaacccgcctgagggtcgtcacggggtctgagtgggcgccattgctggatccggaacccctcctgagggtcttcacggggtctgagtgggcgccattgccggatccggaacccgcctgagggtcttcacggggtctgagtgggcgccattgccggatccggaaccccgcctgagggtcttcgcggggtctgagtgggcgccattgccggagcgggaacccgcctgagggtcttcacggggtctgagtgggcgccattgccggatccggaacccctcctgagggtcttcacggggtctgagtgggcgccattgccggatc

SEQ ID NO: 20098 - DNA, 992 bp, Artificial sequence
  DNA replication origin
cgcctgagggtcgtcacggggtctgagtgggcgccattgctggatccggaacccctcctgagggtcttcacggggtctgagtgggcgccattgccggatccggaacccgcctgagggtcttcacggggtctgagtgggcgccattgccggatccggaaccccgcctgagggtcttcgcggggtctgagtgggcgccattgccggagcgggaacccgcctgagggtcttcacggggtctgagtgggcgccattgccggatccggaacccctcctgagggtcttcacggggtctgagtgggcgccattgccggatccggaacccgcctgagggtcttcacggggtctgagtgggcgccattgccggatccggaaccccgcctgagggtcttcgcggggtctgagtgggcgccattgccggatccggaacccgcctgagggtcttcacggggtctgagtgggcgccattgccggatccggaaccccgcctgagggtcttcacagcatctgagtgggcgccattgccggagccggaacccgcctgagggtcttcgcggggtctgagtgggcgccattgccggagcgggaatcccgcctgagggtcttcacggggtctgagtgggcgccattgccggagcgggaatcccgcctgagggtcttcacggggtctgaggggaaagcagggccggggtgggcgtgtggaaggttttggggtgtggcttcaggtgagtcttcaggaggcttcgttaggattgggcatgtttgggacggaagtggttcgggactgatggacataagaagggtttggagtgagtctggagactgagcccagctgtgctgtccgctcacaggtcctaggcaacgactgtcaggaagttcccaaaataagtcactcacaacctcatcgtcctgggtaagtttcctgatatgttccacagctcaatggtccatcattgtttttggttttgttttgttttgttttgttttgttttgtt

SEQ ID NO: 20099 - DNA, 1642 bp, Artificial sequence
  DNA replication origin
gacatagcaagaccgaggggtctgcggcggcggcggcggcgacgggacgggcgcgcggacggcccacaatgccccgcgggcggctgccaatcggaaagcggcgcgggagggcgaggcccgctggtccctgcgcgcctggacgaagccccgcccccggggacgaagcccgagcgccactgccggccgcgcaccgcagctgcggatcctacaggctgggtctccccaggtcctcagcagccgccgcggacgggcccgggaaaacacctgcacgacacggggcggctgggcctcgcctccttcctgccccgcgggacgcaccgggagggctggaggagatggacctggcccgggtgccgactctgcggggctgaacccgccagggccgaacccggcgatgcaggatccatggtggggccaggactggggtcgggggccgctgcaggaagcaggggagggagcggcgggggacgccctgcgggtgcaggaggcagagcagggggcggctgcagagcccgggcgccggacgcggcggggaacctgcttctgggaatctgttcccctgagtcctaagcccagaggtgtccgggggaccgaacggcgaggcaggcgtaggaggcccagctgccctgcttcttaccatcgctgacttgcagagttccttgtatattctgatcaagtctctgtcgcttgtgtctgcgttgcagacactgtaaccgccccatgggttcgccttgccagctgccgggacagagtctattgtcaagacaggggaattgcaatagagaaagcataattcacacagagccgattgttcgggagaccagagttttattcctcaaatcagtctccccaaaactcggggatcccagtatttaagaataatttggtgggtagggggccagtgagtcagaagtgctgactggtcagctagggatgaaatcacagggagtcgaagctgtccgcttatgctgagtcagtccctgggtagaggccacacaactggttggcaggtccaggtggggccatccggttgtcagaaatgcaaaaacctgaaaagacttttttttttttttgagacggaatctcgcccttgttgcccaggctggagtgcagtggcgcgatcttggctaactacaacctccgcctcccgggttcgagcgattttcctgcctcagcctcccgagtagctggaattacaggcgctcaccaccacgcccggctaatttttgtatttttagtacagacggggtttcatcatgttggccagcatggtctcgatctcctgacctcgtgatccgcccacctcagtctcccaaagtgctgggattccaggcgtgagccaccgcgcccggcggaaaagacttcttaaaaggcaaatcctaggctgacgcggtggctcaggcctggaatcccagcacattgaaaggccaaagcaggcgatcacttgaggtcaggagttggagaccagcgtggccaacatgcaaaaccccgtctctactaaaaatacaaaattagccaggcgtggtggcacatggctgtaatcccagctacttgggaggctgaggcaggagaatggcttgaacctgggaggtggaggttgcagtgagccgagattgtccctctgtacactaacctgggctac

SEQ ID NO: 20100 - DNA, 749 bp, Artificial sequence
  DNA replication origin
gtccgcgctggaccagctcaagcagttcaccaccgtggtggccgacacgggcgacttccacggtgaggacggcgcggagcccgggcgcggcgcaagcgccctccagaggccccggcgccccgatttccccgggtctcccgttccgggacgcggaccgggtggcggtgccccgggcggctcgttccgggaggaatgagcgcaggtgccggatgttggggccagggacagccgtgaggggagcggggcccgggtcggccgtgagaggcgcagggccagcggcgaccgtgaggggaacggggcccgggtcggccgtgagggagcagggccgggggcagccgtgaggagctggggtcagccgtgaggggctcggtgctggggtcagcggtgcgggcggtactgacgggtccttgcgagccgtggggcacgaagccggagccccagcctcgccctccgcccagggtggggtcggctgcgccctcagaccccgcacccgggacgggctgtgggcagcccgcgggagcccctctgtgcaccttcatgggtcgaggcagctttcagagcctttgagttcaggagagattcagggtagagcttcgagctgacttccacgtggccagtttgtggtcagcgagatgcaattttgttgggctgatgtctgcagagcggggacatcagctagctctgaccagaagctgccagtgctgccatcgcccttgagccctgcggtgcccagtgggacaactccgtgg

SEQ ID NO: 20101 - DNA, 1354 bp, Artificial sequence
  DNA replication origin
tgttgaggacgtggggtcttagcgccagcaggctgggggcagcacttcaggaggccggaagggcgggcagctgggggaacagagcctgcggcagtctactgggcactttgtttttcctcgataagtggacattttacagtgaatatgtattaacttatataagaatgaagagtctgggcgcagtggctcacgcctgtaatcccagcactttgggaggctgaggcgggcggatcacgaggtcaagagatcgagaccattctggctaaaacagtgaaactccgtctctactaaaagtacaaaaattagctgggcgtggtggcaccctcctgtagtcccagctactcgggaggctgaggcaggagaattgcttgagcctggaaggtggaggttgcagtgagccgagatcgcaccactgcactccagcctggcgacagaccgagactccgtctcaaaaaaaaaaaaaaaaaaaaaaaaagaatgaagataaaaatgaagctgagggattgggccccagagttaaaataaatgtagagagatacagctcacgctactttggaataaacttgtaagtgctctccggcaggcagggtgggcggggctgtgtccttcccctggtaggacagaggcccccagagccttctggattgggtgtggtgtgttgagtttcttttttaaaagttttttgaggggccgaaggatgctaggaagagctggcgggggaggggtataatcccagaacccttgtgaggaaagggtccctctgagcggcttccctggaaggggtgagggggggccaggacacttctgcgttctccatggtgcctgagggcctgagtccctggtggttcagtgagaggatgagctgaactctgtgaccctcacacccgggtttgcctttcagaaaggtctctcgtggctctgttagcactaggatgaggctggggtgtgggagtggcatggacagttgaggtgggctgcatcctctcccagcttctggctgaggctggaggtgacagtgccaggctggggaaagagcccgccatgggggatgcaggcccggggatggcctaccgttctggcagacctggctgtgcccctctgactcatgccttcccagcttccttctcctggacgtgaatgggtggctggccctgccccagggcttcaagtagtcgttcttgggtgtaggggagagggctgctcctcagcgtgttctggggtcagtcgaggccatgggggtgtctgggtagccccctgaggcggggcacgctagtcctgtcgagcccacactcactgggaccttctgcaggtgtgtcggcccagtccttcctccactgtttcacgatggccagca

SEQ ID NO: 20102 - DNA, 1264 bp, Artificial sequence
  DNA replication origin
ggttcgggacacggtgggcgcgcgtcacgtggcgccggaggccgaggccgctgggggcgccgggcaggggccgggggagggcggagcggggtcggtgtcgggatggagctcggggcggggacgggggcgggggtggggtcgcgggttggtgggatggagctcggggcggggtcggggggtcgtgatggatcccggcgccgcgtcgctcctccgagtctcgtctgcccggcgaggcggcccgggcccgacgtttctagcggagggagccgcgtgcctgggcctggtctctgaggccgctgcgctgcgagaggggagcccgggtgtggggaggggccattccgggagttgacccagctctgaggtcgggcggccgcggggaccctgaccttctgagccaccggcttctgaggagacccggagccccctcctggagaaggcgccccgcggcccccgtcctggggcaagggtaccagggcagtactggcctggggctcacgcgggtcggagcgcagcggggtgcgtcccctggcgctgagcctgcagggtctcagggcagcaggggagggatgagcagcggagcacgagggtgcctggccttgttctgagccttttggagagggaagtgagcagcccaaggtcaccgcaccacggagaggtgggggccggggttgcgacccaggggtctgcctcttgaagtctgtagctcctcaagtgtggacggggagatggggctgtggggttgtggcgtcacgatgtgctgagctccaggggtcctgagtgatgcccccagactgcgggtgggaggagcctcgagtggggttcagtcctgggggggtgggttggggcttgtttccagagcaggtaggcgtgaggaggtccggcatgttgaggacgtggggtcttagcgccagcaggctgggggcagcacttcaggaggccggaagggcgggcagctgggggaacagagcctgcggcagtctactgggcactttgtttttcctcgataagtggacattttacagtgaatatgtattaacttatataagaatgaagagtctgggcgcagtggctcacgcctgtaatcccagcactttgggaggctgaggcgggcggatcacgaggtcaagagatcgagaccattctggctaaaacagtgaaactccgtctctactaaaagtacaaaaattagctgggcgtggtggcaccctcctgtagtcccagctactcgggaggctgaggcaggagaattgcttgagcctggaag

SEQ ID NO: 20103 - DNA, 922 bp, Artificial sequence
  DNA replication origin
ggctcgggctcggcgctgggtctgcgcgtgcgcggcgtctgggcgcgcccgggagttcgcgggtcacgtgccctggcggccgggggcggagccgggtgggactgggcgcctgcgcgttcgtacccggtccgggtcggctgggctgcccgccgctccgcgcgcccgggcggtcgcaggtcgcgcctgctttggccccggcgggttcggcatccgagcctggcaggggccaataggtagggtcgcgagggtcctccccggccgcatgcgcagtctgagcgcgcgcggggtagggctcttggcctggggtgggggcgcgggcatcagcagagccaggcggcggtgtcggggcgcgaaggtgcccgtggtgttccggtggccacacccgaggagcaggggagaccggggggctgcggggtcagaagctccgggtgtccccggagactaggagggggacggcggggtccaggaggcggggtgggctccgccggcccaggacgggggcgtcgcggggaggcctgcagggttgtggggcgtcgggctgagctcctgggaggacggagtgtcacttcctgagatggggacacctcgggcgtgctggctttggtgaggagaattgaagcagtttttctttttttttttttttttttgagacagggcctctggagtgcagtggcgtgatctcggctcactacagcgtctgcctaccgtgttcaagcgatcctcccacctcagcctgttgagcaaccgggaccccaggtgcacactccaccacgcccagctaatttttttgtgttttgggtagagagggggtctcactgtgttgtccaagctggtctcgaactcctgatctaaagcgatctgcctgccttggcctcccaaagtgcgaggactacaggcgtgagccaccgcgcctggcctgaag

SEQ ID NO: 20104 - DNA, 2568 bp, Artificial sequence
  DNA replication origin
acctgttattgcattatacgctggttagactcaggtggtgctgggtgcaagctggaggggcagtctagcggggcagggcgggcacagctgtgaggggccctcgacatccctgcctccccgccggcgtcggggctcccctggagcacaagctggggaaggcgacccttgggcagcaccccctccacacgcaggcttcagggctccgtcttcccacccagctaggcttgggtggtgtggggaggtggcattgaggctctgctgaggtgagtgcccaccccaggtccgtcccactgcattcgcccaggcagacccccggggggtacgcaaagagcagaaatggggcgagtggagccaccgcgccctttaatgtccccacgagggccgggcccaggcccaacccatcccggcacccccacctgcactcagaccagccctgggggcccaggatcacccagccgccaggggtggggggggccacacacagggtccattcctttcttgccgttccccagctgtgccctcgccccacatcctgtgctgtggaccccggagcctgggctctttctgccctggaggttggggaagtcctgggtcagcaggggtgggctcgggcgtcctcttcaccgtgcgcgtgtgttgggggcgtatgtaggtgtgtaatgaatgtgcgtgtgtacgaataggtaagggtgaactctgcatgcactggcttcctcgggtctgtacaggaagtggctccgtgccccccgcctggcccccaggtattattttttccggaccaggaaggccacaccgagaatcagggctatggctgccacggccacacccccagccaccagcagggggttgaagttctcacaggaccagggacctcggcccccaggccccccactggcagcctcatcttcctccgccccgtccccaggacccttgggctccggggttgcatcgggactgctggggaccgtgggggctggcttcaggttgctgtggttgttgagaagggcagggtcggccttggccgaggtcttcttggcaggtgccgtggtgggggctgctggcggctgctgcttctcggccggggcctccttcttcgagggcttggtcaagggggctttcccatcggctgccgggggtaccttggcctcggtggtgacctggggcaccttggtgtcgggcttggggctgctggctgacttccctctggactccatggtgggcggggcgtatgggacaggcaggtggctgcaccagaggggctcaggacagtttgtcgcccctgggcattctatgggcctggagggagacacaagggaggctgcgcgcgggtccagtcccccctgtgctgccccgaccacctggtccccaggcagcccctgcccagttctctggactctctggagccccagctcaggggcctcccgtgggcctctgacacttctctttcacggcctggactccatctgtccatgaccactcctcaaggggcccctccagccgcagaggcaagggccacgcacaggtgggaggaggtaggggaccccactgtgctccataaaatggcccatgcaaatgccacatcctcccaccagccgggggcaggaggctcttggtggggaagtaaggatcaggcccagagaactcgaaggaagagcattctcccctccaaggaggtgatcggagccccagtgggagagctgactgcatcccctcctcaggagagcattcctgctttgcagagatggacactaaagcacggaggctgtgacctggccagggtcccagggggaggagggcggggaggggcaggagctgggatctcaggcagccatcagggtgggtgggcccacaagaacccagacttgagaaaactggggtgtctctccaggaagtcagcgtggggctgtgcttccaagggccgtctgcccctccccagcctctggggccccctcctcagcatgggccgtgcctgcctccagccctggagcagggagtcctcgcccagcccaaggctgtgctgtctctgtgggcagagggttcctggcgttaaacagggtgggcacatgctgcacttggcccgcgggtcagggcggaggacagggttctgggctgtgggaaaggcggtgcccagattctcaatgaccgaggcagaggtgggaagggccctgggggcccagccgccctgaacctgagtgggtcttgccccaaagccccagaggccgcctgtctgcctctcccagggaaggatgagaaatgccctccagacctgcagagaaagggaggcacgttccccaccccccgccaggtgcattgaccacactgaaggtcacccgaaggtcacagcatgatgagggcgtctccagaagaggcccagctgctgccacctcccagggaagcccagccgtcccttcacccctgcagttctcggggggctcagctgctgggcatcaagtttgcaaagagcaggtggtctgcccccccaacctcgctatttgtggcacttacatcccggccgccgcctccctctcccgggatcaactgagccctggagaactggggggcccgcgc

SEQ ID NO: 20105 - DNA, 1935 bp, Artificial sequence
  DNA replication origin
ggggcctgcgtaccgggctgaccctttcgtccttcctccacaggaagatcctgcggcacgagggcccctcggccttcctgaagggcgcctactgccgcgcgctggtcatcgcgccccttttcggcatcgcacaggtggtctacttcctgggcatcgcggagtccctgctggggctgctgcaggacccccaggcctgagcccagcacccgctccaccccagccagctgggcagggccggtgtggggctggagccaggcagctagcccaggacggagcaagggaagacccctccccagccctcccgtcggcaggggcagcagggggcagggtgcagggtccacataggtggtgcacacgcaagccccccggggtgctgcctgcaccgttgggatcaatgtctcatttatgtagaaaatgcagaaatctttacattcctcaagctagcccctgccccaatcctgccctggcctgaacacccccagggacagagctggtctctgggctgggggcccccgggcctgggccgggcaggctggaccatacccccagtccaccagctccagtctccacagccatcctggcccacacaggcaccccacacaaacctatttattgaatctgctggacccaagcggctctccagcccttccgtccttccccagccgctcttgtcgccttggcaggacttgactctgcctccctggccagccttgcaagaggactggggtctcctgccctctctgttgagccaggaatcccaagtgaggggttgccctgaggtctgactcttggggcaagcccgccacccactgtgggactttctggtgggctcctcagctcccaccccaggctggggcccagattgtgaggtctgtgtgcatgtgtgtgtgtatgtgtgtgtgcatgcgtgtgtgtgttgtggggatctggcctggcccttggggatggggctgctggggactgccccccttcccgccgtggccaggcgctctgtgtgctgtgtgtgccccaggctctgttgaccccgtccaggaactaacttacccagcttggtctctcctgagtcctccaccctggcctgggattggccagggagcagggcgggcattgggaccagtgtggagcctgagggtgcctgccctgctctggagggagggccaggagctgccacacccccaagtcctctcagggcccaccctcctttttcagcctctgcataaggcccctgggtacactgcagaagccccatccttcccgcctccgggcataaggcccctgaccacacttcagaagccccatcccccctgccaccgggcgatccctgctgtgagccgaagctctccctgccccgccctggccatgtgatcgtgttggtgacagaccctgatgtgctggtgctgtgtccccaaaaccggggccctccacagaggccccttcccagcgacactacctggggctcaggcctggacccccccagttcacggttgctcctgggagctgcccctcccgtcacatcagaaccttggaagctgctgctgctgcttacagaattatatttttttcttttgaagagttttaagaagttgtaactttttgtgtcttgtcatgtcagagaataaataaatattctaagtagatgctgctgtctgtctgggggtctgtttgggggcgggggagggcagtcccctcttcccataactggctcccttcagactgcagggctaggcctgcgcacccacccaccgacccctcacccaccgacccgtcacccaccgaccaaggggcaccctggcctagaggggatgctgagcgggacccgcctcctgcctctggcagtcccagatgggacttggaccccgcagttgctctctcggaccctaagtttctacccctggatctaaggcggagctgggtttgcggatcccacggttcccg

SEQ ID NO: 20106 - DNA, 973 bp, Artificial sequence
  DNA replication origin
acggctcccaccatcctctgcgcccaggcatggtgggcagccccgagggtggcaggtagacctgtctcttcccacttactgcggccccgcccctaccacaggcagaagctgaccctgcttaaagagatgctggcgggctgtggggctggcacctgccaggtgatcgtgaccacgcccatggagatgctgaagatccagctgcaggatgcagggcgcattggtgagggcggggggagggggaggagagggcagaggtgcgggaagaggtgagggcgaggggagggtggggacgcagggagggccagagcgtgtcccctgcccagttcgcacagaagaggagacagcagcctctttgtccccagccgcccagaggaagatcctggctgcccagggccagctctcggcccaggggggtgcccagccctcagtggaggctccagctgcccctcggcccacggccacccagctgacccgcgacctgctgcggagccgtggcattgccggtctctacaagggactcggggccacgctgctcaggtaggaggcacagggcaggtggggggagggaagggggaggccggcctgcccaccccaccacctcctgtccccacggccacctccctccccacagggatgtccccttctctgtggtgtacttcccgctctttgccaacctgaaccagctgggccgcccggcgtccgaggagaagtcgcctttctacgtgtccttcctggccggctgtgtggctgggagtgccgccgctgtggccgtcaacccctgtgatggtcagtgcatgggatggcgcccggctggggatggggcgggactgagcccttggccaggctcacactgacccgagcgccccttgcagtggtgaagacgcggctccagtcacttcagcgaggcgtcaacgaggacacctactctgggatcctggactgtgccaggtggggaggtcccacggcgggtggg

SEQ ID NO: 20107 - DNA, 2013 bp, Artificial sequence
  DNA replication origin
ccctcactcattcccattccctcatccttctaggacagaagtggcggttgctgacgcctggaaattcccctgaaggtggagcaccacccaacccccctgggtcccaccctccctcaaggcctcctccacctccacctccaccccgcctggcctggcgtccacctctgcggctcctacctgggtgcaatcgagttaaatggctgataagcagatcaggtcagactccagtcctggctgcgtgcctcacccccaccctgacccatggtcaaggaagccggtcctgacacccctgtccacacagcctgccagccaagctcatcaatggcggcatcgccgggctgatcggtgtcacctgcgtgtttcccatcgacctggccaagaccaggctgcagaaccagcagaacggccagcgcgtgtacacgagcatgtgagtgtgccgggcggtcgcggggagtgggcccagcatgtggcagcaggagaggtgggggctctgctcctgtgccccccaccctgtttgacagaagggaaacgggaggcaggcgggcctaggggagatcccacgtgggtcaggactggggtcggggctgggctgaggacttggcctcttctatcagccctagacagtccagggaccctggcctccggctggccccagctggccctggctcaccctgtccccttggccacaggtccgactgcctcatcaagaccgtccgctccgagggctacttcggcatgtaccggggtgaggtttggctcggctgggctcgatatgggcaggcctgggtagcgcccgcgagtcgtggcagggagcggtgggggaggcagggcagggcggccagcctgggcctggtgtgtgagcgtggacgtgtttgtgggggctgtgcctgtgcaggggggactggatctctggtgagtggtagttctcagcctctcccgtggcagctccccacccccacttagtgcctggtgcgtgggatgccatggtacatctgtctcttctctggtggccacagctgcctctgccttctgggccaggctggaccccgtttgtggctggggatgggagggagtaaggggcattaccgcaaagcagcttaggacacaatccagagcctagatttggcagaagctctccagccctgagccttcggcactgagatgggggctctccacagcctcccccgagctctggcccagtccagaccacacactcctgtgacctctggccccagccccctgccagcacaagcaccatctgtcctccagggagggagaggtatcctagggaggcctcaggggctccggggcagtcctcatgccctgagcagcaagatgctgcccagaatcagagacagatggagctgcagtgggcatgggagagcctgagcctgaggtgctgccccatccctgcctggccccgccccacctggcacacaccaggcccaaatgtgggtgagagaacagatggtggccaggagtgactgggacagggttttgccagccaggaggcaagtcctggccaagcgcctccccactcaggccaccgagcatgtccccccagctgaccccctgccccacaggagctgctgtgaacttgaccctcgtcacccccgagaaggccatcaagctggcagccaacgacttcttccgacatcagctctctaaggacgggtgagggttctgcctggcagacactcgaggggtctttggcttcagataaaggatgggtccaccctgccagctgggtcccacctgggggctctgcctgtcttcagccccttgcttggggcttctttgacctcgtggggcaccctccctcctttcccctgaccaggggagcaaagcagatgtcaaatcagtggggctctggcttggtagcccttggcctgagggcactgaccagctcccccatcactggagggggactgcaagggcagcccctttttggggcacttgacccccaatttcccattttcctttgtcgcagacagccccactgccctccccagg

SEQ ID NO: 20108 - DNA, 1055 bp, Artificial sequence
  DNA replication origin
tcctctgtagtggatgggggtgccagccacagggggcctcagaaggccagccatcccccacccccaaggcttccaggggtcccatcactggcttctgtgtgtccatgagtgaaactcctgggaggggtggaggggaggaaggggcgggcaaggggctggctgtggggggtgtgggcatcgtggggaggagctctgcaggccctaggtggagctgccatgggaggagagctatacctgggatagctgagcccaggtcggggggtcttagggcgcccgggaccccagcccctagctcgaagggggcaggtgccggctgctgctctctctgtgctgaaggatgtgggggatggtcaccacagctgtccaggtcgaggtgctccggtaggcaccctggccccggcccctggcactgcccccagaggtgcctggccctttaaaagccggagctggctggggtgcacgtgagccccgagcgtgagcggcgtgtgaggctggctgggaagacgctggcggtggggagggggggactgaaaggaagccaggtggtcccaggggtgagcatgggactgggtggcaggtgcctcccgctgctgcaccctcaggacgcagtgacggcttcagtctggggtggtgggtgaggggctgcgtgagagagggaggctgggggaggattactcttcgggtggccccaccctcactcattcccattccctcatccttctaggacagaagtggcggttgctgacgcctggaaattcccctgaaggtggagcaccacccaacccccctgggtcccaccctccctcaaggcctcctccacctccacctccaccccgcctggcctggcgtccacctctgcggctcctacctgggtgcaatcgagttaaatggctgataagcagatcaggtcagactccagtcctggctgcgtgcctcacccccaccctgacccatggtcaaggaagccggtcctgacacccctgtccacacagcctgccagccaagctcatcaatggcggcatcgccgggctgatcggtgtcacctgcgtgtttcc

SEQ ID NO: 20109 - DNA, 2083 bp, Artificial sequence
  DNA replication origin
ttggggacgcgcggcccggcctctgcgcgcagaactgccaccctgcccgggggaacccacggccagggggcgggtgggcgcgtggctgtggcctggctgggcgcagtagcctcgacggccaggagggggagccgaagcccggaggaggccgagggcggagcgcgcgcggcgccgagcggacgcgcctccccgcctaggtgctggccgagcgcggggcgggcaggcgagcgcggcggcggcggcgagcgtggtgagtgtctgcccggcggctcccttctgctgcgcccatccgaacgcggccgggctgcgggggcgagaggtgctgcggcggccgagggaggtgacagctgcccgaacaacgtggcctggcgggcgggagggggggtcctggaccagcggatgctccgatccgcggctgctctggcgtgagacgccgtgctcggccccgacggttccgggcgcgctccccgcacatacgtgtccccgagggtgggtgtccggggcccgagcccaaggaagaaaggccgacccgtgtgggacgcacacgtgggagttcaccggacatctgtggacacgtgcgtggccggagtcgcggtggccaggcggaggacggagcggtcggctgagccccagcagtagggcaggggcctgagccggcctccgagcgcagagagcggcccccaacccgcttctcctttgtcctctggccgaggcatcgcgcagttggagtccccttccgggaccctccagccagcaggatagaaagcaccgccccaagaggacggggacagcgggagattgaatggggagccgccggccagactcggagcctcacccccattgcctttcttgggggtaggaggagcctggcggcttcttgggtggaggattttacccctgcagattcggaagcagcggtatcttcctgtggggtggtctctgctctcctgctgtctccctggcttgcctgtggcctcagttcacctgactatgaaggggggacagtgacggctcacagcccggggcccggctggggctgcagggtttctatagcaacatcagtgcagggggagggccctggccagctgtctcataaaccaggggtgggaactgccgagtgagggcagagaaaggcggggttggcgttcagagggaacccctgccggttcttccccaggcagagcccctcactgtcatcattctccacccagaagctcctctccgctgcactgggtgacgtgcgggcccaggcctgcctctccgccctgggatctctgggcctgcttctcttcttgggacgaatggccgctccccacctcggtcggcctgacttccaggattgcccctatcatgcaggtgtcctcatcccagactggagataggctcccaggaggaagggggttgctcagtccctggagggccagggtacacccctgggagggactagagtggagatgaagggcccagcgcagcccggagagctgtggccagtctgcacccgaagagtggggcggcaggggtggggggggctaggagggatcaggtagaagttcagaggtcagcttgtcaccaccactggctgaggcagggaaaggcaggtctgacggtgaagccctgagtgggacgggtggtggggcagagggctctgggcatgccagctcgtgtgccctctggacctgccaggtgagcagggcctgtgggtggcaacagtggcctctggcacccagctagctcttccctgtggacagcaggccttttttgtggcccagcatgaggcttccctgacatgcatctgcccctagcagacacacatcccacagacacgagtgggtgttagcccatctctgctccacagcaccggattccctgtccaggtacatacagggtaccctggcccggagaaagcctcattctcagagtaccagccctagacagatccaggccaggaaatgctatagggttcaacccacaggcagcagacaggaacacatgtgtgctgggggtgtggtggccacgcgctgaggtccctgtcggtgggtggcctcgctgtgccaggtcagcctgagtcagacccacccctgct

SEQ ID NO: 20110 - DNA, 1670 bp, Artificial sequence
  DNA replication origin
gaggaggctgaggctgcccggcagaggaagggcgcagacgccctgtggatggccactctgcccatcaagctgccggtgggactgagggacagcagaggggcggggcaggaccgaggcccaggggtgaccagggtgacatggtggagttgggggtggagcccagggcttaatgcactttttccttccaacagagacttcgagggtccgaggggccacggcggggggctggcctctccttggcacccttgaatctgggagatgccgagaccggctttctgacgcagagcaacctgctgagtgtggctgggcgtctgggtctggactggccagccgtggccctgcacctgggggtgtcctaccgggaggtgcagcgcatccggcacgagttccggtgaggctcccactgcccgctggctgccagccccagggctgagccctggctgcctggagggcccacctgattctgacagaagtttcttccaggggaggtgggggaagggcaaacaccaggctggaaaggaaaggtctggccgcacctggccccaggagccgggaactcccccacactccgaggcagagtgtggtggggggtcctgggcaggtggacaggacccctctgtcgcccatcctctgcctgcagggatgatctggatgagcagatccgtcacatgctcttctcctgggctgagcgccaggctgggcagccaggggctgtggggctcctggtgcaggccctggagcagagtgaccggcaggacgtggctgaagaggtgcgcgcagtcttggagctcggccgccgcaagtaccaggacagcatccgacgcatgggcttggcccccaaggaccccgctctgcctggctcctcggctccacagcccccagagcctgcccaggcctaggccccacagacttttaggctggcccagatattccccagtggatgggcagagcccccaccttcaagtctctccagtgtgtggggacgggtccctgtgagcaacaaaactgcactgtttctttcacctcagagcttgatttatttgttggatggagaagccgttggagggcggagggtggtggggtagaggcctggcccctgcggggagggaggcctgtgtgcacaggtgccccacatcctggtcctgtcctctcccactgtgcctggggcctcctgtgggtcctcatcttcctgggagggaggagctgtgctacaaagtaacccacatgggctactttttttttttttttaaatggagtttctgtcacccaggctggagtgcagtggcatgatctcagctcactgcaacctctgcctcccaggttcaagcgattctgcgtcaccctctcaagtagctgggactagggcacttgccaccacgctggctaatttttgtatttttagtagacggggtttcaccatgttggccaggctggtctcgaactcctgaccttaagtgatccgcctgcctcggcctccaaaagtgctgggattgcaggtgtgagccactgcgcccagccccaagtggggtgctttggatacaaagtcgctgttcggcgggtggggttgtgcctccacttctccattgcgctggcccagcagttccacggatcacctgtgtctgccctggaggccacgcctcccccagggcaccctcatccaccggcgctct

SEQ ID NO: 20111 - DNA, 1320 bp, Artificial sequence
  DNA replication origin
tcgctgcccctcccatccccaggcctcagtctggaccgctcccgcctgcacctgttgtactgggcccctcctgcagccacctgggatgacatcacagctcaggtggtcctggagctcacccacctgtacgcacgcttccaggtcacacacttctcctggtcagtgccccccagctttctcagcccccctcccccagtctgtacagccctcctcacccccagctctcccaggtactggctctggtacaccaccaagaactgtgtgggaggcctggctcggaaggcctgggagcggctgcggctgcaccgtgtgaacctcatcgctctgcagcggcgccgggaccctgagcaggtcctgctgcagtgcctgccccgaaacaaggtgggggcacgggccggagggcagcagggtggtgaccagagggctggggtggggtgcagagctttgggtcctgagctgcacgggcttccccgcaggtggacgccacccttcggcggctgctggagcggtaccggggccccgagccctctgacacggtggagatgttcgagggcgaagagttctttgcggccttcgagcgcggcatcgacgtggatgctggtagggatgctggtggatgctccctgccctggagggggagccttaccgtcctccccgagccctccttgctcagcccacccctgtcccctagaccgccctgactgtgtggagggcagaatctgctttgtcttctactcgcacctgaagaatgtgaaggaggtatacgtgaccaccactctggaccgggaggctcaggctgtgcggggccaggtgggcgaggggagtgggtgaggggagaggccccccaggccgcttgggcagaggaccgaactccgaaccccattcgatgccccttcaggtgtccttctaccgtggcgcggtgcctgtgcgggtgcccgaggaggctgaggctgcccggcagaggaagggcgcagacgccctgtggatggccactctgcccatcaagctgccggtgggactgagggacagcagaggggcggggcaggaccgaggcccaggggtgaccagggtgacatggtggagttgggggtggagcccagggcttaatgcactttttccttccaacagagacttcgagggtccgaggggccacggcggggggctggcctctccttggcacccttgaatctgggagatgccgagaccggctttctgacgcagagcaacctgctgagtgtggctgggcgtctgggtctggactggccagccgtggccctgcacctgggggtgtcctaccgggaggtgcagcgcatccggcac

SEQ ID NO: 20112 - DNA, 1710 bp, Artificial sequence
  DNA replication origin
cctggccccgcacagcctgagcctcccggtccagagtggtggtcacgtatacctccttcacattcttcaggtgcgagtagaagacaaagcagattctgccctccacacagtcagggcggtctaggggacaggggtgggctgagcaaggagggctcggggaggacggtaaggctccccctccagggcagggagcatccaccagcatccctaccagcatccacgtcgatgccgcgctcgaaggccgcaaagaactcttcgccctcgaacatctccaccgtgtcagagggctcggggccccggtaccgctccagcagccgccgaagggtggcgtccacctgcggggaagcccgtgcagctcaggacccaaagctctgcaccccaccccagccctctggtcaccaccctgctgccctccggcccgtgcccccaccttgtttcggggcaggcactgcagcaggacctgctcagggtcccggcgccgctgcagagcgatgaggttcacacggtgcagccgcagccgctcccaggccttccgagccaggcctcccacacagttcttggtggtgtaccagagccagtacctgggagagctgggggtgaggagggctgtacagactgggggaggggggctgagaaagctggggggcactgaccaggagaagtgtgtgacctggaagcgtgcgtacaggtgggtgagctccaggaccacctgagctgtgatgtcatcccaggtggctgcaggaggggcccagtacaacaggtgcaggcgggagcggtccagactgaggcctggggatgggaggggcagcgagctgaggcctcctggccggagaccccctccaccctatggccacaggtccaggtatgccccatggctgcctctcacctgtgatgccagagggcagaggcagctgcacggtgaccggttggaggaagctggggggaccgctctgtgacaggcacagcagggggctcactgcagcctctggttctcccaggagggcctgcagctctcggccagccatgcgcaccacctggggcagacaggccccctgagcacctgcctgtgggctgaggcgcggcctgccaccctcagtgctgtcctggccatacctgcatggagactcgacgaggctcctcagtggccccaggggggaagatgactttgaccccaggatgacccgaggagcacagcagtgtcccctccggtggcaccaggcaggcattggacacagggcgggaaaccacaaggaaccaggagaagtggggcacctggcagtgagcccagagccgctgggatgggggagagaggaggtcacaggagcctgggtcagggcacagccagtcagggacacagggagcaggatccaggagagacggggcggggtggaaggtgccagggacacagggagcaggatccaggagggacggggtggggtggaagttgccagggacacagggaagcaggatccaggagggacggggtggggtggaaggtgccagggacatagggaagcaggatccaggagggacggggcagggtggaaggtgccagggtgaggctctgggcagaggtgcacggctcagggcagcagctctccactcgccaccggcaggcctgggtggccctcacctggggtgcctcttcctccaggtaggtctccaggtcaccccagctgttgtcattccgggtcctgaccaccacttcac

SEQ ID NO: 20113 - DNA, 879 bp, Artificial sequence
  DNA replication origin
ggggtggaaggtgccagggacatagggaagcaggatccaggagggacggggcagggtggaaggtgccagggtgaggctctgggcagaggtgcacggctcagggcagcagctctccactcgccaccggcaggcctgggtggccctcacctggggtgcctcttcctccaggtaggtctccaggtcaccccagctgttgtcattccgggtcctgaccaccacttcacggcagcgccgggcctgcggtggggtgaagagcagccacagccccacatcctgccagacaaggatggtgtgagcactggagccatgcccgggcccgcacactgcccctgccatgccctggcccacacactgcccccgccacgccctgtccatgcctgctggaaggccaccccatggggctgcagctccagcacatggctgagcagggcgtcatgaggacccagggggacgaggcctggctccggcagcagcagccgatagcggatggtgatgggggtggcggtggctcccgctgggaactgcaggcggacgccacaggccagggtcactgagcagccttgaggggtcacaggaaagctgagtgaggaaggagcgagcaacaggttagacccagaagggcctacgtgttggagcctggacccaggaactctggagaaggtgtcggaggggccagagtgacaggcagacagactcccctccagccccctcaacccaccccatacctgtccaaatctgaggtcaggaacagtctgggcatttctggaatgagggctgccactgtgcaggggacagacatgtgctcaggacagtgaggagactcatgtcctatcccaggtctgccccttctagcaccaagcctacctggtgaactcgggg

SEQ ID NO: 20114 - DNA, 2463 bp, Artificial sequence
  DNA replication origin
ctgaggtcaggaacagtctgggcatttctggaatgagggctgccactgtgcaggggacagacatgtgctcaggacagtgaggagactcatgtcctatcccaggtctgccccttctagcaccaagcctacctggtgaactcggggcgtctggcgaggcctcacccagggggttcccctgcaggcgcacaaagggggcgtctagcagctcagggggcaggtcccggagctggttgtccctcaggtcgagccgggtgaggagtggaaggcgggccaagtcagctggcacagaggccaggaggttgctgtgcaggacaaggagccgcaaggaccgaagtcccgctgcgggcagttgctggcttaggcttggcaccagcccagcccacggcgctgggacactcctgctgccgcctcccagagcagctgtttcagactctcctccacagctgggctcagagaactctgacaaagccactgagggagtctcaaaggccagggaggtggagggacaaccaagaggcagctgtggaccaagcctgtgggtgcagaggcccctgcagaagacaggcaggcttcagggaccctcccgtggggccagtgtgtcggggcgcaggggctactcacccagagaggctgggaggctctgcagccggttggaggccaggttgagctccaggaggctgcccaggcctccaatctcaggaggtagcgtgtccagcagattctgagagagatcgaggcgctgcagggtggatagggcccccagtgctgggggcagcgtctgcaggcggttgtgtgtcactgtgaggaaggtgagggcggggagggcccccagagcctcaggcagctcagagaggcagttgtgagacagcaagagcgcacccagacctcgcatctgcaggacacaggccggcagtgtctccaggctgttgaagctcaggtccaggtgggccagatgggccaggccactcagaccagcgggcaggttggtcagggcaccccggagacaggcacccagtgtgtcccggcgttgccctcctgggaaggggggaggcggatgtggccctcagagccagggtccgaggtcccagatcgaccctgccagccagagaaacagctgctcgagaggcacagacctcccaccccacccccaccccagccagacagggacagacagacagaaacactggagaggtgcccgcaaatggaaggaggcaggggtggagaccaccggctcatctcagctgacaaccatcacccacaaccttccccaggaacaacatctgcactgtggtctggagagacccccactgggcagcgtcagggtccaggagccagggcccagccagccccacactgggggtggtgatcaccgaggatggcgatggggctggacaggaccaagagcagaacagttcacacctggggagccgggaggggcggcctggagctggggctgggactggggtttgcctttgagaacatgcagcagaggcagggcagagcgagagatggagacagggcccagaacaggtggaactcacctttgaggaccagggagcggaggcaggacaggctctgaggcagctgggccagggtggcctccagcagctgagggtcctcgtgagtgctcagacgcaagaattccacctgcagcagctgcagaggctgctggacacacaggtgcagcagctgctggcagcccccggggtacaggtccaagctcagccggttgccgcccaggaaaggcagcgccctggaccctgcgtccgaatcctctgaagcatctcctgcggcagcagctgcctccagctctggcccctccaccgttgcagccatcgcccaccgacggtccttggaggccagacatgtcccagcacgcaggcaggcctgtccaggcagcgcccggggaagctgcagaggcaggaggaggagtgagcgggagccggggtgggcccttctctttggggaaacagggactctggatggagtggggagctctagagccaggccatctgggcctgggctgcagagtgggggagaccttgtggtcaccctgaaccccggaggcctgggtcaccactggaaagagggttggggaatgggaccgccatggctcgcaggagcaccgggcagggagacctcgctatgagcagcaaagccggggtagtgaggcttcagtcctggtcctggaaatctggccaatggagccgtggagctgcgaggtcataggggctgttccccagtcctggagatgagtcccccttctatttacatccgttttaccaggaaggccgtgaccctcccctaccgcgggggtgactgcgccccgaaagtcagggaaggccgtgtaagggtgagggcctggggcgtgagccattgggcagcttcggggtcctggggccgggaccccaattcgtgagccccggaggaaacctctcccggcctttccagttcggtccactg

SEQ ID NO: 20115 - DNA, 1060 bp, Artificial sequence
  DNA replication origin
gtttcaccatattggccagactgggcttgaactcctgacctcaagtgatgcgcccacctcagcctcacaaaatgttgggattactggcgtaagccacagcatcaggcctgtggttggtttttaaaaagatctcttggccgggtgcggtggctcaaacctgtaatcccagcactttgggaggccgaggcgggtggatcacgaggtcaggagttcgagaacatcctaggtaacacggtgaaaccccgtctctactaaaaatacaaaaaaattagccgggcgtggtggtgggcgcctgtagtcccagctactcaggaggctgaggcaggagaacggtgtgaaccctggaggtggagcttgcagtgagccgagatcacgccactgcactccagcctctgggacacagccagactccatctcaaagaaaaaaaaaaaaaagatccctccaggccctacatggaaggggctggggtgaatggaagcagggaggcctggaagagacctgcctgtcccagagggagggatggtggtagctgggaaatggaaggaagaaggagccgccgatatgacctcaggaaagaagcaggcatagctggtggtgtctgttccctccctaaacacctgctctcctgggcgaggaagctggtgaataaagcacaggcccgctcgggggtatcatgttggtggggaaggaggagccgctgatatgacctcaggaaagaagcaggcatagctggtggtgtctgttccctccctaagtacctgttctcctgggcgaggaagctggtgaataaagcacaggcccgctcgggggtatcatgttggtggggaaggcggacagggcagatttcaggttcttggctttgaccctcaccagctacagggcctcgggcaatatctgattttttttttttttttttttcagacggagtcttgctctgtctcccaggctggagtgcagtggcaccatctcggctcactacaacctccgcctcccgggttcacgccattcttctgcctcagcctcctgagtagctgggactacaggcgcgcatcaccacgc

SEQ ID NO: 20116 - DNA, 980 bp, Artificial sequence
  DNA replication origin
ccgccacgcccgggactcaacctttgccagcgaactgcaagtcccatggtgcaccgctgccggaagtggcctgcgccgcgggcctacccggaacggcgcgtgggcccgggcagaagctgctggcggtaggctcgccttgactccttggtggttccctggccgcggcgaccggtggtcccacgtccagccgggctcagtgaggtgagccagccgcctcggacttagcgactgcggccctatctgggaggccgcccccgcactgcggtgtcagggcatcctgtcagaggacgagcgcgggccttggagggcaggacaatgacgtgaggcagcgtcgcccgctcacccctgcgaggagtgaggtctgagtggtcagcccctgcgctggccgctttggcccggaactgacctcggtgtccatgtggacatcagcacctcagggaccccgctacattctcgggtcctgggagggaacagggttggccctgcctcctaaggacttgagttcttgtgcgaggacgcaggaggtgaatagggaggcgatccgaaggacagggacagagggagacttggtcctctgggcagcctgagaaagcttgagctgagagatgagaaggagccatccctgccaatatcccgggcgagcaccaggaacagggtcagatgcaggtatctaccgtgttagcaggcagcgccagctcccgttgggctctaacagcagtgcaaaccctggggtgtgtatacgtcaagcactggaactcgacttcacagtcgccttctgtggcctcgttatcattacccccattttatagatgaggcagttgggtacagaaaggtttttttgctcagggtcacacatctggggtaaaggcgggaaaccatcttgggaacaatgggacttttcttattttgtaatttttgagactgggccccattctgtcgcccagcctggagtgcagtggctcgatcacagctcgctgcag

SEQ ID NO: 20117 - DNA, 998 bp, Artificial sequence
  DNA replication origin
agcggtttaaccccgcctcttgcgtcggcgccttccttttcctccctgtcgccaccgaggtcgcacgcgtgagacttctccgccgcctccgccgcagacgccgccgcgtgagtgtggtgaccgggcccggggtgccggctggggacgcggagtccgtggggatgcggggtgggcggcggggtatttttgggacggaggcctacgggccgagccacgcgcggcctcgcccggcggccccgggatgggccggcaggaggccgccggggtaactccgccgtcgcgtcctctccgcccgcctcaggatgcgctacgtcgcctcctacctgctggctgccctagggggcaactcctcccccagcgccaaggacatcaagaagatcttggacagcgtgggtatcgaggcggacgacgaccggctcaacaaggtagcggccgcccttgccccgcagccgccgtggggccccagtgtcccatacaggcgattcttctgcctgatccggccacatgctggagggttcggggagaggctcgtttcagtctagttggcgatttcttggatagagaagtaagccgggcggaggtcgggcgcggtggctcacgcctgtagtcccagtactttgggaggacgaggcaggcggatcacctgaggtcaggggttcgagaccagcctggtaaacatgtcgaaaccccatccctactaaaaatacaaaaattagccgggcgtggtggtgggtgcctgtagtccccctacttgggaggctgaggcaggaaaatcgctcgaacccgggagatggaggttgcacggatcgtgccactgtactccagtctgggtggcagaaggagaccctgtctcaaaaggaaaaaaaaaaaaaaaagcagggtgggtacgaggcaaaatcgtgattaacaagctttggaagtttaataccagtgagctgcgtaagattgcgttaaaaaaaaaaaaaagcagtcctggcgcatggctcacccggctttgg

SEQ ID NO: 20118 - DNA, 1090 bp, Artificial sequence
  DNA replication origin
tgccactgtactccagtctgggtggcagaaggagaccctgtctcaaaaggaaaaaaaaaaaaaaaagcagggtgggtacgaggcaaaatcgtgattaacaagctttggaagtttaataccagtgagctgcgtaagattgcgttaaaaaaaaaaaaaagcagtcctggcgcatggctcacccggctttgggaggccatggcgagtggattattggagccttgaagttcgagactggtctggaaaacattgcaagacccggtctccacaaaaaaaaaaaaaaaaaaaaatggttggaggcagtggtgcacatctgtagtctcagctactcatgaggctgatgcgggagaatcatttgagccttagaggtcaaggctgcactgagtagtgattgtgccactgcagtctaacagaaccaggcctcgtctctaaaatacaataaaaaattagccaggcttggttgctcatgcctgtagtcccagactgaggtgggatagtcacttgagcccgggaggtcaaggctgcagtgagatcctaccactgcactccagcctgaagtcaaagtcaatttcattgccagtttattttgccagtgttgaagatacctatgagtagtcaacataagtagtgagatgccctgtgtccttttgtcagtcctaagtctaagaaagctagtgtccatttatttttatatcacttcccaagtgaggctggtggctccctttgggcagtgcagttctggaaacttcagggcctattcccatgtggggaacccagtcctgctgtgactctgggagggagagggccggggatacaatcgtacattcctggtaacagccctgtgattgtctgcttcaggttatcagtgagctgaatggaaaaaacattgaagacgtcattgcccagggtgagttgatgtggacgggctttcgtttgttttcatggtccatcctaatccctgccggtccatctgtggcctgccaggtttcgcttgtggaccagagcaccctagaagcctcacccgaggagtgagcagggctccagtgggctcacgtcatgggcacttctagacactctcaggagcagggcagca

SEQ ID NO: 20119 - DNA, 841 bp, Artificial sequence
  DNA replication origin
tttagtagagatggggtttcatcatgttgcctaggttggtctcaaactcctggcctcaaatgatcctcctgcctcggcctctgaaactgctgggattacaggcgtgagccactgtgcctggcctacatttatattttgttttattttgtattttatcttatattttgagtcggaggctcactgtgttgcccaggttggagtgcagtggcaggatcttggctcatggcagccttgacctcccaggctcaagtgatcttcccacctcagcctccagagtaactgggactactgatgtgtgccaccaacacagctaatttttgtatctttttgtagagatggggtttcaccacgttggccaggctggtctcaaactcttggctcaggcaacccacctgctttggcctcccaaagtgctgggattacaggtgtgagccaccgtgcccggccttaataatatttttaaaaaaacctttttggatgcccgtaaaagcagagattagggtgggagtaaagccaggtgaggagtggaggaggccggaacctgggtagtaggggtggggcagcagatggaggaggaagcaaagagaaatgaccccagcagggtacagctaaggagtgcagggagcagtgctcactacaacggggcaggggtgaggcgggggctggggatcgcccaggctcagggagcagtgctccctacaaggaggcaggggtaaggttggtgctggggatggcccaggctcagggaaggggcccacagcaggagtggacctaggcttcagggtgcagacctcacaattccagccttggaccctgaagggagggggcctgtgtcgcctgg

SEQ ID NO: 20120 - DNA, 1979 bp, Artificial sequence
  DNA replication origin
ccgtagatgtgcgtggcgttggccaccaggaagggcgcgtgctcgcggaggcaggaggccacgccgacgtagtagacgccgaggaagccgcagcccgcgaacgagatgttccacgtcttctcgcggggaaacatcgcggcggcggccgccgggccccgggttccgtgggcggccaggcctctgtgagccgcctgctcgccgctcgctcgctggagccgggggccgggcaggtcccgctgcggctctagctcggggtccccgctggcggaggcgaagaagctacgcgggcggcgcggaggcggcgcttttaagtgtgggactcacggcgggggcggggccggcacacgaagaccaatcggggcgcgcagggaacggccgtgccctcgggacccgcccccgtccttgacccggccccccgcgctggagccccgccctccgctgccgcccggagaaagcttctgccctccctccgcccctgctgggcacggctgggggcacacgcctaggggtgtagggtgggctgggcgcaggcccgagcctgggggccggaagcctcacacagacctgggtaccggcgagagggagctctggtttcagggcagccaccgcccctccccaccgggtccgcctcccacacccacccgggacagaggagctggtccctggacagaggcgcaccggcagcacccccagacctgaaagccgcacaggcctcgggagccccgggacccacaggctcacccacagacagacccataaacatccaaggccaaggccggatgcgagtcccgcaaacccttcgtgggggaccccagctccgcagacccacgcgacctgacgtggggcctcagccctgccccgcgcccgcgacccttccggaccttggcttcttacctgggtctggccctgcctgttcaggctttggggctgcctgcgtctgactggggccgccctgctcccgataattgccccagaggtggagcaatcctgggtgatgtcaccctttcaccccttttccgcatttttctcctggtcagtggagcaaacagggcttggagtagatccaggatccctccctgaacctcaccccacccccaaacgagaggctttctcaggttggggtgggaggcaatgagattctgtctccccaggaacactggctccccaggctgaggtcatctctggacctagctgttgccagagctgcagagggtctgggatggggcttggggctgcccccaacccaagctgagttagggaagccagaacagggccagaacaggatggggccatctagggggatgctgcccagtcctcagcctctttgctcccagccatcccagacagcactggaaagtcaaccctgccccagccctactgggggccggtaggcatttacataagctcaaaatgagaggaggccgggtgtggaagctcacacctgtaatcccagcacttggggaggccaagacgggcggatcacagaaagtcgggagtttgagaccgcctggctggtgaaacgctgtctctaccaaaaatacaaaaattagccggtcagggtggcacacgcctgtaatcccagctactcgggaggctgaggcaggagaatcacttgaacctgggaggcggaggttgcagtgagctgagatcgcaccactgcactccagcctggggggcagagcgaggctccgtcctaaaaagaggccgggcacagtggcccatgcctgtaatcccagcactttgggaggccgaggagggcagatcacctgaggtcaggagtttgagaccagccaggccaacatggcaaaaccctgtctctactgaaaatacaaaaatttgccaggtgtggtagtgcacgcatgtagtcctagctactcgggaggctgaggcaagagagtcacttgaacccgggaggcagaggttgcagtgaactgagattgtgccactgcactccagcctggccaggtgacagagcatga

SEQ ID NO: 20121 - DNA, 3406 bp, Artificial sequence
  DNA replication origin
ggcacccccaacagccacctcccttcactacccgcagctcccaaccccaaaacctatcctagatccagaacaagatcaaagctgtacagggaggttggacagaaagccgggcgcagtggcttacacctgtaaccccagcactttgggaggctgaggcaggcggatgacgaggtcaggagatcaagaccatcctggctaacacggtgaaaccccgtctctactaaaaatacaaaaaattagccaggcgtggtggtgggcacctgtagtcccagctactggggaggctgaggcaggagaatggcaggaacccgggaggtggagcttgcagtgagaggagatccagccactgcactccagcctgggtgacagtgtgagacttcatctcaaaaaaaaaataaaaaaataaaatagtttgaggccagcctggccaacatggtgaaaccctatttctttactaaaaatacaaaaagtagccaggcatggtggcaggcgcctgtaatcccagctaatggggaggctgaggcaggagaatagcttgaaccttggaggcagaggttgcagtgagctgagatcctgccactgcactccagccttggcaacagagcgagactccgtctcaaacaaaaaaaaaaaaaaaaaagagagagagactggacagggagcctggacagagcagctagacagagaggttggatgggccatctgcccctagaaaggttgtgcgctttccccagccctcagaagaggctcccaccaccctaccctgggcactcagaagtcaaaggatcagtgttctcccttggtgcccagtgaggagtggctgggaaggccacagtcctcggagcagagctcaccaggggctccggcgggaagagggccttggagaggcggtagaggttgcgcaggttgaactggatgctggtgttggtgacccgcagctcgtggatgttggtggagctgtcctgcggacagatgtcactctcgcccgagaagggggacactgtgatggtgttcttaagctcatagagtggcaggttgtctgaaatgccaccatccacgtagcgcttccacgggacacacagacaggaccgtatgtgagggcctgtggctgcactggccacccaccccagccaccccacccggccaccaagggccccattcagtggctacctcatttgagcgttttacccactgggcactggctgtgggccagcctgggcactgagcagatggtagacgggggagggcagggacggaggaagggatggggggccaggaagcgtgcgttgccacagctgtttcttgagtaacacaggggaagtgggtaacaggcggtggcagagcaagggcctgaaggatggctctaggcggcctcctcctctgtccctcatcccacggcccaccccatagaaggtgtccagggctaggaatactcaccaccccctggagggagggagggatgagcccacagtacacggggatgaaaccgctgcagacattggccttcagggcagggacagagtgggagagaatgagcagaggccttgaggttcccactgccccccccaccgccacccagcatggctccaccaggccccacctggatgagctcgtccttggagttgaagtgggatataatgacattctcgccgtctgacacgcgggtcagggagatgcccaggcgcccactggcatgctcatggctatcagcaggcaggaccttcagcaggaaactgcggatgatctttaccaggttgaaggaggggtgcagggggcccaggaaccgcttccgggcctctttagatacctcaatgaacttggcaccagcctcacctggggcacagggccaaggttaggggcccatgctcctgggcttagcaacacccaccttccttcatagccccatgtccagggttccatggcatacagaccctggaggaggcccagtgaatgtggggcctggctcacagttgggactttggccacctcccctgggatggcagacagcagaggctggccagctgagaccaggacctgccctctgcctggtatttcccaactgcctgccctatgagtcactgggcctggtgtggcatctagcccaggagaggggacaaggcagaaactcaactctgaccggccttagccttcacccacttggccagatccagcagtgcggggatggggcagacccacaaaacccatcccggcacacaggtcacagttcacaggcccgggagtgttgggctggaagtagtcagggcccagttcctaggaaggcacacctgtgtcccactgcagccaagaggaagcaccccaaacactcctcttggggcgcaggagtgctggccagcttggggatagtccctggaagtggtcgggagcactgagggaggagctgaggtccaagccctcctccagtgcatcaccctggtcaggagtggggcagtgtggagccaggggctcttcagccagcacctgctgcactatgggctccagctgtgcaagaccacccgtgagaaggagtcttgttgggagcagggtggggaagcactgtgggagaggtgtccttggctcgggtagcagggaccttgatgtatcttgaagccagggggccgactgaggcgcttgtctgaaggcctccatgagagggagggggctggagggggctgttcccaataatagctctagttattgggacctgagaggttcacttctgtggtccagccccctccctcccaggacaaagttcagaggaagagggcaggggtgagccccggacaggctcctgctgagcagagtgcccctgtcatcttgggtgtcctcacaggctcctgaagtcgtgtgctgtaaacatcactccctcatggcagccgatggtgcgagccgaggccagcccagcacacagagacccatccactcctgacccaggcaccagagcccagaagcaccctcacccatgaagtgtgcaaacgcggtgggccgcagcggggagccaggccacagggcaccgtgtgcaaggagagggcaggagagccccttcgcgcccagccctgacctcagcggggctcctcctccgggcccttgggaaggaccaggtcacggttcccagacgcctctcaagaggctacccccatgccaggccccctgatagcagcctgcaactgcggaagcccaggacactgtgaccgatcgctggcaccggttgtaatatccagggccacggggtgacttaggtccctcctcggattctcacggtcccgcccacgagttactttttctgtccaattaagcagcttttgctgcacctgcccgcccccaaacctttgcgccagacaggcgggccccgggcaccctcggagcaaaacaaaccaggccccgcccccaggccagcgacccggattgg

SEQ ID NO: 20122 - DNA, 1895 bp, Artificial sequence
  DNA replication origin
tggcaactgtgagtcccctcatctcactgcgcagtggtaatggaggcgtctcaggcagggttcctcgagagggtcggggtctcacagccccagggccccgatcacgggccgggcctcgggagcaggggtgctcagcaagggggcaggcccggccagctggtgctgcggggatgctgggtccgcgggggcgggagccgggtcggcgggtgcgcgcatgcgcagagcttcgggcgggaaggccacgttggtgcagaagaggccgagcagcagctggcgctggcactcctcccacttggccagcgcgtcccccagcgagaggttgttgcgcatccagccgggcagtgcctctctgtaggcggcgcaggacagcggcacggacggcagcgactggacgcggcgcagctccacctgctccggcagcctgcggggcagggatgcggcagggagggcttcagctcccggcgctagcaccgcgggccccgggtggacgcgcggtcggcggctcacctggagggcaggtgcctgcccagcttcctcttggcgcgcatcaccaggtactggcagatgctgcccgtctgctccttcatccaccggatgtcctcgggaacgtcgggcagccactccagcaagctggggacagggcgagcggcgcgttcagggacttggccagacccacatgcccacccgccgggccctgtctgtgccctgacttggcactgctcaccccaccccaccttccctggtaaccatcactcgcggatgatcccaaagtccgtcccctgggcccctctcccgaccccccagccctcacaccggatggtgaaggacagagcgctctccagcggcagcgtgtagggcaccatcatggccgtggccagacgcacaggcagcatgttggagagggtggtcagcaggtccgtgggctccacgcaggcctccagcagggctgcgggtgggcgggaggtcggcggccagtggaggcagcggggcccaggacccgctcggcttccctcccctgctcaccgtcctctcctctctctctttccctcctgcctcccctcctcccctcccgtcccccaggtgcgcaccctcattgagccgggcgggcaggtgctccaggatgtgatcttctccgggcagctgcgagtaatcctccgcttgggcgctctccactgcctggtccttgtcctctgggccgtgggggcgggcggggggcaacgccagcaaggggttgggccggttcaggaggcctggggttggggagagaagggattctcagttcatcagcgcggccgcggcccgcagggggtagcagagccgagcccaccccgccctctcccgcccgggtccgcgcaccgttccgctgcagaaagcgcaggccatcccggtatccctgcttgcacatctctcgcagcacctgcagtgaggagggttaaatggagcggagggagccagggatgcccgttctgcccctggaatccctggcacccccaacagccacctcccttcactacccgcagctcccaaccccaaaacctatcctagatccagaacaagatcaaagctgtacagggaggttggacagaaagccgggcgcagtggcttacacctgtaaccccagcactttgggaggctgaggcaggcggatgacgaggtcaggagatcaagaccatcctggctaacacggtgaaaccccgtctctactaaaaatacaaaaaattagccaggcgtggtggtgggcacctgtagtcccagctactggggaggctgaggcaggagaatggcaggaacccgggaggtggagcttgcagtgagaggagatccagccactgcactccagcctgggtgacagtgtgagacttcatctcaaaaaaaaaataaaaaaataaaatagt

SEQ ID NO: 20123 - DNA, 2670 bp, Artificial sequence
  DNA replication origin
ggggcggccagcctcctgtgctccccgaaactctgggggacaaccccgcccttacccctgccgccttgcgccccgagggggtaaccggagttcccgaccgagacgctcaggtttggcgcgggccacggcggcccggagggggtgccgggcgggcggcagtggaggggcctcagcggcgggaccagcggtcgcctacccgcgagttgcgccgccgcacctgccgcgcgcccgggccgctcctcccggaaacactgggcgcgccccgccccagctgggacccggacgggacgtagagggcactgggccccgagcgacccctgccgcttcgcaggcaccgagacccccgcttgggccggccccgggaggagccactctgcgccgctgtcgcctgtccccgcctctctgcgctgccccggcggcccgatccctggaggctcgagcgagcagtgaagcaacgatatgccccagagacccagggaccccccggagcagggacaaggctgcggggggcgggcgcagacaccagcgcctgggaggggcccctcctgtccggggggagcccgacttaaggcgccaaaaagtgtgtgtaggaaaaagccgggcaggaaacagaccaaatactttcagcggttatctctaggggtggggagcctttactttcttctctatactttcccggtttttaaacaataaacatgtaggccgggcgcctgtaatcccagcactttggggggctgagacaggggcagatcacctgaggtcaggagttcgagaccagcctgcccaacatggcgaaaccccgtctctactaaaaatacaaaaaattagccaggtgtggtggtgggcgcctgtaatcccagcactttgggaggctgagccaggagaatcacttgaactcgggaggcagagtttgcagtgagccgagattgtgccattgcactgggcaacaagaacgaaactccatctcaaaacaaaacaatgaacgtgtaatgctagaaaatgtttaacttagcagtattcagtgtatatgtatgggtgaacgagctggggactcaggcaggtcccacctcagtagcccctcctggctctccttctggggcccagccctgactggggctccccttgggggaggattggaaggaggagctgcttgaggcccgagtgaaaccctcctgtggggggagaaaattccaccccagaccgaggagccctccccagccccagccccagcctggcccctgcacccacctgaagggctggaatcactgtcccgcccggcaaccctggggggtacaaggcctctgcttttcaaggaaggggcctgggatccagcgtgcgacccagctgaaccacaaaaggctgggcttataggacaggaccttgagaccaaggggggtggcctctggcacaggcacatcagggacctgcctggccggctcgcccagtcccagatcccagaaccaaccgttattgttggcagggggctgccaccacagccaccccacgccttctgggaggagcaggtgggggctggctccagcaccctcaggccatggggcctttttggttgccaaggagggctggccttctcccctcatggcctccctgccatgaagaggatgccctcaggaaaccacttccccagcacagggctgagtccccttcagctaggacctcacctgcctccatatcccagccctgccctgtgtactggcaggaggctgggcaggggaacaagaaggtatgtgcaccaggccagagaggcttgtgagggtggggggacagagaactttgggccaaacgcccaagtggagcaggggcccagctttcccaggtcccctgtgcttggtttcaggaacctcagcccccacagctggccaagccccaaaacagtcacacaccccactgtgtcaccgtgtgaggggaggggcaggcgacaccttttgcaaacattttcgtttttatttaccaagaatcttggtcccaaatatttccattggccctcagaaggctgtggccaagggtcagccaggaggctgctgggcaaaattggggggggtgtggatgcatcctagacaggggggtcggcaggaatgcagtacgttcatatgtgcctgtaggggggtgttcccaggccagcctggcaggttccaaatgccaggcccaggagtgcgacgctgggagacctggcctgcagctgtggagaggctggtcagccaaggtagggccagaccctggccaccaggctctcactgcaagtaagcaggcggtcacatacacacaaagtgggcagaggctgggctgcagcatttattacatgtgctttggcgaaaataaataattcttcacacacatatttcagcaggccatgaaaaacggggagggaagggcagctgcaaagttctcaggagtaaaggggcgggggaggtgctcgggcagcacaggggagggaagattaaggcacaggtgcgcggggcctcagcggcccaggggaggggtgtggaaacctcccctctcagtgcatgcagctggtgagtggctggcgagggggcccacggcaaagacccctcttggcaactgtgagtcccctcatctcactgcgcagtggtaatggaggcgtctcaggcagggttcctcgagagggtcggggtctcacagccccagggcccc

SEQ ID NO: 20124 - DNA, 2876 bp, Artificial sequence
  DNA replication origin
aggcccagtgggatctcctcgggctgagggcagcctggacccgcggaggtggggccgtcggggagggattaattcagagaaggcggagccagggaggccagcgaggtgggattgggcctggcgggaggggcggggcccgaggcccacctgactcggcgggcgccggctctgctcccgaagctgctccgtctcctcgtacagagcgcgcacctccctctcgtgctcgctctcgcgccttcgggggaccgggcgaccccggatgagaacttgccagcgctacagccccctggcaccgcctctgctgctgccctgaggccctccattggcccccataccccaccccggccctcacctccgcagcgcctgctccaggccgtcgcgctcccgggccgcctcctccaggcaggccgacgcgcgtatcagaacatcctcgaaagagcccagcagctcggggcgctcgcgctgcagcctggcccagagcgtcctcacagcccgctgcctggagggcgggcgggaactgaggctggagctggcagaagcgggaagcaggcttccctccgccagcagcaaacccttaggagacttcttcgcccctgggcaggacaggagcacttgctgcgtgcagggcatccctcccgtgagcgctttcgcccctgcccggcgtgcgtggtcggtgaggtgtgtgtaccctgggcagtgccggtatgtggccccgcgcccggcgctgcccctcctccctgcagccctggctgctgcctcatgaaatgcaaattctgcgggaaatcatgccgggtccctcccagggaatcgcagctgacgctaggctgggcctgacccggcctagagaccctgtgcagaaccagcactcgggtgacaagggcagacagcatgcaggcagagaaacagcagagcgggcagtgggagcggggccagcgccgactcacttgcccaggaccggggccacccccagctgctccagcacagtgtggaatcgctcctcctcttcctcctcctcatccagagagcccgccgtgccctgcacgtcgagcccgcccgactcaaaggtctcctcgggagtcctgcaggggttcgctccctgggctgacgccacccccacaaacatccctgcgggcatggagcgagcgattaccagggctgtgggtcgccaccgtggctgtgtccccgttcaccctcccaacgagtatcctgccctctctcagggcccagtttcctgttttccttccttattctggtcctattggcctggaaacaagaggtgacaggccagctcccagccctaccggagcttagcacaggagaggagctgggggccaggaaggtcagctccacacactccaccgcagctaggagcccccaggcgcgagtgcgtgcagacaaagcacgggccctggagggaggaggacgagaggcaccggcagccctcagggcgccacaagtgccaggcctcctgatcaggcctccagctctgggcagtgggggataggcaggccacaggctcacccaggcccaggcagaactccctggcggtgaggaagccagtgtgagcccggtccagactttcaaacacagcctccagctgctctggcgtgaggggcaggtcgctctggagaccctggtcggggaaggagagcagagatgagccgctgcggtcaacccagggccgaagcagtctcttggggtgggggactcacctgcaggtcgtgcttggtgatgaagcccttagcctccttgtcacacagcagaaacagctcctcagcctgctccagtattgcagcccgcggccctgcagagcccccctcgagttccccctcctcctcctgggcctcatcagccccaggctttccagggctggccatgagagcagggggcctcagcctggccttcaggtgctgtgaagccaagggagggtcagaagaaattcaggaggggagcggatggggtgcaagtgtgtctgaaggctcagccgagggccctccctgcagcaggtgggaaggtgggcggaaggcaaggtgggaccagggggctgggggtggaaaatgctgcaggcttggggtgtcactggggtggttgatgtaggctcagggcctgtgggtactgccccagtgggtctggcatctcaggaggctggaacccaggaggggctgccaacttcaggagaggaggagctggaggtgatggcaatctcaggggccagtggagaagacctggtgataaggaaggtggggtcctgaaagctgagaggagcaggcttggggtcagtgagggaggagcccctcacactctgcaactggagatctgatcccaagtgagggctcagccagtcctgaccaagtccttagcccctggcctgggcctgtgtggcccagcctcatgacagctggcaggcagggcagacttctccctcctgcccaccggcccctccctccccacaactgagcccacagagtgcaggggcaaggtcccagcctgcagagcccttcgcctctgacgccccactcaggaacacttccagattcgagacctaacacccttgccccacaacactgaggcccttccccgtttcagaactccctggggcctcccttcccacctccttgcagggacgccccgccccctaaccagagccacctgtccttcacacaatgtcctgatcccggatttcccaaagctgctccccaccaacacccgccttcccccaccggggagctgggatcctctcccctcactctccacccagcgtccttccatgttccttagcccgggcgacctccaaagagggcaagtctgggcgggtgagagaaggggacacgagaggccagggccattgcctccaggccacgttgttgtctcgcccg

SEQ ID NO: 20125 - DNA, 962 bp, Artificial sequence
  DNA replication origin
cggaggctcagtggtcctccgtgcgtcccagaacttcgcccgcggggagcggagaagccgtctggagctggagctgcagagccgcgagcaggacctggaacgcgcgggcctgcggcagcgggaggtgagcacccggcccctgccctgtccccacggtcacccgtgcactctccccctgtgccttagcgtccccgggttgtcgggagcctggggcacgcgcagcaccccggggaagagggggcgttcctcgccggtctccatccttccaccctccagttagagcagcagctgcacgcccaggctgcggagcacctggaggcacaggcccagaactcccagctgtggcgggcgcacgaggcgctgcgaacgcagctggagggggcgcaggagcagatccgcaggctggagagcgaagcacgaggccgccaggagcaaacccaacggtgccgtgggacggggctgggcgggccccggtgcgtgtcccgggggcggggccgacgggcgctcaggtctgggccactttcatccccatctcaagtcccaggcccgccccgtgggaaggaggatcttctagggggtccgggggctccccaaggagccttcctgcagccgggtcaccacctcccatccacagagacgtggtcgccgtctccaggaacatgcagaaagagaaagtcagcctgctacggcaactggagctgctcaggtacggtcaggctcaggcccgagagggaatgggctcagcggagcttgggggctcccagctccccaacattcttggctgccgctctactccattggaagtccttccttatgcctgcctttcacccctcacgctgcagcctcagccagacacctctcttcgctctgaggggagtcggagctcacctccccccaccttgagctccctcagaccctctcagtgtcggactcctccttccctagggagctgaatacacggc

SEQ ID NO: 20126 - DNA, 1513 bp, Artificial sequence
  DNA replication origin
ccgcggaagggcaggcgagggagctggggcaggcgagggagctgggccaggcggtgggtgcggcctcccggaacctcccggcgcctgcggctgggcctccggggctggggcgcgcagggccttcggccccctcgcgcccctcgcccccctcgcgcccctcgcccccctcgccccgctcgccccgctcggccgagctgtcgtggccgcgcactcacctaccacgcgtccgagtccgggccctggcggcggcggcagcagctgcgggggcggcggctcccagcgctgagaatgcgcggcccggagcctacgagggggacgccccgccccgccccgccccggccccgccccggcctcaagcccctcccgcggcggcgggcgctcggcaggtctgaacccgcgtgggtgtaggcgctgggggtcgacctggcactgcggaggccgggcgagctgcagccctgggggcgccaatagcccagcaagggcccatcccgtccaaggacggaggagctgggcgggaggcgggcccggaggtaagacggcgaccagcctagccagaggccctgggctgtggcgacccggccctcctccatgcccaacccccatctctttctcctcacccaggaaccgcccagaggctgcaggggtcggcagaaccgatgccggcctggggcgtgggagggcctagcgctgtgggcaaatgcgggagaagggctactgtacgtgcagtgtggacagcctggagacccgggcaggcctggggtcccagcgagacatacccatggggtcctggggggcccatgccctccagactggaagggaccactgggagcggtgcgaggaggtgagggacgaagggcagggccggcctagggctgcaccaagacgccaagagtgggagtgaggaaggagggggctgcccacccaccaagctcattcatcacagccacaggggaggaccagcatgggagggggtggccgactgaggccgggaacctgcccggcctccctggcgagacagtggggagccctgatccacacactggcgagggccccgaggggctccagccttgatgggtagtgtgagtttggggcatgaccagggacacaagaggacacgcaggacctcagccccatcgccacaggcccgcgctccctgtattcacccacacagcacgcgtgcacaggtgcccacctcatccatgtggcacacacaggctgtggctcccagacacacggaaggcccaggaggacgcagtgcagtcagtgggttttatttgacgagggggttttctgctgaactgagatggggttgattgaacggggacagagcgaagactggcagagggcacacacgggaccctggccactcccgggaccctgaccactcctaggctaggtccttcatgtcttcagtcaggcgagcctggggcccactggggagagcctgcatcctgagtgggcacccccgacccatgacaagcctcctgcaagggcagcttctagctcatggtcc

SEQ ID NO: 20127 - DNA, 1965 bp, Artificial sequence
  DNA replication origin
gcggggcgagcggggcgaggggggcgaggggcgcgaggggggcgaggggcgcgagggggccgaaggccctgcgcgccccagccccggaggcccagccgcaggcgccgggaggttccgggaggccgcacccaccgcctggcccagctccctcgcctgccccagctccctcgcctgcccttccgcgggaggcggactccgggcgggttggggaggcgcagcgggaaggagaggcgcctcccgggcccttggaccggcctgacggcccccttcagcccaggggtcccgggacgcgcagcctggacaccctgctcattgtccctggacacggcagtcttccctccgcccgcagcagcccccgcccgcgtgcaagtgggcgcgccattggccgcgccgggcggggtcggcggcggcggtgacctcattgcagtgccccggggacgcttggcaggcgcggagtcccaggtccccctgactggggctccccctgatagggcgcgggccgcccaggggcctggtgcaggtcccggggacttggggaggaacagacaactatttctggaaggccctttcccagggggtccagagggaccaggcattcctgggaagaggggccactcctcagcgggtcgcctgtgtcctcgcggtggaggacgcatctgtgcccagaaccaacttctccagaaagcctgggaccttacagccaggccaggggcaggtccttgaggggctcacacatccccccatcggtggcagacgcacaccccgccccccggtggcagacacatccccccgctggtggcagggtctgcctgtgccacccttcctgcgtgtatttaggccctggctccttcatggagggtgaatatcccctctcagctcagtggtaaggtctgtccccctccagctccattccatgatgcctctttcccaggctgtagctgccgctgtttgtgggggaagggccagtgatgggtctggagcgaaggccaagagtggggcacctgggggaaggtatgaggtccctcccaggatcagactgtcccgaaatgtcgtctgccttgggaggccaaggcgggtggaacatctaaggtcaggagttcgagaccagcctggtccacatggtgaaactctgtctgtactaaaaatacaaacattagctgggcgtggtggtgggtgcctgtaatcccagtgactcaggaggctgaggcaggagaattgcttgaactcaggaggcggaggttgcagtgagctgagatcgtgccattgcactccagcctgggtgacagagcgaaactccatctcaaaaaaagaaaaaaagaaaaaaacaaaatgtcttgtgccttgccccaccctagcccagactaaaataccgggcttggccactcctctctctgcctccagaatgaacccggcccactctggcccttgggccagacctgtaacctgtgacctgacatgtccttgcccctctagcctagagtcctggggagcttctgtccacctgtcctgcagaggagtcgtttccagcccggctggtgagtgctggccagggtggggcagagcaggcggggcggcgaaagtccagacctggctgtgctgtctggaaacgtggcccagggcgctcagctgctgtctgcaccccacgccctccctggcttccccatgctcacagcttgcccactgctgcaggtcgggcgggcacggggcatctggggaggggcatagcctgtctgtgctgccccctcaggttggtgtgggtcgcctgtccaggaaaaaccctcccagtctgccaggctccacctgcctccacgctccattctccccaccccggccaggatgaaggaagggctgccctttaacagaccgtaaacaggcctggagagcttaggaaggggctgagctggggcctgtctgagcccctacccctctgctgtctgagtggcctcctccgcccttactgcaggc

SEQ ID NO: 20128 - DNA, 1979 bp, Artificial sequence
  DNA replication origin
gcgggtcgcaggcgtcttgtcacccgcagtaaagcccttggcctccgccctattcccatctctgcccccaggcccaccccatgtcctgcaaacctcgctgcaggacgggcgggcgcggcggctgacatctgtaatcccagcagtttgggaggccgaggcgagaggcttgcttgagcccaggaggtcgagaccagcctggacaacctggggagaccctgatctccagaaatttattttattttatttttcttttttgagacggagtctcgctccgtcgcccaggttggagtgcagtggcgcgatctcggctcactgcaacccccgcctcctgggctccagcaattctcctgtctcagcctcccgagtagctgggactacaggcgtgtgccaccacgcccggctaatttttgtattttcagtagagatgggatttcgccatgttggccaggctggtctggaactcctgacctcaggtgatccacccgcctcgacctcccaaagtgctgaggttacaggcgtgagccaccgcgcctggctctatctttttaattcgccggacatggcggtgcacacctgtggtcccagctacttgggaggctgagacgagaaaatcgcttgagtctgggaggcaggtggaggttgcagtgagccaagatcacgccactgcactccagcctggaagagagagtgaaactccgtctcacgcacacacacacacagaaaaagaaatgcagggtagacttgctgaccaccctcatcaggctttgtaggggaggcgtctttctcctgtgcttgtcccttggtgctgctgtcaccacggtgcctgagtcttggtgcccccgctggagtctgaccctcgcccactgagtcttcgtcacatgtgaagccctgggcttgtgtgcgccagcctgccatcggcacttggtgcagcttgctggacaaacgaggaaagcgagtgggctgctagactgagtggctggcggcctgtccagaccctttccccggataggaacggcaggggcctcccatgtggcctcccctttcccaagcttctgtgtctctgcacattggagccatcggtgtgggagttttctggaggtcttgagggtgactggagctaggtcccagggaaatgaaagcttctaattggcttgggaagtgggagaggtggctccgtggagaagcagtctctctctgatggaaggaagcagaggtgaggaaagaccccacagcggcagagcagggcttgctctggctggggtgggggtgaaccagctaagggcaggcccctggagagctaccctgccgtggccagtgctggatgaggtggctgcacatcagcaccttggtggtcttggttttctaagctccccgcaattacttcgttttcatttcatttacatttcttacatacgttatacacacacacgtacagccagagtaggtgggagaggaggctcctcacgctccacccagggttctgggcatttccaggttactccagccaggatcatactgctagatctcagcttctgagccgggtgaatctgttcgccttgccggtggcggggggggtgaggccagcaggcagtgagaggcaggttggatgtgggctccaggcctttgcagaccgtagagaactcagttggcctctgctcctcccctcgacacagggatgcgctggatgccctgggcctgaagcgctactgctgccgccggatgctgctggcccacgtggacctgatcgagaagctgctcaattatgcacccctggagaagtgaccacgctggaacccacccacccgctgtgctgaccatgggccctgagcgtcctgccccgaattcacgaggctgaggcatccgggagctggcgtaatgcctggccgcagtgtgtgtgtatccgataccccactctggaaggaaccatccagtaaaggtctttcagaaccactaaggtcccagccctcactaggatgtca

SEQ ID NO: 20129 - DNA, 762 bp, Artificial sequence
  DNA replication origin
tgcaccaagacggtgggcgggggtgtgcggtctgctgctgccgcggccgcgcgggcccgggagccccgggacgcacaggcccaggagccccgggacgcacgggaagcccctatcgcggcggaaactgcggccagcggtggcggggccggtggagggacggccggaacagcggagaacgagcggagccgattctcccgcaacagtggacgcgcccggggcggggcctgggggggttcttcgcgtgcggccgggccgggccgggcagtctgggacgcgccgccgccatgatcatccctgtacgctgcttcacttgtggcaagatcgtcggcaacaagtgggaggcttacctggggctgctgcaggccgagtacaccgaggggtgaggcgcgggccggggctaggggctgagtccgccgtggggcgcgggccggggctgggggctgagtccgccctggggtgcgcgccggggcgggaggcgcagcgctgcctgaggccagcgccccatgagcagcttcaggcccggcttctccagccccgctctgtgatctgctttcgggagaaccttatcccctgaagtctggggaagagaacggagttgggcttcaaaccagtggtgtcctggggattctaggtggcctggcgggtcgcaggcgtcttgtcacccgcagtaaagcccttggcctccgccctattcccatctctgcccccaggcccaccccatgtcctgcaaacctcgctgcaggacgggcgggcgcggcggct

SEQ ID NO: 20130 - DNA, 1073 bp, Artificial sequence
  DNA replication origin
cggaggtgtccgaccgggagcggctggagccggacgcgagcggggcgcgcgagttcgagcccagagccgacacgcagcaacaagtggggtccggcgcgggggctcggggagagggcgggcgggggccggggcgggtcttcctgccgcccctcctggccgcgccgagtagtgggttcctccgcctcggcctctgcccgcggggtgtccggggctctcggcgctgagttcgggggtcccattctggacgcggcccagcccctaggggcgccgccctggcctcagctgcgcaattacagcccccgccggcagctccccgccccgggctcctgtccgcgttctttccgctctttcccgggaatggggtcggggtgcgccctcccgggtcccggctctgctggctgctcgccgtcccgagctcccgacgctcagacgcgcctctgagcacggggagaggggacccgggagggaggtcggggagggagtcgtggaagaggtgctttttgagctgaacctggaagaccccggcacaggggatccctgggcagactcccggaggctgcactggcaggaccccctgaaggcctcagctctggcttgccctggagctcagggcctacggacgacgagggacgaggagcccgtgtctctcggatggagtgcgggggggctggcaccagcacccttcttgctgtgcccctggggtgggggtgaggaaatggggggtcggtgtgcagtgagaggcaaagaaggctccttggaggtgcgaggtgggctgtgggggtgggtgggccgcaaagcggcacccatggggggctctgggctggtttgccggcctggggcttctggctggggtgggacctgtgttgggttccaggcatcagctgccgctttctcagggcaatgctgcgtctgccttagttgcagaggaggaggacgaagggttttctgggtccggagtggtgctagccagatccactgcacgcttggggtttccgctcccaccctggccagggccctgggcagcttccccagtggcatttgccataccccacccagccacgtgcggagccacg

SEQ ID NO: 20131 - DNA, 814 bp, Artificial sequence
  DNA replication origin
ggcaaagaaggctccttggaggtgcgaggtgggctgtgggggtgggtgggccgcaaagcggcacccatggggggctctgggctggtttgccggcctggggcttctggctggggtgggacctgtgttgggttccaggcatcagctgccgctttctcagggcaatgctgcgtctgccttagttgcagaggaggaggacgaagggttttctgggtccggagtggtgctagccagatccactgcacgcttggggtttccgctcccaccctggccagggccctgggcagcttccccagtggcatttgccataccccacccagccacgtgcggagccacgagccgaggccacttcccttccctgaccccctccccccaggatgagtggacgcacatcctgctctgggcagaagggcaggacaggggccctgagtaacggtggcctggggtcagagccaggttcagctgcgaggctgctggtggctgtggaggtgaggggggcaggggggtcccggatgttagcagggtgggccctggggagtgggtgggggcctggaggcttcttggaggagggtccagggcctgtcccgcccctgttcctgcctgcaggagttgtttactcagagcaaggggtggtggggagtgagctgctctccaaatcctggcttgggccaagctgacattcttggaattccgagtgtgtgcgcttcctatccctccatttcccagcagagcccctgagatctggagactgccccagcctcaggctctgtgcatctcccccgagcccccaccacatatgtgcggaggcccctggggg

SEQ ID NO: 20132 - DNA, 2205 bp, Artificial sequence
  DNA replication origin
gccctggggagtgggtgggggcctggaggcttcttggaggagggtccagggcctgtcccgcccctgttcctgcctgcaggagttgtttactcagagcaaggggtggtggggagtgagctgctctccaaatcctggcttgggccaagctgacattcttggaattccgagtgtgtgcgcttcctatccctccatttcccagcagagcccctgagatctggagactgccccagcctcaggctctgtgcatctcccccgagcccccaccacatatgtgcggaggcccctgggggcccaggcctgtcctcagtcccgactgggctctacctgaggaccctggggagcctgggcctggccctcctcaggcaagcgggggtgggagggagcctggtggcggggcagggcactgtgcccgccagcaggggcgggtgggggcccctctctcctgggtgtggagtgttggcgcagactcggcctggcttctgggggggggggtctgggatggggccaggagggtgaggcgctggttttatagaagggggcgttgtggagcctcctgtggtcagggcagggcacagggagcagagggtgggctcccccggctgcttcctgctagaggagggatcacttcagggcaaaggaccaggggaaacccatgattgaagttttagctgctgacccctcccaccctgggtgttgccctggaaacaggccagccacgggaccaggagggctgggagggggagcacgggctgagccctggctgggattcagctgaacttgcactctggtctgggatcccagcccacgtttccctgtctgtaaagctcaggtgggatcagaaactgcccgcccggagggctgcatccctcctgccgctgaggctgggcatgaccttgactgggagagggtgttgaaggtgtctgtccccagcctcgcccccacacctgtgctctctggccctgtccatgcctgggacagatgtgtgctcacccccagggtgctgtgggatggggtgggtgcacacggcgccacgagcacacgtgcccgacacctcagcggtgcacacagccaaggccactgcccaccgtacccacgccgtccgtgtcctctctacggtcctgggagactggcgttgtgagcagtggggcctgtagatggggccgggtcctctctacggtcctgggagaccggcgctgtgagcggtggggcctgtagatggggccgagactgaactgaccctagcctcaccactcatatgtcggggctggtgatatttgggaatgtcactgcctgccatgcagctgcccaggcctgatgtgcccccccagactgttctataggggtctaggttgcaggggccagggccagggctgtggtgggatggcacctgaggtgcggctgctcctggagcctggggggtgtgggaaggtgccccccacccagggtcctaagtctgttgccttcacccccgactcccagcagataaatacccaacagtgcaggaaaggattacagggaaggcctggagtgtggggttagcctcggtggtcccaggaggaaagactgggggacctctggactatctgtccctcccctggggctgctgggggtatcagagtggtgtctccagcctccagggctcaggtttgggtgggaggggcctggtcccacccagactctgtatgtagcccccagtccctgctcctctgtgtgcatgagggagtgccagcttgcttgggaccccccagggtgagggcttgggacgggcactggggccccgcaggggctgaggcagccaggaagcccacagcataggctgtttgtgttggcgggcctccctacctcctcaaagctgcctcagagcccgtgggcctggggggccagggtgtgtgggcttggctctgctgtctgtcctgagctgcccctgctgagctgtgtggagaccccgaggtctgggctgggccaggactgagctgctgccctgctgctggggctcagagaggctgctccacgggcatggcacccaggctgctgcagacaggctgctttatcatgtgggcaggcccctctttgggttggacctccgtctggccttgtgggtgtctgagatctccttgcagctcagtccccagggcttttccaacctgcagagctctggatgtctcttttggggctctcgctcagccagggttggggtggaggctc

SEQ ID NO: 20133 - DNA, 981 bp, Artificial sequence
  DNA replication origin
agaggctgctccacgggcatggcacccaggctgctgcagacaggctgctttatcatgtgggcaggcccctctttgggttggacctccgtctggccttgtgggtgtctgagatctccttgcagctcagtccccagggcttttccaacctgcagagctctggatgtctcttttggggctctcgctcagccagggttggggtggaggctctatggttccctcctgcccttgggctactggaaggacagttacctcactccagagagctagttctgaggggcgaggtgttgcggggttgagccagcagggcagggagtagtgggcactgcgtttggctgcccaggtgggtttggggcctctccctggccagaaatccctgagtgccaggaggaggacagactccccagcctggcacccatggtggaggagggccttgcgggtcattgctggcagctccatagggagggcgtgaggccccttcctgagcctgggtgtctgctcagagcccaaggcagggtggggtaggggtgcttgtgcctggtaggaagcagacagcaggctggtccaggggtccaggaccccagggaggaggcactgctgcgtgtctgtgtgggtgcaagcatgtgtcttggcctgtgtctctgcatgtccgtgctgtgagtacgtctttgaacatgtgttctctgcacaccgtgtctctgtgagtgtgagtctgtgtccctgcctggctgtctcagagccctgaaggagcagaatttggtgactcagtcattgattcagagctttcctggttggggctactcctcagtggtcttcttctccgagtctggtggtgtatcccctgcccaccccgactgcccctctgccctgtagggacctggccccaggtgggggttccctgcccttctctgggagcatctctggctgtacagctgagggtggaagccagggctccactctgcccatctttccttttgcagagct

SEQ ID NO: 20134 - DNA, 1520 bp, Artificial sequence
  DNA replication origin
cactcctgggtgtcatcacgccggatgcgcacacacctcccacagccggagatggggacagaggcccccagctgtgccctgcagcctaccccacgcctctgaagccccagccccaccacagggcacaagggccctgcggtgttgggaagatatcagcacgtggcccagattcctggcagatgacctgaagcccagaggtggggaatgaggaagggcaggaggaagaggagggagaggaagctaagggaggggaagggggtgctccatggcagggctgaccagctctggaggcctgggtcctcctggagtgactgatgtgggaggtggcaggtctggggagggctgccgtggaagccccgggtgcccagggaggtcccgcagctctgcccacccctgacgacctgggctgggtgccccaagcctctgctgccccccaagggctctgtagagaactgcagcccaagccccagggcagcaccccatgcccaggtcctcgctgggggaaggggacagggggcccccagagaacaggaggctggcctggaggtcccctgaaggcccacaaggccatcctggggcttcccatggcccctaccctgtccttcccctgggggttctttggtgggtctgggccccaggaatgggtcagaacggcggccacgcatcggggcccagcagagaccccaggagccctgggaccccaaccctgacagaaaccctcacccgcagctctgcccagagagcagatggcgcccggcccccttcccctggccacgcaggtgcaacctgagggcagacactcagccgtgtgcagcgcctccagggagctcacatgtgacctgggcagcgctcagagcacctactcgtgggccaggcaagggcaggtgccacggggacccgggaggaccccaggctgactgggagaagccagaccccacctgcagtcaaaaacaccacccgagccaccccaaggagagcatccgccgccaggctagccagtggcacccctgccccatctcccctgcgtccctctgtggctgggggtggaaggggaagtggcaggcaaggctcgagggtcccaggcgggtgggagggcgaagggagagctggtctgggtgcctgcactgagcccagcgcccaggatgcagtcccagtgtcccctaagacccctcccaccccctttcccatctacaaagctctgcacacatcgcccaggtgagcagatgaagcctattcaagaagaaatcaaaaacctcacaaggccaccgagggtcaggaggagcggggttgggggggggtgggggcggggagctgggcttgcttctgttgccaagttcaagattcacactgggttgcccagacgcagtcaggggcccgggcaaggcacagtgtcagagctcagtcggggagggtccttcaacaccccagtcggggtgttctgggaccctgtctccaaagtccagcccctccccacgggagctccaattagatactcaggtgtggtgtcaaagtgtccgctg

SEQ ID NO: 20135 - DNA, 1043 bp, Artificial sequence
  DNA replication origin
ggcccacgagtaggtgctctgagcgctgcccaggtcacatgtgagctccctggaggcgctgcacacggctgagtgtctgccctcaggttgcacctgcgtggccaggggaagggggccgggcgccatctgctctctgggcagagctgcgggtgagggtttctgtcagggttggggtcccagggctcctggggtctctgctgggccccgatgcgtggccgccgttctgacccattcctggggcccagacccaccaaagaacccccaggggaaggacagggtaggggccatgggaagccccaggatggccttgtgggccttcaggggacctccaggccagcctcctgttctctgggggccccctgtccccttcccccagcgaggacctgggcatggggtgctgccctggggcttgggctgcagttctctacagagcccttggggggcagcagaggcttggggcacccagcccaggtcgtcaggggtgggcagagctgcgggacctccctgggcacccggggcttccacggcagccctccccagacctgccacctcccacatcagtcactccaggaggacccaggcctccagagctggtcagccctgccatggagcacccccttcccctcccttagcttcctctccctcctcttcctcctgcccttcctcattccccacctctgggcttcaggtcatctgccaggaatctgggccacgtgctgatatcttcccaacaccgcagggcccttgtgccctgtggtggggctggggcttcagaggcgtggggtaggctgcagggcacagctgggggcctctgtccccatctccggctgtgggaggtgtgtgcgcatccggcgtgatgacacccaggagtgcaggcacatctgcgcacggggccggtatgtctgtacctgtcaaggggtggggtggggtcttttacaggctgacttccagcctgggctggagcaaaatgaaattctgggccccttgtttaaaaattaccaagaatttcaagacgggaacagcagagcatcaagccagctggg

SEQ ID NO: 20136 - DNA, 920 bp, Artificial sequence
  DNA replication origin
gcacccccttcccctcccttagcttcctctccctcctcttcctcctgcccttcctcattccccacctctgggcttcaggtcatctgccaggaatctgggccacgtgctgatatcttcccaacaccgcagggcccttgtgccctgtggtggggctggggcttcagaggcgtggggtaggctgcagggcacagctgggggcctctgtccccatctccggctgtgggaggtgtgtgcgcatccggcgtgatgacacccaggagtgcaggcacatctgcgcacggggccggtatgtctgtacctgtcaaggggtggggtggggtcttttacaggctgacttccagcctgggctggagcaaaatgaaattctgggccccttgtttaaaaattaccaagaatttcaagacgggaacagcagagcatcaagccagctggggtgggtgcgcgcgactgcccttgaagccggccccgctcccgcattggggacagcacggggcggaggccgagccgggcccacctggagcgctctgggtctgtcctggggctgccagcctcctgcggggctgcctggtggagggggggtgggtatctcaggaatcacacctgcgcttttctgtgttctggaacctcccatatagtcaaagactcaacgacacctgctccatgcagtgcaggctgacccagccccccacccgccgccggcactcagggcttccccaagggcgcccggggcggagccgcttcaagttgccaccagacagcaacggggtcaccctccatttgcgtagtgctttgagtatcgttctcgtggttggaggtctccaagcccggcccggggccagagtccgggcgaggtaccgtggggggaagggctgggggtgtcggtcgcgggctaagagctgcccaggtttcatccccaggcc

SEQ ID NO: 20137 - DNA, 1793 bp, Artificial sequence
  DNA replication origin
ccgggaggacccaagaccgctgctccggctaggagcctggactgggcgggtggggaaggtttgcaccatcgcggggtccgccccctgcactcagagcggctgccccacgccctggtcccctctcctctcctctcctctcctcacttgatgagacgggacacgttgcacacgtgcgcgccggacagggccacccgggcactgcgcctctcctagggtcggggttcgagtccgggtcgtggccagttttgcgcggggccccggtgcctcctctgcgcccgctccctcctcggtgcagccgttatccttgcctcggccccgcccctccaggcaggcgacctgtcgggcccagggactcacttccgagggtttgagccggctgccgccaaggtcccccagtcgccgggaggcgctgcggaagggaatcctggacactgagcagggccgtgggccatcagtgttcgcgggagacactggctttcccgcgcctccggcagcagaggcttccctaacttttgcggaggtggggtcaggtgtgctcagacctgcagtggtgtccgggggggccctgtgtgctggatggagcagagctgaggtagagggcggacagggttccaccccaccccagccccatgtcagcaagaggtggggcaggattcccacctggccaggttggagcaagcctcatggagccgcgaccctgtcctgtccctggctcctgtggagggcagctgcagttgggggtggccgaggatgacctggaccgggcctggggctttgctggctgggctgggggaggtgaagtgataccaaggtcattctgtgccctattcttaattcctgaaccagctcctgcagctgggagtcgggggtgtggcctcagctcctgcctaggctctgggcttcagaaggaggctgtccatctgcataaggtccagctgggccaagtgcccagaagcctgggtctgccttcccacctctcccctcctgagcccaggctccttctctagccagcttggggtggaggcaggggggtccctgggagggacagccagcctgggttgcctgctgagtgtgacccaaggaggctcttggcccagacatccacctccagaaggggtcacccaagggtttgttttctgcaagaggctctggaggggtgaggcccaggcctgaggggcgccttggaggtaggggtggtgggaggtgtgggtgtggtctggagctggtgggtgtggggggtgggctgcaggtggctgagtgaccagagtgtttctgtgacggggggacggggcagaatgactgaagggcagtgggtgtgggggcccggcaggcaggcaggcaggtcctgggaggggaagccctctctcctctccaccctcctcctgtcctccgtggcctggacacctgccttcagggagaaagaagagggtcctttcccagggggggtctctctgctctgagagcagcccgccctcatggaggacccccaggtggacctctctttgctctgtgaaccccagagaagcctccattcctaccgcatggcagacacactcccccatcctcaacctgggaaagaacacacaaggaacccccttgggaccctattctgggctggaaaatgcaattctctcttttttatctttgttttttgagatagagtcttgctctgtcgcctggagtgcagtggcgtgatcttggctcactgcaaccttccatctctggggttcaagcgattctcatgcctcagcttcccgaattgctgggattacaggcgcgcatcaccacgcctg

SEQ ID NO: 20138 - DNA, 751 bp, Artificial sequence
  DNA replication origin
agaacatggaggcaaaggtgggagagaggggtgccaggctggggttaagggcacaggagagcaaagctaaggggcagccaggcaagctgggggcagagggaagctgcaccctgaccaccgcacacgagccaggcatgggaccccactcccagccccccaacccctcccagtgccctggccgcacctgtaccacttacagggctcagcccctgcccccacacccacagccacacccaggacgggcacagccccccagtcacacacaactttcctcaccccaccccggctcccaccactgcccacggctctggtcactggctgcccactggggctcccccatgccctccccacaggcccagcaggactccggcagcggggggtcaggacagacacacgcggggatcttgaggtcccgccggggggacgtccctcccaccaccttaacccctgaacttcgcccctgagaagacggaggaggaggaggaggaggccaggttgtatcccctggtctcccaacgagtaggaaatggagtgggcggcaaaagccccgacaacagggggctggcacccccaaaaggaaaggagccctggggaaggggagcgctaggcctgactcctgaaatagcctcacgccaggaggagagggcttagctcacagtgactcagggcacagcaggcgtggacatcagcccgggacagactctcctggcaaaacccccactcattcttatttcccctgccccgcccccac

SEQ ID NO: 20139 - DNA, 845 bp, Artificial sequence
  DNA replication origin
tacaccagccttggccccccccaaccctgggctggtgcccagtgggggtctaagggtgggggcggggcaggggaaataagaatgagtgggggttttgccaggagagtctgtcccgggctgatgtccacgcctgctgtgccctgagtcactgtgagctaagccctctcctcctggcgtgaggctatttcaggagtcaggcctagcgctccccttccccagggctcctttccttttgggggtgccagccccctgttgtcggggcttttgccgcccactccatttcctactcgttgggagaccaggggatacaacctggcctcctcctcctcctcctccgtcttctcaggggcgaagttcaggggttaaggtggtgggagggacgtccccccggcgggacctcaagatccccgcgtgtgtctgtcctgaccccccgctgccggagtcctgctgggcctgtggggagggcatgggggagccccagtgggcagccagtgaccagagccgtgggcagtggtgggagccggggtggggtgaggaaagttgtgtgtgactggggggctgtgcccgtcctgggtgtggctgtgggtgtgggggcaggggctgagccctgtaagtggtacaggtgcggccagggcactgggaggggttggggggctgggagtggggtcccatgcctggctcgtgtgcggtggtcagggtgcagcttccctctgcccccagcttgcctggctgccccttagctttgctctcctgtgcccttaaccccagcctggcacccctctctcccacctttgcctccatgttctcctcaaagccccccttcttccaaatgcagaccctccaag

SEQ ID NO: 20140 - DNA, 1106 bp, Artificial sequence
  DNA replication origin
gaggggttggggggctgggagtggggtcccatgcctggctcgtgtgcggtggtcagggtgcagcttccctctgcccccagcttgcctggctgccccttagctttgctctcctgtgcccttaaccccagcctggcacccctctctcccacctttgcctccatgttctcctcaaagccccccttcttccaaatgcagaccctccaaggccctcacagtactcctggcttccaaggtctctttgggtccaggcctgagcccccctccacacccatggtcaggctagggcccctggtcactgacggcctggggcagcctgggggcctacctgggaggggaagggaggggctcgctccagaaggctgattgacgtatttctttacagcgttggttcggatttcccaggcaggcatctttgctggggtctgggagggtggggctgctggcaagagtctgtgctcagagcctccagctttgggtggagtggggagggttcctggggcagccagggtggggaggtaggatgtgtcctggcctggtggtgggggacccggtggggccttcagagttcagagcactggtgccaactcctaaccccatggacatctggggacatgctacctgccttcagcaaatagaggccctcacccggtgatggcagctccgctggggcacagccactgagccttcctttgagccctccctgcagaggttggggagtgggaagcaggctgcctgtggtggggccggggtgtctcctgggagcctcattccgggggaggctgggtgcagggcccgtgagcctgagcgaggtgtcctggtccaaggcaggtgccgacacagacacaggttagcaatggtgagggcgtggggggctctgctgccctgggacccccaccttcaggcctctgtgctgcctggtcagctcagctgctgccagcgacactcttcccctaatggaagtggaggtcccggggcggaggggagaggacggggcctgctcttcccgcctgtcagggatggaggcagccgagctatttagcaaggtgccaccacgaagggctgtcctcccgccctcctggcctcggctccttccagacgctgctccc

SEQ ID NO: 20141 - DNA, 902 bp, Artificial sequence
  DNA replication origin
ggctgcctgtggtggggccggggtgtctcctgggagcctcattccgggggaggctgggtgcagggcccgtgagcctgagcgaggtgtcctggtccaaggcaggtgccgacacagacacaggttagcaatggtgagggcgtggggggctctgctgccctgggacccccaccttcaggcctctgtgctgcctggtcagctcagctgctgccagcgacactcttcccctaatggaagtggaggtcccggggcggaggggagaggacggggcctgctcttcccgcctgtcagggatggaggcagccgagctatttagcaaggtgccaccacgaagggctgtcctcccgccctcctggcctcggctccttccagacgctgctccccagggtgggtgctgctcccctttctcttcacccgcagcaccaggagcttggtggaagctccggccgtctccgcactgtatggttagggcctggctgggggaccgggtgggggttggagtcccacctgccagtgcgggacgccgggcaggttctgccctccttgaggcctcattttcccatctgcaccatgtggggcggtagagggtgaggtccccatatactggcctggctcgggggttgaatggaaatgtgggaggcctctcagttccccaccacctgcgctgatccccggggagaccccccaggtgggcagtgtgagtctcggagccaggtggtccagggccccagcctggaggggcacgggggctgtcctggctctgcgctgcctgggctgtcaaccctggaggtgtgggggcccctcagcctcactgcccactctctgttgttccaaaggaaagtcctggctgcgcttgaggcctctgctctaagatcagcagtgagcctggtggagggggtgcagtg

SEQ ID NO: 20142 - DNA, 1193 bp, Artificial sequence
  DNA replication origin
cactgcccactctctgttgttccaaaggaaagtcctggctgcgcttgaggcctctgctctaagatcagcagtgagcctggtggagggggtgcagtgggggccagccttggcttcccctcccctgggatgagctgagacgatgtctggcagatggcatggccggcctgcctggcgctggcctctgggcagcacagtgtccccaagggtggcagagggctctgccttcagctcccaggcctctctttgaggagtttaacatcccaggccagcctttggatcaattgttcggaaacaatccgtttctgaacaaaggccctgacgctggcaaccacagcgtgtctgagccttggggagtgtgtggctccctgtgggtggggagcagcagcggtcggtcgggggacactgcctacccagctgtgggctccaggcagctctggtgctgttgggggtaggtcagacttgtccacccagtgacacaggcctggctccacggggcctctgcaggttccaggtcccagctggcggcagggcaggcaggccgggcctctgtgtggagagggctgtctctgggggcagagatgtggcattggcagcccagggctgcagggggcaggcagagaagtcaggaggcccacgcagggggacgggagtgagcgtgggggacctgggcttccagccgcgcttgtgcgatgtgagccgtggtcctggcctgatgacggcaggccacctccttgctgttcccacgcagccctgctgcacccacagccccgctgggtcacagtctcctcctggattcctgtgcctccagcaaactcctacccaccctgcaggagccagcattggcaccctgggcaggtgcccactgacgagggctgttctgctctccctgctttggacactggcctcagggtgggccttggtcactgggtggggctggtctcctcatctctgggccctggggtcccttggagagctcctagggtcaggggtgagggaacggaggacagatggggatgtggaaacaggacgtcgctcagggcccacagctttaaggaaacaaatcacagcgagccacacagattgtaagtggacagacttgtcatccctggaaaccagcatcccagccatgacggggacgttcccgccagcccagagggtcctgaggctgtgctggctgctagcatccctgtgtc

SEQ ID NO: 20143 - DNA, 993 bp, Artificial sequence
  DNA replication origin
agacttgtcatccctggaaaccagcatcccagccatgacggggacgttcccgccagcccagagggtcctgaggctgtgctggctgctagcatccctgtgtctggacagagccctggcccctgcagggacccagccccccatcctattccaaggacgtggctggcagcccagccatctgccacaaagccgcatggccagaggggcagtgggctgagggctgagagctggccagcgtggcccccgtgggcccggagggagcatactcgatggactccagtgactgcacccctgcccaaggcctacaggaggctcaagggggccgtcccgcagcacctgcccaagaggctcaggtgggctgtccagactggaaaagaagggcagagcagagaatgcatgggcctcagcagcacctgcacacgcccagcgctgggggacggccccccgagcctcttgggtgggtgctgagggacggccctccaagccttttgggctcctaatcttgggcagagccatcagttgctgctgaagatcagggtgagcgagtgtctgatggactgagcctggggcctggtatgctggacggacattggccagagatggtctcacgcaggtcctggggacaggttctgggcagtggacagtgtgagctgatgtctgggagaaggacaggccccaggcaccgctgactggaggtgaagaggtctgggacggagcccctctcctgggctgttcccccagctgccatcattcctagggttcctctccccagctgtcatggggcggggtcaacctcccacctgagcttgtgtctggcctgcggcggggcagcagtgagggagggaggctttcagcctattcctatttgtattgagcgtgtggggagggagctcctctggtttccgggtccaggcccagatgctgggtgggaccctgggagggtgcgcaggctgccagccacacccctagctgctccccatctggctgcatttgacc

SEQ ID NO: 20144 - DNA, 990 bp, Artificial sequence
  DNA replication origin
ccccagctgtcatggggcggggtcaacctcccacctgagcttgtgtctggcctgcggcggggcagcagtgagggagggaggctttcagcctattcctatttgtattgagcgtgtggggagggagctcctctggtttccgggtccaggcccagatgctgggtgggaccctgggagggtgcgcaggctgccagccacacccctagctgctccccatctggctgcatttgaccagagggacctggccctcctggcctcagccctgctcatcctgcttttgattttctgtctccaagctaatggggcccattttctcttgcgctttgaggctataattttcctgccaaaatgttttaaaagctgcatatgcagaaacactttcaaaattgcaggtaattttattaaccacgtgcacgcattttatctgtgtgggtctgccagcacgctggggcctcggggcccgggggacgccaggttgcagggcggtaacgcgcgcgtgtggccacgtgtgatggtgtgaggcgtctgtggcaacgtgggctgttgtctgtcacagtgtgtgtgaccgagcccgtctggtgacagtgggtgtctctttcctgccgtctccggtggaggtgaggatgtttcgtggagtgttaattagggaaatcagttcccaccagggctggggcagttgtgggaggggcccagggctggaggtgtagggttccttcctgcccagcccccatggaacggggtttcccacacctggcatggcaccagtcactctgcacatgtcctccctgtgtccttcgacacatccccatggggcgaggggagcttggaacagctcattttcctgatgacaggagaggtctgcgtccttggaaggcagaggcagatggagcaggcagtttgggttttttttttttttttttttgagacggagtctcactctgtcgcccaggctggagtgcagtggcatgatgtctgctcactgcaagctccgcc

SEQ ID NO: 20145 - DNA, 2580 bp, Artificial sequence
  DNA replication origin
cccctcagagcagattccccccactgctggggccccacaagtcccacacacgctcaggccatcctggggagaaggcaggctctgtccttccccggccttccagaggtagcatctccgcttaaagttcaaaacagaacgctgtccggaggctgccagcgcaggacctatcttgggaagctctgctgagccattggctcctggtgcctgctgagctctgacacccacgcccagagcccctccccagcaggccaggcacagcgcacaggggagctggacagactgggtgcaggaagaggggtcacccctgtgctctgggccccaggattgggagtaccgaggcaggggctgacttgctggctctgaccacacagcccctcgtggctgcagggagccaataggagacctgggcacagtgcccagcctgggtgtggcttctgagcaaagccagccccagaagcagcttagggtgataggggaggcttcccaggagaccaggaagaggcttgggggtggcagccagcacagcccggtggagggcggcccggagacgcaccaggggacggatgcatgaacctgagacgtgtgagtcaagttgtgtgtgagcccgggatgcatgggagctggggtgcatgtgagcaggggtacatgggagctggggtgcgtgtgggcccggggtgcatgagtgagggtgtgtgtgagccggagtgcatgtgggcccggggtgcgtgtaagagggggtgcgtgtgagcccggggtgcgtgtgagcccggggtgcgtgtgagcccggggtgcgtgtgaggggggtgcgtgtgagccggggtgcgtgtgagagggggtgcgtgtgagccggggtgcatgtgagcccggggtgcgtgtgaaagggggggtgcgtgtgagcccggggtgcgtgtgagcccggggtgcgtgtgaaagggggggtgcgtgtgagccggggtgcacgtgagccaaggtgcgtgtgggccagggtgtgtgtgagtgggggtgtgtgtgagcggggatgagtgtgggctgggggtgggtgtgtgagcctgggtgcatgtgaggggatgcgtgtgacctggggtgcgtgtgagccggggtgcatgtgagcccaggggtgcgtgtgagccagggcacgtgtgagcccgggggtgcgtgtgagccggggtgcatgtgtgccgggggtgcaagctgttggtgtgagcccgggggtgcgtgagagctggggtgcatgtgagcggggatgcgtgtgacccaggggtgcgtgtgagccggggtgcatgtgtgccgggggtgcaagctgttgggggtgtgagcccgggggtgcgtgagagctggggtgcgtgtgagcggggatgcgtgtgacccaggggtgcatgggagccgggggtgcatgggagcccaggatgcgagccgggggtgcgtgtgagcgggggtgggaggcgaggtgcatgcaagcgggggtgcatgtgagccggggtgcgtgtgagcgggcgtgaatgtgagccaggtgcatgggagcctggggtgtgtgggaaccggggtgcatgtgagcggaggtccgtgggagcctggggtgcgtgggaactgggtgagcagggtgtgtgagcggggtgcgtgtgggccggagtgcgtgtgagccgaagtgcgtgtgagcaggggtgcgtgtgagccgggagtgcatgtgagcctggggtgcatgggaaccggggtgagtgtcagcgggggtgggatccggggtgcatgtgagccagggtgtgtgtgagccagggtggatgtgtctggagtgtgcaggaccagaggccagctccgtggcagaagtgccaggggacatccctaattaagagaatctgtcctcactgggagcactgggcttggggcacagccccagggtgggcaggggtctgccagctctacaaagatgcccccacttcccgggggacctggccctgctatgggatgcaccagcagctgggggatgggctgtccagggtgctgactgtgaacgcggcgcccccacccacccctttggagaggtgtccctcgtaacattctggagcacaggagaggcctggacaggcaatggcccactcaatggtccctccagaccgtcgggcacaaggtcacacacaccatgtacagacaaggccatgcggaactgaggggcattcccgagcacacaggaaccccagcctgcccctgggctgtccccatatcctcccgcagttcccaggtcttgtggaggggcagacagggcaccagggggacccacaaacggcctgacaccatcactgccccaagaactgggcagagaagggatatggccctgggtccagatcaccaggtgatgagggcaggaggtcagagggaaacgaggccccaggagaggagatggccatcagcagctcagagtacatcctggcctcaagcgccaagcaaccccacaagtctcattccagacgaaatgcccaggctgggggtgaaggtccctgaactgaggggaggtgctagcacaacagagaaaactgtcatttaaaacccaaactggggccgggcgtggtggctcacacctgtaatccc

SEQ ID NO: 20146 - DNA, 964 bp, Artificial sequence
  DNA replication origin
tcagcagagcttcccaagataggtcctgcgctggcagcctccggacagcgttctgttttgaactttaagcggagatgctacctctggaaggccggggaaggacagagcctgccttctccccaggatggcctgagcgtgtgtgggacttgtggggccccagcagtggggggaatctgctctgaggggattttaccctgtggagcccagagggaccgaagacaccagtgacaggcctggcctgaatcttggggcaccagcagccatgctggcccttgggcagggagctgtgtcccatctccccagcacagcctcctgcctgccagccagccagtaaaagggtggcggcctccaacctccagcctggcgctggctgatgcactgctcagggaggggcaggtgagcgtgcacacgaggagggggcatctcccacccccaggccccctgaggcaagagtgttggggctcatgggccctccgtgggccctgccagggtggaggccccaggcctgtcttgagctgggctggtgttgcaggtgggggtggggcggctgctggtggccagcagctatcccagccttggtttctgtctggaaagtggggtgtgagtctggccactggggcttgggaggcttttatggggtgacttggggcttctggtagtcccccgggaacccccagagcctggggtctgagcctgtcctcaggcatgtggtctgggtgctccaaggggtttcatcaggttgaggggtggctttgccagcccattcccaagtcctgtccagtccagggtggggcagggatcccccagggctgcgcggcccttccccagaaccagtcaaccgtcggcaccccaggacgtctacccaccacccacctgggcacccacgctgcagaccgggagctggtcagcattttcgggggactgcttgtcccgtgcccaggcctggaacatatctcccgtctca

SEQ ID NO: 20147 - DNA, 1156 bp, Artificial sequence
  DNA replication origin
tacaaaaaattagctgggcgtggtggcgggcgcctgtagtcccagctactcgggaggctgaggcaggagaatggcgtgaacccgggaggcggaggttgcagtgagccgagatcgcgccactgcactccagcctgggtgacagtgcgagactcggtatcaaaaaaaaaacaaaaaagactattgtggctaaaccatctctactaaaaatacaaaaaattaaccgggtgtggtgggggcatgcctgtaatcccagctacttgggaggctgaggcaggagaatcacttgaacctgggaggcggaggaggttgcagtgagcccagatggtgccactgcactccagcctgagcaacagggtgagactccatctccaaaaaaagaaaaaaagaaagaaatcataaccaggagcagagtgtgagggaatcagcgtttctcctgccacgagtgacaggggacagctggggacatcacagagatcttgtcgggagctgggaatcggaatcctgggaccacctgccaggaagccccatcccggagtgagggcagggctgggtctccctgacagcacagtctggaaaggctggagtggcctgtcaggtggggagtgagccttctgccctgcgcagaccagacggtgaagcggggttaggggtgtgcagactgcgtcctggggcctaagatcccgtccctttggctccaggccaggggttgggcggatccctcctagagggagtggttcagaggcacaagggagcctccccgactgtggccatggagtgtgggtttggggatggggtgccagcccagggtgtcgggaaagactggcctgccctggacacccccccgggctgccgtgggatctagcaggactctgggtggttctggctcaggctggcaggcggcatggctttgggcttgtgggccgggctctgccctggggtccagagcttgcattggggcctcaccctgtctgtgtctctcctgttgctgtgccccagctgggaggctgtggcgtgctgggtgtcggcatctggctggccgccacacaggggagcttcgccacgctgtcctcttccttcccgtccctgtcggctgccaacttgctcatcatcaccggcgcctttgtcatggccatcggcttcgtgggctgcctgggtg

SEQ ID NO: 20148 - DNA, 954 bp, Artificial sequence
  DNA replication origin
atttgtgcccacttgggggtgtctgggttgccccagggatgggggcaggggaggggagcccaggccagcccagggccccacactcaggggctgagcaggacacaacagccacagtccctggacctggggccaagggttctgaggtgggggcggcgttctgggctctctgggagtgggggcctggcagaggtttcctggcagcaccaggtatccatgaggtacgtggccctggcccctggcatgctgtggggcggaggctgtgcggcctttcgggtccctgtctgagcctgccccctccacagttcttcctgctgctgctgctggtgttcctgctggaggccaccatcgccatcctcttcttcgcctacacggacaaggtacggctgccttggccgcaggcccaactgcagggctgggggctccatcctcactcccagggagcactgtgggcccggtgtggacagagtggccctgcatgtgccctcacgggcagccaggacagcgggtgtggatttaccaggcctggaggggcagcgccagcgaccctgggaggctgtgctgtggctctatagcgactggggcacaagggcactgctaccccacccggagggtgcgccccaggttgtcccccgccctctgacgcagcgtcctgagccgtctgctcccagcgccccatccgggccgcgcaccgtggggttctcctctgtagagcggcctcttcttggtcactcactcatatattcagccatttgtttatactgggatgaagtcctggctattgaggttgcactccgagctagaacacactactttgttttgtgaatcacactgtccgtccttggccctggggagcttctgccgtctgctgctgggtcccctgacgtgcccccatcaacagacttttcattttggggcacgtcctgacttcctggcactgcagggcgctccaggctc

SEQ ID NO: 20149 - DNA, 1456 bp, Artificial sequence
  DNA replication origin
gctttcagctcacagagcatggctgcacgtgtcccgatacgtggaggcacctgtgtccctgtcctctgtccccccaggacccatggtcctcccccagcctggggaggaagcccagaggtgggggccctgggcctcagggctgctgggaggacatggggccggtgtgtctgcagcttggtgggctaggaggcgcgggggacacaagaccaggcgcaggaggggcccagcttaggggccggcgagggggtctggatgagggaggcggggtacagtgggaggggccctgctgaccccccccgcacccccagattgacaggtatgcccagcaagacctgaagaaaggcttgcacctgtacggcacgcagggcaacgtgggcctcaccaacgcctggagcatcatccagaccgacgtgaggcgtgggcaggtgggcggggtcggcgggtgccccctcccctcctgcctcagcccgacctgagcttgccccccagttccgctgctgtggcgtctccaactacactgactggttcgaggtgtacaacgccacgcgggtacctgactcctgctgcttggagttcagtgagagctgtgggctgcacgcccccggcacctggtggaaggcggtgagtgagacccccaccctgggggctggtaggggcctagagggcgggaccagcaggccctgccgtgacacgcatgacatccctccctgcagccgtgctacgagacggtgaaggtgtggcttcaggagaacctgctggctgtgggcatctttgggctgtgcacggcgctggtgcaggtatggcctgggggcctgcgggctccctgcccccactttgttaggaccttctgagcccagggaacaaagtagcaaagaccttgcccccaggaacccacgatcgggggaggccggggcaaaagcaggagggcgagttcagggggatgggcagggacggcctgtggggacagtgggctccctcttagtggacagaggcagaggctggtgtggggtggaggccggtggtcgtccatgttggtcggtggcccaggactggccagtgcacagagggtggcagctggggccctggtgccagtggcccctggtttccaaactccacagccctcaggaagttctgggtgtcctcatgcctgcaaggctcaggggagggtgctgtggctcgagccacaggggttgggtggggcgtgcaagccaccaggaagctgaagggctctgccactgtgtcgcccaccctggggtcggggtcagggccagggcacctgctgaggacagggactgctctgggcttgaggcctgagcctgtggagctgccatgcccagtcctcctcccctacctacagatcctgggcctgaccttcgccatgaccatgtactgccaagtggtcaaggcagacacctactgcgcgtaggccgcccaccgcccgcttctctgccaaaag

SEQ ID NO: 20150 - DNA, 1065 bp, Artificial sequence
  DNA replication origin
tccttggctggccgtgaggactcccctcctcaccactgggtcccacagggctgaggtgggcagtagagggcataggtgggtacatgtcccgggcaaggtctctcggggggacagaagtgagtccagggagtgggtgggcctgggcgtccctcactcagaatgccgtggggtgaggacggtgaggacagggtgggcactgggttctggtttagagtcagtaatgttagggcgcagtgggcagggggtcaggacatctccagccggtggtgaggaagcatggtggggtctcctccacaggacgggagctggggagggggtcctgggtcggacccaaggcacccacacttgagaaagcctccgcctggacgtcagggaggcctgcgagctgccacagtgcaggtgcagccgttcccaccgccctgctgctgcttgacacgggcataggagatacaagtggtgtgtgcggcggttcatgcctgtaatcccagtactttggaaagccgtggcgggaggaacgctgggcaacatggtgaaaccccgtctctaccccctaaaaatagaaaaattagcaagacatggtggcatgtgcctgtactcctggctactcaggaggctgagatgggaggatcgcttgatgaggttgaggctgcagtgagctgtgaccgactgcactccaaaaaccttgtctaaaaaaacacaagctgccactggctttggggcactgaccttgtctccccagaggtgctgacgctaacattcaagttgttctcgggggtcctgtggcttctgttggagtgagggtgggggacacgcaggtctgggagggtggtgtgggcctggagctaggcattgccagatcagcattgggtggaggcaggggtggggatgccacacaggatgggatgtctagagcgggctgtgtctcccggggggatgggcagagggtggggcaggaattagctggaaatgagattgtggggtgcagtttggggatcagatgccccaacctgaactgaccgtcatccctgtggccagggtccccacacaaccctcacccctggctgt

SEQ ID NO: 20151 - DNA, 1076 bp, Artificial sequence
  DNA replication origin
cacgctgtgggggcagccatgaccagggcgctgtcagggaccccaaccccaggaatcgctactcccaagcaggccctggggacgaggagaagctggagcccaggtgctgggtgggggtgtgtgcccagctcccaaaagcccagggagggtctgagagtcactcctggggagggaaggtggggccacccggtataggggcggggctgagtgaggacgggcagctgcaggcacagcagagggagtccaggcccacagcagagggaggacagtcctcagagggccgcagacacacacaggggctgggtccttggggggcctgagtggccatccaggctggtaactgggacccccttgagggcttgtaagaccccaaggagcatggctggtgtgatggacaagcacaccaggggaccaggctcccaggaggaacaagggccacacaggtcttttgggcgcaggcaccagccacagtgagtggggagcgagcgaggggcctgcctgggaggaaggaagggccacagagagggcaggggaaggtgaaagtccgagagtgggtgcagggagcactgcaggagcccaagggagggacaagcacatggacggggaggatgtaaggaataaggactcaatgaacacggacagctcggcctcacagaaacatccagaacagacaaacctacagagacggtgggctggaggtgggcacaagctagggcggagaaagagggcacagctgctaaaaggcacagggcttctttttttggggagcagtaatgcgggctgtacaattctggaagcgtgttaaacgccactttgaaatggtgcattttatggtatgtgaatttcatccaacctcaaaaacagctgcaaggcctcaaatggaaagggccaaggaaagccaaacaggatatacacacaaaacacaccgagacgcgccacagagcaatttaggaggaccagggacagaggttcgacgcgtttctagggagaaagcagatcaagtgtgagaaagatgtccttggacctcctgatgtgtgtgtgtgtggggggcgtcaccccacggagaccagcttgga

SEQ ID NO: 20152 - DNA, 997 bp, Artificial sequence
  DNA replication origin
tgtttctaagaaactcaactgcatccagaacaaagattaagatgatttataaaaatgctaaaacacccagcacgcaacatggtaaaattcgcaatgcctcaggcatcaacccgagagtaccaggcccacaggaaggcagcataataggaccccaaacaaggaggaaaagcagcctcctgaaaccgaccctgatatcagaaccagcagacatgggcactcagcagttcttacaactgaatcccaatctgcaaaagtttagtagagacatggaagacgtaaaggggaccccaagcaagcctctagagaattataacatgttggctgggcttggtggctcacgcgtgtcatcgcagcactttgggaggctgaggcaggaggatcgcttgagcccaggagttcaagaccagcctggaccacatagtgagacccccatctcataaaaaataaaaaaaattgaattacaacacgaggtgacaaaagcactggatgagattaacggtaggctgggtggtgagggaaaggaccacgtcgggcggtaggctgggtggtgagggaaaggaccacgtcgggcggtaggctgggtggtgagggaaaggaccacgtcgggcggtaggctgggtggtgagggaaaggacgtcgggcggtaggctgggtggtgagggaaaggaccacgtcgggcggtaggctgggtggtgagggaaaggaccacgtcgggcggtaggttgggtggtgagggaaaggaccacgtcgggcggtaggttgggtggtgagggaaaggaccacgtcgggcggtaggttgggtggtgagagaaatgaccacgtcgggctcaggatggatgggattaatggcaggttgggcacagcaagagaaatgaccaggccaggcacggggctcacacctgtcatcccagcactttgggaggctgaggcaggaggatcgcttgagcctaggaatttgagaccagcctcgacaacatggcaaaaccctgtctctaca

SEQ ID NO: 20153 - DNA, 1207 bp, Artificial sequence
  DNA replication origin
ctccccaaatgctgggattacaggtgtgagccatcacaccccgccatttttcctttttttttttctttttttgagacggagtcttgctttgtcgcccaggctggagtgcagtggcacgatctcggctcactgtaagcttcacttcccggtttcacacgccattctcctgcctcagcctcccaagtagctgggactacaggcgcccaccaccacgcccggctaatttttttgtatttttagtagagacggggtttcactgtgttaggatggtctcgatctcctgacctcgtgatcctcccgtctcggcctcccaaagtgctgggattacaggcgtgagccactgcgcccggcccatttttcctttttgaatcaactaaaaaaggcaagaggattgcttgagcccagaagttcaaggctgtagtgagataggatcgtgccgctgcactccagcctgggtgacatagagaccccatctcagaaataaaaaagaaatgatcttgggtttcggtgagaggacctgggtggaggcctcggcccagagggaggttgcagggcaggaaggttccagtggacaactggatttggggctgaagtcttaggggcacttggctatagagaagggcccaggcactgagggaggccaccgggagtgatgggcatagtgctgggaggtgtttgtcggggatctggggaggctgaccgtgcctgagcggtggggctggcaggcatcaggaaaagaggtcggggctgaggggaccatggatgatgctccacgtacctgcaggccgggacagcctggggtggacagactctggggcctgggcctctcattgtgctcagcagaggaggaaggcccagaccttggtcctggtagactcaaggcaggggctgggataaaactgcacatctggagaggcgctcctcagacctgccaggtgggtccagggatctgcaggaggtgtcttgggccctcaagcccctgacagaagccccagcactgaggcccttggcgtggtccagatttggtagcccagtgacccttgagcagaggaggggtcacaactgagggagatcagggcccactgcctcacagggaccccctcccctcacttcagtgcatgctgctcctccggccgcgtcccccatgctgttgtcctacgtcctgctgccgtggggccctccgccccctcggtgttgaccttcatgt

SEQ ID NO: 20154 - DNA, 1585 bp, Artificial sequence
  DNA replication origin
ccccacaggccagtgggaccaacaggctgtccccaggtgcccatgtggtggtgccatccttaacatgggagcagaacccttgggtcactctctagttggccccttgtgttttctgggcattgttagctactgggacccccttgggtccagggagctgacctcaggaacccaggaagggctggtttccttcctgggccctgctggcgccgttgccggccttgttgtcagtggtccactctgaggtgggcggggccgcgaccctggccagctcctgcaagccccgtggttcagggccggccatcgctatatgtggagcccaactcagcagtcagagaaaggtgacgcatgggggcgccgtcaccgtatccccagcaagcacgtttgcacagaggcccctgctcccgtcgcccacctgcctcttgcccgcagcctcaggggatggggcaggccgcgtgctggcagtgtgtgttgaggcctctgtgggggaccgtaggcaccccgtgcggtgtggacgggccgaggtccaggctgaggtcaggccccaaagggccaaagggtgctaaccggccagtcagggagcgggctaggcctgcaggctgaggaacagtagagcagccatcgtgagggggcgaggacgccagcagcagcagacaggggccaggggacccaaggccatggggagcgggctaggcctgcaggctgagaacagtagagcagccatcgtgagggggcgaggatgccagcagcagcagacaggggccaggcgacccaaggccatggggagcgggttcagaaatctctgacaggtgggcagagggggaggggagctgtgggtggaggaacagctgtggccgctggctgctgggggcagatgccctgagcatgggagattgcagggacagtgatgccagcatctgttagggttggggaaaggtattcccttggactgctatggggcctgacagtgatgccaccatctctgttagggttggggactggcattccctcagggctgctgtggggcctggctctgcaggtggcaactatagggccaggcggtgtggctggcagggactagggaccataggccaagcccacgccttcctcacattcagcctggagggaggtcagctgaatggaggtcagagactatggctctcccctgctgggtggctggaagatgacagtctagggagacagggaggctaagcccacagggtctggtagctggagtgcaggagcagggaagagatgggcccaccccagcagatggcggcgggaggggttgacgtggagccgacgttccttttgcctggcgtcaactacagtgatgcagatgtcacccagagatggcagctggtcggccgagggaagagggggcatctgccacgtgggcccagtgtcaggaccaaggtgggtgggtgggggtttcagggagttcgcaggtagaacgtgagagtcgtgctgtgctggagggacggtgtgggtacatggcaggagactgtgggctcactcgtgtcaccgtctcccctcggatctgggaggacgctgttctggaggccgcagccgccccggcctctggcag

SEQ ID NO: 20155 - DNA, 897 bp, Artificial sequence
  DNA replication origin
tgtagctcagggaaggagagggcagggcaccgggcagggcaggagacagggagcagcagttaggcctcctctggcccctggaggtggagggggcaggagcatctcagagcaggctggcagtgttccccaagggatggcactagcctccctcctagcacggcctaggagcagccgtcaggaccccaggccggccgtgtgcacacgctggtgcccatgagtctaccctgcaggtggcctctgcagaaactggcctggagcacatgctgctgcaaagctgggtttcagggtgatacgtccacactgggcaggctctggctgttaccgcacgtaggagactgtcactctcacgctgcaggcccctgggagcagccccatctggggaggagacccaccccttaggggatgacaggaggactgagagtggggcaagagccggcccctggtggccccaggtcccgccccactccagcacaagcctctgtggggctcagtgagaaccgggttaggtcaggacgaggtgacggttcctcagccagtacccagaggccctggtgctcccaatggtgccaggaccagggcctggcatgtgcaactgctgcatagtggcagctcctgtttccctgacatggcccaagtgggactgtcattttccaagccaagcccccgtcaattcctgggtaactctggcccacatcatctggtgttagttctgccggctgcaatgcaggtacagtcctcagtggggagcagtgtctttgggcagcccgtcctcacgcctctgcagctgtgtccacaactctatgggtaccagaggctgtcacacactgtgcgccacttagaggtggtggtcaaggagggtgctgcccccgcccctgaaacaccagagcaaagtgagca

SEQ ID NO: 20156 - DNA, 2383 bp, Artificial sequence
  DNA replication origin
cccagaccccactccctcagccagcacccctcagtgtgccccccaccggatgtgtccaagaggctcctctgtctgcttccctcctgggaggcctggcagcagcaggaagacaaggagctgtgtgaagggaggctgggaggcgcactgcagtgggggtaaggatgtccgcaaggctatggggagcctgtcgtctgcacagcctctgaggggccccagctttgccggaggatcaggtgcctgcgttcctggctgagggacaatcccaggccctgccttggggggttcttgctgagccgtgggcagtggaccctgccggggctgaccttccattaccctctgaggagaggggtgtctcagcaggagacagagcccgcctgcttccagccttctcactaatcctgggagagtgggtctattaaccagagatttgccacactcatttccgtttcagagcattaggtaggcagtgagatggcaccagaggctcctcaggagatagcctcttgtctggggtggaggctggaggtgctgagacagcctcgtgtctggggtggaggctgggggtgctgagacaggctcgtgtctggggtggaggctgggggtgctgagacaggctcgtgtctggggtggaggctgggggtgctgagacaggctcgtgtcggggtggaggctgggggtgctgagacaggctcgtgtctggggtggaggctgcaggtgctgagacaggctcgtgtctggggtggaggctgcaggtgctgagacaggctcgttgtgtcgggtggaggctgggggtgctgagacaggctcgtgtctgggatggaggctgggggtgctgagacaggctcgttgtgtctggggtggaggctgggggtgctgagacaggctcgtgtctggggtggaggctgggggtgctgagacaggctcgtgtctggggtggagtctgggggccctgagacagcttagtttctgtggtggaggctgggggccctgagacaggctcattgtgtctggggtggaggctgggggcactgagacagccacacgtctggggtggaggctaggggtgctgagacagcctcacgtctggggtggaggctgggggtgctgagacagcctcatgtctggggtggaggctgggggccctgagacagtttcgtgtctggggtggaggctgggggcactgagacaggctcattgtgtctggggtggaggctgggggtgctgagacagcctcacgtctggggtggaggctgggggtgctgagacagcctcacgtctggggtggaggctgggggtgctgagacagcctcatgtctggggtggaggctgggggtgctgagacagccttgtgtctggggtggaggctgggggtgctgagacaggctcgttgtgtctggattggaggctgggggtgctgagacaggcttgttgtgtctagggtggaggctgggggtgctgagacaccctcatgtctggggtggaggctgggggcactgagacagcctcgttgtgtctggggtggaggctgggggtgctgagacagcctcatgtctggggtggaggctgggggccctgagacagtttcgtgtctggggtggaggctgggggtgctgagacagcctcgttgtgtctggggtggaggctgggggtgctgagacaggctcgtgtctggggtggaggctgggggcactgagacaggctcgttgtgtctggggtggaggctgcgggtgctgagacggcctcgttgtgtcagggctcgacgggtcattaacgtcagggtgggagggcaggaggcagtagggggattgctgagccggagtggccactgcaggggaggacggttgggagcagcctgcgagcacctcgtgtccaggctcctgcaggaaggtggggagctgcgggaaggtggggagctgcaggaaggtcgggagctgccagcatggcaggggcaggcagtatccaggctcctcagagcagcttggcagattcctttgggcattctgctgcctgggagctgcctcagcacagtcctgcctctgaccaccacttgggaccccagcccgcattgtgccaggcccgagactgggctcagcaggttcggtcccatgcactgggccctggacagaggctcaggggcagcttttcctgcagagtttgttggcagtgcccttagaagggatgttgctgcctctggtccctcctgagctctggatcagccccttacagttgtccgcatgcccagaggggctgtgttaggggcgctcggagccaccagtgccagcagctggcagtatgagggggtctgtcgtgaggagcgctccgggcaatgctgcagcactgtagctgcagctcacgtcgcctccggggcccatgttgtctcctg

SEQ ID NO: 20157 - DNA, 2356 bp, Artificial sequence
  DNA replication origin
cggagcccaccgcgcggttctcccggcaccgccgagccgggcagaggccctggagcccaaggccccgcgcggccccacgccaagggcgccaggcctgcctaagagccgtggcgctgggaacccggctacccctgggccgggaacctgataaccagctccagcgcgagcaccaggggcgctcaaggtgaacgcgccgggcccggggtccgcccccggcgcggccccgccccggccccggccccggccccggccccgactttcgggcagccctgcccagtcccctgtcctggcccagcccctctccatcccagcgtgccgtgcgcggcggcggcgcgcgggcgcctggggcgggacttccggcgcgctggagcgttttccggccgtgcgtttgtggccgtccggcctccctgacatgcaggtgagccccgcggcggccggcccctgctcctcctccttgcacggcctcagtttccctcccgcaaagtgggcgcgccgggcagcgaggctcggccccgggaggacgggcgtggggtcgcgggcgacgccgggcgggtgcgtgagagagagcaagtgtgtgagggggcgtgtgagagggtgtgaggacgagggtgagagagggttgctatgagagcgagggtgagcgagagcgggggtggagggcgagtgtggacgggggcgcgtgtcggggggaccgcgagtgggaggtggagcgcgtgcgctggggcgagcaagcctgagagctaggcgcgctgggtggaaggggcctgagtgcgcagacaagggatgtggccggcgggtgaggagtgtgtgagcgcgcggctcgtgtggcagagtggtggccatcgggtccccaggacccccagagggagcagaggcagtagggctccaggcgggctgccctcccagtgaggggcacgcggtccccgtgaagggtgggcgcatcagacgcgatcccacccacccttggttcagccccaacccttgaagcttccattgctgactgtccaaactggagggtgacccgcccgcccgtccgcctcgacttcctgggctctagtaatctcttagcctcctagctacttgggactacaggtgtgcgccagcgcactcagctaagaatttttttttttttttgagacagagtctcacgctgtcacccaggctggagtgcagtggcgcgatctcggttcactgcaacctccgcttctgggcttaagggattttcctgcctcagtctcccgagttgctgggagtacaggcgcacaccactgcacccagctaatttttgtatcttttttagagactgggtttcatcacgttggccaggctggtcttgaactcctgatggggtgatctgcccggcagaaaaatattttttgtagagaccaggtctggctgtgttgccaaaaccagtcaaaaactcctggcctcccaaagtgctaggatcacaggccagagccgccatgcaccagttagttcttcaaaacacaacagaacaggagttgtcagtgcgtccatcgcagaatagagttagctctgattggctgctgtcgctctacacatgtacacacatgcacaacacatgtgcacacatgacatacacgtgtgctgggctgtgacgtaaagtgcatttcttactgctggtctccatgaaaagcattggaaagcccctgctgtgactcccatcatttccatcaacaccaccgaggaggtcctggacctacggactgggagcgcaggaaagtgggagcagtagcgctccaccttatcttgttacagagcggtttctgggacccctttgggtgaccagggtcggggcctgtgcctcttcataacacaacacattccctttgtgtgcggggccgttctgcccaagggaaggtcattggcatttggggaagaaacggtttgatgcaggaacacagtgtgtgtgaacctgggagtctgtgttatgtgaagagcatgatggagagtgtcctcacgggcctcagagccgagcggccggtgagcagtggggagcgggagaggtaccaaagcccagacaagggcctggttgcagtgtgagcacccctcacacatcacacacaccatctccctggggcagttgtctggaaagttccatggcaagtcaaagaagcagcccagcatttgtgagcagcctgtatccaagcactccatcacagagcgggcaagttaagcgcgagtggacagaggcagtaccctggccttgtgttcagttaggttctcctagtgtcccctctgctggacacatgctggcaggactgtcttcctcttccaccctttcctcttccttccctgaagtgtgaaatcacaggttggggggcagggaggtcat

SEQ ID NO: 20158 - DNA, 1253 bp, Artificial sequence
  DNA replication origin
ggtccgcacccccgccttgcacattgcacgagccggagccccaggaggcaaaccaagttcccaactcagcccctcgcgcttggatgaacgagcgcgtggccagcacttttgagtcaccgcgcattctacgcggcacaggctgtccgacccccacccccagccctagccgttcccagcgcagtttcctacagaaaaccgcacggccgggccccaccctgccccgctcagccgttcccggggcgcgcgtgggctccaagacaccctgcacagctgcttctccatttctgctgcttgggagctttctccttaaactaagctttgtctttctttctagtcacgtttccttctttcccttcccggtattttctgccagctgacgcccacgcctttcctagaaggggctgggggctgcatgcggtgcgaggcacgtcccccaccagctgtgggctcttactcagcttagcactcgctctcagcaaacggcctggatggtggcctgaagcctgacctttgggggtgaagacctcaagtcggcagagctctggagagggtcccagtaagctatggcaggtgtcctcagggacatatgcgcagtcctcccaatgctaaggaggccatggcaacatccaacttctcttaggaaaggcacttagccattttaggatctcattgaggtcagaggtctttggcgctaaagaattgcagaatcgatcgggcagccgccgcctttaatcctagcactttgggaggccaaggcgggtagatcacttgaggtcaggcgttcgacaccagcctggccaacatggtggaaccctgtctctactaaaaatacagaaattaggcgtggtggcgcatgcctgtaatcccagctcctggggaggctggggcaggagaattacttgaacctgggaggctgaagttgcagtgagcagagatcacactgcactccagcctgggtgataaagtaagactcggtctcaaaaaaacaaaaaaaagaattgcagaatctacttagggttcactctgggccagaactacagacctcaagagcagatggggcccgcagatgggaggataggaagcccagagccaggcccctctgcagagctcccaacggccgggttcctgggggagtcttgtcagttgccagcacaaagcggtccgcttcccaatctgcatagtttgtgccaatgggccccgtgtacctgcattgaaaactgacttcttggctgggcgcggtggctcacgcttgt

SEQ ID NO: 20159 - DNA, 1885 bp, Artificial sequence
  DNA replication origin
gttgcagtgagccgagatcatgccattgcactccagcctgggcgacagagcaagactccatctcaaggaagaaaaaaaaaaaaaaagaaagatactgaggctaggcacagtggcttgtaatctcagcactttgggaagccaaggcaggaggactgcttgagcccaggagttcaagaccagcctgggcaacatagtgagactccatctccacaaaaatcagaaacttagccaggtgtggtggcgtgcacctgcagtctaagcactttgggagccaaggcaggaggatggtttgagcccagaaggtcgaggctgtagtgattcatgattgtaccactgcactccagcctgggagtcaaagggagaaaccctgtctctaaaattaaacataaataaataaataaataggccaggcatagtggcttgcatctgtaatcccagcactttgggagacacaggcaggcggaatgctgggattacaggagttcaagaccggcctgggcaccgtggtgaaatgccatcactacaaaaaataaaataaagaaaaagaaactgtttcctaggactgcgcactcccgaagctggcctctcccgagccgaggagtggcagtggtcagagaggcccacatggactcagacccaaggctgggactggagtgaatcatctggagggcttgcgtgtctgcaagggcaacgacgctggaaggaggtgggaagtcttttgcatggctgcatgtcgggccttctgggacccctaaacactcttgtgtggacgggaggatgtctgtgggaatcccagagctggcactgaggaggagtcttccgagtgggcggagggggatgcctgccaggcccaagccctcctgtgggcagcccctgcagcacccccattgccctgctctgtgagtggctgctggtgggggggcacagtggtctgcttgtctcggtcttctgcactgccactgccaatgggagcttggattaggcatgccagcctcctgacgcccagagcccatgctctgcccacgtgtgttagtggacggtcctcgtgactgctgggactgtcctggagagcagcccaggacccctcacatggcacaagatgctcttgtgtccagaatggcctttatttgttgtcagggacaggggagggaagcttcttggtggaagggagaggctgaagaatgaacagccccgggaccactttctctgccaggaggtggcactgggagaggatagggactccggaggggtgtaccgtcctccaggaagccctctgctgggtcggctccgtgcctctgtcttgggaagtgatggacttggttgccttatgctgactggggtctgtcacagatcttggttttccccaggagttctggaggcccagagcctgggtgcggcacccggttcattggggaggggcatgggtcctgtgccctcctcctggccgggctccaccagggctaagctctcatctggggctgcggaagtgagccagggtggggacaaagccctggctggtgggtctgggccagttccaggtacagggtccagatccccccactgcagcaggagggagcttcctgttcaaagccatctggctctgggaaggacagtgaggcagggccatctgcttccccactccctggggtctcttcctggccgggacctggagctgtgcagcctggcccagcaggtcctcccttgcgatgtgtccacaggggtgggcctaggcctccagcttgcagtggtgcagagggctggggagcagagggggccctggcaacagtggccaaaagtcctggcgccgccgagggactagattccgcaggggctgccgcccccggccgctgtcactggggtggggtgggtggttgtttctctgcag

SEQ ID NO: 20160 - DNA, 1584 bp, Artificial sequence
  DNA replication origin
ctgcctcacgcgacacccgccccggccgccgtccgtcgtcgctcgcgtgcgtgcgcgtgcgtgctggtgcgggcgccgtacgtgcgcgcgcgcggcggcccagaaagcggcgctgggaccctgaggcggccgtggttaggcggctccccggcggctcctccgcggcggtgacggcgaccgcactccccgcttcccgctccccgcgctcctccgcccgggtccgccagccgaggccgctcccgagcgtcggaagatgccggccgtgtccaagggggacgggatgcggggcctggcggtcttcatctcggatatccgcaactgtgagtggcgggggcggcgtggggccggggccggggccgccggcggagacggggtctgggagcggaggcccggggcggggcctcgaggcgggggtgcaggctgggatgcgggcggggcccggggcctgagggtgcgggcggcgctcggggtcttggggtaccgggtctgggggtgggggccagggtgcggggtgggggtccagggtctgggggtgcgggcggcgctcagagtcttggggtatcgggtatgggggtgcgggtcaggatgcagagcggggccctgggtctgggggtgcggggtggggtgtccagggtctaggggtgcggggtctaggggtttagggcacggcccttcatccacatctccactcccgtttgctggtccgtgcggggggctgcggcaccaccaagggggttccgggccaagacgcccctccccagcatgatgtcaccttggtctttctagtactggagcgtttaacccagcgttttccaaaacggcgtggattttagctttgggagcagaaatctggaaatcagtgtcttcccaggaaacagctttgtgacctgggttctggaggcttattaacccctgattagatctcacctacgacgattaaaatgactcattcccggagggaatctggacacgagcagcagtcggggtgtgggatggcctcgctgcctgctgctccaatcacagacctcgttctcagccccgtgcctgtcccctcggggtgggaaaaatccacaccaaaccgttaaacaagccaggaaggctgggcctgttagaaggatgtgcagggtggctgggtgggtgcaccggtccaccaattaatttgactttggtgtgcagaacctcctcttggctttcagaggccatctccttatttaatttgagggagaaacaaagccagtttcctgtctgctgcgttgatttttttccttgttatccagcaaatagttgacttcatgatttttgtttttcttttttttgagacagggtcttgctctggctctcaggctggagcgcagtagttccatcacggcgcactcaacctcccacctcaagtgatcctaccacctcagcctccggagtcactgggactacaagcgtgcaccaccaccatgcctggctgattttcgtgttttttgtagagatgggggggtctcgccatgttgcctaggctggtctcgaaatcctgagctcaagtgatccacctgtcttggcctcccaaagtcctggggttactggcgtgagcca

SEQ ID NO: 20161 - DNA, 793 bp, Artificial sequence
  DNA replication origin
gctgtctgcttgtggatttcatttctgccttttagtttttgcttcttctttctttggaggcagaaattgggaataagacaatgtgaggggtggtctcctcccttaatgccagcttctctgtggaaagtaggttggaggtgagtggaaggtgaaagctgcgaagagtcccaactggagatgcaggtggcagcggagatggcgagaataggagagtccgaccggagatgcaggtggcagcggagatggcgagaataggagagtcccgaccggagatgcaggtggcagcggagatggcaagagtaagagagtcccgaccggagacgcaggtggcagcggagatggcgagaataggagagtccgaccggagatgcaggtggcagcggagatggcaagagtaagagagtcccaactggagatgcaggtggcagcggagatggcgagagtaagagagtcccgaccggagacgcaggtggcagcggagatggcgagaataggagagtccgaccggagatgcaggtggcagtggagatggcgagagtaagagagtcccgaccggagatgcaggtggcagtggagatggcgcgagtaagggagtctgactggagatgcaggtggcagcggagatggccggaatagagcactcgtttggaggaaaagcggacaggtcgacaggatggatgtgatgggggccccgaaggagaggatgctgtagagactgacatggcacctctggtgatcccgtcgctcaggaaatgctcgttgttttccagctgtgttgctcagaagctcttgg

SEQ ID NO: 20162 - DNA, 924 bp, Artificial sequence
  DNA replication origin
cttcccaggattctgggactatggcagggaaaaaacaactccgtgttcacatggagcttgcattctagtggacagagatcaaaaagaaaaacatagtttagtgggatgttagaagatgataaacacaacagagaaatatcattctagtggatagagatcgaaaataaacacgaaatttggtgagatgttagaagatgataaacacaacagagagatattaaggggggaaggtgattgggtaaatgagggtataggtgttcaattttaagtagaatgatcagggccggcccttctgtgaaggcagcagttgagcaaggacctggagctagtgaggcagtggccacgtagaagttagtggggagggcgtcttggcagagggagtggtaagtgcagaggcctttgtcggggaggatgactgctgcacggaagaaacagcaggaggcgcatgtggctttaggacagcaatcctgggtggaaaggcagtagggggttaggttggggggaatgaaggtgggggacaggtggagtagggcctttcctagagctttataaagactgtggctcttactagaatgctaaacactgagtatccttgagtagctcaggcctttgtaatgcagagtggtgaatggtgtgaggggtgaacagcttcggagaggtcaggcatggaatgcaggggtgatgcttggctcaggtcttgctaggctgatgggatgtgggggatggtctggaaagggtgggcagtcccgtgtgccacgctgcagagaggcatgagcagcagcaggacacatgtgatacattgagggtgactcctagcgtgggtagggcctagtggggcacgggaatgtggctggagaccaaggtgggagaggcagccaaaaccagatggtaggacctcctgtctaggatgtgggctgtttaagt

SEQ ID NO: 20163 - DNA, 1053 bp, Artificial sequence
  DNA replication origin
tttgatgtggttggtgctctgtgcccatgaggtcggcctccagaggaggggaggatgtctccctgacacagtgccttgttgacgcactgtcccaagtagacccgtcccgtggtcccttggacagctttgtttctgcagtaggcgctggaggcacatggctgggtcttggtgcggagggtgctcaccccaccatctccccagcccttgccgggctggtgcacagtgtcctgtcactctacttttgaagtcttcttgggctctgcacgttgagctgtgtagtctcttgcagtcacattatttctatgttttccctggtggtataaagtaatattttcttccatttgtcaaaaaatttaacttagagaaattaagagagactgtagatgtcttggggttttgataagtattggtgtttattcaagcatttgtggagtgcctgtggtgtgttggggggatgggggattagccttgaggacggaggcacagggactggaacttgggcctgcccttgtcctgggggagatgggtgtcacatggctccacagacatagaagttgaaaggatttgagagagggagtggaggtgggtgtgttgagctgaggctggagggaggggaagttaactgggggctgagggtgggaggagcagggagagcagagcaggtggtgcctggcagtggcctgggcgtgcgagcgcagggctgaaagggcagtggtgtttggcagggcgggagctccctcgtggcgtcttcctgggagccgtgggaggctgggtacatctttaaccggggtgctcagtgatgggcctggagaaaaccactgtttccctccaggtggggagggtgtcaccttcgaggatggctgggaagaagtggcagtgacacaggactggggtttgccctgggtcagtgggggtggaggggggcggcatgaggctgtgacacaggcagattaaagagtgggagggaacaggcagccgggtttctggaaattgttgtagctaaaatcagcctctcagtgaaggttcctgcccatcttaacttgaggatagtgt

SEQ ID NO: 20164 - DNA, 1167 bp, Artificial sequence
  DNA replication origin
ggcctgaggtcaggagtttgagaccagcccggccaacatggcgaaaccccgtctctactaaaaatacaaaaattagctgggtgtggtggtgctcacctgtagtcccagctactcagaaggcttgaggcaggagaatcgcttgaacccaggaggcggaggctgcagtaagttggagattgcaccactacacaccagcctgggcaacagaataagactctgtctcaaaaaaaaaaaaaaaaaaagaaagctgggcatggtggctcatgcctgtaatcccagtactttgggaggctgagacgggcagatcatgagttcaagagctcgagaccatcctggccaacatggtgaaaccccgtctctactaaaaccagaaaaattagctgggcatggtggcgccctcctgtagtcccagttactcaggaggctgaggcaggagaatcgcttgaacccgggaggcggaggttgcagtgagccgagattgctccactgtactccagcctggcgaaagagcgagactctgtctcaaaaacaaaaacaaaaacatgctcgggaaggaggtgctgtcattggaggactgctggtgtgtgtgtcacctagaaatggaaggacagagtaggtgctgaggaggtcaggtcattcctagggccagaggtagggacgggaggcagcggccaaggcagaagagtggggtggtgtctctgctgggatggacggagttggtggaaagagaacccgtggaggtgcagagtagccgtggggtcctcggtctccctcgtgtgagccgacattagcgagtagctgtagggtcctcggtatccctcgtgtgagccgacatcggagagtagcagtggggtcctcggtctccctcgtgtgagctgacgtcggagagtagtggtggggtcctcggtctccctcttacgagccgacattagtgagtagcagtggggtcctcggtctcccttgtgtgagccgacgtcggagagtagcggtggggtcctcggtctccctcgtgtgagccgacatcggagagtagtggtggggtcctcggtctccctcttacgagccgacattagtgagtagcagtggggtcctcggtctccctcgtgtgagccgacgtcggagagtagcggtggggtcctcggtctccctcgtgtgagccgacgtcgg

SEQ ID NO: 20165 - DNA, 1064 bp, Artificial sequence
  DNA replication origin
tttccatggccatgcagccgcagggtcaccctgagtgcttttcagggtggcagggccttgcctcagatggccacaagggcacctctccttggatactttatgattctgtgacgccagctacttggtttgctttttgtatttttatgcatctggctttatttcaccaggcacttgagtcagcatattcttggttataggcaacggaaactcatcctgaagggacgccacagccaaccccagggtgggctccctgctgcccagtactttccctccttagctctcccagcttgcgcacctgcacccctggcagctgtcttttgtgtggccatggcttttgtcaaatgccttccacctctgacagcgaaggcctgaggcttggcttctctggtctcaagtcaggagcccccaagaaaggtgtcatttgctcacctagagtgagtgagctcccccatgtgtccttcagggaggtcttgtggagtgggacaggaagcgtgggcgggaccaggtgggtgagggtcagaaggtcggcggtcaggcctgcgcccggagttgggtggtggggagggaggtgatttggcccgagtgctgcatgggcaccgtgccgagccttgggtctgtagcctgagggtggcctgatggagcagacaggttggagtggacaaggacaggagacaccatggggagaagggttggggggctgggccaagggctggaggccactgaggagacacggaggtcgctttggcaccagctgccaccacaggggtggggccacgtgtcgcgggcctgagtgtgcccctcgagaggcctcttacagtctcagtgcagggggaggacgtcctaaatgagaggctgagctccgcgcctgtcagcctgttgcagggggcattctagatgcgtgtttcctgggggaacacaccgtgaacattcaggagccccgtggggaatgactctgccctcatggaagttacagacctgcagtttcttacaagttctttattggacatggcaaaatccgttagcactttgctcaccgagaaatacaggaagaagaccaatcagac

SEQ ID NO: 20166 - DNA, 1364 bp, Artificial sequence
  DNA replication origin
gctcgactgaaaggacagagggaaacaccatgcccggctgaaaggatggaggggagcaccatacccggctgaaaggacagaggggagcaccatacccggctgaaaggacggaggggagcaccatacccggctgaaaggacggggtggggggagcatcgtgcccggctgaaaggatggaggggagcaccatgcccggctaaaaggacggaggggagcaccatacccgactgaaaggatggggtggggggagcaccatacccgactgaaaggatggggtggggggagcaccatgcccagctgaaaggatggggtggggggagcaccatgcccagctgaaaggatggggtggggggagcaccatgcccagctgaaaggatggggtgaggggagcaccatgcccagatgaaaggacggggtggggggagcaccctgcccggctgaaaggatggggtggggggagcaccatgcccagctgaaaggatggggtgggggagcaccatgcccagctgaaaggatggggtgaggggagcatcatgtccggctgaaaggacgggctggggggagcatcatgcaggccaagacacagcacctgtcttactcctcacagcaggagctggctgaggattgccgctcatcacgcagaggggcgagagcagacaccgggctgacgaatgcccaggacctcaaaatctgcacaactgcactcagaagcacactgcttctgtctctgttcaaaacacccagaacaacaatcaggaacgaggctcccgtgacggccgtccccagagccagccccaccccaccacaagtgctgacaccaggccacactgccccagccaggccagagagggaccactggctacagtcaacgagcacctgcctggcccctctacagacagccctgccctacaccacggtgcctgcccttggggcctcctgccgggagtcagcccaccccgtccctgtccccctcaacttcccaggcccactgtcctggagggtggacagtccagcgtgagagccgcctcctggcccctgctctctgcaggtctgcagtgcctcactgaagctcagtccatggtaatttcacccctcagcattgaagccccagcacctgggctcctccgttcactaaaagacccctgaaaacccgagtctctcacctgggcatgaccacacaacacctgcccagagcaaccctgtcacctgccactagctccaacactggctctcggcaaagctcccaaggaggccttgagccgcacttcgcccaaaaaaaacaaataacaaagcgctttctatacaacggaggcgctgtctcagcctcaacaagaggctgtggtcctggctggtcacagtggcga

SEQ ID NO: 20167 - DNA, 2027 bp, Artificial sequence
  DNA replication origin
gctgggcatggtgctccccccaccccatcctttcagctgggcatggtgctccccccaccccatcctttcagctgggcatggtgctccccccaccccatcctttcagtcgggtatggtgctccccccaccccatcctttcagtcgggtatggtgctcccctccgtccttttagccgggcatggtgctcccctccatcctttcagccgggcacgatgctccccccaccccgtcctttcagccgggtatggtgctcccctccgtcctttcagccgggtatggtgctcccctctgtcctttcagccgggtatggtgctcccctccatcctttcagccgggcatggtgtttccctctgtcctttcagtcgagcatggcagggcgtgttctctggctgtgctaggtgctaagtgtccaaactggacatggcccactccctgcctactcggcaccttgccatccatggagggggacggattgagagcaggaccgtgggttgctgtgctgtgggtgggatggctggaggaagtgcctcatgttctgggggcctcaggaggcattacactcctggggggctgtgtggacttctgcagaaggtgatagtggcctggtctggagaggatgatggtgcagaggctactgggagggcagagcatccgttcgtggaggggtgggaggtaccttagcacaggctggggagcagggcacgcgaggcaggggtggaagcagacatggggaccctgccagtgaggcctgagggcccctggtgcacagccgtgagctgcgggtagggctcagaggcagtacattttggaatgatgccctggaagtgtcacggagtcaggttggggtttgggggtccaggctccaggcagggacttggggtgggggggcacagtcaccagcacctgagaggccagtggcagggtgtggagagggggcggcagggtgtggggaggggcggcagggtattaggggtgccctcgggaggtgcgcggtcttgatgcctgctggcgttggtgttggcagctggcgctgttcgaagggggcttggttccaggcgaggtgactttggggagatgagtttggtgttgtacagcctggcagagctccatgtgggtggctgccacgtgggtgtgggctgggcaggtgcctccggggggcacccgtgagagtgagccagagaggggaagaaggggaacccccaggtgaggctcgcaggaaagactggccagagccggaagaaaccagcagagaagtggccgccgggagcccagggtggcgcagtcactggccgccgggagcccagggtggcgcagtcagaggtcagaggagtgctgccaccgggagcctagggtgatgaggtcagaggagtgctgccgccaggtgctggggctttgggagagaagggcccaggtgggaggtggcctggctgtggccgtggccttctgtgcactggtctccgcctcttcctggctttctttgcttaagtcagggcatcttaaactttctgggctcgtgggcttttttgagaatcgagttcaagcttcctccatgtcccaaacttttgtagacacattgaggtgcttctgaaactctcactttgactttggacgacagtttggtcttgggattgccatggcctgcaggtgccggccctcagcagcctgtcccccacaggtgctgaaggtcgccatcctggctgagaagtacgcggtggactacacctggtatgtggataccatcttgaacttgatccgaattgctggtgattacgtgagtgaagaggtgtggtaccgagtcattcagatcgtcatcaaccgggacgacgtgcagggctacgcggccaagactgtgttcgaggtatggcccgcaggatggcaggaaggatggggtggagggcagttgcagaaggtgagcagtgagtggttccagcctgcctgcgtggaggtgccgagggccgttgctgacccctcttgcccctcagctcttccctgaggctctagctcctccactgttggtgccccttgct

SEQ ID NO: 20168 - DNA, 944 bp, Artificial sequence
  DNA replication origin
caggacaggccaggggggcgtccagcagggacagtggcccccgggacaggccagcagggtgtgcagcagggacagtggcccccgggacaggccaggggggcgtccagcagggacagtggcccccgggacaggccagcagggtgtgcagcagggacagtggcccccgggacaggccaggggggcgtccagcagggacagtggcccccgggacaggacaacggggcgtccagcagggacagtggcccccgggacaggccaggggggcatccagcagggacagtggcccccgggacaggccagcagggtgtgcagcagggacagtggcccccgggacaggacaacggggcgtccagcagggacagtggcccccgggacaggccaggggggcgtccagcagggacagtggcccccgggacagacagcggggcgtccagcagggacagtggcccccgggacaggacagcgtggcgtccagcagggacagtggcccccaggacaggacagcagcgtgtccagcagggacagtggcccccaggacaggacagcggggtgtccagagccacagccagagcctgggttctcagtacatgctcctccctgacaggcaaatgctctgctggtcccaagtcttgggggtgaggccctgacaggtctgggtgcacagtaggtgagggacccaccacggcgctggtactggctggggcaggctcaggacccccgttcacgtccacactcctgtcccgcttggtgtcctccaggtctgtcaccgtgctggggcccttcttcttcttgagctttgccaagatggaggactcccgctccgggaatgggggcatctcctccagcacggtcgccttggaaagaacacagggtgggactggtcagagctcctggcctccaaccctcagccaagccagcccgaagggcgggggcctcctaccaga

SEQ ID NO: 20169 - DNA, 1572 bp, Artificial sequence
  DNA replication origin
gcctggggtatgggcacacctcacttctcaggacccacattaaaaagaaacatcaaataagaaccaaagagagactgaagacaatcctacagcccctttccatgctccctcagcgagttcctcttaacgtcaaagcagctggaggggagcgagagcacctggtgccttcccagcttccaacaggcaatcccaggtttccgtggaagacttcacagtgcccttgctgaaagccggcctccaggaatccctgcacaccagcctcccctggatcacgtcatcctgccctcgcctcctcacccaactggggccgcgtcctcctctctgcagggcggagccgctgccggcccagcacccacgggaaggcccctgctccggcagctcacagacaaatctccacaagcaagtttctgcctccagaaacctatgtcaagatgtccaaaggagagggagagatggattagaggagtgacagaggcctgctgcactaggcgcctggctagtgacgtcccacgggaggagacagggtcaaaagcaggtcaccagctctacagagcacatgagaaacataagcatgaaggtgctcaggcgtgaagggaagacgcccaccttgggagaaagagtcacatctttcattcatttcattcactccaggatgagctcacaggcaattcaagcctccagatggcgggcacagcagcgtgccacaaacaacacagagagagggcacggggggacaggggctgcacagaggacactaggtggagggaggggagagggaggaagagggggagggaagactgctcattgagatgtcaggctcagcctggataccagccccatggcaggccctgcactgtcggccagaggggcaggacacatggtcagccggggcacataagcaggtccccgccaaggagtgccaggactccgacatgagcaccctcccaaccagcacactgccagggcaggcaccaccacaggagctcaccccacaaagccctgccgatactgggtagcagcactggttgccaccactggacctgcgtcctggagagacaggtcctctaactggacaaacagaaagcccgcctgaccccgacaggagccctccctgacagtgcagaggggaacagctggcaagcagagccaagcaaaaacgcaactctcaaaacgacacttctcacctgacaaataccacaggacacattctgttacaggattattctcatcgcatcacacatacaaggaaaaccagacctaacccaactcactacataaaacctcgaagagcagggcaggacaggtcctctctaaatcaacaaagcatgtgaggacagctgcctgggtgaggcagtcctgtaggagaggggacggccacttcccctaaaacaaggcaccacagaggatgtgtgagctgagctggacaagacgacggtctgaaggaagtgccttgcccagcaggcacagtggcccccgggagaggacagcggggtgtgcagcagggacagtggcccccgggacaggccagaggggcgtccagcagggacagtggcccccgggacaagccagcgg

SEQ ID NO: 20170 - DNA, 1232 bp, Artificial sequence
  DNA replication origin
ttcctccctctcccctccctccacctagtgtcctctgtgcagcccctgtccccccgtgccctctctctgtgttgtttgtggcacgctgctgtgcccgccatctggaggcttgaattgcctgtgagctcatcctggagtgaatgaaatgaatgaaagatgtgactctttctcccaaggtgggcgtcttcccttcacgcctgagcaccttcatgcttatgtttctcatgtgctctgtagagctggtgacctgcttttgaccctgtctcctcccgtgggacgtcactagccaggcgcctagtgcagcaggcctctgtcactcctctaatccatctctccctctcctttggacatcttgacataggtttctggaggcagaaacttgcttgtggagatttgtctgtgagctgccggagcaggggccttcccgtgggtgctgggccggcagcggctccgccctgcagagaggaggacgcggccccagttgggtgaggaggcgagggcaggatgacgtgatccaggggaggctggtgtgcagggattcctggaggccggctttcagcaagggcactgtgaagtcttccacggaaacctgggattgcctgttggaagctgggaaggcaccaggtgctctcgctcccctccagctgctttgacgttaagaggaactcgctgagggagcatggaaaggggctgtaggattgtcttcagtctctctttggttcttatttgatgtttctttttaatgtgggtcctgagaagtgaggtgtgcccataccccaggcctttgatcacacccaggtttgtccggctaggctcagggtggactttggagggcctggccttgactgtgtggcttagggatcagatggaagcttctggaccctgggagtgagagcagtgtgctgccctctgaaaaggaggatgagggtccagtgaggttcagcatttctgtaaggtgccttcttggagggagttcccccttcagggctcattcagtggattttctgagtgtggcttcactcctgatggtcagtggtgcctggcgggtgggttccttagggaggtgtctgtggccgaggcacgcagctctgttctgagctgagagctgtggtgtgtgggcacctccgtcctgactgagagctgtggtgtgtgggcgcctccgtcctgaccgagagctgtggtgtgtgggcccctctgttctgaccgagagctatggtgtgtgggtgtcattg

SEQ ID NO: 20171 - DNA, 3976 bp, Artificial sequence
  DNA replication origin
tgagagaccacgaaggcaactgtggcgttgtcgcctggtggaggtcgatgcatgcgagggacccagtccctgggtggttgctgtgagaggaacacccaggagggaagggagggacatccctggaacgcgaggtgaggtgaggtggacatggataaggcctgaggtgtgctctgtccccaggcatcccatggcctggggagcagtggactcgctcacaggcatgggccgggaagagaccgtggcccagagaattggcatgagcacgaaggagcaggtgccctggttgccaggtccagctccaccttcaacaggtcctttggggcgaggcaggggatgtgccagacttttgtgtctctctctgcacttggaggaagggctgtgctgcttgaaccctggggttgggccagccctgacatcctctgagcaaccaaaggggcagccagggaaggcttttggcaggtaacactctgaggggaggccaggagtgcagcagtgaccgggcatgagtgagccagtgcagggaaaggtcaaggttagctggggaacaaggcccaacggggaggccaggcacttgcttggccaggacagcgttggcatagagggtgcccaggagaggagagtggaaacgcctggcaggtgtgtagggaaggcagggaacaggcgtgtggtcctgggatcacaggaccatgaggggtaagctgaggcaggggctgcctgggagtcatgagcacagaggtgaggccaggagaagggccacagagatgccacttaccgggtgaggtgggcgtaggtgtcccgagagaagataccggggcagaagcaggggtgcttccatgggcagtgagggagctggtcaggaaccgtgtggtaggcgacaaggtgggaccagggtgcctggtggtaaggttggtgactggagaggtggggatacccgtcacccccgaggtgagtgacacaaagcctgatgtgggaactcgggtggtgagagaagtggaccgcgaggtggtggactgagaggagaaggcaggggcggtgtgggtgctggccgtggtcctgggcgtggacggaaatgcaatggtgctggaggctaggtggctggatggggtgggagacacggtaacagtggatatggggagtagagcagagagggtgaaaggagaggagatagtgtgggggagagtggccctaatggtagtagaggcagctggagaagaaggaaaaagaggagatgcagacactgatgcagtcgtgggatgagtggacaatgaggagtgtgaccccgagctcagggttgtggagtgcacgggggcggacacgaaagaggaagatgtgccaacagaaggcgatgaagtctggggagaggagtgggaggagggcacataagaagaaacagtagagggggcagaaggactgggagaaaatgaggaggacagctgattagttgtggaaacaggagtggttgcagaactcaagtgggggagttgtgtggtgataggtgatgacggtggccttgagctagagttctgaggcagccaagacgaggaggatatgaaggaagaagaggctgtagctgtgctgaatgagctgtgggtttggctggtcccactggtggtcactgtcattggtggggctgtgtgggtggaccctgtggccttgagcgttgttggtggaggaacggtgcctgttggcgttgagtggatggaggcagaagtggccatctgtgtgtgggtagtgatgatgactgtgtgagtacttggagtcaccaaggaggtggagaaaggtggaacgtgagtgggaagtgtggtctgagggtgtgatggggttggataggtagtggtggtctggaaggatgttgcagtcataggacctgtggaagagaagggactgctccctgtaggtggggagtgtgtggtgaagggtgtgggtagcctgctgctgctggccgaggtggtgtgggccacaggggttctggtgcctgtactggtgtgtttgggggtgatgttggtggtagaagttggggtgacttcaggatggtgtgttgaggaagtgtggtaaggtagggatgtagaagttttggccgtgctaaatgagcttggggattggctggtcccactggtggtcggtgtcattggtggggctgtgtgggtggaccctgtggccttgatcgtggtcggtggaggaatggtgcctgttggcattgagtggatggaggcagaagtggccatctgtgtgtgggtagggatgatgaccgtgtgagtacttggagtcaccaaggaggtggagaaagatggaacgtgagtgggaagtgtggtgtgagggtgtgatggggttggataggtagtggtggtctggaaggatgttgcagtgacaggacctgtggaagagatgggagtggtccctgtaggtggggagtgtgtggtgaagggtgtgggtagcctgctgctggtggccgacgtggtgtgggccacaggggttctggtgcctgtactggtgtggttgggggtgatgctggtggtagaagttgaggtgacttcaggatggtgtgtggaggaagtgtgtgaatgtagggatgtagaggttttggccgtgctaaatgagcttcgggattggctggtcccactggtggtcactgtcattggtggggttcctgtactggtggggttgggggtgatgttggtggtagaagttgaggtggcttcagcatggtgtgtggaggaagtgtgtgaatgtagggatgtagaggttttggctgtgtttaatgagctcagggcttggctggtcccgctggtggtcagcgtcattgttggcgctgtgtgggtggaccctgtggccttgagcgttgtcggtggaggaatcgtgcctgttggcattgagtggatggaggcagaagtggccatctgtgcatgggtaggggtgatgactgtgtgagtacttggagtcaccaaagaggtggagaaaggtggaacgtgagtgggaagtgtggtctgagggtgtgatggggttggataggtagtggtggtcttgaaggatgttgccgtcatgggacctgtggaagagaagggactgctccctgtaggtggggagtgtgtggtgaagggtggtggtggcctgctgctggtggctgagttggtgtgggccacaggggttctggtgcgtgtactagtggggttgggagtaatcgtggtagtagaagttggggtgacttcaggatggtgtgtggaggaagtgtgtgaatgtagcgaggtaggtgttttgtttgtgctgaatgagctgtgggcttggctggtcccactggtggtcggcgttattggtggggctgtgtgggtggaccctgtggccttgagcgttgttggtggaggaatggtacctgttggcgctgagtggttggaggcagatgtggccatctgtgcgtgggtaggggtgatgactgtgtgagtacttggagtcaccaaggaggtggagaaaggtggaacgtgagtgggaagtgtggtctcagggtgtgatggggttggataggtagtggtggcatggaaagatgttgcagtgacaggacctgtggaagggacgggactccccgccgtaggcggggagtgtgtggtgtgtggggtttggggcgttgtgtattcagtagtcgttcttgtttgagtggtctctgtggctgtgggcctcgtgggttgtcctggctgtggggtggttgggcctgtggtgcttgctggggttggacgtgggcctgtcgtctgggtggccgttgttcctggcagttcctgattggtcgattttgctgtgggaattggtgaagttgtcatcgttattgtttttgtttctctaccctgacctccgctggcccgtccttttgtctatgtgacctttttcttgcctgtctgtgcctctgttcctgtgacatggcccctgctgggcactccagcctgccccattgtctccatctcacctggacttgctccacatcctgccctga

SEQ ID NO: 20172 - DNA, 1266 bp, Artificial sequence
  DNA replication origin
attcatgcacattcgctcatacacacacgcacattcatgcattcatttgcacattcattctttcacacacacagtcactcagcagatgggtcctgagcacctctgtcctccaggccggctccaggtcaggggacctggccttacacaaaacaaacagtcctgcaacctggagcttccctcccagccagggagaggtgcttaaggaggcagacccagtgtcggccgaggcgcccaccatggagaggagaaaggcaggctggggtgggagagccacaggcttctgtgccacacagggtggttggggcccttggtgggaggcagatgtgagggcgaggatgggaaaggtgaggaggggagccaggaaagtgtccagaggagcagccaggagcagccttgtgcccagaacccttaagaaagccagggcagcgggcagagccagcgagtgaggggcgcgggctgcagagggcagagggagcggtggaggggtgcggggctgtagagggcagatggagtgagtgaggggcgcggggctgtagagggcagaaggagcgagtggggcgcggggctgcagagggcagagcaagcgagtgaggggcacagggctgcagagggcagagggagtgagtgaggggcgcggggctgtagagggcagagggagcgagtgaggggcgtgggctgcagagggcagagcgagtgaggggcgcggggctgcagagggcagagggagcgagtgagaggcgcggggctgcagagggcagagggagcgagtgaggggcaccgggctgcagaggggtgtggggtacacagacttgtggggtggggtgtggccgggagggaggggtctttgtgaggcctgtggctgccccaaggcagaggtctgaatgcagagggtcctgggattaacaggtcctggcccaagtggtggaggagggtggtgtctggagccatccggacacacagaggacagatgtgttggggctcaggagggcaatgcagggcacctgcatcggggagcacagaagaggggccagtgtctgaggtccagggggaggtgaggactggaagatggcaccgaagccccagccccgggtgataagcagggtatgagagaccaaggcctgaggaaggcatggcaggaaaggaggggcttagagcaaggtgcgcgggtgaaactgtaatcccagcactctgggaggccgaggcaggaagatcacctcaggtcaagagtttgagaccagcctggccaacgtggcgaagccccatcac

SEQ ID NO: 20173 - DNA, 1635 bp, Artificial sequence
  DNA replication origin
acgtgtggcccacgcagcctctcacccagggtgctgttagaggaaggacgggagctccagggcgtgtgggcaggaatgggtgcaggagggatgggttcaagtcgagctcacgccccgccggctcagggctctgcggcaacttcaacggggacacaacggatgacttcaccactagcatgggtatcgccgagggcaccgcctcgctgtttgtggactcctggcgggcggggaactgtccggccgctctggagcgtgagactgacccctgctccatgagccagctcaacagtgagtgtccggccccccactcccctggctgcccccccagcgcccacagttctgacagacccctggactggaccacaggcccagctgccagggtggggggtccctgggaggagccgtagctggaatgggaggggccgggactcacgcccgggcctgtcatccccagaggtgtgtgcagagacccactgctccatgctgctgaggacaggcacggtgttcgagaggtgccacgccacagtgaaccctgcacccttctacaaggtgagggcccgagggcgtcttgggagggctgcaggggaggctgtggtggctgacaaggtctcaggcacccaagggcataggtttgggacccccatgtccccagggcagggtgcctgccaccagcccatgctggctctctgcccgcagaggtgcgtgtaccaggcctgcaactacgaggagacctttccccacatctgtgccgccctgggcgactacgtacacgcctgctccttgcggggcgtcctgctctggggctggagaagcagtgtggacaactgcagtgagtgcccgacggggcttaagcggggtcacggcaggctgggctcacgagggggtgtcctgggaccccaagctctgaggctctgcagtgcccggcaggcaggggaacccgagattgccctcccggccgccccctcccggagagtctgatgcccgggtcccccacagccatcccctgcacgggtaacaccaccttcagctacaacagccaagcctgtgagcgcacctgcctgtcgctgtcggaccgtgccaccgagtgccaccacagcgccgtgcccgtggacggttgcaactgccccgatggcacctacctgaaccaaaagggcgagtgtgtgcgcaaggcccagtgcccgtgcatactggagggttacaagttcatcctggccgagcagtccactgtcatcaacggcatcacctggtgagggaccgggcaggggccaggcggggggtccctgccaggtcccggggtctcacgcagcctctctcttgcagccactgcatcaacgggcggctgagttgcccgcagcggccacagatgttcctgggtacgtacagcagcgctggccgcaggctgggactgtgaggggccccggcttcctctgagtgtcctgaccgcgcacccctctttcctgcagcctcctgccaggcccctaagaccttcaagtcctgcagccagtcctccgagaacaagtttggggcagcctgtgcccccacatgccagatgctggccaccggtgttgcctgcgtaagggggcgcgcgaggagcagggacaatgcccgggccccagctgaaccatgagggggttt

SEQ ID NO: 20174 - DNA, 1141 bp, Artificial sequence
  DNA replication origin
tacccgatgtccttgactgagatgatggcttcgctcacagtgacgacggaggcccccagctccacgatgatccgcgagatgctcccgtctgggcctcgccgcagctggacactgaaggtggggaaggcgtccttgcaggtggccgcgaagatgtagttgcacgtccccgagaagtcgtacacgtggtggtcgaaggtggagaagtgaccagccccccacgtggagcactggcctttgtccggggctacagagagagcagtgctcacacagccctgtgtccccaccatcctggccaggcagggctggggcaggcagagaggtcactcgtctccctgggccagggtttttgagttggggccaggctgtggaaaccccagacatccgatgaacctgagtgctatggtatatgcctggccaggagtcagcaccgctgtgggcatgtgcacacacgtgtgtgtgggtacacgtatgtgtgttgtgtgtgtgcacgtgtgtgcacgtatgtgcgtgtctcgggtgtgtgcatacgtgtcaggtgtgtccatgtgtgcattgtgggtgtgtgtgtgttggagggctgtgtaggcgtgtgagatatacacctgcatgtgtgttgggtgtgtgtgattgtgttgcatgcacatgtgtgtttgtgtgagctgggcatgtgtgtcgagtgcatgtgtgtgcattcggggtgtgtatgtgtgtgttgggtgcgtgtctcaggtgtgtagggtgtgtacatagggtgcatgtgtgtgtagggtgtgtgtgtgttgggtgcgtgcacatgtgtaagtcgtgcgtgttgtaagtgtgcatgtttgcatgtctgggatgtgtgtgcatgggtgttgggtgtgtgtgcatgtgtttgtcaggtgtgtttgtgtgtaggttgtgtgtgttgggtgtgtgtgcatgtgtgttgggttgtgtgtctgtgtagagtgttgggtgtgtgtgtgacgtgtgctcatgcatgtgtcatgtacatgtgtatgcgtgtgtcaggtgtgtgtgcatgtgtatattgggtatgtgtgtgtgttgggtgtatgtgcatgtgtgttcatgttggtgcatatatgtgtgttggatgtgtgtgtcttgggggtgacctgggctccgggcccct

SEQ ID NO: 20175 - DNA, 1200 bp, Artificial sequence
  DNA replication origin
tcccccgcgctcccctacccagctcgggcaggatccaggagggactgacatcctggatcctctgccaaccgcctgccctgcggctgctgcaggtgaccatcagtccctccccaggcccccagaaggagccagccccaaggggtccctctgtggccgcagcctgagacctggggagacccctcttgccgaccaaggcaccagcccaagggcctctgtgttccgtgctcctccttcctctccaagctggcccgaccctcctccacagccgggagccccctggggtggacgctggcgtgacagagctcgccctcggagctgctgccaacctgggcgcctcgggctcagagcacagtgggacccccccaggggtgtcccactgtagggcgacccaagcccaccccaccccttctctcctttgaagccccttccccaccacgccgggcaccacccttcaaccgtgggagatgtgggggtctctgagctcgctccccaccacgccgggcaccacccttcaactgtaggagatatgggggtctctgagcccgctccctaccacgccgggcaccacccttcaaccgtgggagatgtgggggtctctgagccctcccagcggtgccctctgcttgggaccccagcccctacctgcacacctggcacagcttggggacaagtgccaggaagtggggctaaacttgcagcagagtgcgacccctagtccctcgggccaccaccctggagccagggagggaggtgtggtgaggcccagagaggctggaggtctgggctgtgggcagtgcagagggtggagggccaagtgggggtgtccacccgtcaccccagcaaataatctctgagcgccatctctgccaacatgggaggggcctcagccagcagagtgtggggtcggacagacgggctgcaggcctgggccgcggtgggccgggaggcaggggtgggcggccgccaagcgtgcagaaggaacagtgcgcacctgccgcctcgtgctcgtccaggggctgagaggccgggggtggcggaccaacccgcccagatgcccatgcgcctggccaagggatcagccgaggggaagcacagccagtctgggcaggaacgcaggagtctcccgctggacttcagagctggaggcagccgacttggagccagtggactcggggaacctcctgcgggtggggcagggcg

SEQ ID NO: 20176 - DNA, 1315 bp, Artificial sequence
  DNA replication origin
cgtccatgtgggccagccgagttgtcgaggcgagaaggcccagagacccccgcacacagggcccctctgagggcaccgcagtgtctggcgcccctcgacctcactcaccagcgctgagcagggctccgcagcaggacagcagcagccaccgctggaccatggtgcacagtggagaggagctcgcgctgggcccggcaggcctgctgctgccatccatgcggctccaacggccggtcctgggtgccttatataggctggcgggccctcccccgccgcacctgcctgcgccccgcggtccagccccttaatcaccactgccggcgggcgccgcggtggccaaacaggatctgggcctgctttatcaggactcggctttctttggaaaatcctgcaggcagcggccccattatcacccattcccagcggggggctgacgcacgcacgcccccaaaggtcctgcaaacaccccctgcatgggggccatcctggcccgggccctccccgctgctgggtcaacgtggcactgtcagccacacgcctggtggccgggatggacctgttgggggaggtcgggggccctggggcacctgctctgccccttccggggagcccagtgctgacccagcttggggggaaccctgctgcacctgaatcccaggaccccctgaggggcactgggcccacccctcaccctgaatcccagcaccccctgaagggccctgggcccacccctgagttccctgcccaacaggaaagatcacccagcgggagggaccttgccagggggtgttggggagcaggggctccgccgtctgggacaggcagcggccttggggcttagacaggctgccctggaggcctgaggagctaccgtgtctctgcagcccgccaggtcccaggcttgctcctgaagacccctccacagctgttttcttcccccttcgagcgctgttggcagccatcttgaggacaggaactcgggggctgctcgtctgctggggcatctctgcggggctgtggggtcgccggtatgctcctgaccccttcaggcagaggggcagggactgggatgaccagggggccttgcctgtggaggcacgtgccacgtctgaggggccggggacagggcaaggtctggtgacatcggggtggtgccggtggctggcgggggggagggaggtggaggtctgagtggtcaccaggattgccccagcttcgtttggcagcccagggacccctcccaaaggggattttggtccccgactccgacaggagccctcgctggcctcggggctgctcccaccacacgtcagca

SEQ ID NO: 20177 - DNA, 879 bp, Artificial sequence
  DNA replication origin
tggggcctctcagcccgggctcgaggtggggacgatgaggggcagagatcttagggcctccttccctgggtgggtcactgcaccagggcagctggtgccaaaagggacctcatgggcaggtgtcatggctgggagccctgtggccatgtcagcccggcggttgtgcttgtctgaccacctgtctgggcttgtgagaaccgagctcaggttctcaggagggatcctatgaagctttgaatgtaggggcaggggtgggttgggggtgagagccagtggacactggttccccggccaggcctgtagggcttcgggtcctggccactgaggcttccatttcccagctgtaaagtggcagagacccctgaccttgaaggttatggctgtggcgttcagcatgtgagtccccagcgtcctctagaattgggggatccctgcaacttgcacaggtgtggggcgggtgggggctggataccaccagcctgcaatggggctgcccactgggcctgtggtgaagatgcccgcttgcaggtgtgtggtgattgtgtatgtgtgtgtgcgcatatgcatatgtgtgcgtgcacgtgtacctgtgtgtgcgtgtgtatgtgtgtgcctgtgtgcacgtgagtgcctgcctgtgtgtgtgcatgtgtgcctgtgtgtgcacgtgtgtgcatgtgtgtgcgtgtgtgtgcacgtgcctgtgtgtgcctatgtgggtgcctgtgcctgtgtgcctgtgagtgcgtgtgtttgcgtgtgtgtgcatgtgtgtgcacgtgtacctgtgtgtgcctgtgtgtgtgcatgtgtgtgtataggttgaatttctggtgaaagctgtgcatcccagaatttattgtccccatgatctcaggg

SEQ ID NO: 20178 - DNA, 1103 bp, Artificial sequence
  DNA replication origin
gcctgggctgagcccagcctcaggcagtggttcctgctagctactcctctacccaccccggacaggcgggccagcccaccatcccagccacctccaggcccagcagctaccagggcccctcccgcagccagacgagaccttcagtccactcaaggccacacagtgggctgtgggcagcggacagcacagggctggggctgggctgggggtgggggctgtgcgcacctgagtgtccggctcccaaagggggtcccagggatacgggggaagggcagtgcccccaaatcccagcccaggcaccaagcagtcaagtctgaaagtgcagaccagtgggtgcccggggagccctagccctctgaacatcactggacaggggctgtggggtctcattgagggtgggctggtggtcgcccgggtgagctgcactgcccggcccttgcagctgcccttccggggtcacgctgcccctccccaggccttggggagggccctcacctgtggcatgcagctggctctgtttctacctccggcagggtggaccccagcagctggggtcagaggggtctgcagggctggtggagaagcaggagttgtccagggagggggatagaggccagaggtcagggagtgtcagagccaggcagggcctcctctgaggtgctagggagaatgagggggtaccacacactcggggctgcagggcgggggccacggcaggccagattcgatgggggtggctgcaggcaagagctggactaggaacgtttcaacatactcaggaggcaaaaccgcagggtactggcaagctggacaagtccatggggaggtcaccagtgacgctcagggacgggggagagggagaggacccagggccagccccacccagccacacaagggccttggagggagggtggggcaggtgacctcccccaggcctgacgccccttccctgccatccccctgccccttgggggaccttgcatccagccactctgtccccagggtctccaggttcccaccgcctccccaagcaatgggccccaggacctggcacagggtcagtgcctcccaagacatcgggcatccggatcaacaggaagccg

SEQ ID NO: 20179 - DNA, 1153 bp, Artificial sequence
  DNA replication origin
gccgggacggctgggtgtctggctgactgccccgcccgggctctggagctgataaccagcggatgcggagtgaaatgcaaacagataaggctgttgggaactaggccccctggactgctccgggcgggcagccgtggggcaccacactgcccagggccaggggttattgggccgccttttgccctcagtgagcgcagctggatggggagttagcaagggcttgctctccgagggtggctggtgagggggctttgaggagggtggggggaccctgggctgccgactcagactctggaggctgctggtcaagtgggggtggaggtcaagctggagctgaggctcatgagaccacctctctcccaggaatcctcatccctctcatgggggtgacatttaggactccctttggggagcccggcagggccccaaaagcacaagtcaaatggcctctgagggcagctgcagctcacagcaagggggccctgggcagcccagggtgagatgaagggcttccagggctccaggtgaagagcaggactgggtggggggtggggccaggtcaccaggaggtgtcggagaccaggctggaaggtgacctggcctagagtaagctgggagaggtgggtaaactgaggaccagagctgggggtggggaagggaccctgagccagcctggggggcggtggtgctgtgtgctggcgtggagtctgggcaggtgccccggcagaggtgcctctgccagcaatggcgttggggccacaggtcctgcagagaatttgaagaatttgtttttttccccagaaaagctccaggtattgcagccagacctgagtctctctcaggaatcacatccagggcccattccaggcagttggacgtgcagtgggggcagccactgaggcccaggcaagaaggggtgacggggcaggtcctggtccagagggttgtgggggatgctggcatggctggcatggctggcatggcctgcagagagtcgaggagcgcccaggctcaccacagctggttcttcgggtgttgttcaggggaaacacagtggaggcctgacgggaacaggtgggtttcccggccactcacaccaggtgccggcccaagggagccttgggcctgatctgctgcccagcggccgtgagtg

SEQ ID NO: 20180 - DNA, 1750 bp, Artificial sequence
  DNA replication origin
ttctggggctccaaaggttcggagacacctggaggtgtgcacttcacctcccaaggactgcagaggtgaaaggcgggatgttggtgccactgctctgtgaggtgtggagggtgagcaagtgagcacacagaggcgtttgttctcaggtgagggatcaagagaggcctcaaccagtccaggcctctgctgggcaggcgggcactgggcaggctccattgaggaaagggcagcccagggccagggccatcaggtggatagctgtgcttcaggagtccagacaccctggggcacttgcccctcaagacttggtccaggtgtcacatcctcacactgaacactgttctcaccaccctggccacactgtgtgacccttgctggccatcctgctccgaatgctgcaagggcagcagcccatgtgggccccccatggccaccctcacagcagatgcactcaataactttgcttctgggtgggtgggtgggtgggtgggtgggtgggtgggtggatggatggatggatggatggatgggaggaagggagggggaatgaatgggtcagcaggtggatggatggatggatggatagatggacggatgggaagcagggaggggaaatgaatgggtcagtgggtagatggatgggatggatggatggatggatggatggatggatggatggatgaatagatcaataaatgagtgggtaaatgagtggacggatggatgaatgggtggttggctgggtgaatgagtggataaatggagggagggagggacagatcgttagatggatggatgaatgggtgggtgggtggatggatggatgaatgggtgaatgaaaggatggatggatgggagggagggagggaaggatggatgaatgggtcagtgggtgggtagatggatgggatggatggatgggtggatgggtgagtggatggatggatggatggatggatggatggaagggatggatgaatgggtcagggatggatggatgggagggagggatggatgaatgggtgggtggatggatggatagatgaatgggtgggtgagtggatggatggatggatggatgagtggatgaatgggtgaatggaaggatggatggatagatggatggatggatggatggatagatgggttagtgaatggataggtggatggatggaggcatggatgaatggagggatggatgtgtggatgggtcaaagaatggatggatgaaaggatggatggatagatggatatgtgagtgagtgactggataggtggatggatgaatggagagatggatgagtggatgagtggatggatggatggatggatggatggatggatggatggacaaatggacagatagatggatgagtgggtgggtggatgggtgggtgggtgggtggatgatggattaatcggtgggtgggtgggtaaaaggatggacaaatgaaatctccctggtactggagttcaccttctgtggcagctccacagggctccacctcacaagagctcatgatgagcaagtacaggccaactgctctataggcccacctcactggagccctcaaccctgggaggaaggcactcacctcactccatcctatagacaaggaaactgagactcagagagggtgaaagcactccttcggctcacccagcccaagaatggcagagctgcaatgtggtcccagagaatcttcccagccccaaacttacactgtccaccgcttgataatggtgtggc

SEQ ID NO: 20181 - DNA, 1444 bp, Artificial sequence
  DNA replication origin
agggctgtgctgccccaactcttcaagggtctctgccacctgagaatggggccttctggtgggatcctggccaccccttcctcccctatggacaatgacccagttcactggggcctgacctgctgtttccacctggtgctggccccaagacccacactgtcgtcgggcagtcaaccccaaaggaatagcaggggagccccgaccttccagctccttgaaagtcagcagggccgggggcttccagggaccaacccgggccaggagcctcagcagagccgcgcaggctgcactctgggaccagctcctcctcccagacgcgacttgcccgcccgcctcgccctgcccccaggacactctgccaggccccagacccctgtgtctgctctctcacctgtctggagctccgagccccctgccaaagacagggccaggcacacagccgccaggcgggctagtggcagccccatggtggctggcaggggcggtgtgggttgcgcccgggggcaggggtctggtccttatatgtcctggcaggagggtaggagggcaggaaggcaggggagggccaagggtgggtgtggcatctgccagatgatcaagaagacagctgcgggggcccgagccccaatggggaaatattgattcaggttatcggaggtcatctctttatggctccctgggtaaacgcagccttcttcaggatgaggcagccctgtagcctgaatgccaacacacacccggggaacacatgcagctactagaggggcgagcccagggtggccgggggaggggtgtcctgccagaagcaagtctggtcaggctccttagcccgccatgggcccccagacacccgctgagcaggtccccaggcctgatcaggctcacgttacgctgggaggaccaacccattcctggggcccaagctctggggcagcttccaggcctgaccccagaaaggggcctccccgagggcagggaggatgtgggatccttcagggtccgggggggccactgacttgtgtgggactcttggccgggctcatggagctgtgtcagaggccccagcccccaaccaccccctatgcccatccttttcccaggctgagcccttctctgcagttacatgtaattagaacttggggagtacatgcccagccaggggacatgttacggaatcaggcacacagggagctggctggtggccggaagtggccgtctgccccttctcctggggaccacatgaggacctcgggcctgacagctgaggaggtgacagcctgcccaggctccccagaactacctctgactcatggtggggatcctgcccccaaggctgtgcctttgatgagccttggtctcgcccaccaatcccagcagttgtctggaaaaaagcctggagaaccggaactcacaccgaccccagactacgagaccactgggccca

SEQ ID NO: 20182 - DNA, 1147 bp, Artificial sequence
  DNA replication origin
ggggaagggggtcccacagccccctgcaccggcttctgtaactctagcctggggagggcacacacggccactccatgcacaggaccagagacatgcagcctccaggggtgccaagtctgtccggagcctggtgggctccgaggggaggggctgtcagggacacacaggcaaagggataactgaaaccccttgcctatggggggaatggtgggggctcatcagtgtttgttgaatgaattagtgacctgaacccaaacctcaaggctgttctcctgagctgtgtgctggggcggaaggggtcttctagggctacaaggaatatccctttgggaaacatcagcccccgttgctaggatgtgggaggggtgccaccgaccacactcacacggccccgttaagcacagccaggtggcgggtgaggtagatggtgtcatccttgatggtcagcaggatggactccaccccggcgggggcctcagcctggcccggaccccgcttcaggtgcacagcaaattccttgtaggagcctcggcagtcggaggcgaagttgtagtcgcaggggccggggaagcggaagacgtccccgtcgaaggtcttgtagtggaagttgccccaggtgctgcagacgttgtggccgtggtttcgggttctgccctctgagggagcagcggggaatgaggggtgagtggccccggagggggaaggctgcccaagctaccctcgagagaaggcccctgaagaagcacctggaagcagcttcgagcccagcacagggcccctggccgggaaaggttccttcctatcctcgggccctctgctgggccttggtcaccccaccacaggggtctcagggcttctacccccggcctggtgaggagtgcggccgggtgccaagcgggatgtaggagagggcattctgggcaccccgctccccagcaagggctgtgctgccccaactcttcaagggtctctgccacctgagaatggggccttctggtgggatcctggccaccccttcctcccctatggacaatgacccagttcactggggcctgacctgctgtttccacctggtgctggccccaagacccacactgtcgtcgggcagtcaaccccaaaggaatagcaggggagccccgaccttcca

SEQ ID NO: 20183 - DNA, 1734 bp, Artificial sequence
  DNA replication origin
gggccaggctgaggcccccgccggggtggagtccatcctgctgaccatcaaggatgacaccatctacctcacccgccacctggctgtgcttaacggggccgtgtgagtgtggtcggtggcacccctcccacatcctagcaacgggggctgatgtttcccaaagggatattccttgtagccctagaagaccccttccgccccagcacacagctcaggagaacagccttgaggtttgggttcaggtcactaattcattcaacaaacactgatgagcccccaccattccccccataggcaaggggtttcagttatccctttgcctgtgtgtccctgacagcccctcccctcggagcccaccaggctccggacagacttggcacccctggaggctgcatgtctctggtcctgtgcatggagtggccgtgtgtgccctccccaggctagagttacagaagccggtgcagggggctgtgggacccccttccccatccccagctattgctcccctattgtctccagaacaatgaggccctgtaagtgcgttcccatccagcgcctgcccctcttctgcctggggatttagtttcctgcaaggcgccccagcatgggcatgggcaggcgggtggaggccctcaggcatgggcatgggcaggcgggtgggtagaggccctcaggcgtgagtgcgggcgggtgggtggatagaagccgtcaggcatgggtgcaggcgggtgggtagaggtcctcaggtgtgggcatgggcaggtgggtgggtagaggccgtcaggtgtgggcgcgggtgggtgggtagaggccctcaggcatgggtgcaggcgggtgggtgggtagaggccctcaggcgtgggcgcgggtgggtggatagaggccgtcaggcgtaggtgcgggcgggtgggtagaggtcctcaggtgtgggcgcaggtgggtgggtgggtagaggccctcaggcatggcacaggtgggtgggtagaggccctcaggcatgggcgcaggcgggtgggtgggtaggggccctcaggcatgggtgttggcaggtgggtgggtagaggctttcaggcatgggcaggcaggtagaggcccttgaggaccgaggcacagaggctggggtgagtgcctctacctggaccagcaaggggcactggcaggaggtggggtagggcccctgacgttctcaggggcagcctggggggctctggggggtttgggaccccatggggggatgttccaccaagcagggggcctggaagggggctgggcagcctggtcctccctcctctcccaacctggtgccctcagggcctctgaggggggaccctgcccaggaccgtgccccgaggagggagtggagaggaggggcgtgcaggcaggaggtggctctgccggggaagcccggccagcggagatggacaggtgctctttggccactgcctatgtccctccaccccagaggccggccaagttggtgatcccagggcaggagctgggcctggcagagccatctccaccaccccaggtgcccagcttcagtcccctctgggcggcggggtcccgggaggacaagctggggcgggggggcctgggtggtggacccaagagtgaccccgatgtgcctccgccagggtcagcaccccgcactacagccccgggctgctcattgagaagagcgatgcctacaccaaagtctactcccgcgccggcctcaccctcatgtggaaccgg

SEQ ID NO: 20184 - DNA, 1565 bp, Artificial sequence
  DNA replication origin
gaacctggtgtacctggagagcggctcgccctgcatggacacctgctcacacctggaggtgagcagcctgtgcgaggagcaccgcatggacggctgtttctgcccagaaggtgcgtgtggaggatggccccgccctggcactgcccaccagatgagaggcagccctggcctggggttctcgcctgcgctgaggggacggctccgctgggtggtgggggcagcggcggcacagaagtgcctctccctccacccgataccgggggagaaggggcctcggtgtgaggcccttcccaaagggtggcttcagggaggccgggaagggggctgccttcctggttatcaccctggggacagacctcctcctgcccggcccctggcctggtgcctgaggcctttgggagcagctcgattgtcaggggcaggaaggtggcctggaggctggacccccatggccagaccccaacccagggaccaggtggggaccgcaggcgtcagcacaggggaccagtggtgcctgcgggtgggaggcctggctggcagcccctcggtggggattctggctctttctgagccagccggggtgacatcgcctccctggctgtcccaggcaccgtatatgacgacatcggggacagtggctgcgttcctgtgagccagtgccactgcaggctgcacggacacctgtacacaccgggccaggagatcaccaatgactgcgagcagtggtgagtcccggggccagggctgggcacagcagaggctggggcggctgagccctgaccctgtgccccgctgcccaacagtgtctgtaacgctggccgctgggtgtgcaaagacctgccctgccccggcacctgtgccctggaaggcggctcccacatcaccaccttcgatgggaagacgtacaccttccacggggactgctactatgtcctggccaaggtaggctgcccagggtctggggcatggggcagagctggggctggcatccaggcccttggctgtcccggggtgggtgggctggctgtccctgaagcagagggtgcctgtgggctgtcctggggcaggtgaccatgcttctgctctctggctggagaataagaagcaggccttcctttctaagccactgccgggtcctagggtgcagggtgctgcccgtcccggccctcagcagctgcactgcctcttgccccatcacagggtgaccacaacgattcctacgctctcctgggcgagctggccccctgtggctccacagacaagcagacctgcctgaagacggtggtgctgctggctgacaagaagaagaatgtgagtggtcctgccccctccttctggagccccaggtcccccgaggggggcccttctcagccctgagcaacctcggccttccctgcaggtggtggtcttcaagtccgatggcagtgtactgctcaacgagctgcaggtgaacctgccccacgtgaccggtgagttgcgccccagggaggggcccgggcccttcgagctccactgggcctgcagtgattcggacagtccagccacctcggacccaggaggctggg

SEQ ID NO: 20185 - DNA, 1482 bp, Artificial sequence
  DNA replication origin
gactgtgtgtgcctgcgtgtcagtgtctgtgcatgtgagcatgtgttcatgtgtgactgtgagtgcatctgtgcacgtgactgtgtgtgcctgtgtctgtccatgcatgtgtgcatgtgtgcacgtgtgactttgtgtccatgcatgtgtgcatgtttgactatgtgtgtgtgcctgcatatctgtgtctaggcatgtgtacatgtgtgcagtgtgtgcatgtgtgactgtgtgactgcgtgtctgcatccatgcatgtgtgactgtgtaactgtgtgtgcctgggtgtctgtgtctatgcatgtgtgcatgtgtgactgtgtgtccttgcgtgtcagtgtccatgcatgtgagcacatgttcatgtgtgactgagtgtgagtgcatgtgtgcacgtgactgtgcctatgtctgtccacacgtgtgtatgtgtacacatgtgactctgtgtccatgcatgtgtgactgtgtgtgcctgggtatctgtgtctaggcatgtgtacatgtgtgcactgtgcatgtgtgtgtgcacctgcgtgtctgcgtccatgcatgtgtgcatgtgtgactgtgtaactgtgtgtgcctgggtgtctgtgcatgtgtgcatgtggtgtatgactatatgaccgtgtgtgcctgcgtgtctgcatccatgcatatgtgcgtgagtgtgtaaccgtgagtgtatgcctgggtatctgcgtctaggcatgtgtccatgtgtgcgctgtgtgcatgtgtgactgtgtgtgcctgcatgttggcatccattcatgtgtgcatgtgtgcaccatgcatgcatgtgaccgtgtgtatgcacgtggtatgctgtgtgcgtttgtgtgcatgtgcacccatgtggaacggttgtgtgtctgtgtactgtgtacactgtgtgctcacacgtgtgtgtgtactcatgtgcccatatgtgcagctcccccaggccccctgccacgtgggcttaggtaccaggacttgcaggtctcctcggtgggaaccgatgctccaggtgggtagtgggtgtcctcgacatagcagccacacttgtctgcagtgacacacttcttcagatcctcctcatagatgggcctgtccttggggcaccgggggtagcagcctggtggacacagggcatagggttgggaccaccgcagtccaccacaccccacccaccgtccctaccctggcaggcccttctctgcaggatgcccctctgggaaggccggggattggaaaggcagggcctggatctccccaccccactgagccctgaacgctgcctgctgaggagccctgcccagtctcatcgggccccccgagcagccctgagtcccaagacccatgttcctctcccatggcgggatactcctcccaaacttcccaccagtccctccttcacgtcactggttctcagctcagacaccagcacccggcaggggcctcccctgacctgtgcctgaaatgctccccaacccg

SEQ ID NO: 20186 - DNA, 1098 bp, Artificial sequence
  DNA replication origin
ccccacaggacaccgacaccccagaagaaacaaaatgggtcacagcagccccccagggctgatacacatcggaggtgggtctgagctggggggggaccaaaggggcagagcccaggaggagaccagcaccccccaccgatccaaggccccacaggcttccccaggatgggcccggccaccgcagggctggcagcagagggcagcttaccttcctccggcctgcagacgacttgggaggagttggtacacacgctgcaaagcaagcacatggctacaagtcccactccactgacaacgcgcccacgctgctcagacccccagcttccccatgtggctagtaccgagcccaaagcccccaggcactgccccaaagccagctccggaagagccccccactgggttgtaactgtgggaacagagcaggggcgaggagaggaaggaaaaagccagacccagaggatgggatgagaacagaagaccccccgccgcagtgagggactggtacctctgtagcctggctcctgtgtgcatgtgtgactgtgtgactgtgtgtgcttgtgtgtctgcctccatgcatgtgtgcatgtgtgactgtgtcaccgtgagtgtgtacctgggtgtctgtatctatgcatgtgtgcatgtgtgcattatatgactgtgtgaccttgtgtacctgtgtgtctgcatccatgcatgtgtgactgtgcgactgtgtaattgtgtgtgtctgggtatctgtgtctaggcacgtgtacatgtgtgactgtgtgtgcctgcgtgtcagtgtctgtgcatgtgagcatgtgttcatgtgtgactgtgagtgcatctgtgcacgtgactgtgtgtgcctgtgtctgtccatgcatgtgtgcatgtgtgcacgtgtgactttgtgtccatgcatgtgtgcatgtttgactatgtgtgtgtgcctgcatatctgtgtctaggcatgtgtacatgtgtgcagtgtgtgcatgtgtgactgtgtgactgcgtgtctgcatccatgcatgtgtgactgtgtaactgtgtgtgcctgggtgtctgtgtctatgcatgtgtgcatgtgtgactgtgtgtccttgcgtg

SEQ ID NO: 20187 - DNA, 6248 bp, Artificial sequence
  DNA replication origin
ggtgctctggcagcaacacagcttgctggccaagccgatggccagcaagaggcgtccagaaggcactggctgtggcatgccgtccaccaggaaaaggccccaaggaggggctgcagccagaagcaggtggacccgcaggcacctcactggcagcctctctctgccccccagccttgatgggctcccacagcaccgcatcacatagcagtgggcccctgaagaaggccgtcttatgggcgagcaggatagccaagggctccactgcccagcactggccggtgtcagcagctcctcagaaggctgtcctatgggcaagcggaatggcctttggcttcactgcccagcactggccagtgtcagtggcttctgcccacacagtgaccaagcttcgtgggcagagaggcgcccagaacgtgccttgagccttcctgggacagtcctgcccggcacaaggggaggaagaagcatcccaggccagaggaaccaagcggctctgcttacctggaggggacgtggtggtgctgggcggtggagacagtgtgtggcctccgctcgtggtcgtgggtgccgtgggtgtggagggtggggccgtgctggtcatctcaatggcaggtggtagggtactcagaagggtggttgactccgtgagaggggaagaggtggaccgagaggtctgaggggttgaggactcaggcggaggattggatgtggtcaactcagcaatcggtgctgtgcttgtgtgggtggggggccccgtgcttccagtggtgggtgttggggttggggtcaccgtagtggtggtgctgatgggtatcatggttggggtctgtgtgccggtgggtgttggggttgcggtcaccgtagttgtggtggtgatgggtgtcacggttgtactctttgtgctggtgggtgttggggttggggtcatcgtagtggtggtggtgatgagtaccgtggttggggtctgtgtgccggtgggtgtcggggttggggtcaccgtggtggtggtggtgatgggtgtcgtggttggggtctgtgtgccggtgggtgttggggttggggtcaccgtagtggtggtggagatgggtgtcggggttggggtctgtgtgccggtgggtgttggggttggggtcaccgtagtggtggtggtgatgggcgtcaatgttggggtctgtgtgccggtgggtgttggggttggggtcaccgtagtggtggtggtgatggctgttggggttggggactgtgtgccggtgggtgttggggttggtgtcaccgtagtggtggtggtgatgggtgtcgtggttggggtctgtgtgccggtgggtgttggggttggggtcaccgtactggtggtggtgatggctgttggggttggggcctgtgtgccagtgggtgttggggttggggtcaccgtggtggtggtggtgatgggtgtcgtggttggggtctgtgtgccggtgggtgttggggttggggtcaccgtagtggtggtggtgatgggtgtcgatgttggggtctgtgtgccggtgggtgttggggttggggtcaccgtggtggtggtgctgatgggtgtcgttgttggggtctgtgtgccggtgggtgttggggttggggtcaccgtggtggtggtggtgatgggtgtcatggttggggtctgtgtgccggtgggtgttggggttggggtcaccgtagtggtggtggagatgggtgtcggggttggggtctgtgtgccggtgggtgttggggttggtgtcaccgtggtggtggtggtgatgggtgtcagggttgtactctgtgtgccggtgggtgttggggttggggtcaccgtggtggtggtggtgatgggtgtcgtggttggggtctgtgtgccggtgggtgttggggttggggtcaccgtagtggtggtggtgatggctgttggggttggggcctgtgtgccagtgggtgttggggttggggtcaccgtggtggtggtggtgatgggtgtcatggttggggtctgtgtgccggtgggtgttggggttggggtcaccgtagtggtggtggtgatgggtgtcgatgttggggtctgtgtgccggtgggtgttggggttggggtcaccgtggtggtggtggtgatgggtgtcatggttggggtctgtgtgccggtgggttgttggggttggggtcacccgttattggtggtggagaatgggtgttggggttggggtctgtgtgccggtgggttttgggggttggggtcaaccgtagtggtgggtggtgatgggtgttgatgttggggttttgtgtgccggtgggtgttgggggttggtgttcaccgtggtggtggtggtgatgggtgtcagggttgtactctgtgtgccggtgggtgttggggttggggtcaccgtggtggtggtggtgatgggtgtcgtggttggggtctgtgtgccggtgggtgttggggttggggtcaccgtagtggtggtggtgatgggtgtcgatgttggggtctgtgtgccggtgggtgttggggttggggtcaccgtggtggtggtggtgatgggtgtcggggttggggtctgtgtgccggtgggtgttggggttggggtcaccgtagtggtggtggtgatgggtgtcgatgttggggtctgtgtgccggtgggtgttggggttggggtcaccgtggtggtggtgctgatgggtgtcgttgttggggtctgtgtgccggtgggtgttggggttggggtcaccgtggtggtggtggtgatgggtgtcatggttggggtctgtgtgccggtgggtgttggggttggggtcaccgtagtggtggtggagatgggtgtcggggttggggtctgtgtgccggtgggtgttggggttggggtcaccgtagtggtggtggtgatgggtgtcgatgttggggtctgtgtgccggtgggtgttggggttggggtcaccatggtggtggtggtgatgggtgtcgttgttggggtctgtgtgccggtgggtgttggggttggggtcaccgtagtggtggtggtgatggctgttggggttggggcctgtgtgccagtgggtgttggggttggggtcaccgtggtggtggtggtgatgggtgtcgtggttggggtctgtgtgccggtgggtgttggggttggggtcaccgtagtggtggtggtgatgggtgtcgatgttggggtctgtgtgccggtgggtgttggggttggggtcaccgtggtggtggtgctgatgggtgtcgttgttggggtctgtgtgccggtgggtgttggggttggggtcaccgtggtggtggtggtgatgggtgtcgtggttggggtctgtgtgccggtgggtgttggggttggggtcaccgtagtggtggtggagatgggtgtcggggttggggtctgtgtgccggtgggtgttggggttggtgtcaccgtggtggtggtggtgatgggtgtcagggttgtactctgtgtgccggtgggtgttggggttggggtcaccgtggtggtggtggtgatgggtgtcgtggttggggtctgtgtgccggtgggtgttggggttggggtcaccgtagtggtggtggtgatgggtgtcgatgttggggtctgtgtgccggtgggtgttggggttggggtcactgtggtggtggtgctgatgggtgtcgttgttggggtctgtgtgccggtgggtgttggggttggggtcaccgtggtggtggtggtgatgggtgtcatggttggggtctgtgtgccggtgggtgttggggttggggtcactgtagtggtggtggagatgggtgtcggggttggggtcaccgtagtggtggtggagatgggtgtcggggttggggtctgtgtgccggtgggtgttgaggttggggtcaccgtagtggtggtgctgatgggtgtcgatgttggggtctgtgtgccggtgggtgttggggttggggtcaccatagtggtggtggtgatgggtgtcagggttgtactcggtgtgccggttggtgttggggttggggtcaccgtagtgttggtggtgatgggtgtcgatgttggggtctgtgtgccggtgggtgttggggttggggtcaccgtggtggtggtggtgatgggtgtcggggttggggtctgtgtgccggtgggtgttggggttggggtcaccgtagtggtggtggtgatgggtgtcgtggttggggtctgtgtgccagtgggtggtggggttggggtcaccatagtggtggtggtgatggatgtcggggttgtactctttgtgccggtgggtgttggggttggggtcaccgtagtggtggtggtgatgggtgtcgtggttggggtctgtgtgccggtgggtgttggggttggggtcaccgtagtggtggtggtgatgggtgtcagggttggggtctgtgtgccggtgggtgttggtgttggggtcaccgtagtggtggtgctgatgggtgtcgatgttggggtctgtgtgccggtgggtgtaggggttggggtcaccgtagtggtggtggtgatgggtgttggggtttgggtctgtgttccagtgggtgttggggttggggtcaccatggtggtggtggtgatgggtgtcgttgttggggtctgtgtgccggtgggtgttggggttggggtcaccgtggtggtggtggtgatgggtgtcgtggttggggtctgtgtgccggtgggtgttggggttggggtcaccgtggtggtggtggtgatggatgtcggtgttgttctctgtgtgctggtgggtgttggggttggggtcaccgtagtggtggtgatgggtgtcggggttggggtctgtgtgctggtgattgttggtgttggggtcaccatagtggtggtggtggtgatgggtgtcggggttggggtctgtgtgccagtgggggttggggttggggttaccgtattggtggtggtgatgggtgttggtgttgtactctgtgtgctggtgggtgttggggttggggtcaccgtagtggtggtggtgattggtgtcggagttgggttctctgtggtggtggttgtcatggtggtgggttgggtgacacactcacagcactgaacgttgatctcgtagttgaggcagaaggccatagggatgaccccacctggcttttggtcttcatttttgcatatcagccccacagagacatcacacaccactgtttgtccaagctgtccaatgggaacatcaggatacatggtggctctgcaagagatgttagctgcccagcctggtccacagacgtctccaatcaattctgtgtctccacctggtttgtgaaagttgggttttccagaatccagccagccagtccaattgcagagaggcacgcatggggtagtaggggttgtcgttgagaatggtgaaaatgtaggaggagttattgatggaggtagaggagtagttgttagagggctggaagtggtggttggtggaagggtggtcgtggtggttgttggagggctgggagtggtggttggtggaggggtggttgtggtgattgttggaggactgggagtggtggttgttggagggctgggagtggtggttggtggaggggtggttgtggtggttggtggagggctgggagtggtggttggtggaagggtagtagtgctggttggtggagtgatgggcgtagtcgttggaggactgggagtggtggttggtggaggggtggttgtggtggttgttggagggctgggagtggtggttggtggaagggtggtagtgctggctggtggagtgatgggcgtagtcgttggagggctgggagtggtggttggtggaggggtggttgtggtggttgttggagggctgggagtggtggttggagggctgggagtggtggttggagggctgggagtggtggttggtggaggggtggttgtggtgcttattggagggctgggagtggtggttggtggaggggtggtcgtggtggttattggagggctgggggtggtggttggtggaggggtggttgtggtggtggttggagggctgggggtggtggttggtggaagggtggtcgtgctggttggtggagggctgggagtggtagttggagggctgggagtggtgatacacttatccatgggccagcaacaattgacacgtatcttgtagtcgtaacacagtccaaatggtccatttccaaactggtcttcattcttgcaaatgaacccaacagagacatcacactgcaccttctggcctagctgctccaagctgag

SEQ ID NO: 20188 - DNA, 679 bp, Artificial sequence
  DNA replication origin
cgttggagcaggtgggcatgggcggcggctcacactccaccttcacgatctccaccgtgttgttgtacttgcacgtggccatgaagcagtcgcacagccaccaagtctcgttctcctggggacgggaggcaagggacgtcagggggaccggcacaggatggggtggtctgcgctcaggaggggcgggtgctgagccgggaggctggaggccgaagtggcttccacggacctcactgcagccagccacctcgccaggcacagcggggcacggtgaaaatgtggagggctcggcagaccctgcacccaagggttgctggaggcctcggccctcagacgaccagcaggaagtggtgcctggggcctcagctgcccggacatgctgcgcagagtgccatggggacaaagccgcctgcagcccactgacctgtctgggaggatcaaagtctgggcactcggggggcttggtgccgggcgtcggcttggagggcgtggacgatggcttggaaggcgtgggcgtcgacttggagggcgtgggtgttggggagggcgtggatgggcaggaccagttatagaactccaacgtacagctcagtgagcagttgacgaaataacaggtgtctccgtatgtgccgttgtacacctcctcacctgcgaagggagacagacccacgatcacacc

SEQ ID NO: 20189 - DNA, 1938 bp, Artificial sequence
  DNA replication origin
gtcggcagggttgacctccgtggcgaggtaggtgccgtcttccacgcagtgggtaacgggcttctggctgcacctcttgggttggcagatgatgccacttccaccctccaggcagacacagttcttgcagtcgaactcgaagtgctccccaaactgcagggaaagaagggtgagtagagaggacaggtggcaccaggcaggccccacctcaccacagccccggagctgcagctgtggtcagcggggagaaacagccaccctgagcagagtgctgagggatcctgggggaaaaccatgtccctcctcacttctgagcacaccaggcaggttctgggataggacagtagctgctcattcactgatatcacaaagccattacctgctcaccagcatcgacaagcaggggcttggcacgtggcaaattctccactcaggcctctcaggtttgtacagaatttagctaaggaatcatccacatggctgctaccacaggtaggaggcatgggcagcacagaggtggccaagatgtcatgtcagagcttctagacagagtatcatatgaccaatgggtggtgaatggagggagggagaatggatggataaatgggtggatggtgggtggatggtggatggatggatggatggttgggtggatgcgtggatggatgggagggtggatggtagatggatggtggatggatggatggatggatggatggtggatggttgggtggatggatgggtgggtggatgggtggataggtgggtgggtggatggtagacagatggtgggtggatggatggatggatggatggatggatggatggatggatgggtggatggataggtgggtgggtggatggtagacagatggtggatggatggatggatgagtgggtgggtggatggtagacagatggtggatggatggatggataggtgggtgggtggatggtagatggatgatgggtggatggatggatggtggatggttgggtggatggtggatggtagatggatggtggatggatgggtggatggttgggtaggtggatggtggatggatggatggatgagtgggtgggtgggggggtgcatagatgagtgggtgatgactaggtaggtggaaggatggaggggtaggtgagtgggtagatgggtgcacaggtggatgagtgggtgggtggaaggatgggtgggtgagtgggtggtgtccatgccaactcagccatccaggacttagatgacctcattcctcaatctttgaggctccaggttttcatgtccatccctcactccccagaattcagaatttgtggaaggatcccccagcaacacggtggggcctacctctctgggcacattgtcaggtcccacacagcctaggaagagggaagaaacaagttgtgttagcagagtccttgtgcagcagggagcaggggtgggggtggtcagcctcctggtcccagcctccatggacacccaggagacaagttgtgttagcagagtccttgtgcaacagggatcagaggtggggggtggtcagcgtcctggtcccagcctccgtggacacccaggaggaggcaggagggaggcaggaggggacagtgtgagtgggtggcgtaccgcaggtcttcacgcagacatcaaagccaggagcgtagttcatggtgccctcaggacagaagcagccttccaccaggactgtgttgttctgctgggaggagctgggggcgggagggcattgtcagacaggtggggtggggctggggagctggcaggtgggactgctatgcccagatgatgccaccctccgcactgcagaaggcgagcccacggtcctggtggaccctcaaacaacatacctggatttgcacgtgggctcttctgcagggccacaggcctggtactccctgtgagatgggcactccaccact

SEQ ID NO: 20190 - DNA, 830 bp, Artificial sequence
  DNA replication origin
gcttggcctgggaggagccaccctcacggccgcgtgcacaccctgtcttcagagtgcaacaccagcctgtgcaaagagaagccctccgtgtgcccgctgggattcgaagtgaagagcaagatggtgcctggaaggtgctgtcctttctactggtgtggtaagcagggctggtgggcagggcagggaggaggctgccgcccggggtggggtggctgtaagggggttggctccctcctgggggtctcagattctggggacacagatggctgtacgcttggctgatgcacccaccccagccctgagcgctcgctccatccactgggtgtgcaccgggagtgggggtctggccaggtggccgccccggggcagtctccaacgaacggccttctccgttctttctcccaagagtccaagggggtgtgtgttcacgggaatgctgagtaccaggtgagccctgggctgggtgagagggaggaggggaggaggtcggctgcagcgtgggggtcctggcaggctgttgggctggctgggatgctggagaggcccctgcctcatgtctctccctgtgcccgaagcccggttctccagtttattcctccaagtgccaggactgcgtgtgcacggacaaggtggacaacaacaccctgctcaacgtcatcgcctgcacccacgtgccctgcaacacctcctgcagccctgtaagcggccaccctcctccttcagcctgcccttttccctcctcccagacaagcacccgggcccatgtctgcatcgtgaccctttctttcctcctttcaacgccaacctgtccctgtccccacctctccatc

SEQ ID NO: 20191 - DNA, 762 bp, Artificial sequence
  DNA replication origin
gggcgctggggataaagtcgggggctgcaccgtgactggacggggttggggggagcccctgcgtctccctgcccctccgttggcaccaaccctgcctccacctgaaggggcagctccctccccaccctcaacacctgcactggagttctggacacagagaacccaaaaggaagatcctgagtgggcagaaggggcggggcctgtcctaggaaaggggtggggcctgctctggggaaggggcggggcctcctctagggaaggggtggggcctgctctggggaaggggcggggcctcctctagggaaggggtggggcctgctctggggaaggggtggggcctcctctagggaaggggtggggcctgctctggggaaggggcggggcctcctctagggaaggggtggggcctgctctggggaaggggcggggcctcctctagggaaggggtggggcctgctctggggaaggggcggggcctcctctagggaaggggtggggcctgctctgggaaggggcagggctgtctggggaaggactggggtcagggctcatgctctcctggagcttcccgggtagcctctgctttaaagggcacagcagggaagagcaggcaggggcctagccgtacccgtgtccacgctgcatcaccaggggaagcccctcttcgcagctgcaagctgggagacagatgaggaaactggagggagcctgaccacctcttccttaccaggtctctggccgcagtgcccccaccccgccctg

SEQ ID NO: 20192 - DNA, 821 bp, Artificial sequence
  DNA replication origin
tcctcctggggccccgccctctttggcctctgtggtttggagattccactgagccacagactcaggatttttgggcagccctgaggcaccccccgtctgcacagcgaggtgaggccaagcaggccactagtgctgccggccgttggggcaggaggggggcgtgcaatgggcagtgggcactgggcactgggtcccatgccgagcccgtgccaggggcaggaaagtgggcactggttcatgggcagcccccagggctccccgccaggtatccgggcaccgcaaaggggcacccgcagtttaccacccgccgcaatcagcactcctggcaggtggccagccacacgccaccctcccaccgccccagggctgcccatccctgcaggccacccccttccaagtctcccgggcccctcccatgtcgagagcccatggggagggcagtgcagcccttgctggcctccacaccctcaaggacatgctctgtccccagacgcctgagcaggagcaggagtgagggtgaggcagcgagaggccaggagggtccagggctctacagcgaggttaaaggtttgcgggtgtgcctagcagaaggctctggtcagcctggtctgtgaggaatccgggcactgcctgggcccctccaagaatgccaggagccatagaagggtcaagaaagggtcagggtcaaattgcggtgtcagcggtggggtccgggtccaaacagcccctgcctccagccagaccagcagaagccaagaggggcctcccaggagaacatggcccctgccgtctgcaccctcctcacttttccaagagcagca

SEQ ID NO: 20193 - DNA, 1107 bp, Artificial sequence
  DNA replication origin
ccctctgtcctcaggcaggtgcatcctctggccctggggcaggtcagtcatctctccctggggcaggtgggtcctctattcctggtgcagatgttgagaagctaagtcttgggcagaaccagatgtgagcagcctgaattcagaccccacatgaacaatagccacgggctatctcctgaaccacccctgctctctttccacaccccaaggaaccacctcctgggctgtttaagtcagaactcttggagtacctgtcccatcctgacgtccctccctctggccagacaagggaccccagattgtaggacatgtctggtctctgaggaggaggctgaagctgacagcacctgcactaggtggacagaacaggtctgagaaggcccaaaggacagagaggcatgttatggtgtgaatatattcctcaaagttcatacattggaaatctgattgccattttaacagtatgaaaaggtgcagcgttaaagaggtgaacagcatgtcatgctggggttccacggagctctgtccccgcatgtcctaaagggggactgaggctggattttactgcaggtgatgctggacacagcaaggacaggaccaaagcctctgtggcctgaatgttatggagggattgagaaaaaggacagtctaaaaaattgtcccacatgccttcagccagcattgcatcccatatgatgtactaatggaaggagagacagagagaggaggcagagggagggagagagacagagagaggaggcagaaggagggaaagagacagagacaagaggcagagggagagagagacagagagaggaggaagagagagagagagaggaggcagagggagtgagagaaacagaggaggcagagggagggagagagaaaaaggagggaaggaaggaaagacggagggaggaaggaagggggagggggaaggaagaaggagggagagagagagggaagagggaggaaggagggaatcaggaggaaggagggaagagggagggtacaagggagagaaaaagaaaaaagagatagaagggaaaagagaaagaaagcaagagaaggaaagagggagggagagaaatgatggagagagataga

SEQ ID NO: 20194 - DNA, 1276 bp, Artificial sequence
  DNA replication origin
ccttcgtcccaagccacccgagtgttggctgccgagggctcggccctccttccctgggaactgccctccccagaaagccacctcgcccaaggccacagcgagcctgcgtgcaacgcctgccacatcgggggacagaacccagcctgggatgtctcccaaggcctcccggctccagagctccagggtggctccctcggcagctcagcctgtcccacgctccctccatgctcccctcacccccagctggtgtcctgagagccccgctgacccctgcccacatatctggggcagtctgcctctgggcccccagcctcagacggcctgtgtggctggacagtggggtgcgtgtggggctgcagcgggggacacgggaggcacatggaggtcgggacccccaggcctcggcccccctctggagccctcagggcctggacaggggcaggcaggctagaggggcacccacctcaggagcctcctccaacggaggtgggaacagattgggggtcgagaggggaggccggggctgggtgagggtgataagacctgggccggggggcaggaggctggggaagagcggccttaggggggcccagcctcctcctccactcggggactgtcctggctgaggtcacagcatcagccacgtccatccccatccctgcctttctgctcccccagccctgcctcctacctgggtccccccagcgacccggccccagggcagtgcgttggccaataacgtctctcgttggctccagagctcacaggttcactgtgaatgtcaggaacccgggtgtgtcctagagtcaggacagacagcgtcagacctgggctcagttggctgcgtgcttttcgtgggtgtgtgtgtgtgtgtgtgtgtgtgtgtgtgtgtgtgtgtgctacacagcagttttacctgtacacacaggcttcaaggaaaggctagtagtcatgatcaactgactcttacgcatcttcttcacaacggtggctgtttctgagctgcagctgtgctggggtctctacagacagcgttttgccacaggccttctgtagcatgtgatactgtccccatttaactcgagagcagactgagatgcagagctcaggagacctcaggtcacaggcggggggacaagccctagagggtccacagaaccagagcctcccaaaagcccagattgacccagctgccaccagccctgccaaagtccgtccccggccgcagggctgctgtgaagtggggcaggggtgcctgctgagagccctgtccacc

SEQ ID NO: 20195 - DNA, 1618 bp, Artificial sequence
  DNA replication origin
ggacctgggaggtgggttcctagagccctcaggaggcagggtcaggtccagctggcttcctggaggtggtggccagcagaaaggaaggagagagaccagggagaaaccccggctggggcccagggtccctaaggacagcatcccgcgccccctcccactcccgcgggcctcgtcgctcgcccaccctggcctggccccgcagtctcaggacgcctggtacctgcttgtttgctcagggcgccccctcccctgcctgcctcgtggggcagggctgtctagacagcgggggctccttggcccaccggctttgtccccagagttccccgagcagaagaggcggccacagacaaaagggtgtttgcctttcccccacagccaggcagctcccctgtctccatggctccaggccagcctgtgaccccaggcccccacccagagggacacacccaggagctgggcctgtggctccctgaggggtggggtgaggaccgacaccaggacttgcttcccacaggggcttcctgggggtgcctccagccgagtctggggcacagggcagggctctgatgagtggaggttaggagggcgccgtgagggctggcaggagctcaggcagggggagtgaggaggtgggaggtgggcagagtggggtgtggcttccagcaggggccccctgacctggcaggtgtcgggcagaaagccaggccagctgtggcggatgcaggtgggctctggggtggggcagatgaggagggcccgggtagctgtgggtctgtgcccacctggcctggcccccaggcacctcctctgcttggcccccaggttctcccagcaccctgggcttcttcaagtccccctggcctctctccctctcatctcaggtggcttcccaggcagccctgcccctaaaaccagcacctagagcgtccctgcctgtgccagcaccctctccccacccggctctgccagcctgattccctcacgtctgagtttcctccacccgatttcctggcatattttatgtcacggtcctgcacggttgtcaggtgcccaggcctgtcttgggatggagggggctctgacagtgagcgagacagcaaatgtcccaagactcagtttctccgtttctgagcagggcttccccctgccaaggactcggccgaatggcacgtggggacactcccggtgccctggcccagtggcaaccctcccccggccccttcatctgtgtcccacatgctggggcgctcacggattttgtgaatgaacaaggaacaagggaggcagcgcctttgaaacccagggtaggagcacaaagccaccaagacccggctctcctgcacacccttgccccgagcccgccacgggcagccagatagcaggcagctggagcgaacccctgatccaggcccctggccctgcgccggctgaggggtgagagctgggcagagcgtatctgacctgggaacacccacctcacctaagcctgcccagctccacctgagacaacatccgggccctgataaagccagttgtgcaccctgggggcatgcaccatgctaatccgcttatctgctgggttggtctcagctgtgcccaaaaggagtccacactgggc

SEQ ID NO: 20196 - DNA, 1801 bp, Artificial sequence
  DNA replication origin
aaagaaaacaagaatatcgattcactgaaaggaaagcaggcaaagaagatcgaaggaacaaagaatgcatgggttacacataaagcaaagtgcaagacggtgggctgaacttgccctacctgtaaaacagcaatattgaagcgatgataaaataaaacatgtctgagtcaaagcaagacttcatttattcggctagttgagagtctctcacgtgtcattcatcaaggtgcacaaaaccagacaagatccttcttgtcagtgggataagagtttagtgggatcataatatttcagttgtataatctcatcaatcaatgggtaactgcagaagggaacacatttctgtggggaaattcaatacggggagctgagcggggtgtaggcaggggagatggccttgcacggggtggctgggggaggcggggggtggctgggggagggagggggtagctgggggaggcgggggtggtgggaggaggcggggtgctcagacagaagcagctgcagggaagccctggggtgggggaacaggccctggaaaactgctaaggcaatcaattagaaagaatatttcccatgcatttttcctgcaaacagaaaggactggaagacatacatcagcccatcaagatacaatctcagcaaaaaaccacaaaagcggcagacaaaaccaaacctcaagaaaggcaaagttgtacattcagaaggtctggaatgactgggtttaggggtcatcccggccatttgctgcaatggctgccacagattgcaaagagcacagtcaattcttggaggaggacaaggggaggtgtcatgtttacaatccagagtgcacagcccagaactgagacctggaaaggaggggccagcaggaggaagggaaggggtagtgacgtctcttccacacgcacaagcaaatcagggtcactcatagaaacacagatcccagggttaaaaggatgacctctatagtcatgaaaacagagtgaagacctgcaagaggaaacggcaaagggagcacaaacccggctgcacaagaacagaccggagaaaggtcaggactctcaggccagggactgaggagccagcgataagccatggcagtaaaggctgactgaatgcccctatgaaaaggaggctggagatggggctgaaaagaaaagagcacgcccacagcctcactgcacgttgtttgaaagagacacagctaaaacgaatgccccagcaaagttaaaatcgaaaggcaacatggccgggcacagtggctcacgcctgtaattccagcactttgggaggccaaggtgggtttgaggtcaggagtttgcgaccagcccggccaacatggtgaaaccccgtctctactaaaaatacaagaattagccgggcgtggtggcgcgtgcctataatcccagctactcgggcaggagaattgcttgaacctgggaggtggaggttgcagtgagctgagattgcagtgagctgagtgccactgcactccagcctgggtgacaagagcacaactccatcaacaacaacaacaacaaaaagcaacaggatatgagacaaaagccagcagaggcagagctgtggccgtagtattaataaatcgaaaggcggggttaagatatgaacaccgaacacgacaaagaggatcagtttgagtttatagaagaagcagaagaaacaatggtgatttattttgatttttactcattaaaaaacatagtgctgctgctcccagatgatggcatagctcttcttttccctgtcttcctcctaagtacaaagaagaatcctgaat

SEQ ID NO: 20197 - DNA, 1633 bp, Artificial sequence
  DNA replication origin
ccagttttttttgggtggacattgacaagcgccttctaaaatttatacggccatggaaaagacctgggatagccatgacgatcttgacgaagcagaaaaaaacatttccaagacttagaatgaagctcttagtcgagacggagtgacattgatataaacttagacattcagattaatgagacgaactgagagcacagaaataggctgtcacctgtaccgggcaaacacaccgaggaaaaccaagagtgccagtgtgtgtgtgtgtgtgtgtgtgtgtgtgtgttcacagggttatgtgtctgtatgtgtatgtatttgtaggcttgtgtatgtgtttctgtgtttgtgtgtttgcagggttctatatgtgtttgcatgtgtgtgtatgcaggttgtgagtatgtgcttgcgtgtttgtgtgtttgaatggttgcatgtgtttgcatgtgcgtgtgtttgcagggttctgtgtgtgcacatctgcttgtttgcatgtgtgtttgcagggttgtgtctctgtttgcatgtgtgtgtgtttgtgtatgtatttgcagggttgtgtgtgtgtctgtttgcatgtgtgtgtttgcagagttatgtatgtgtgtttccatgtttgtgtgtttgcaaggttctgtgtgtgtttgcatgtatgtgtatgcaggtgtgtgtgggcttgtgtgtttgcatggttgtgtgcgtgtttgtgtgtgtgcttgcatgttgtgtgtgctttgtgtgtgtgcttgcatggtgtgtgtgcttgatgtgtgtgtgcgcttgtgtgtgtgtgtttgcatggtacgtgtgtgtgcttgtgtgtgtgtttgcatggtatgtgtgtgtgcttgcatagtgtgtgtgtgcttgcattgtgtgtgtgtgctttgtgtgtgtgcttacatggtgtgtgtgtgctttgtgtgtgtgcttgcatggtgtgtgtgtgtgtttgcatggtgtgtatgtgcgtgtgtgtgtgtttgcatggcatgtgtgtgtgcttgtgtgtgtgtgcttgcatggtgtgtgtgtgcctgtgtgtgtgtgcttgcgtggtgtgtgtgtgtttgcatggcgtgtgtgtgtgcttgtgtgtgtgtgcttgcatggcgtgtgtgtgtttgcatggtgtgtgtgtgcttgcatggcgtgtgtgcttgtgtgtgtgtgcttgcatggtgtgtgtgtgtgtttgcatggtgtgtgtgcgcttgtgtgtgtgtgtttgcatggtgtgtgtgtgcttgcatggtgtgtgtgtgcttgtgtgtgtgtgtttgcatggtgtgtgtgcttgtgtgtgtgtgtttgcatggtgtgtgtgtgtttgtgtgtgtgtgtttgcatggagtgtgtgtgtgtttgcatggtgtgtgtgtgtttgcatggtgtgtgtgcgcttgtgtgtgttgtttgcatggagtgtgtgtgtgtttgcatggtgtgtgtgtgtggactgctactgctgccatgtcgctgcagttcaatgggtttgtgcgttgtgatcacacggtcctgcccacagagctgaatgggctattggggtttccttgggtgagtcccaggctgtgtgtggggtgagtgtggggcctttcttgcaccgtttagcctggcacgcgttgccctctct

SEQ ID NO: 20198 - DNA, 1059 bp, Artificial sequence
  DNA replication origin
cggcccgcaccacatccggtggggaaagccccctgtggatggcttcggccccacagagctgggggaacagcctggggtgccccagggccacttcccctggaggagggagtgaagagggtcctgctccccaggaccccccagaactccctgggagccccttagacacccccacaggtgtgtatgttccaggtttctcagccccaccaggccgagcgcacactgttgggggcacctggcccagtctgccctccagcagcatcaggagaggcccccagcccggcctgagcccagccaggacaccccagcccggtggttactggccaggtgagcaggggagggaagcactggtttcaacatcgcaagccctgggctgggctcacactctgcccccagcctgtcgcttccatcccagtttccgggcacagcccctaggaggtgacctgcagggccgctggggtcagcctggctctggctggcaggacctggggaggccacgcctaccctaaggcacctggggtggagggtgggggtctgtcctggggagaccaggggagggcagctccacacaccctgcccacaggagaccccagggctctgtggagcagacatcttcccttccaggcggggggtggcgtaggactccagcagctcccgctgtggggccctgagcccgtgcattaccctcctgtaccatctgttaaatggctcatttaaagcccgctgctcagagccctgctgccctaggaggaacccagccatgcacccccacagcgtccaggcatgctaggtcccctaggaggaacccagccatgcatctccacagtgcccaggcatgctgggtccagaggtgagctcagtgccagcccgccccaccctcctcctagacttgggaccactgggggcctgcaaagtgcctgtgtcctcatccacaaaacggggtggagccaccatgttctgccatttctgccacttccatgctctgaacatagcctctctcatgcctggtggttcagaaaatgatggtagcttagcacctgtgaccctcagtctcgccaaggc

SEQ ID NO: 20199 - DNA, 1186 bp, Artificial sequence
  DNA replication origin
cacaggcctcagaggggaatctgaggtggtcactgcagccttgctgggggctctcagagggtgcaggcagggctggccgagccgtggcgcagccacctgcctcctgggaaccctccctgaggcctaaagctctcagcatatgcccgggagtcccacccaccggagggctccatgccatctccagtcccctcagctcccaacccccatccagcacaataactcctcctgctgcctcccagcaggggccctggccaggccggctggataccttcccccagcctggggccggtgtcagctctgagaccggcagccaggacaggtgtaagaccagcgacttggcctcaaaatcaggatcactcttcccccgtgagctcccgaccccccgtggtagccaagcccagcacttgcatctcggaaccctgatgccccggccaccctgcccgcagcgccgaccacttagcgggcacggctgcgcatgcggtccgggtggggctgcagcaggggcctgggggccggtgtctgaaaagcaggcgcaacccctaaagcagaccctgcctcagcccctgagaagggtgatgaccccaccgggcaggagtccaccctcctgacttgaacctgcaccctcaggtgagaggcaccttcagggaaggtgtgtgcctgggaccagcagctgcctgtcatctggaaagtgtttgcaggagggtccccagggcggggacagtgccgggcaggtgggagcttttgcttctgtgggatgtgcaggaggaaagctgtgcatgggggtggcacgtgggctccgccgggaccgcagcccacaaaccttcactgcactctggtgcgggaggccccacagctctggtcctgggcggccgccagtgcccctctctcctcgggatctgacaggtgaatgcagacaggagggcactggagaaagggcgggggtcacgggcctgataggagctcccagccaggtattgccacagagacaacaggattgggaatggagggaggcccggccacatcccagggcagcactgtctcctgccgccaggtgctgaccccgcctccggccccctggacttgggaggaattgtgtcggttagctgtttgtcctgggtgactaactcaagtgagattaaccacggcccgcaccacatccggtggggaaagccccctgtggatggct

SEQ ID NO: 20200 - DNA, 1347 bp, Artificial sequence
  DNA replication origin
caggcagtctcagagcaagaagaaccctctcccggtgtctccgtgccaccctccactgtggcctagtcggactctgccccgccgtccctcgtctgtaccaccctcatctcagaagcaggaattctgtcccggggctgctcccaggagagggcggagctggggctggggtctgcgggggcttagaaggtgggggcaggcctgggctgggactagataagtgaggctcaggccgtcatctccgtctcccccacggggcttgcagatgctaacacccctccgcccactgacggatttgatgcagtgggccccactggggccagagggtgtgagggcgaggggggtctcccagcctggcctgaggacccctatgccagttgcgggaactggaaagctggggctggggtgcaggcgaatcacagctttccctaagacccctctctgcaggtcctgggctgggccgggcgcccctcccaccatgctggtgctgtgcggggctgtgcggggctgtgcggggctggggtccagtcccacgatgatggtgctgggcggggctgtgcggggttgtgtggggggtctggtccccccatgctggggtgctgtgcggggctgtacgaggctgtgaggggctgtgcgaggctggggtctggtcccaccatgctggttctgtgcggggctgtgcggggctgtgcggggctgtgcggggctgtgcggggctgtgcggggctgtgcggggctgtgcggggctggggtctggtcccaccatgctggctctgtgcagggctgtgcggggctggcgtctggccccaccatgctggttctgtgcggggctgtgtggggctgtgtggggctgtgcggggctggggtctggtcccaccatgctggctctatgcagggctgtgcggggctggggtctggtcccaccatgctggctctgtgcagggctgtgcagggctggcgtctggccccaccatgctggttctgtgcggggctgtgtggggctgtgtggggctgtgtggggctggggctggtcccaccatgctggctctgcgacgggctgtgcggggctgtgtggggctggggctggtcccaccatgctggctctgtgcagggctgtgcggggctggggtctggtcccaccatgctggctctgtgcagggctgtgcgaggctgtggtctggtcccactatgctggctctgtgcagggctgtgcggggctgggccgggctgaaatctggtgacattctgcacattagcacagtctctatggaccctgaagatcagcctcctgcagggtctgctgcttgtagggaggcagggtcctccaggtggtcttggggccgacccctc

SEQ ID NO: 20201 - DNA, 1638 bp, Artificial sequence
  DNA replication origin
gctcctctccctcactagaaaaccccactccaccatcccagtccccgagagggaggtgtgctaggaggcccccaggtgtggacacccaggcacacacagaaatctgcatgcaccctgaggaggccacactctgcaacgccaactataggaccctctgggaaagacagcactcagaaggtgcaaatgccagcagctgccaggggctgggcgagagaggggtgaggagctccaaggggtttcagggcagtggagctgtctgcgtgaaacttcctggcaggaacaagacactgcacatctgtcttaaacgtggaatttcaccaccacgagggtcgctgatgtcaaccatgacctgggaggtgagggtaccagtgcagcctccaccccagcgcagggtatcatcatagggaaactgtgtattgggtgcagggtctcattgtgggagactgtgtgttgggtgcagggtctcatcgggggagactatgtgttgagtgcaaggtctcatcttggggagactgtgttgggtgcagagtctcatctgggagagactgtgtgttgggtgcagggtctcatcttggggagactgtgtgttgggtgcagggtctcatcgtgcagagactgtgtgttgggtgcagggtctcaccatagggagactgtgtgttgggtgcagggtctcatcgtgggagactgtgtgttgggtgcagggtctcatcttggggagactgtgtgttgggtgcagggtctcatcttggggagactgtgtgttgggtgcagggtctcatcgtgcagagactgtgtgtcgggtgcagggtctcatcttggggagactgtgtgttgggtgcagggtctcatcttggggagactgtgtgttgggtgcagggtctcatcgtgcagagactgtgtgtcgggtgcagggtctcatcttggggagactgtgtgttgggtgcagggtctcatcgtggagaaactgtgtgttgggtgcagggtctcatcgtgggagactgtgtgttgggtgcagggtctcatcttggggagactgtgtgttgggtgcagggtctcatcttggggagactgtgtgttgggtgcagggtctcatcgtgcagagactgtgtgtcgggtgcagggtctcatcttggggagactgtgtgttgggtgcagggtctcatcttggggagactgtgtgttgggtgcagggtctcatcgtgcagagactgtgtgtcgggtgcagggtctcatcttggggagactgtgtgttgggtgcagggtctcatcgtggagagactgtgtgttgggtgcagggtctcatcgtggagagactgtgtgttgggtgtagggtctcatcgtgggagactgtgtgttgggtgcaggctctcatcgtgcagagactgtgtgtcgggtgcagggtctcattgtggagagactgtgtgtcgggtgcagggtctcaccatagggagactgtgtgttgggtgcagggtctcatcgtgggagactgtgtgttgggtgcagggtctcatcgtgcagagactgtatgttgggtgcagggtctcaccatagggagactgtgtgttgggtgcagggtctcatcttgggtagactgtgtgttgggtgcagggtctcaccatagggagactgtgtgttggg

SEQ ID NO: 20202 - DNA, 3301 bp, Artificial sequence
  DNA replication origin
ggccgtcggcatcggtcagctgcgagcaccagtgctgagcatacttctctgtggacagaggagggatagggttaggattaagatcaggcagcacactcatcccacccagcttggcctctggtgtggggtttgggtggccagcttctctgggcagtctgatgttgggcccttcatcctgctacacactcagcctgggtggtgtggcgccctccccgaggaaaagctcccccaaacgcagggtacaacatccagaaccgaggcttctctcgtttcctgcatgtcccacccagcccctcacagcctctcacagtgccgccttccagggacgctagtgaccaccactgtggacagacaaaccaaggcccttctggcccctccactgggctcactggaccctggcttcccaggctgcaggaagaaggccagaaccagcaaatgggatcccacctccccacggctggcgcccaagctctgaaggcgaagtgaatgactgagtgagtgagtgagtgagtgagtgagtgagtgagtgagtgaatgagtggatgagtgagtgagtgagtaggtgagtgggtgaatgggtgagcgagtgggtgagtgggtgaatgggtgagtgagtgaatgggtgagtgggtgagtgagtgttgagtgggtgagtgggtgagtgagtgaatggatgagtgggtgagtgggtgaatgggtgagtgggtgagtgagtgttgagtgggtgagtgggtgaatgggtgagttagtgaatggatgagtgggtgagtgagtgggtgagtgggtgaatgggtgagtgagtgggtgagtgggtgaatgggtgagtgagtgagtgggtgagtgggtgagtgagttcgtgagtgggtgaatgggtgagtgagtgggtgagtgggtgaatgggtaagtgagtgggtgagtgggtggttgagtaggtgagtgagtgggtgagtgggtgagtgagtgggtgaatgggtgaatgggtgagtgagtgggtgagtgggtgagtgagggggtgaatgggtgaatgggtgagtgggtgagtaagttgagtgagtgagtgaggtgagtgagtggatgaatgggtgaatgggtgagtgaatgggtgagtgggtgagtgggtgagtgagtgagtgaatgcgtgagtgagtgagtgaggtgactgagtgagtaggtgagtgagtgggtgaatgggtgagtgagtgggtgagtgagtgggtgagtggatgagtgggtgaatgagtgaatgggtgagtgggtgagtgagtaagttgagtgagtgagtaagtgagtgagtgtgtgaatgggtgaatggatgagtgagtgggtgagtgggtgagtgagtgaggtgaatgagtgggcgaatgggtgagtgaatggttgagtcggtgagtgtgtgaatgggtgagtcggtgagtgggtgaatgggtgagtcggtgagtgggtgagtgagtgggtgaatgggtgaatgggtgagtgggtgagtgagtaggtgagtggggtgaatgggtgagtgggtgagtgagtaggtgagtgggtgaatgggtgagtgggtgagtgagtgaggtgagtgagtgggtgagtgagtgaggtgagtgagtgggcgaataggcgagtgaatggttgagtcagtcagtgggtgagtgagtgggtgaatgggtgaatgggtgagtgggtgagtgagtgagtgaataggtgagtgggtgagtgggtgagtgggcgagtgagtgaatgggtgaatgggtgagtgaatggttgagtcagtgagtgggtgagtgagtgggtgagtgggtgaatgggtgagttggtgagtgggtgagtgagtgggtgaatgggtgaatgggtgagtgggtgagtgagtaggtgagtgggtgaatgggtgagtgagtgagtgagtaggtgagtgggtgagtgggtgagtgggtgagtgggcgagtgagtgaatgggtgaatgggtgagtgaatggttgagtcggtgagtgggtgagtgagtgggtgagtgggtgaatgggtgagtcggtgagtgggtgagtgagtgggtgaatgggtgaatgggtgagtgggtgagtaggtgagtgggtgaatgggtgagtgggtgagtgggcgcgtgagtgaggtgagtgagtgggcaaatgggtgagtgaatggttgagtcagtgagtgaggtgagtgagtgggtgaatgggtgaatgggtgagtgagtgggtgagtgggtgagtgagtgaatgggtgaatgggtgagtgggtgagtgagtgaatgggtgaatgggtgagtgggtgagtgagtgaatgggtgaatgggtgagtgggtgagtgagtgaatgggtgaatgggtgagtgggtgagtgagtgaatgggtgaatgggtgagtgggtgagtgagtgaggtgagtgagtgagtgggtgagtgagtgaggtgagtgagtgggcaatgggtgagtgaatggttgagtcggtgagtgggtgagtgagtgggtgaatgggtgaatgggtgagtgggtgagtgagtaggtgagtgggtgaatgggtgagtgggtgagtgggcgagtgagtgaatgggtgaatgggtgagtgaatggttgagtcggtgagtgggtgagtgagtgggtgagtgggtgaatgggtgagtcggtgagtgggtgagtgagtgggtgaatgggtgagtgggtgagtgagtaggtgagtgggtgaaagcgtgagtgggtgagtgggcgagtgagtgaggtgagtgagtgagcgaatgggtgagtgaatagttgagtcagtgagtgaggtgagtgagtgggtgaatgggtgaatgggtgagtgagtgggtgagtgggtgagtgagtgaatgggtgaatgggtgagtgagtgaggtgagtgagtgagtgggtgagtgagtgaggtgagtgagtgggcgaatgggtgagtgaatggttgagtcggcgagtgaggtgggtgagtgggtgagtgggtgagtgagtgaatgggtgaatgggtgagtgagtgaggtgagtgagtgagtgggtgagtgagtgaggtgagtgagtgagtgggtgagtgagtgaggtgagtgggcgaatgggtgagtgaatggttgagtcggcgagtgaggtgggtgagtgggtgagtgggtgagtgagtgaatgggtgaacgggtgggtgagtgggtgaatccattccccacgtccccaccactccaccctgtgcaggggtaggcggtcagggcggatgttgaccaacagagacttgtaccctttctttgaccctgaagcagatgccccacattcctgaagctccacataagctgggttgggcgccca

SEQ ID NO: 20203 - DNA, 1151 bp, Artificial sequence
  DNA replication origin
cctccgcagtgatgcagccgccctcgccgtccgccaccagcccgtcggggcacacgcagccaggcacacactgggggctgtactgcagggccagcagacaccactgagtgatggggcagggcacggggcctgccaggtcctcccagggacagctcacccacaccacagtggagggaccacaggaccagggagtccgggagcgcatgggcaggggtcctctgggacgtggggcagcccatggcctaatgtgtcagaggctcaccactgcccaccctggggacaggcgcccttagcaggcaggggcagatggagggtctgtcattggggagtcctcagggacttacacaggtcatgtccagtgtgtggcagctcttctgacagccagcccctgtgtccccgggcgtggcatttcggcagtcaaagaacaccatgggcgcagcacacactggggagggaggggccgtcagggggccagccacaggctgctgcggtgcctcaaacatgtgttcagggaggacgtgtctgtgccatgtgcgtgcacattgagtgggtgcgtgtgcatgagtgggtgtgagtgcatgtgcatgagtgggtgtgtgagcgtgtccatgagtgggtgtgagcgttgcataactgggtgtgagtgtgtgtgcatgagtatgagtgtgtgtgcatgagtgggtgtgtgtgcatgtgtgggtgtgtgtgcatgtgcatgagtggatgtgtgagcgtgtccataagtgggtgtgtgagtgcgtgtgcatgagtgggtgtggtgtgcatgagtgggtgggtgtgagtgcgtgtgcatgtgggtgtgtgagcgtgtgcatgagtgtgggtgcatgacggtgtgtgtgcatgagtgggtgtgtgagcgtgtgcatgagtatgaatgggtgtgtgtgcatgagtgggtgtgagtgcgtgtgtatgagtgggtgtgtgagtgttgcataagtgggtgtgagtgcgtgtgcatgagggtgtgaatgcgtgtgcatgagtgggtgtgtgagcatgtgcatgagtgtgagtgtgtgcatgaatgggtgtgtgtgcatgagtgggcgtgtcagcgtgtgcatgagtgggtgtgtgagcatgtgcatgagtgggtgtgagtgtcatatgtgcgccccacaccc

SEQ ID NO: 20204 - DNA, 872 bp, Artificial sequence
  DNA replication origin
ccatgaagtaggcctgtgtgtgtcctggcggaccccgagcatctgccgtgagtgcgagtgggcacctggggaagaacaggaagcgccggcagcgtgtgccccaccacactcgccgctgatgcgtggggtgtgtggggcgggtggggaaggtttccaaataaacagaaacacctgggcccagagaggagggcgtggctgacagaggggtccctggcatggtagaacgttctgggcagaggggtcagcagagctgcccagctctagagaggagggcgtggctgacagaggggtcgctggcatggtagaacattctgggcagaggggtcagcagagttgcccagctctagagaggagggcgtggctgatggaggggtccctggcatggttgggcagagggttcagcagagctgcccagctctagggaggagggcgtggctgacggaggggtccctggcatggttgggcagagggttcagcagagctgcccagctctagggaggagggcgtggctgacgggtcgctggcgtggtagaacgttctgggcagtggggtcagcagagctgcccagctctagcccacacggagccttgccgggaacgggcactgctggatctgctctgactggagaccccactctggtggcagcctccgtggcaccctgataattggggggtcccgatctggcccaccctcccctgtccccatcttgtgatggccgggaggtgcaggggagggaagcggctttagaacagccctggggtgcggggcctctgcgagtgagttcctgggaccccaccgagcccttccttcctccctgcagctctgttctgcgactactacaaccccgaaggccagtgcgagtggcactacca

SEQ ID NO: 20205 - DNA, 891 bp, Artificial sequence
  DNA replication origin
agaccccactctggtggcagcctccgtggcaccctgataattggggggtcccgatctggcccaccctcccctgtccccatcttgtgatggccgggaggtgcaggggagggaagcggctttagaacagccctggggtgcggggcctctgcgagtgagttcctgggaccccaccgagcccttccttcctccctgcagctctgttctgcgactactacaaccccgaaggccagtgcgagtggcactaccagccctgcggggtgccctgcctgcgcacctgccggaacccccgtggagactgcctgcgggacgtccggggcctggaaggtgggctggggccggtcggagggtggcctgggctccgccgcctgtggccttctcctggcccctcgaggagcctctgtggccccagcttccagcacattctggtgctgtcggcgaggcccgctgcttgggggctgggcggagccctccagagcgaggtggacgacactcggtctggttgtgactctggcctctttggcccacaggctgctaccccaagtgcccaccagaggctcccatctttgatgaggacaagatgcagtgtgtggccacctgcccaaccccgcctctgccaccacggtgccacgtccatgggaagtcctaccggccaggtgcagtggtgccctcggacaagaactgccagtcctggtgagtcctttggggggaggaatatggagcctgcagcatgcaggggaatttgaccacggcctgggctttgggtggggctgggagcggcagggctggggacctccccgttactggagttgaagcttgggtcctgtcctggcccaggcatctgtgacatcagcttctcagggaccagcacccccatgtcctgagtcccagagg

SEQ ID NO: 20206 - DNA, 3446 bp, Artificial sequence
  DNA replication origin
tggttgtcctggatttctgccaagaggaagtgctctgagttgggctggtggctctcccactaggggtgctaggagctgtcacaggtgtggaggtcacggggcaacctttaggggtctcgcagcagagcacacgcacctcgtagttgaggcacatcttgaagggtccctgctggtcctggttccggcacaccaggccctcttcacggctgcactgcaccacctggcccaggtgttcaatgctcacctccgggtggctctcggctcggcactggagcctggtgatctcctcaggtcggcggcagattttttccccactcctgatgatgttgttgtaggtttccttgtccccgccgtggggtccaggggatgggaagtctatgtcaaaccacttggtccaggtgcaccggagatgacagtctctggtgactggttgggagtgggttgtcttggatatggaaacatggcttgtgctggtctttgaaacagaggctgtgctggtggtgggaacggggctgggagtggttccaggaccaggggttgtgctggttgtagaggcagaagtggtgctggttctaggagcaaagattgtgctggtggtgggaacagggctgggagtggttccaggaccagaggttttgctggctgtagaggcagaagttgtgctggttgtaggaggagaggttgtgctggtggtaggaatagggctgggagtagttccaagaccagaggttttgctggctgtagaggcagaggttgtgctggttgtaggagcagacgttgtgctggttgttggggccgagattgtgctggttgtagcggcagaggttgtgctggttgtaggagcagaggttgtgctggtggtgggaacagggcttggggtagttccaggaccagaagttatgctggtggtagaagccgaggttgtgctggtctgtggagaggaggttgtgctgcttgtaggggtagaggttgtgctggttgtaggggcagaggttgtgctggttgtaggagctaaggttgtgctggttgtaggggcagagggtgtgctggttgttggggccgagattgtgctggttgtaggggcagaggttgtgcttgttgtgggagcagaggttgtgctggtggtgggaacagggctgggagtagttccaggaccagaggttgtgctggttgtagaagcagaagttgtgctggtggtaggaacagagattgtgctggtggtaggaacagggctgggagtagttccaggaacagaagttgtgctggttgtaggaacagagattgtgctggttgtagtagctgaggttgtgctgcttgtaggggcagaggttgtgctggttgtaggggcagaggttgtgctggttgtaggagcagaggttgttctggttgtaggagcagaggttgtactggtggtgggaacagggctgggagtagttccagggccagaggttgtgctggttgtagcagtggaggttgtgctgcttgtagggacagaggttgttctggttgtaggggcagaggttgtgctggttgtaggggcagaggttgtgctggtggtgggaacagggcttgaagtagttccaggaccagaagttgtgctggttgtaggagccgaagttgtgctggtctgtggtgtggaagttgtgctgcttataggggcagaagttgtgctggttatagtagtagaggttgtgctggttgtaggagacaaagttgtgctggttgtaggggcagagattgtgctggttgtagtagcagaggttgtgctggttgtagtcgcagaggttgtgctggtggtagaggcagagattgtgctggttgtaggggctgaggttcttctgggtgtaggagcagaggtcgtgctggttgtagtggcagaggttgtgctggttgttggggccgagattgtgctggttgtaggggcagaggttgtgcttgttgtgggagcagaggttgtgctggtggtgggaacagggctgggagtagttccaggaccagaggttgtgctggttgtagaagcagaggttgtgctggttgtagaagcagaagttgtgctggtggtaggaacagagattgtgctggtggtaggaacagggctgggagtagttccaggaccagaggttgtgctagttgtagaagcagaggttgtgctggcggtaggaacagggctgggagtagtttcaggaccagagattctgctggttgtagtggcagaggttgtgctgcttataggggcagagtttgtgctggttgtaggtgcagaggttatgctggtggtgggaacagcactgggagtagttccaggaccagaggttgtgctggttgtaggagcagaggttgtgctcgtggtaggaacagggctgggagtagttccaggaccagaggttgtgctggttgtagtggcagaggttgtgctgcttataggggcagaggttgtgctggttgtaggagcagaggttgtgctggtggtgggaacagggctgggagtagttccagcaccagaggttgtgctggttgtagaagcagaggttgtgctggttgtaggagcagaggttgtgctggttgtaggagaagaggttgtgctggtggtaggaacaggtctaggagtagtttcaggaccagaggttgtgctggttgtagcggcagaggttgtgctgcttttaggagcagaagttgttcttgttgtaggggcagaggttgtgctggtcgtgggaacagggcttggggtagttccaggaccagaagttgtgctggttgtaggagccgaggttgtgctggtctgtggactggaggttgtgctgcttgtaggggcagaggttgtgctggttgtaggagctgaggttgtgctggttgtagtggcagaggttgtgctggtggtaggaacagggctgggagtagtttcaggaccagagattctgctggtggtagtggcagaggttgtgctgcttgtacgggcagaggttgtgctggttgtaggagcagaggttgtgctggttgtaggggcagaggttatgctggtggtaggaacagggctgggagtagttccaggaccagaggttgtgctgcttgtaggggcagaggttgtgctggttgtaggggcagaggttatgctagttgtaggagcagagattgtgctggtggtaggaacagggctgggagtatttccaggaccagaggttgtgctggctggagaggcagaggttgttctggttgtaggagcagaggttgttctggctgtaggagcagaggttgtgctggttgtatgggcataggttgtactggtctgtggagtggaggttgtgctggttgtcaccaaagtggttgtcctggatttctgccaagaggaggtgctctgagttgggctggtggctctcccactaggggtgctaggagctgtcacaggtgtggaggtcacggggcagcctttgggggtctcgcagcagagc

SEQ ID NO: 20207 - DNA, 1083 bp, Artificial sequence
  DNA replication origin
agaagcaggggttgtgctagttgtaggggcagaggttgtgctggtctgtgtagtggaggttatgctgcttgtcaccaaagtggttgtcctggatttctgccaagaggaggtgctctgagttgggctggtggctctcccactaggggtgctaggagctgtcacagatgtggaggtcacggggcagcctttgggggtctcgcagcaaagcacacgcacctcgtagttgaggcacatcttgaagggtccctgctggtcctggttccggcacaccaggccctcttcgcggctgcactgcaccacctggcccaggtgttcgatgctcacctccgggtggctcttggctcggcactggagcctggtgatctcctcaggtcggcggcagattttttccccactcctgatgatgttgttgtaggtttccttgtccccaccgtggggtccaggggatggaaagtccacatcaaaccatttggtccaggtgcaccggggatgacagtctctggtgactggttgggagtgggttgtcttggatacagaaacatggcttgtgctggtctttgaaacagaggctgtgctggtggtggtaacagggctgggagtagttccagaaccggaggttgtgctgcttgtagcagctgaggttttgctggtctgtggagtggaggttgtgctgcttgtaggggcagaggttgtgctggttgtagtagcagaggttgtgctggttgtaggggaagaggttgtgctggttgtaggggcagagattatgctggttgtacgagcagagattgtgctgcttgtaggagccgaggttgtgctgcttgtaggggcagaggatatgctggtctgtggagtggaggttgtgctggttgtaggggcagaagttgtgctggttgtgggagcagaggttgtgctggttgtaggagcagaggttgtgctggtctgtggagtggaggttgtgctggttgtcaccaaagtggttgtcctggatttctgccaagaggaagtgctctgagttgggctggtggctctcccactaggggtgctaggagctgtcacaggtgtggaggtcacggggcaaccttt

SEQ ID NO: 20208 - DNA, 1490 bp, Artificial sequence
  DNA replication origin
attgtgctggttgtaggggcagaggttgtgctggtctgtggagtggaggttgtgctggttgtcaccaaagtggttgtcctggatttctgccaagaggaagtgctctgagttgggctggtggctctcccactaggggtgctaggagctgtcacaggtgtggaggtcacggggcagcctttgggggtctcgcagcagagcacacgcacctcgtagttgaggcacatcttgaagggtccctgctggtcctggttccggcacaccaggccctcttcccggctgcactgcaccacctggcccaggtgttcgatgctcacctccgggtggctctcggctcggcactggagcctggtgatctcctcaggtcggcggcagattttttccccactcctgatgatgttgttgtaggtttccttgtccccaccgtggggtccaggggatggaaagtccacgtcaaaccacttggtccaggtgcaccggggatgacagtctctggtgactggttgggagtgggttgtcttggatacagaaacatggcttgtgctggtctttgaaacagaggctgtgctggtggtgggaacggggctgggagtagttccagaaccggaggttgtgctgcttgtagcagctgaggttttgctggtctgtggagtggagcttgtgctgcttgtagggggagaggttgtgctggttgtatggaaagaggttgtgctggttgtaggggcagagattgtgctggctgtaggagcagaggttgtgctgcttgtaggggcagaggatatgctggtctgtggagtggaggttgtgctggttgtaggggcagaagttgtgctggttgtaggagctgaggttgtgctagttgtaggggaagaggttgtgctggtctgcggagtggaggttgtgctggttgtaggggaagagattgtgctggtctgtggagtggaggttgtgctggttgtaggggcagagattgtgctggttatgggagcagaggtagtgctagttgtaggggcagaggttgtgttggttgtaggagccgaggaagtgctcgtaggagctgacgttgtgctggctgtgggagcagaggttgtgctggttgtaggggcagagattgtgctggttgtaggggcagagattgtgctggtggtaggagccgaggttgtgctgcttgtaggggcagaggatgtggtggtctgtggagtggaggttgtgctggttgtaggggcagaagttgtgctcgttgtgggagcagaggttgtgctggttgttggggcagaggttgtgctgggtatagaagcaggggttgtgctagttgtaggggcagaggttgtgctggtctgtgtagtggaggttatgctgcttgtcaccaaagtggttgtcctggatttctgccaagaggaggtgctctgagttgggctggtggctctcccactaggggtgctaggagctgtcacagatgtggaggtcacggggcagcctttgggggtctcgca

SEQ ID NO: 20209 - DNA, 2294 bp, Artificial sequence
  DNA replication origin
cagaaacaattgcaccagaaacactcacgaacctgcagggtagagccggtcagccacgttgcagaagcaggtttgggtggagtaagccacagagctggatgccacagagctggatgccacagaggtggatgccacggaggcggataccatggaagtagacagggaaggatacagagcattggtaggagaagtcccatatggggtcacagaggtcaccgggcagcctctgggggtctcgcagcagagcacgcgcacctcgtagttgaggcacatcttgaagggtccctgctggtcctggttccggcacaccaggccctcttcacggctgcactgcaccacctgacccaggtgttcaatgttcacctccgggtggctctcggctcggcactggagcctggtgatctcctcaggtcggcggcagattttttccccactcctgatgatgttgttgtaggtttccttgtccccgccgtggggtccaggggatgggaagtccacgtcgaaccactttgtccaggcgcacagaggatgacagtcactggtgactggttgggagtgggttgtcttggatacagaaagatggcttgtgctggtctttgaaacaggggttgtgctggtggtgggaacggggctgggagtagttccaggaccagaggtcgtgctggttgtaggagcagaggttgtgctggtggtgggaacagggctgggagtagttccaggaccagaggttgtgctagttgtaggagcagaggttgtgctcgtggtgggaacagggctgagagaagttccaggaccagaggttgtgctggctgtagaggcagaggttgtgctggttgtaggagcagaggttgtgctggtggtgggaacagggctgggagtagttccaggaccagaggttgtgctggctgtagaggcagaggttgtgctggttgtaggagcagaggttgtgctggtggtgggaacagggctgggagtagttccaggaccagaggtcatgctggttataggagcagaggttgtgctggttgtagggagagagattgtgctggttgtagaagcagaggttgtgcttgtggtgggaacagggctgggagtagttccaggaccagaggttgtgctggctgtagaggcaggggttgttctggttgtaggagcagaggttgtgctggtggtgggaacagggctgggagtacttccaggaccagaggttgtgctggctgtagaggcagaggttgttctggttgtaggagcagaggttgtgctggtggtgggaacagggctgggagtagttccaggaccagaggttgtgctggctgtagaggcagaggttgtgctggttgtaggagcagaggttgtgctggtggtgggaacagggctgggagtacttccaggaccagaggttgtgctggttataggagcagaggttgtgctggtggtgggaacagggctgggagtagttccaggaccagaggttgtgctagttgtaggagcagaggttgtgctggtggtgggaacagggctgggagtagttccaggaccagaggtcatgctgcttgtaggagcagatgttgttctggttgtaggagcagaggttgtgctggttgtagcagcagaggttgtactggtgctgggaacagggcttggagtagttccaggaccagaggttgtgctggttgtaggagcagaagttgtgctggttgtagaggcagaggttgtgctggtggtgggaacagggcttggagtagttccagaaccggaggttgtgctgcttgtagcagctgaggttttgctggtctgtggagtggaggttgtgctgcttgtaggggaagagattgtgctggttgtaggggcagagattgtgctggttgtagaggcagagattgtgctggttgtaggagcagagtttgtgctggttgttggagcagaggttgtgctggttgtaggagccaaggttgtgctggttgtaggaccagaagtcgttctgtgtgtaggagctgaggtcgtgctggttgtaggggcagaggttgtgctggttgtaggggcagaggttgtgctgggtgtagaagcagggattgtgctggttgtaggggcagaggttgtgctggtctgtggagtggaggttgtgctggttgtcaccaaagtggttgtcctggatttctgccaagaggaagtgctctgagttgggctggtggctctcccactaggggtgctaggagctgtcacaggtgtggaggtcacggggcagcctttgggggtctcgcagcagagcacacgcacctcgtagttgaggcaca

SEQ ID NO: 20210 - DNA, 1022 bp, Artificial sequence
  DNA replication origin
ctgcacagccagggagtgtggcagagccagggaggagccactcccacaccagaggcccctgcccgggccagctcggtgtctggggtgggtgctgagggtggggcaggaaggaaactggggcacagccaccctcccctgtccccacacgggactctcgggactgtgaccccgagaaccaaggggtgccccggagatcgggagaggccggaccctgcaggtctctgtgcttctgcagaaaggtgagacctgggccacacccaactgctccgaggccacctgtgagggcaacaacgtcatctccctgcgcccgcgcacgtgcccgagggtggagaagcccacttgtgccaacggctacccggctgtgaaggtggctgaccaagatggctgctgccatcactaccagtgccagtgtgagtggagcgccgagcgggacccagggcagccggggcagccactccccacccaggtggaaatgggcggggcagaggagggggcttggctgaagcagaaaagaattgggtgggacagcaggaaggacttcccagcatcaaggcggggccgcatggggccgagcctccccgcttaggggtgctgagtgaatccctgtgagcctcggagcagcctggctggagaaggtggaggagtctgtccctgcctcgctccagccttgtcaagcgcccgctggatggagctctgtgcggacgctggccacgtgtgttctgatgacgtgagggtcttgtgcgccctgtgagatgagacggtggggggtcagggacagatgtgacctgttgggaggaaagccccagggccatggtgccaccacccgagccacccgtaaggctgcccctggggcctggcaggtgtgtgcagcggctggggtgacccccactacatcaccttcgacggcacctactacaccttcctggacaactgcacgtacgtgctggtgcagcagattgtgcccgtgtatggccacttccgcgtgctcgtcgacaactacttctgcggtgcggaggacgggc

SEQ ID NO: 20211 - DNA, 1083 bp, Artificial sequence
  DNA replication origin
accgcgtctgcccaggcacttgcaccaacgacaggaaggatgagtgccgcacgcctagggggacggtggtcgcttcctgctccgagatgtccggcctctggaacgtgagcatacccgaccagccagcctgccaccggcctcacccgacgcccaccacggtcgggcccaccacagttgggtctaccacggtcgggcccaccacagttgggtctaccacggtcgggcccaccacaccgcctgctccgtgcctgccatcacccatctgccagctgattctgagcaagtgagacttgggtgcaagggagggagggtcagtgtggccgccccacctcccacccttccaagggctggaggggaagaagcgcattttcagggggctcctgagaggaaacgagagctgctggtaccacagaccaaggaggggtgggtgttggggagaagtgggtgccggggaggggtgggcagtggggaggggcgggtgccgggaaggggtggttgtggctggaatgctgccaaggggtcaccagggttggccggctgggccgtctctgaggctctctgctggctcaggtgtatggacgggggcatcggtcaccacccccaggcagcttccaggtttgcagggcaggggctgggggggccaggaagaagaacttgcagaaataaatggatgatgccatctggacccccaccccccgcccccaagcacacagaatgtgtggaaggagcccgtccggggatacaggagggcggccacacaccagtggctgctctgggactcgcctcgcctggagactgccctgaagcctgggagcctgacgtggagcaggcaggtggccggagaggctgcacccagcaccctgcccatccctcccacagggtctttgagccgtgccacactgtgatccccccactgctgttctatgagggctgcgtctttgaccggtgccacatgacggacctggatgtggtgtgctccagcctggagctgtacgcggcactctgtgcgtcccacgacatctgcatcgattggagaggccggaccggccacatgtgccgtgagtgccaccactgtcctcaggg

SEQ ID NO: 20212 - DNA, 1062 bp, Artificial sequence
  DNA replication origin
ttaggagtctgtcccccgcccccacccgaaggcccaccccctggggtctctaggattgcggaccgcctagacagcccgctcgggggtctccagatgaggctgttgcggaagcggaggaggggacgccctcgtaggcactgtccccaggtgcacgccccaaggcagcagcaaagtccgggccgagtgggctccgggtcacctgcctgccacaccatgcccctcacccagcaaagggcttaccgcagctgtactgggggcagcactggccggcctgtggggctgcaggcacaggcacgaagccgggcagggggcaggcagggggcagcgggcagagcttgggtcggcaggtcagcgtccacgtggccgcctcacacgtgcactcctggcagtccatgccgacggtgtggcccacctgcaaggaaggggactgaggtccagcgtccgcagcggctccacccaggggtgcagcagccaccccggctcatgcagtgccggggcagccaggtgtggaggccgtgtggcctgcactgaggacccagcaggagtagggcttcaaaagtgcagggtagggcccagggatgggcacaaagctctgcaaggtgggcaggctgtggggtgactggcctgcgccccccacctcacacctccacagtcttggctgggcagaaggggcgtcccaaggaagggaagagcacagccagcctcggggccagcacccacccacagagcaacaccaggacagacgccccggcaccgtccccaatacggacagagtgggtacctgggaagggagatcccgagtctttctgggagcccggctcctcccgcagccctttctctgggcctctgacacagagaggacaccccgacccctgagccccacctgaccatttctggggccggtgtttcaagagcctccctcctcgggctcttggaccccagtgccctcttgggccatgccttccactcaccttcaccggctctccgtggggccccagacaccctggaaggagagagatctgaggttactgggggtcagccaccacaataggggcgagaggc

SEQ ID NO: 20213 - DNA, 1592 bp, Artificial sequence
  DNA replication origin
gacctgccgacccaagctctgcccgctgccccctgcctgccccctgcccggcttcgtgcctgtgcctgcagccccacaggccggccagtgctgcccccagtacagctgcggtaagccctttgctgggtgaggggcatggtgtggcaggcaggtgacccggagcccactcggcccggactttgctgctgccttggggcgtgcacctggggacagtgcctacgagggcgtcccctcctccgcttccgcaacagcctcatctggagacccccgagcgggctgtctaggcggtccgcaatcctagagaccccagggggtgggccttcgggtgggggcgggggacagactcctaattgcctcactcccgcccccgcagcctgcaacaccagccgctgccccgcgcccgtgggctgtcctgagggcgcccgcgcgatcccgacctaccaggagggggcctgctgcccagtccaaaactgcagtgagtggcctggaccaggccctgtcaggggccgtgggctggggtctccacctgggattttggggggccataaccagatgccagtgcggcttgtccactgcgggtctgtggctctggactgagccttccgcagagatgaggctggacaaaccccagtggcgagcccgggaatgaggcgcccaggaggctgcaggggcgggaatgctgagggtgaggggagagtgggcggcggggggtgcagctgcttgtcttctcgtgggcaggctggacagtgtgcagcatcaacgggaccctgtaccaggtaagagccacggagctcagaccccctcagccatagggacggagcttcccactgaccctgaggcccaggtagactttggagcaactgccaactccggccgaggccagggactcgagtctctgcagacacagcccactatcaagtgtggctgaggcccgaggtcggccccaggtcccggaaatatggacatctacaccctggcctgcctggctccggggggctccgggggactttgcctctcctggcaccacagcacagccaggcctggatcccacggctctgtcctgagccggctgagtatgtggccctgcagagtgtgtggccttgttgggcaccccatccaagggggtgcagcgtggggctctgctctagggatggggaccctgggctgtggcctctgcaccaagaggtgccaccacgagtcaccccaggggtgcaactcggcctggtaggaagcggcctggagggggatgtctgggaagttgggggcagcaagccagtggggaggcaggggcgggtctccccagggcccaagctcatgagtgtctgctgccctggctctccccagcccggcgccgtggtctcctcgagcctgtgcgaaacctgcaggtgtgagctgccgggtggccccccatcggacgcgtttgtggtcagctgtgagacccagatctgcaacacacactgccctgtggtgagcgctcccaccctgccccgaccctgccctggctcttggggggcagcggtcgcctggattccagccacatgtccatccctcccgcagggcttcgagtaccaggagcagagcgggcagtgctg

SEQ ID NO: 20214 - DNA, 1092 bp, Artificial sequence
  DNA replication origin
gctggggtgcagacagagggacagacggagggagggtcactcaccccggggcctggcctccctccagcccggcgagacctggtcagacgcagggaaccactgtgtgacccaccagtgtgagaagcaccaggatgggctcgtggtggtcaccacgaagaaggcgtgccccccgctcagctgttctctggtgaggtccaggatccccgctccagccaaggggggcttcacccctagatgggtttggggggctgtgatcatccctgcagcgccagcagacaccccctcctgcttggggctgtccactcctgagcctggccccatgtccccatccctcacttctgtgggggccgccgagcgcctcggcactgagggcgcccctctgtcggcacaggacgaggcccgcatgagcaaggacggctgctgccgcttctgcccgccgcccccgcccccgtaccagaaccgtgagtacccagcctgctgggcggggcgggctccaccctcagaggtctaggagcagctgggctggtcctaaaccctgtgttcctctccagagtcgacctgtgctgtgtaccataggagcctgatcatccagcagcagggctgcagctcctcggagcccgtgcgcctggcttactgccgggggaactgtggggacagctcttccatgtacgtgcctgggcagcaggcagggagacgcgattggctgtggggtgcagtcagggcccccagggctctaggtgccagatagacgaggggcaggaccatgaggggccaggcaaagggctctgagggtgaggcgggaaaggggtcctgagatggcaagggtggggctggggtaactacatccccagagcctgtgtcggcatcacgctctcctgtttactgagctccgccaggaacttgccgcagccgccccgagtctccctccctcccatcagcacggagccggggtcggccctggtgggactgttggcgcctggggaactggcaaaggagagctggttgtcagacactggcagcatgcctccaggagcagggaacacgatgaggccgcccagagctcggcacggcgccggcttacggcaggaggct

SEQ ID NO: 20215 - DNA, 802 bp, Artificial sequence
  DNA replication origin
gggacagctgagacgccccgggagaggaggctggtctcagtggagctaccggtggcttcctgagctgcgcacaggcgcacgggtccacggcaggtggggtcgggtgccgggagcaaggccatagtgcctcttggctctggggacctaaggcacatcctaccaccagggtgtggcctggtgacctccctgcccccaggggcttcttcctgaaccctgtgagctggagccagcctgccagggcccctcccagcaggacgtggattctcagttttcactaaattctgaaccatcctttcgtgggagggtagaagcttgagagccatcggccggggacatcagcttgggggcccttccctggcaccctcctgccagcccccgcccaggcatctgaggcctccagggtgggtgctgggcgaggcagcctgagcccccggggcctgcaggggtggtgcatcagggctgatctccctctgggtgggacagtcagaggagcagccccccaaccctgcccgggtgggaatgagcctctggctcagcccagccagagaggagcagtgggacgctggcctgggatgggtctggatggtttggggttcaggacctctgcctctggtttggtaagcaccgctctcagggcccctgcagggtctgggactagggtggcacgtggtgggtcgtgagcagggcgagctcccggaggtgacagagctgcctccaccattgacaggggcccagccagcggcctctgagtctcgcaggccccacagctcaggtggcccagtcttcattgtctaccttcacc

SEQ ID NO: 20216 - DNA, 929 bp, Artificial sequence
  DNA replication origin
ggaagggcatggaggaggtctctgttccactcattcaacttacctgcaagttcagaaccacagcgaaggaggactttccccagaggcatgatgccaccagaatgcatcccctgcagtagcccagtggggcctggatgcaggggtgcagtagtgaagggggacaaaagggaaaagggagaagtggaggggacacgtgtggaaggaggaggagggggacatggcagagacagcctgagcaggcaacagggatgcaaggggctggcgtgccatggccaggtgctgaggccggtgtcggggctgtcctggccctggcaccgtggatgcttagtggctccccagccctgagagtctcctggggaagcagcacccccatgcagggccagagtcttggggtgcctcacagtggcgggcaggcatgacctcagtgtggcgggcaggcgtgacctcagtgtggcgggcagacgtgacctcagtgtggcgggcaggcgtgacctcagtgtggcgggcaggcgtgacctcagtgtggcgggcaggtgaggatgcgggcagagtgtggacagaggacaaggccgaggcaggccccttggccgcatttgctcaggattaagacaactcgagtcagagcaaacaggagtggggcgcacgttgtccagttccctgccaagtgtcagcggcaaacaggccctcccttccctccaggaaccccgatgttgacttagcgcctgcgaggctggcagaggggccaacgtggccccgtgtggctgaggccaccttccccagtggcccggtgctgggttaggcacctgataccaaggccagcacccacacccaagccctacaggctcctgctaccgccggctcctgccccacctggccccagggcccctgcaagaactgggaaagggagatccaggcccagcccaagggac

SEQ ID NO: 20217 - DNA, 877 bp, Artificial sequence
  DNA replication origin
cccctgctcactctgatgcctgggcctcatggggctccagagagacccccagctgtgaccccctcccccattgcccactcctgtcccacccccaagaccaagaccctttcggtggtctcccaggggccttgccctgcggtcaggggcccaccttctcctggacaccccatccaagccagcccctgagtttcctgacactgtgagcccgtggggccccagagccctgtgttggggacgggtagggtcccatccaggacactcagggagtcgtagggggatctgcccgtgcactctgcaggagaagctcccaggcaagcgacctgcagagacccccgccgtgaagacagcatcgagagggggcggagtggggggctcttacctgcctgcggcaccacgagcatggccgccagagccaacaccagcgtccggcacgcgctcggggcacccatcctgggggctggcacgggtggggggacggggacgggcagggagggagccgggccgggtgcttgctcccctgggggccccagcttatgtagcagggagccttggccccaagccaggccaggccacgcagggcaccatgctcttccccgctccagccacgtgtgtttgctctcggggaggggctgtggcaggggagaggcctggatcaggaaggatttgcagctctgtgccctgaggcccaggacgcccccacccccagcagcttctgagaatcggaagggagagaagggcctaccccacctggcacccgtcctagatggcaaagccgctggaaggcagggctggccttggacgcagggtccatggaaacagtggtcagccagcctgcctcacactcagccccactgcggctcctgctggaagggaatcc

SEQ ID NO: 20218 - DNA, 1180 bp, Artificial sequence
  DNA replication origin
gtcagtggctgggggtgctgcccagaggctgggattcccttccagcaggagccgcagtggggctgagtgtgaggcaggctggctgaccactgtttccatggaccctgcgtccaaggccagccctgccttccagcggctttgccatctaggacgggtgccaggtggggtaggcccttctctcccttccgattctcagaagctgctgggggtgggggcgtcctgggcctcagggcacagagctgcaaatccttcctgatccaggcctctcccctgccacagcccctccccgagagcaaacacacgtggctggagcggggaagagcatggtgccctgcgtggcctggcctggcttggggccaaggctccctgctacataagctggggcccccaggggagcaagcacccggcccggctccctccctgcccgtccccgtccccccacccgtgccagcccccaggatgggtgccccgagcgcgtgccggacgctggtgttggctctggcggccatgctcgtggtgccgcaggcaggtaagagccccccactccgccccctctcgatgctgtcttcacggcgggggtctctgcaggtcgcttgcctgggagcttctcctgcagagtgcacgggcagatccccctacgactccctgagtgtcctggatgggaccctacccgtccccaacacagggctctggggccccacgggctcacagtgtcaggaaactcaggggctggcttggatggggtgtccaggagaaggtgggcccctgaccgcagggcaaggcccctgggagaccaccgaaagggtcttggtcttgggggtgggacaggagtgggcaatgggggagggggtcacagctgggggtctctctggagccccatgaggcccaggcatcagagtgagcaggggcaggcttagcgtggacccctgtccaggaccggctctacccttcacgacctccctggggatcacagctggcagggcaggtgagggtaccaccctcaagggttgcacagccagccgcaagagccccggcctcaacccacgctcgactcccacggcccatctgtgggcatctcatgccgcacgggctgcctggctctcagccgagcgttttccctcgtctgctgtctcttggccagagccgcagcattaatacttactgtcaatagagaaagatg

SEQ ID NO: 20219 - DNA, 1143 bp, Artificial sequence
  DNA replication origin
ccacccgtcctcctgtcctccacgcacgtccaagttggggagatcaagcccttggcagggactgtgctttagtcaccagatgcacgtcctgtggccggggaaggcagccctgcacagagcagcttcatgttaggggacacaccccaaagtgatggggtggctggtggtgggcacttctctggctacaagatggaggcccaggtggtccagcccaaggagggcactgcacggagcagataaccaagggcagtcagcctgggcaggggaggggctgcctgggggggaggggttgcctgggttggggaggggctgtctggggcaggggaggagctgcctggggcgggggaggggctgtagggccagggaggggctgcctggggctggggaggggctgctggggtggggaggggctgcctgcggcgggagccggggcgtgggagtggctggttgggctggcacacaggggcagggctgtgagctgtgggtcggggtggaggactcagggatcggctggctttctgggaaaggcagtcaacctggatctctggaggcggcccctgtggtggttcccagatgtcagcaggacctggctggaaaagccaggcagggccaggccagagtgcgaaccacagggccggcccctcgctgagccctgaccatgctgtgggggctggggcctcacctcccacctccccacagagagtctcagatcaggatccagggaggagctctggggtcctgtgaagggggcgccccaacccaaactgggcagacaatggccgggggtcctcagagtcctgtgggttggagctgcctcctcccagcctccatggggttggtgggtgaggccttgcccggaggcggtggtcagcctgggggaccttgggcggccatcccagtatcaacggccacacagcttgcgcggcccagagtcctgcccccagcctgccccactcgccctgacttaggatctagttcgaaactggttctgtgtttaggtttctgctaagtcacgcctggaaggctccaagtgtgtcctcctaacaaagctggtctttgtccttctccaagggatgtgtgggatggggcgaaatccccccttggggcggccaacgccttttcctgattccattttctccccca

SEQ ID NO: 20220 - DNA, 1101 bp, Artificial sequence
  DNA replication origin
aaactgggcagacaatggccgggggtcctcagagtcctgtgggttggagctgcctcctcccagcctccatggggttggtgggtgaggccttgcccggaggcggtggtcagcctgggggaccttgggcggccatcccagtatcaacggccacacagcttgcgcggcccagagtcctgcccccagcctgccccactcgccctgacttaggatctagttcgaaactggttctgtgtttaggtttctgctaagtcacgcctggaaggctccaagtgtgtcctcctaacaaagctggtctttgtccttctccaagggatgtgtgggatggggcgaaatccccccttggggcggccaacgccttttcctgattccattttctcccccatcccttgagaaggaggcaccatccccgcctgtcagtcggggacagggcaggccgtgctgggggcagctcagggctccctgctggaagcttccatcccgcaggctttccatagcattgagcaggagcggaggcatctgcggctgacggttggggtggcctgagcggctggggaggagtcccggccttggccacagtgtgtcgtgagggtgaacctgcagggcatggagaccgccaccaaggaccccacatgcggctgccgcaccagggatgtggccaggtccgtggttgggttcgtggctggcagccacatctagttcctcactgactcccattccctcttcccacagagacccagggccctgtggagccgagctgggagaatgcagggcacaccatggatggcggtatgtggccaggttcgggggtggggggttcctgaccaggctggaggggctggaatttgggctggggcaggcagacgcctctccaagcagccatgcgtctgacagagaccctccctgggtcccctgcccaggacaatacccagcacccgaggcggagcttggtgctccaaagaagaggaaagtgcagagcagagagacatgcacacagaagcacacgcgtggacaggcacatgcgtgcccacacttacactggcacacacatgtgtgcacacacaggccaaaacacaagggcagcagtgtttgtggggcagacag

SEQ ID NO: 20221 - DNA, 938 bp, Artificial sequence
  DNA replication origin
gccgaccatgggcttttccattccaaaaaccagggtgcctcggcccaggggaggctaccccgtggggggctggcatggggatgggcctcatcccgcgctccccacagccctgaacccggcgcacaatgggcgggtgtgcagcacctggggtgacttccactacaagaccttcgacggcgacgtcttccgcttccctggcctttgcaactacgtgttctctgagcactgccgcgccgcctacgaggacttcaacgtccagctacgccgaggcctagtgggctccaggcctgtggtcacccgtgttgtcatcaaggcccaggggctggtgctggaggcgtccaacggctccgtcctcatcaatgggcagcggtgagccggccaccctggggaggggcgagggccgggccacacagtgtgacctccccacacggccatgtctgacctgggccagggctgggggggggttgggtgggcaggcagccaggagagcggggcccagggagagaccccgctgtctgcgcagggaggagctgccttacagccgcactggcctcctggtggagcagagcggggactacatcaaggtcagcatccggctggtgctgacattcctgtggaacggagaggacagtgccctggtgaggaagccccctcgccccttgccccttcaggcctggccacaaaacccccaccgggggtcgagggatgcctccctgggcttggggtcacggggcttggggcatgttgccagtgtggggatcagaggtcctgaggctggagctgcccctccccactctcagctggagctggatcccaaatacgccaaccagacctgtggcctgtgtggggacttcaacggcctcccggccttcaacgagttctatgcccacagtgagtgccacctgggtgagggggcggtgaccaattatgtcggccaa

SEQ ID NO: 20222 - DNA, 1227 bp, Artificial sequence
  DNA replication origin
ggctgggtacaaggaaccccgacagggagagggcttcccggcctggcctgccatgggtcctattccagcaccgtggcagcccccatggatggcaggggtgcccagcctggcccactgtgctccccaggagggcatctgccaccgcaccctgctggggccggcctttgcggagtgccacgcactggtggacagcactgcgtacctggccgcctgcgcccaggacctgtgccgctgccccacctgcccgtgtgccacctttgtggaatactcacgccagtgcgcccacgcggggggccagccgcggaactggaggtgccctgagctctgccgtgagtgctcccagggccttcgccagggattgtgccagagagaaggggcagggggagcgccttgggggccactgggggtggggaggcctgggggacaggggtggagggcagaggacccaccccaggcatagtgggcagaggccaccccaggaccccaggagggggtggggcctccgggggctgcaggagaaggagaggctgtggagaggctgtgcagcaggtggcgggggctggggctggagggtggagctgcccacgatgaggggcgtcagggccaccctggggcctagctctggcttctgtggacttgatggcatgtggaaggccgtggaaggcggctggggctgaccacacgggcagtacagggcccttcccctggcccagccccacctccttttgcgcagcccggacctgccccctcaacatgcagcaccaggagtgtggctcaccctgcacggacacctgctccaacccccagcgcgcgcagctctgcgaggaccactgtgtggacggctgcttctgccccccaggcaggtcttgtgtgccctgaacccctcagggggctttcaggtccctgctcccaaccccgcccccagcctcatcaggcgtggaagcagagcccctcatgccagaaggtcccaccagagggcccagggtgggaagggcactggctgggagggtgccggaagacctgccgatgcgtggagggaggtagagcagtgccatgagccagctgggcatggtggggaaactgaggcccagaggtgcttggtgttcatccaagcgagtgcagctcagggcgggggcggtgtcctggagcaggaattcctccccaagggaggcagcttgtccccaaggccggtgtcttctgaccttggtgtcccccgtgcatgggccg

SEQ ID NO: 20223 - DNA, 1235 bp, Artificial sequence
  DNA replication origin
gggctcaggtggagaccgggctccctgagagagtggggctgagcgagctggatgtggggtccctgccgctgccggggtgggagcctggcatccccactctgcagacgagaaaccgagcacagggagctcctggagctgcccgaggccacggagaactagcagggatggagcggacgctgcccaggctgtgggagctgcccctgcaagcaggcgccacccagcccggccgtcctgggagagccacatacctgccgacaggggcagctgcgtgtagatggagttgaggaacacgccgccgtccgcttggacccggatggcctgcggaaggaggcgggcgggaggtcagctctggggaggaacccattcccgactctcaaatgagggggtggcctgcccaggggcccccactggggacagagcccacagagaagctcagacctggacctgcggtgggctctgcaattgcccccccgggaggacctgacctcagggctggaggggggacctgacctgggggctggagggggacctggcctgggggctggaggggggacctggcctcggggctggagggggacctgaccgtgcttgctccccacacaccttcgcatgcctcttcctgtcccagcccagggccccagccaggtcctcaccgtgtccccgccgtccaggctgagcgtcaccgctttcaggcagttctcgttgtccgtcaggccgcacttccgcagctcagccagcacggtgaagctgctgtcggcacatttctggggagaaggacccacgcgtgcattgggcctggctcgatgatgtggggtgccccccagaagtgtgctggggatgcccatgtgggggatgtggctctgtggggaggtggtccttggcacctctggtcacctcccagcagcttgtctcagggcctgggggctccttggccccatgccgctcagcagggagagccatccctctatgaccatcatggggacccagggctcccccctcagcagggacatccacccctctatgaccatcgtgggggcctcccctgggtggaagtggcatgagggtcccaggagggtctgggtgtctgaagacccggccccaagcccagaccttggacagaacgtagctgcagtcaccatgcaggtcgtagagtttctcatcataggtggagatgtgggccccgccctgcacagagcaggtgccagggcacggcaggtcctggcactgccatagcc

SEQ ID NO: 20224 - DNA, 1286 bp, Artificial sequence
  DNA replication origin
ggcacgaaggaaacgctgcaggtgacgtcggcctcactcaggccgcggcaagtgggctggcaggcatccaccacgtaggcgtagcgctgggacttggggcagttctgcatgtacttggctgtggtcggtggggccaggggggacaggtcagcggccgagcagcctggccagcccccatcttcaactcagcatccccgtctgtgacgtggggatcgcaagggcatgaggttcttgcgaggctgggatgaggaagtgcaaagctctgggctgagaaccgtgtgagtgacggctgctgccggccagggtcccccgcacccccacgcggtgtggacacatcccacccccagcgtgggcactcactgcagacgccgtccctccagtcgctgagctgtacgcccttggcggcacaggcgtgcacataggaggacagcgcggcgcacaggcagtcctcgctccgctcacagttgcaggtgtcaaacatgcagttctgcggaggtgggaggcatcggggcgtcagggaccccagcctgccagggctcccccacccatcctgcccaggcgtgggggtctggcctcagcctctcaccgagtggaagggcttggggttgatgatggagtggcagcgcgagaaggcactgttgggatcggtcaggcgcgagcaccagtgccgggcgtagttctctgtggggaagacctgacctcatctccacgccctgccccgaagcccacacccctgacacgcaggcctgcgaccccctcagcccggggaacagtgagttggaatttgcggctcacctgctgcgccttggggggttctggccgcctggccccaagcacctcctcctgatgcctcccacctgcctccatggggtccccaatcccacccaggggtccccgtggcccaggggacaggaaggtgctgggtgggacttgagcctggggtgactgtgggggtgggggcgaggagtaccattctccacactgagggagcaggggtcctcaaagctgttcctggcattggcacaggcagcctgggccttccaggtgttggcgaaggctgcgcccgtggcctccaccaccccgctgagggccgtgaagtcgtcagcctggttctggttgaagttcccacacaggcctgggggccagggttgggggatgtcagcggccactgttgggcccacctggctcctggcccctgccatccctccaggcaccacacagggtggaacggctgggagccctgtcccaggattctgctcccagaaccctctgcagataagccctgg

SEQ ID NO: 20225 - DNA, 962 bp, Artificial sequence
  DNA replication origin
tgcaaaatcctctgcccactgtggaggccacaggcagggccctcaccagccaggctcacgcacccacgggtcagcgagtcccacagaccccacctggcaccagggtttctgtcactgtgagagggtcctgcagggcctaggagtgcacggcccgagctcaccttgtagtcctggtgcagtcggatgaacacgctggtcttccggtcccaggacacggccatcccgtgggtctcgatgaccaggaagatccccatgtagcgtatcttgtagggtgggtccccacccggccctctcgccaccgccttaaaggtcccctcttggaggatcagctcgtagctctgcaggggaggcagacgctgccggaagccgaccctgtggcccccagggaggggcctgagacccagggatgccccacccagtgctctgcaggtgcgcacgggctcttagcacaagcggctggcgttaggggtgagctgggtccgtgagaccctcagcgaaggtttggcaagaggctggccaggaagtgctgggaacaggggctgcctgggaaccttggggctgcacgggagcagcagaggctgcagtaggcccactccaccccaccctgctccccatccagccctgcagcccccacgccctcacaccagcctcccctgacccgctgcggtcctcagcccctcccgccatctgcagggagcatcccggccagcggcgctgctttatcccctgggagctctggcccccctttgctggagtgggtgtctctaggtgtggcagggtgaatcgtggctcctgaaaatgcctgtccacatgcgaactcccagaacctcagcccgggccctcactgggagaaagcatctctgcagacgggattaagtgaagcatcttgaaatgagatcatcctggactacgtgggggcgggggggggccctaaatccaatgaccagtgtccttacaagaga

SEQ ID NO: 20226 - DNA, 792 bp, Artificial sequence
  DNA replication origin
agctgagatgaggggctggcgtaggggcagcagtgggcatactcgctcgtgggaggccctgaagcactctcatgtcggccgccgcttgccctcttgagaaggcagctggtgaccccttggaaggtcctgtggcctgacaaagctgagcccaggttcagatggggcctgggaggggtgtgggctgcctggaggaagcaggcagcttcccatggtcaggacgcattcacagctcagctccccgcgtggctggtctggaaaggaagtgaccactccttccttagtgcacattcactgggtgcctggaatagcctggcatgttctgggctcaccccagtgatcaggggacgaggctgaccctcacagagcttccagaggaggcagaaaggcggtgggtgctgggtggtcggatgctaggatgtggagggccctggccgggggttggttccgctggagggaaggcccccaggtggaaaggaggccagtacgactgcagcggagggaggtgggggcgagggcagagggtaagcaggggtgctatgctccacatgggtttgaaacctgtgggccacatgaccagatccacgtgatagaaagatccaaagagcacatgtgaaggcaggcagatgggcaggtgcataggtgggcaggtgcataggtgggcagatggacaggtgggcagatgggcaggtgggcagggatataggtggacgagggcacaggtgggctggagaagtgctggggcagctcccatttggggcacgctctgaggtattccaggccccaggagctcag

SEQ ID NO: 20227 - DNA, 2135 bp, Artificial sequence
  DNA replication origin
tggaggaggcggtggccgtggatccggtgggcaccgtcacggtggctgtagtgctcggctctgtgaggatccaggtggtccctggggtggaggacggggtggccgtggatccagtggactcagtcgtagtggctgttgtggtcagctctgtgaggatccaggtcgtccccggagtggaggagggcatggccgtagagctggtggccggggtgctggggcagtggccgtagttgcagcagaacacacggatttcatagttgaagcacatcttgaacttccccacctgctcacggttcctgcagaccaggccaaagtccaggctgcattccacgacctggcccaactcccgcagggggacaccaggctgggcctgggcacggcactcgaggcccaggggctgctcacagacggcccctccggccgcacggatgttggagtaggtgtcaaagtccccgccagagggccccggcatggggtagctgtagtccagccactctgaccaggcacactggggctcacagcccatggtcaccaccgtggttatgggggccgatgtggggctgctgggcagcagggtcgaggtgcgggtcttgctgggtgtggccgtggctgtggtcctggaggtggccgtggtgtggcccggggtggtcgtccctggagaagggggtgactcggtggttctgctgctagggtgagggctggaaagggctggagtcgagtgctgggtggtaccggtggttgctgctagggtgtgggaagtcaccgtggaaggctctgtgatgtgggtggtgcccaagatgcccgaggtggccgaagtccaggctgtgcgcaccgtgtggggactgctggggggcagggatcgcccgtgtgtggtggccatggtgttcggcactgggggtgtgtgggtggtccctagggcagaggagggagtcactgtgttgctggtggctgcaggtgtggtggcggtggtggtcagcactggggggatgggagttgtcccaggagttgaggaggggttggtggtggagccggtggccgtgatcgtagtggccgtggtggtcagtgatgggggagtaccactggtctgtgtgctagaggagggtgttgccatagaaccagtggccacagttgtggtggtggtggtcagcactgtggcggtgtgggtggtccccgggatggaggagggggtcaccgtggagcctctggttgtgggtgtggtggttgtgctgatccacactggaggcgtgagtgccgtccctgggctggaggagggggtggctgtgaagcccgtggttgtggtagttggcactttggtagtgtgagctgttcctggggtggaggagggggtggccacagagccggtggccccagttgtggtggccgtggcggtaagcactgtggaggtgtgggcagtctctggagtggaggagggtgtggctgtggacatggtggccgtgggtgtggtggtctgtgataggcgggtccaggtggtgcccagggaggaagaggggatgggtgtaacgctggtagctgtgggtgtggtggctgtgcttctcagtgctggaagggcggttgcagtccctggactggaggagggagtggctttggagctggtgactgtgggtgtggtggccgtggtggtcagcactttgggagggggagctgttctcagggtggaggtcggggtggccgtggatccagtggacgcagtcgtagtggctgttgtggtcggctttgtgaggatccaggtcgtccccggagttgaggagggcgtggccgtggagctggtggctggggtactggggcagtggctgtagtcgtcacagcaaagcacacgcacgttgtagttgaagcacatgttgaacctgcctgtctggtcttcgttcttgcaggtcagccccgtctccaggctgcaggtcagcacctgcccgacctggtcgatgcttacctcggggtagttctccgcccggcactctatgctctttggtgcccagcacatcttgcccccagcagccctgatgttttcaaaagtttccatgtccccgcctgcaacccctgaggttgggaagtccacgtcaaaccactctgtccactcacacttcggttgacagcgggtcgtgccctggctggtggtg

SEQ ID NO: 20228 - DNA, 1958 bp, Artificial sequence
  DNA replication origin
ctggtcagcactttgggagggggagctgttcccggggtggaggacgggatggccgtggatccagtggttgcggtcgtagtggctgctgtggtctgctctgtgaggatccaggtcgtccctggagtggaggagggcgtggccgtagagctggtggccggggtgctggggcagtggccgtagttgcagcagaacacacggatttcatagttgaagcacatcttgaacttccccacctgctcacggttcctgcagaccaggccaaagtccaggctgcattccacgacctggcccaactcccgcagggggacaccaggctgggcctgggcacggcactcgaggcccaggggctgctcacagacggcccctccggccgcacggatgttggagtaggtgtcaaagtccccgccagagggccccggcatggggtagctgtagtccagccactctgaccaggcacactggggctcacagcccatggtcaccaccgtggttattggggccgatgtggggctgctgggcagcagggtcgaggtgcgggtcttgctgggtgtggccgtggccgtggtcctggaggtggccctggtgtggcccggggtggtcgtccctggagaagggggtgactcggtggtcctgctgctagggtgagggctggacagggctggagtcgagtgctgggtggtaccggtggttgctgctggggtgtgggaagtccccgtggaaggctctgtgatgtgggtggtgcccaaggtgcctgaggtggccgaagtccaggctgtgcgcaccgtgtggggactgctgggggacagggatcgcccgtgtgtggtggccgtggtgttcggcactgggggtgtgtgggtggtccctagggcagaggagggagtcactgtgctgctggtggctgcaggtgtggtggcggtggtggtcagcactggggggataggtgttgtccctggagttgaggaggggttggtggtggagccggtggccgtgatcgtagtggccgtggtggtcagtgatgggggagtaccactggtctgtgtgctagaggagggtgttgccatagaaccagtggccacagttgtggtggtggtggtcagcactgtgggggtgtgggtggtccccgggatggaggagggggtcaccgtggaacctctggttgtgggtgtggtggttgtgctgatccacactggaagcgtgcgtgccgtccctgggctggaggagggggtggctgtgaagcccgtggttgtggtagtcagcactttggtagtgtgagctgttcctggggtggaggagggggtggccacagagccggtggccccggttgtggtggccgtggtggtaagcactgtggaggtgtggacagtctctggagtggaggagggtgtggctgtggacatggtggccgtgggtgtggtggtctgtgataggcgggtccaggtggtgcccagggaggaggaggggatggctgtaaagctggtagctgtgggtgtggtggctgtgcttctcagtgctggaagggcggttgcagtccctggactggagaagggagtggctttggagctggtgactgtgggtgtcgtggccgtggtgctcacatgtggggtgccagcagttgcctgggtggaggaggcggtggccgtggatccggtgggcaccgtcacggtggctgtagtgctcggctctgtgaggatccaggtggtccctggggtggaggacggggtggccgtggatccagtggactcagtcgtagtggctgttgtggtcagctctgtgaggatccaggtcgtccccggagtggaggagggcatggccgtagagctggtggccggggtgctggggcagtggccgtagttgcagcagaacacacggatttcatagttgaagcacatcttgaacttccccacctgctcacggttcctgcagaccaggccaaagtccaggctgcattccacgacctg

SEQ ID NO: 20229 - DNA, 2412 bp, Artificial sequence
  DNA replication origin
ggcaccgtcacggtggctgtagtgctcggctctgtgaggatccaggtggtccctggggtggaggacggggtggccgtggatccagtggactcagtcgtagtggctgttgtggtcagctttgtgaggatccaggtcgtccccggagttgaggagggcgtggccgtagagctggtggccggggtgctggggcagtggccgtagttgcagcagaacacacggatttcatagttgaagcacatcttgaacttccccacctgctcacggttcctgcagaccaggccaaagtccaggctgcattccacgacctggcccaactcccgcagggggacaccaggctgggcctgggcacggcactcgaggcccaggggctgctcacagactgcccctccggccgcacggatgttggagtaggtgtcaaagtccccgccagagggccccggcatggggtagctgtagtccagccactctgaccaggcacactggggctcacagcccgtggtcaccaccgtggttatgggggccgatgtggggctgctgggcagcagggtcgaggtgcgggtcttgctgggtgtggctgtggctgtggtcctggaggtgcccctggtgtggcccggggtggtcgtccctggagaagggggtgactcggtggtcctgctgctagggtgagggctggacagggctggagtcgagtgctgggtggtactggtggttgctgctggggtgtgggaagtcaccgtggaaggctctgtgatgtgggtggtgcccaagatgcccgaggtggccgaagtccaggctgtgcgcaccgtgtggggactgctggggggcagggaccgcccgtgtgtggtggccgtggtgttcggcactgggggtgtgtgggtggtccctagggcagaggagggagtcactgtgctgctggtggctgcaggtgtggtggcggtggtggtcagcactggggggatgggagttgtccctggagttgaggaggggttggtggtggagccggtggctgtgatcgtagtggccgtggtggtcagtgatgggggagtaccactggtctgtgtgctagaggagggtgttgccatagaaccagtggccacagttgtggtggtggtggtcagcactgtggcggtgtgggtggtccccgggatggaggagggggtcaccgtggagcctctggttgtgggtgtggtggttgtgctgatccacactggaggcgtgagtgccgtccctgggctggaggagggggtggctgtgaagcccgtggttgtggtagtcggcactttggtagtgtgagctgttcctggggtggaggagggggtggccacagagccggtggccctggttgtggtggtcgtggtggtaagcactgtggaggtgtggacagtctctggagtagaggagggtgtggctgtggacatggtggccgtgggtgtggtggtctgtgataggcgggtccaggcggtgcccagggaggaagaggggatggctgtaacgctggtagctgtgggtgtggtggctgtgcttctcagtgctggaagggcggttgcagtccctggactggaggagggagtggctctggagctgatgactgtgggtgtggtggccgtgctggtcagcactttgagggtgccagcagttgcccgggtggaggaggcggtggccgtggatccggtgggcaccgtcacggtggctgtagtgctgggctctgtgaggatccaggtggtccctggggtggaggacggggtggccgtggggccagtggctgcagttgtagtggctgctgtggtcagctctgtgaggatccaggtcgtccccggagtggaggagggggtggacatggaactggtggcccttgtcgtggtggccttcgtggtcagcactgtggaggtgtgggtggtctccggagtggaggaggggtggattgtggacatggtggccatgggtgtggtggtctgttctgggagggtcccggtggtcccaagggtgaaggaggggatgggtgtaaagctggtagctgtggatttggtggctgtgcttgtcagcactggaagggtggttgcagtccttggactggaggaggaagtggctttggaactggtggctgtgggtgtggtggccgtgctggtcagcactttgggagggggagctgttcccggggtggaggacgggatggccgtggatccagtggttgcggtcgtagtggctgctgtggtctgctctgtgaggatccaggtcgtccctggagtggaggagggcgtggccgtagagctggtggccggggtgctggggcagtggccgtagttgcagcagaacacacggatttcatagttgaagcacatcttgaacttccccacctgctcacggttcctgcagaccaggccaaagtccaggctgcattccacgacctggccc

SEQ ID NO: 20230 - DNA, 1979 bp, Artificial sequence
  DNA replication origin
tggtggctgtgggtgtggtggccgggctggtcagcactttgggagggggagctgttcccggggtggaggacggggtggccgtggatccagtggatgcagtcgtagtggctgttgtggtcagctctgtgaggatccaggtcgtccccggagtggaggagggcatggccgtagagctggtggccggggtgctggggcagtggccgtagttgcagcagaacacacggatttcatagttgaagcacatcttgaacttccccacctgctcacggttcctgcagaccaggccaaagtccaggctgcattccacgacctggcccaactcccccagggggacaccaggctgggcctgggcacggcactcgaggcccaggggctgctcacagacggcccctccggccgcacggatgttggagtaggtgtcaaagtccccgccagagggccccggcatggggtagctgtagtccagccactctgaccaggcacactggggctcacagcccgtggtcaccaccgtggttatgggggccgatgtggggctgctgggcagcagggtcgaggtgcgggtcttgctgggtgtggccgtggccgtggtcctggaggtggccgtggtgtggcccggggtggtcgtccctggggaagggggtgactcggtggtcctgctgctagggtgagggctggacagggctggagtcgagtgctgggtggtaccggtggttgctgctggggtgtgggaagtccccgtggaaggctctgtgatgtgggtggtgcccaaggtgcctgaggtggccgaagtccaggctgtgcgcaccgtgtggggactgctgggggacagggatcgcccgtgtgtggtggccgtggtgttcggcactgggggtgtgtgggtggtccctagggcagaggagggagtcactgtgctgctggtggctgcaggtgtggtggcggtggtggtcagcactggggggataggtgttgtccctggagttgaggaggggttggtggtggagccggtggccgtgatcgtagtggccgtggtgatcagtgatgggggagtaccactggtctgtgtgctagaggagggtgttgccatagaaccagtggccacagttgtggtggtggtggtcagcactgtgggggtgtgggtggtccccgggacggaggagggggtcaccgtggagccactggttgtgggtgtggtggttgtgctgatccacactggaggcgtgcgtgccgtccctgggctggaggagggggtgactgtgaagcccgtggttgtggtagtcggcactttggtagtgtgagctgttcctggggtggaagagggggtggccacagagccggtggccctggttgtggtggccgtggtggtaagcactgtggaggtgtgggcagtctctggagtggaggagggtgtggctgtggacatggtggccgtgggtgtggtggtctgtgataggcgggtccaggtggtgcccagggaggaggaggggatggctgtaaagctggtagctgtgggtgtggtggctgtgcttctcagtgctggaagggcggttgcagtccctggactggagaagggagtggctttggagctggtgactgtgggtgtcgtggccgtggtgctcacatgtggggtgccagcagttgcctgggtggaggaggcggtggccgtggatccggtgggcaccgtcacggtggctgtagtgctcggctctgtgaggatccaggtggtccctggggtggaggacggggtggccgtggatccagtggactcagtcgtagtggctgttgtggtcagctttgtgaggatccaggtcgtccccggagttgaggagggcgtggccgtagagctggtggccggggtgctggggcagtggccgtagttgcagcagaacacacggatttcatagttgaagcacatcttgaacttccccacctgctcacggttcctgcagaccaggccaaagtccaggctgcattccacg

SEQ ID NO: 20231 - DNA, 2518 bp, Artificial sequence
  DNA replication origin
ggccagtggggactgattgtggccagtgcggacggattgtggccagaggagacccagtgtggccagtggggacccagtgtggccgggaggggccaagtgaggccagtggggaacaaacatgaccagcagggagaaagccactggctcccaggacaggcagacccaggttggcatagcatgtggggaaagggtacagcagtgttatccacatgcactcaccgggcgagaaaaactgtccaaatgccctgcagaagcagggagtagagaagtgggagctggggaagccagtgggtctcagggtggtgaggactgaggaggacacagtggacacgctgaaggttggcaggctgctggggagcactgcaggggtgcgggtggtccccacggtggacgagctgggaaccgtggaggcagtggctgtgggcatagtggccatggtggtcaccactttgggggtgtgagctgttcccagagtggaggaggcggtggccgtggaaccggtgggcaccatcacggtggctatagtgctcggctctgtgaggatccaggtggtccctggggtggaggacagggtggccgtggatccagtggctgcagttgtagtggctgttgtggtcagctcagtgaggatccgggtcgtccccagagtggaggagggtgtggccgtggaattggtggcccttgtcatggtggctgtggtggtcagcactgtggaggtgtgggtggtctctggagtagaggaggtgtggattgtggacatggtggacatgggtgtggtggtctgtgctgggacggtccacgtggtccacagggtggaggaggggatgggtgtaaagctggtagctgtggattttgtggctgtgcttgtcagcactggaagggtggttgcagtccttggactggaggaggaagtggctttggagctggtggctgcgggtgtggtggccgtgctggtcagcactggggtgatgggtgttgtccctggagttgaggaggggttggtggtggagccggtggccgtgatcgtagtggccgtggtggtcagtgatgggggagtaccactggtctgtgtgctagaggagggtgttgccatagaaccagtggccacagttgtggtggtggtggtcagcactctggcggtgtgggtggtccccgggatggaggagggggtcaccgtggagccactggttgtgggtgtggtggttgtgggtgtggtggttgtgctgatccacactggaggcgtgagtgccgtccctgggctggaggagggggtggctgtgaagcccgtggttgtggtagtcggcactttggtagtgtgagctgttcctggggtggaggagggggtggccacagagccggtggccccggttgtggtggccgtggcggtaagcactgtggaggtgtggacagtctctggagtggaggagggtgtggctgtggacatggtggccgtgggtgtggtggtctgtgataggcgggtccaggtggtgcccagggaggaggaggggatggctgtaaagctggtagctgtgggtgtggtggctgtgcttctcagtgctggaagggcagttgcagtccctggactggaggagggagtggctttggagctggtgactgtgggtgtcgtggccgtggtgctcacatgtggggtgccagcagttgcctgggtggaggaggcggtggccgtggatccggtgggcaccgtcacggtggctgtagtgctcggctctgtgaggatccaggtggtccctggggtggaggacggggtggccgtggatccagtggacgcagtcgtagtggctgttgtggtcagctctgtgaggatccaggtggtccctggggtggaggacggggtggccgtggggccagtggctgcagttgtagtggctgctgtggtcagctctgtgaggatccaggtcgtccccggagtggaggagggggtggacgtggaactggtggcccttgtcgtggtggccttcgtggtcagcactgtggaggtgtgggtggtctccggagtggaggaggggtggattgtggacatggtggccacgggtgtggtggtctgttctgggagggtcccggtggtcccaagggtggaggaggggatgggtgtaacgctggtagctgtggatttggtggctgtgcttgtcagcactggaagggtggttgcagtccttggactggaggaggaagtggctttggaactggtggctgtgggtgtggtggccgggctggtcagcactttgggagggggagctgttcccggggtggaggacggggtggccgtggatccagtggatgcagtcgtagtggctgttgtggtcagctctgtgaggatccaggtcgtccccggagtggaggagggcatggccgtagagctggtggccggggtgctggggcagtggccgtagttgcagcagaacacacggatttcatagttgaagcacatcttgaacttccccacctgctcacggttcctgcagaccaggccaaagtccaggctgcattccacgacctg

SEQ ID NO: 20232 - DNA, 1035 bp, Artificial sequence
  DNA replication origin
gaaccgctgctccctcctgcgctgacctctgcctttgctctcccagaactctggcttacccatctctgggagtggcttatctttctatggtgttgttcttcacaggggaagtcatctacaataagaccgaccgagccggctgccatttctacgcagtgtgcaatcagcactgtgacattgaccgcttccagggcgcctgtcccacctccccaccgccagtgtcctccgccccgctgtcctcgccctcccctgcccctggctgtgacaatgccatccctctccggcaggtgggccccgcctgccctccacctcccgtgctgcgtgcacacggtctgggttggctggaggcacagccacagtccagctcccgaggcccgtctcagtgaccccgccgccagtatctccagttggaggaggcacacagggcctaggggccaggctagcatgggggccgccctcctcaggcaggctcttgtggccacccggggctttgggccatgaggggtgggatgagccgtggatgggtcccgtgagctggtccaggtgaggacgtgcatgttccctgccccaggtgaatgagacctggaccctggagaactgcacggtggccaggtgcgtgggtgacaaccgtgtcgtcctgctggacccaaagcctgtggccaacgtcacctgcgtgaacaagcacctgcccatcaaagtgtcggacccgagccagccctgtgacttccactatgagtgcgagtgtgagtgcgtcggtggccgcgggattaccccgggggcaggtggagcagagtgcaccgtcggctaggctggcagaatggggcatggtggggcacagtggggtgcagtggggaatggtggggcatggtggggcatggtggggtgcagtggggcatggtggggcatggtggggtgtggtggtggtgtttgggagatcgctggcatcccttcaggaaaccatcatgcaccatgctgtcttgggcctcagtggtgcacgtcgtgagagctgttagtatgcaggctccgtgtccacag

SEQ ID NO: 20233 - DNA, 807 bp, Artificial sequence
  DNA replication origin
acggagggcccccagccccagggagctgcgtgcgtgcgtgcatgcgggcgggcgggggcgccccagggcctgcaacccccgaggggaggactcactggctcagcatcagatcacagagcggctgtggtgggcatggggtgggggtgggtgtgctagacaccggggctgcggggctggcagtggggggtgtgccagtcggggcccagcagccatcctttctgctgtcggggaccagccacgtcttggccatgtccttgcaactggcggcagtggttccgtcccgctggagacagtcgtccctctggttgttggtgcaggtgcctgggagtgggggcgtcaccgcggggctggaatctggggagcctttcacagcccccacccccctcccccactcattcccctccccaggcttcccctatgctcactgggttgtcaggcccagcagcagccctggccggggcaggacccgccgcccactcaccgcactggccctcggtgttgttgtggaagaggctgtagggcagccgggcctggaagacttggccattgaaggtgacgctcacgcccagggcaggaatgtccacacgcatggtggtggtccccagcacagacacaagcacgccgttcttgctgaaaccgctgctcaccggaatttggtcaaacaggatctgggggaatccaggggaaccctgagctgggaggcagtgccaggtgggctcggggagcagggcttctctttggggctctgcctccatgtgcagagacccccctgtgtatcccccaccccaaagcccagatcttccctgg

SEQ ID NO: 20234 - DNA, 1229 bp, Artificial sequence
  DNA replication origin
ctgctctcctgtgcccaacccacaggcccctggtgggcaccggctctgtcccccctcaccctatgccgggcacctctgctctgcagcgtcttaccgcacaccgtctcggggcagcaggggttctcggcccggggcctggtcacggttacgaagccgggacggttgcacggcgggggctgaccctgggcgtcacagggcaggggcttgcactgcaccgacactgaaccctcgtcacacacgcaggactggcagttgctgacccaccgctccccgggctggaatggatcaagggggtccctgagggctcctggacagacacaggtcaaccctgggcatctgtccagccaccccctccctcgggctggtacccgagtggcccagagtgatggggcaggaagcgcacaccagccactggcacgtccacgtcacactcgggcgccccacagctgccctgtgggatggggatgctccttccctccctccctcagctcgcgagagggtggggtagggcaggtgggggtggagccactcacaaatttaggaaacccatcgggtcccacgcaggctggaaagaaaacagcatggcatcacggagggtgctgagtttgcaggcggaggggcctctggccatgggaggtgctctcaggcctggagcctgcttccccccgggatggaaggccctggagaacttttggggtgtcagatgtggctggagctcaggccagggcaccgtgagcccagctgtcagtgcatggaagcctcgtccatggtggtgggaggcagggctcaggggagggaccatcacaggatcactcaaggacagagcctccctgtggggcttcaggggaccgtgggggctctgcagggttcagggccactctggggccatcccatgctctggtggggcagaacaggtcacgggggtcagctggggagaggggagagcacatcatggtcctgggcggctcctcccaccctgtgtgtgcttgggtcgggcccagggtcgtatcccgccacaggtggcggagcttacggcaggcctgcacgcagatgcccatgtgtgcgttgaagaggatctggtcctcagggcagaagcagccctccgccatcccctccagctgtgggctctggttcctgcaggatgacaagagaggccctgagacctagagatccaggaggcctccactgtcatccacgtgagtccccaggatgggcagtggggagcaggg

SEQ ID NO: 20235 - DNA, 1206 bp, Artificial sequence
  DNA replication origin
gtgcccggcatagggtgaggggggacagagccggtgcccaccaggggcctgtgggttgggcacaggagagcagaggagagccactgtgtcctggcgtgaccgcggcaggaccactcggcagagatggcctccaggtgcttcattctcctcctaacgatgaggctggtgacctctggcctgcccaggagtggcccagggacgtgggaagcagcggggaggtggccaagcaaggggcctggagggagcccccaggggctgtgaagcggtcaggtcctcggggaaaagcacgcctgcgacttactctgggaacaagtggtcgggaggaggagtgagcagcgcccagacagtggcctccatcctcccgcagtgtgcaacacaaccacctgcccccagagcctgcctgtgtgcccgccagggcaggagtccatctgcacccaggaggagggcgactgctgtcccaccttccgctgcagtgagcggggctggggccgggctcctgggtggcctcttgctgggggtgggggagtgcaggatggtgggggcgctggagcacatgctccccaccacttgtcgagggcttagctccctttccttccaggacctcagctgtgttcgtacaatggcaccttctacggggtaagggcacagcagtgggtgggtgtggccctggggcctgaacatgtgtgtgggatgccccggggctctctgagccccactccttgtcttgacattcctgccctgagggccgatccgcacaggggccctggacacgtcagagctgggacatgcttgggactcaggggcaccttacgtcgacagccatgagctccacaactgctgcctctgagaggtcccttcaggggctcccagcaacagcctgggggcagcacacactggcctggggtccccgcctgcccgcccagattcctacccgcccggattcctgcctgccagattcctgcccccatggggtctctgcccacccagattcctgcccacatggggtctctgcctgcccagattccctgcccacctgtggtccctgtgtgcatcagctccctgcctgcctgggtccatgctcagccaggggtgcatctatgctccatctgaggaaggaacaactccctgcaggccccattgggtcatggggaggggtcctggccctgttgccccaccagtgccctcagtgccaccctcccacccctt

SEQ ID NO: 20236 - DNA, 1021 bp, Artificial sequence
  DNA replication origin
ccaggtgagacccgaggcacctgcccccaggtgagcccccgaggcacctgcccccaagtgagacccgaggcacctgcccccaggtgagacctgagtcacccgcccccaggtgagcccccgaggcacctgcccccaggtgagtccctgaggcacttgcccccaagtgagacccgaggcacctgcccccaggtgagacccgaggcacctgcccccaggtgagacctgagtcacctgcccccaggtgagccaccaaggcacctgcccccaagtgagacccgaggcacctgcccccaggtgagcccacagctgctgggcagacccagccctgagtcacttatcctggctccctggggttctctagctcagccattgctggggtcttgtttgtttccaaagggagggtatgaagtaggaggataactgagggggtctgggggtgggacaggacctgcaggctgctggggacaggggctgaggtcaggttccaggaaggcaggggtaggcagagagaaggtgctggaaactggggtgaggctgagccgggataactgagtgggggcaacttcttcgggtataggcccaggcagggacagggctaaggggtcctggaccactggggtgtagacaggagggcaggctgggccggggcatgtgctggaggagagggttagggcctgacgcccctcatgtccccacagggctttgagtacaagagagtggccgggcagtgctgtggggagtgcgtccagaccgcctgcctcacgcccgatggccagccagtccaggtaacagcagaggcatgtgggggcaggtctcagctccctccctggagaccctcacccccaatggggctctgcacaagaggtaatccctactcagcttccacactcacccttgcatttcagctgaatgaaacctgggtcaacagccatgtggacaactgcaccgtgtacctctgtgaggctgagggtggagtccatttgctgaccccacagcctgcatcctgcccagatgtgtccag

SEQ ID NO: 20237 - DNA, 1563 bp, Artificial sequence
  DNA replication origin
cagagagggtgcagcagggagggtgcagcagggaggctgcagcagagagggtgcggcagggaggctgcggcggggagggtgcggcggggaggctgcggcggggaggctgcggcagggagggtgcggcggggaggctgcggcggggagggtgcggcggggaggctgcggcggggaggctgcggcagagagggtgcagcggggaggctgcggcggggaggctgcggcggggagggtgcggcggggaggctgcggcggggagggtgcggcggggaggctgcggcggggaggctgcggcggggagggtgcggcggggaggctgcggcggggagggtgcggcggggaggctgcggcggggaggctgcggcggtgaggctgcggcggggaggctgcggcggggaggctgcggcggggagggtgcggcggggagggtgcggcggggaggctgcggcggggagggtgcggcggggaggctgcggcggggagggtgcggcggggaggctgcggcggggaggcagcagcagggagctgcttttctgggccatcttggctcctcccaccccctttttgttaaagctgggatattttaaatcatgtcccggccgtgagtgacgatgtgtaaatgtctcatgacacgtctttaacagacgctttcatacaaacacagaaccatcatgacgctccagtgattttacctgcagttgacagtttcgaactcagagacgacagtggtgcagtgacttatccgcagttgacagtttcgaactcagaagacagcggtgcagtgacttatccacagctgacagttttgaactcagagacggcagcggtgcagtgacttatccgcagctgacagttttgaactcagaggcgacagtggtgcagtgacttatccgcagctgacagtttcgaactcagagacaaccgcggtgcagtgacttatccacagttgacagttttgaactcagagacaacagcagtgcagtgacttatccgcagtggacagttttgaactcaggagacagcagtgcagtgacttatctgcagtggacagttttgaactaaactcagagacgacagcagtgcagtgacttatccacggttgacagttttgaactcagagacaacagcagtgcaatgacttatccgcagtggacagttttgaactcaggagacagcagtgcagtgacttatccacagtggacagttttgaactaaacttagagatgacagcggtgcagtgacttatccacagttgacagttttgaactcaggagacagcagtgcagtgacttatccgcagtggacagttttgaactaaactcagagacgacagcggtgcagtgacttatccgcagttgacagttttgaactcagaggtgacagtggtgcagtgacttatccacagtggacagttttgaactcagagttgacagcagtgcagtgacttatgtgaagttgacactttcaaactcagacaccacagcagtgcagtgtggttccccccaggccgactcgacacctacactgggatgtccctcctgtcaccatcctctctcagtcaca

SEQ ID NO: 20238 - DNA, 2598 bp, Artificial sequence
  DNA replication origin
aaagttggccaagaattacggcatgacccgcatggacccctactgccgactgcgcctgggctacgcggtgtacgagacgcccacggcacacaatggcgccaagaatccccgctggaataaggtcatccactgcacggtgcccccaggcgtggactctttctatctcgagatcttcgatgaggtgagagggacgtgccagctattatggaggctgcacgtggctgagcgtggctgccgtggggacacacctgccaacacagccacgttcctggctggcttcgaggcgtggctccccacctggtgtttcattgggtgcatgacagggtcctgctctccccaaggaatgtgaaaaagggattgtttccagctccttgaacatacttacatttggaaacatccccagtgacaagcatgacccagggatacagcgtgcacgtgtcccctccgctgggcgcacagggtctggccgctcaccagcaggtgggatttccagggacagagcgtgcacgtgtcccctccgctgggcactgatctggccgctcaccagcaggtgggatttccagggacagagcatgcatgtgtcccccgccactgggcactcgtctggccgctcaccagcaggtgggatttccagggacagagcatgcatgtgtccgccccgctgggcgcacagggtcttgccgcacaccagcaggtgggatttccagggacagagtgtgcacgtgtccactgggcactcgtctggccgctcaccagcaggtgggatttccagggacagagcgtgcatgtgtccgccccgctgggcgcacagggtccggccgctcaccagcaggtgggatttccagagagtgcggctgcctactgggtgggaaagctgttcttggtggtgcgaatggtcgtgacccttgagggtcctgagtcccgtccgtggctgcacctgcagcgcttctgaggcagagtcagaaggtcagaggggatgtggcgaggctgctgctcagtgtggtcctggcacctcgcacctgtggcattgtgaggctagagactgggtgggggccggggagcagtgtggggcagccaggccagcagacggccagccctccctgcctgggccctgccttttcctcccggcttttctctccccgtccctacctgctttcccctccctggccctcagaagagtagagagcgcatgggaagtgcagagtcagctgtgggaggcagaccccgtgtcctttccagtctgcaccccggctgctctggggcttgacaggtggcagccggtggagcaaggatggggccccgagggctggggaggagcagccagtgtccctgaagtggaactgaaggaggacagcagcccagggccctcgctttccccagccccagacctggccctggccctggccctggcccatcctggtggagagagggaagaagtcccctacggaggctgatatacgatcgtgaagcctgcgctgcccgaggggtctcatcgatggggtgttggtgcaggtgggagccctgttccacagataagacggggactcgaggcgggcccacgatggtgcggctgcaggggcagggtggccccttccctgatgcctggggcctctccctcttgtctcccgcagagagccttctccatggacgaccgcattgcctggacccacatcaccatcccggagtccctgaggcagggcaaggtggaggacaagtggtacagcctgagcgggaggcagggggacgacaaggagggcatgatcaacctcgtcatgtcctacgcggtgagctgcacgcctgggcggggtggggcgcattggggtatgttggagcacgtcggggctatgccgccccacagacacccttgtctctttcctggaggcactgagcccataaaacagcagggctcacgttctgaggacagagggcaggggccctgggtggtttggtggcagagaggggctgccctgcccactgctcctgcccatgttctctgtctggggaaacagcataggggttgtttgtgttcctaagatgagccaaccctttgtggtggtctccactgcaggcccctgtgtcctcggaggacccccacagcccttccaagctctgcccttagggtccagctgagcagccctccagggtctgagatacagccctgggccctgcaggacaccaggctcctccccacagggcaggcattggccgtggtgtggcagggcatctctggagatgtcggggaagcctgggggctgctgtgctcagggtcaggaagtcgaggcctggctgtggggccagcacgtcagcgccctggctcccagccatctccattctcagggcacctgcagctcctgggggcatcaggagggccagttagaggctccaagacgcagagctcctgccgtctcgtctgtatcatcaaccagaggattttcaggctgttactgaaaaatggtgctgtgggaaatgccaggcagatgtgacagcagagagggtgcagcagagagggtgcagcagggagggtgcagcagggaggctgcagcagagagggtgcggcagggaggctgcggcggggagggtgcggcggggaggctgcgg

SEQ ID NO: 20239 - DNA, 1849 bp, Artificial sequence
  DNA replication origin
atgcctgtcgcccaggagcttccggaaaactgtcactccatagcattccggagtacgctgtggccacccaagaaacacgctaaaattaaggacccaagaatggggcagttttgacctaaaaggaccggccacagctttgattagaagtgaaaggagggaacttgtatgtggacaagaatagaaaacagaggacctggcagtccagagatgtgggcacaggaggggagagttcagctgtgcggcgagggttggcgtggacgggacagccgtgccctcgggggtcggtgaggacggggcggccgtgccctcagaggtgggtcggtgaggacggggcggccgtgccctcagaggtgggtcggtgaggacggggcggccgtgccctcagaggtgggtcggtgaggacggggcggccgtgccctcagaggggggtcagcgaggacggggcggccgtgccctcagcggggggtcagcgaggacggggcggccgtgccctcagaggggtgcggtgagaacagggcggcggtgccctcagagagggttcagtgaggacagggtggccgtgccctcagaggggcgtcagtgaggatggggtggccgtgccttcggggggtgggtggtgaggacagggtggcagtactctcagaggggggttggtgtggacaggttggccgttccctcagagggggtcggggggcagtgtctggactctgttccactgggaaggaggaactggcgggctccatgtgggtgggagggccgggatggctcccggggtctctatcaccagctcctgggggtgagccgggttggctgcaggagagcgggtggcagtggtacagggaggccgtctgcattccaggcaggacgctttacaggcagccggagctgcagggctgaacccaacccagcttacgagggcttttctcctggttttttcttgtaaaggttttacagttttaggttttatatttgaacctgccatccatgttgagtttgtttgctgaacaatcatcttacttgccacggtcttctgtcttattctgaacacacgttcactcccaccccgaggacctcaaatgtccctgcccagctgagcacctggcctgaagtcgaatctcatggtctacatgtgatgtggctccttgtgattgggagacacaagaaagacaagttccagtccccaaaaccccacgtactccgatagcacaggcagggctgctgccttcacgagggaggaaagcagccacgtggcgtctgaattatgtgcagcaggtgtcctcactctcacctagagcgaggatgcacctctcccgggtcatcatgctccgggggcaggttcacactccatgtcatgctctggctctcagctctgtcccgggacctcctcctctttccctcctcagccacttctgaggagggcattagagagtgcgcccttcatggtgggtgagtggcggcctcagctgtgtctgtgagcgtcgtaggtttctgctgtcaaggacgagccacgtgctttgtctcagaactgcacgatccatctgtggctcactcttcttgctcctggcctcctgggaagcaggtcacagccgtgttcaggcgactctgagtggctgtagtctatgtgttaggaaaaggcctcgtggaagggttcagggaggcagacggcctagagaacccaccctctcctgatggttggcacctccttttcctgacattggcttcattccaggcaaagttggccaagaattacggcatgacccgcatggacccctactgccgactgcgcctgggctacgcggtgtacgagacgcccacggcacacaatggcgccaagaatccccgctggaat

SEQ ID NO: 20240 - DNA, 1010 bp, Artificial sequence
  DNA replication origin
ggagtccggagtgcccacggaacacctggggaggccatgtggccatggtccgtacctagggatctggggtggagctgagtggtcggctcaggctggggccagcacatgggtgtttagacccacagggatgcagaagtcaccgggatgtgtgggcagagaggggaggagggctgaggaccagaccccttggcatcccactggggccccaggagacaacaaggggaagcagcgaggggacgcaagcagggaaccacctgtgtggccgcccagaagccaagagaagcaggaaacaggggctgagctacctggcccagtgaggaggcaggaatgtttcccaccactggagctgcgccacagaaggctgggtgagctcacgtggaggaaacaggctgcctgtggtgggctccagggtgcgggagaggaccaaggggggccagaggcgtgggcaacgccagggccacctccaaggcccagccagctctggagcttgaactgtgtgaggtggagtgccctgcggtcaccaggccctgccaggaggtggcggctgaggacgggtgatggcactggctggcctggtggcagctggcacaggaatgcatgggcttacgggagttcactgggtgggcagagggatcggccacaccagcacagtaacagctgcacaagcaagggtctgagacacgccgcgaggaaggggtgacggtgtagctgtgctcaccacaccatgaagcccctgaaagcaagtcttatttgtgaggtccacggcgattcttctgcctgctgtatttgtgcatttctatgaaagccgcgtggctcacagtgtgtctcctttccctgcatttctacgaaagcccgcgtggctcacagtgtgtctcctttccctgcatttctacaaaagcccgcatggctcagtgtgtctcctttccctgcatttctatgaaagccgtgtggctcacagtgtgtctcctttccctgcatttctacgaaagcccgcgtggctcacagtgtgt

SEQ ID NO: 20241 - DNA, 1169 bp, Artificial sequence
  DNA replication origin
ccccacccatgtccttatcaagtcctggactgtgctcagcctcagtttcctcatctctaaacggaggggtcaagggtgtccagcctggggcctggcccccagcggtacaggtgcagccctcactcaggagatccccaaatgcaggtttctgccgctaaaaatgggttcctgtcctcaaagcctgctcaggtgggttttcaggtcattttaaagggtctcccttgcaccatgtgtgcccacggcttctttctccttgtccacagctaaaggcagggccactgaactgcaggtcacttggtcaaacgaatgagacaaaagctgagcctcaggtctaaagtgatttggaaaaccctctgctgatatacttcaaatgtttccacatgaaacagctgaaattcaaaagtatcccagaagaacgcaggaagtaaatcgattccaaacaaccacgaaagacctccccactctgcatcctatgtctcctcgaccctctgtccaccactgccacttctgaggggaagagagaggatgggcccaggcaggacaatgccatcccgaaaccacccgcacacctgcagcggccgaaggggcctggggtaaaccatgctccacaggtgaaaggtcgctgatgaggccctgagcatgggtctggctgctggtggagtggggtggaggcctggttgctggaggagtggggtggaggcctggttgctggtggagtggggtggaggcctggttgctggtggaggcctggttgctggaggagtgggatggaggcctggttgctggtggagtggggtggaggcctggttgctggtggagtggggtggaggcctggttgctggaggagtggggtggaggcctggttgctggtggagtggggtggaggcctggttgctggtggagtggggtggaggcctggttgatggaggagtggggtggaggcctggttgctggtggagtggggtggaggcctggttgctggtggagtggggtggaggcctggttgctggtggagtggggtggaggcctggttgctggtggagtggggtggaggcctggttgctggtggagtggggtggaggcctggttgctggtggagtggggtggaggcctggttgctggtggagtggggtggaggcctggttgctggtggagtggggtggagaccc

SEQ ID NO: 20242 - DNA, 1182 bp, Artificial sequence
  DNA replication origin
gccccgctccccaatggtctccagatggaggagggcccggtgcccagatggaggcggccccgagctctgactcccgaatggaggagggccccgcaccctaatggtcccccaggtggaggcgggccctgaaccctaatggtcccctagatggatgcgggccctgctccctgatggccccccaggtggaggcgggtcccgcaccctgatggcaccctagatggaggcgggccccgcaccctgatggcccccccaggtggaggcgggtcccgcaccctgatggccccccaggtggaggcgggcctgcactctagttggtcccatagatgatggctgtttcctctttctcatttacacagagtgagggcagtggtgaccacttcttgggcccaattgtgtccccggttagtggccaccgtgcaaaacctcagtttcttcatttgcaaatgagaggataggcgccaggaacttcagagaacctttcctgctctgaattctctcctgagagttgcctggcagtttcttctatagcattaatattgcaggagagctggtgtagactgactcagagatgatgggctcctggcgtgagtggcctcctggctcactgttagggccttcttgcattgctgtaaaggaataccgagactgggtaatttgtaagaaaagagatttaattggctcccggttctgcaggctgtacaggtagcatggtgccggcatctgctcctggggaggcctctggaagctcccagtcatggcggaaggccaagtgggagcttacacgtcacatggcgaaagcagcaagagagttgggggtggggaggtgccacacactgtaatgaccagatcttgtgagaactcactatcaccgggacagcaccaagccacgagggatctgtccctgtgacccacacacccaccctgccaggccccacctccaacattggggatcataattcagcgtgagatttggcggggacacagattcaaaccgtgtcactcactgaggctgggctggggcaggctgtcgtgagcggtacagtttttatcaacagtggctctgaacatgccgtgggtggaaaaagtcctttttcacgatgctccaaggtccctgccctcgcgcagcccagtactggacgtggtggaggggtcaccagggctccccacccttaacactgtatc

SEQ ID NO: 20243 - DNA, 1157 bp, Artificial sequence
  DNA replication origin
ggatagaaataaagagagatcagcagacatagcagcgaggagaaagagaaatctttatttagcttgtgcacaaggaagtcagcaccatgaaaggaaaacggtggggggccccgccgccagggggtggcacgtgggttagtttcacagggaagggattggtccaggcatggataggaggggtttgtctagtgcttctcagtagctttgcatgcttcttcatgcattgcatgcaacattcacattttaaatctctacccctaggtgtgatttttagcgtgaaaatgaggaaggggtaacaatagttgaagtataagtctaactgcacatgtggggcccggggaagtccctaggcccccaaagcaggaacttgtggttaatagcttcttgggtcttgtgctgtggattggctggatgttaagctacaacttgaggaaggggctttcgttctttttctctacaccccatcaaaacaggcaagcggccaggctgccggttttaaaaggagagactggtaaccgagacccaaagatgtggtctttgggataagaggaaagtgagagcacatggtgtcctggatggggagtgaagaaagcatgtgtagcaagaatgactatcgattttgctgtagttcccggaggacgaggactgagaactgaccactaacaatatagagatcactgacaaagagtttttagtggagtggttgtgttaccggaaaagggtcctgatccagaccccaaaagaggattcgtggatcttgtggaagaaagaattccaggccagtccacagagtaaagtgaaagcaagtttattaaggcagtgaaggaataaaagaatggctactccatagagcagggtgttcccaaaagcacgaggaggaaggcgtccacctgggtacgcttgtttatatgtaagataaaagccaaaaaacatcacgggggagacgtgctgtactacctgggctcgtcaaaggattgccaatctttgcataacgcctgtcctccgcaagcatctgtatcattatctttaaagcgaaacttcaactaagaatgcttcttgttcttaagatacccggacatcgggacctaagttccgggtctgctgcgtaaaagtttattaacctgttcccgtgaccgtaaacgcccgactcctgggga

SEQ ID NO: 20244 - DNA, 1307 bp, Artificial sequence
  DNA replication origin
ctcacacacgcacgtgtacactcacagatgcacgcgtatgatcccatcagttgcatcccccacgcccggagcagtgccggatcccagtggatgccctgacagatgagcgcctgagaaatgccaaagctgctcgccaggtgcaggcgcagcacattgagaaggttcatcctttcgggaagtggcgtgggagttcccgcagacactcaagtgcagaagaggaaggtttcctgctggaggccgggcagctccagaaccatccaccgtggcccgggccccccacccccgtgggactctgccagcgatcacgaccggagtcttggtgctggggatgcctccgggacttggacaacctccagcctgggacacaccttgtatgagcccattctcacgctgctatcaagaaaacccaagactgggtaatttataaagaaagaggtttaattgactcgcagttctgcatggctggggaggcctcaggaaacttacaatcatggcggaagacacctcttcacagggtggcaggacagagaatgtgtgctgaacggagggagaaggccccacggggatactcactcgttatcacgggaacagcatgggggacccgaccgcatgatccagtcacctccacctggtcccgagattgacacgtggggattatggggattacaattcaacctgagatttgggtggggacccagagccaaaccatatcacacctggaacaggggcgaggaactgaaagggggtctctggaggaccagcagatggaggatgcagagaggtggaggagatgggggaccagaaaggatggaggacggggaggggtgcaggagacgggcctcctgcaggctgagctggggaagaggccagggcccggaaaaggacaagagagacagagatgagcagcacgtggggtgaaggggtggaggggcccaggcccaggggagagacagagaaaggacagagagatacggagaacagagacagaaaacagagagagacagagaacagagagagacagagaacagagagagacagaaagagatagagagaaacaagagtaatgagagatagaggcagagatgagagagacacagagagacagaaatagagagagacaaaagataaagagatagagacggagagacaaagaagagacagagagagaccaggaggagaagagagattggcagaggagactcaggggctggcaggtgaacctgggaggggcggctctggtgaagaagggagtgaggaggtctgaagccggttgccccgtgaatctgaatttcgcgagtgtcccggga

SEQ ID NO: 20245 - DNA, 1991 bp, Artificial sequence
  DNA replication origin
ctccagcctgggtgacacagcaagaccctgtcaaagaagttctatgtgggttttctctgtgcaagcgtcattgcccctcagcctgcatcgttcaagggttaaccacatccacccaacagatgaatgtgaccatattgcagaggaatgacacagtcacactgaaggaagtcgagaagtaaaggaacgcctgaagtcaccgcggggacagcgttgactggacgctgaaggtgaggctgaagacaagacacgctgtgcatggatgccaggctctgggtggtgggtctgtccctcacgggggtgtatcagcaagtctggagccagttcacccgcagctgggactagacaagcaggtgaaggtgtgaaagccaggtttcttcagacaagagatgcaacaggtaaagcggcggacgagaacaggcctgcactgctggggtgggcatggagggacccgcgctgctggggtgggtgaggatgggcgtgtgccctggggtgggtgaggatgggcgcatgccctggggtgggtgaggatgggcgtgtgccacttgggtgagcgaggatggggcacgtgccgctggggtgggtgaggatggacgtgtgccctggggtgggtgaggacagggcccatgcgtctggggtgggtgaggatgggcgtgtgccctggggtgggtgaggaggggcccgtgtcactggggtgggcgaggatggacgtgtgtcctggggtgggtgaggatgggcgtgtgccctggggtgggtgaggatggacgtgtgccctggggtgggtgaggatggacgtgtgccctggggtgggtgaggatggggcacgtgccctggggtgggtgaggatggatgtgtgccctggggtgggtgaggagggggcatgtgctggtgaggagggggcgtgtgctgttggggtgggtgaggacagggcccatgcccctggggtgggtgaggaggggcccatgccgctggggtgggcgaggatggatgtgtgccctggggtgggtgaggatggggtgtgtgctgctggggtgggtgaggacagggcccatgcccctgaggtgggtgaggaggggccggtgctgctggggtgggcgaggatggacgtgtgccctagggtgggtggcagcagcatgagctcacacggtcaatctacacacatgtagattgtttgtgcatgggggtgagtacacaggcatgcatcttctggctctgtccaccaagagggcctagacaccgggataccccagtaccaaaggaagcacagggtgcaggtctcggtccccgacgtcaccctccagtgagaggaccccacaggcctcggagtctcggctggcaccaaggccggggcagggaaacgtcaggctgagcttggagcactcacagtcccggaacgtgaggaaatgcgtgaacgggagcagggcttgtggggaggggacctgggagtcaagatgaaagctcccacgcgccgggtgatagtttactggattgtaacccacagaataaaaagccgcgagcccacagtgacgcacacgaacaattcgctgagtgaagagtcggtgtacacggagctgccctttctccttcctggccctggtgggagaatttttatcacaagtgggtgatgggttttgtccagtgcttttccatgtccgccgggatggaataaacgtgacgtttgtctgtggccctgtcagtgtacagcacgtcacggatcatctgcatgtgtgcccaggaccggggcagtcacccagcagatacgcacgtgggacccggcttggcctcatggggtggcggctgtgtcttggttttcatttggttcagaaggtgggtacggaccaggcatggtgtctcacgcctgtcatcccagcactttgggaggccgagacaggtggatcacttgaggtcaggagtttgagaccagcctggccaaaaccacccatctctactaaaaatgcaaacattagctgggcctggtggcaggtgcctgtgat

SEQ ID NO: 20246 - DNA, 1079 bp, Artificial sequence
  DNA replication origin
tgggaggggagttggtgggggtggggggtccaggtgtgaggcctgggaggggagttggtgggggtggggggtccaggtatgaggcctgggaggggagttggtgggggtggggggtccaggtatgaggcctgggaggggagttggtgggggtgggggtccaggtgtgaggcctgggatggaagttggtgggggtggggggtccaggtgtgaggcctgggaggggagttggtgggggtgggggtccaggcatggggcctgggaggggagtcagtgggggtgggggtccaggtgtaaggcctgggaggggagttggtgggtgtggggttccaggtgtgaggcctggaaggggaattggtgggggcaggggtctaggtgggaggcctagaaggggagtgggtgggggtccgggtgtgaggcctgggaggggagttggtgggggtggggggtccaggtatgaggcctgggaggggagttggtgggggtccaggcatggggcctgggaggggagtcagtgggggtgggggtccaggtgtgaggcctggaaggggaattggtgggggcaggggtctaggtgggaggcctaggaggggagtgggggtctgggtgggaggcctgggaggggagttggtgggggtggggggtccaggtgtgagacctgggagaaaagctagcagaggcagagggtttaatccacccacctcgcaagagtgtcaggaacaacaggtcatttctcaaaggcagtgaggcatagaggttggagatcagacctcacatcacactgagggtgatcccggtaattacaaattacatttgcaacagatcagtacacagagaacatttaaatagaacataattagtacgctcagaaaaatcggtaaaacacataattagtaagctcagaaaaatggtaaaacacagaaatactaatgaaaacaaacacatctgcatattccagtgcggccgagcttctgtgagagacccgttgccgttcgcaagtccgaggtgattcaaccttttaaagccaaggtcagcgtgattcttccaggataatgagaacatcgacaccatttgactcagga

SEQ ID NO: 20247 - DNA, 1400 bp, Artificial sequence
  DNA replication origin
atctcaaaataaataaattaataaataaataaaataaattttaaaaagaaacaatggatattaaaaattggaaacaaagaaactaaactatgtattgaggaaatgattacttacaaaaaatactgcaatccacaaattatgagaattaaaatagtttaacaagatgctccaatctagaaatcaacattcgaaagtcatttgcagttttctatatgggcatcaaacacaaatgtgaaaattcaaaccccaaaataaaaaatacttaggaataaacctaacaaaatacatataagatctgtgagcagaaaattattaaagtttaatgaaagacttcaaagaagaccagagagagagagacagagtgagagagagcaagagagagacagcatgagagagcgagagagagggagagacacagagagagagcgagagagacagagagagagagagagcaagagaaacagagagagagagagacagagagagagccacagagagcatgagagagcgagagagagagacacagagagagcgagagagagcgacagagagagcaagagagagagcgagagagacagagagagagagagccacagagagagtgagagagagcaacagagagagagcatgagagagtgagaaacacagagagagagcgagagagacagagagagagagagcaagagaaacagagagagcgacagagacagagagtgagagagagcgacagagagagagcatgagagagcgagagggacacagagagagcgagagagacagagacagacagcaagagagacagagagagcgagagagagtgacagagagcatgagagagcgagagagagtgagagacacagacagtgagagagagcgacagagagagcaagagagagagcgagagtgagagagagagagacagagagagagcgagagagacagagcgagagagagcaagagacagacagagagagagcaagagagagagcgagagagacagagtgagagagcgagagagacagagagagagcgagagagagagagcaagagagagagaggtttgtgtgtgggagtcaatgttgtaacaatgttattccttccctctgtaatatctgtgtacaatgcaactcctatctaaatttcaccggcattgtttgcagaggcagggaaagggagttgataagaaggcagaaaagggccacaaagataaagtagtctaagctccagaagctccgagtgccgtggtgacggcagggcagcgtaggtggacggcaggggagcatgggtggacggcagggcagcatgggtgggtggcagggcagcgtgggtggacagccagtgctggggccgggtagaaagttggtattctgaaaaaatcacatctgccttttctcctgtcc

SEQ ID NO: 20248 - DNA, 1065 bp, Artificial sequence
  DNA replication origin
gcacctgtgtgcgtgccagggagggcggagatgtgtgtgagggcatgtgtgtgtgtgctgcggaggacagggaagggaagggagaggaggtggcatccagggaagggctgaatggggacctactggccagtggagtgcggacgccggggtggagaggtcaggggagccacagcagaaggtcccagccttcacccagggaactcagcaatagatcagggaggggtgaactggctggaacttcccacacctgctgctctggtcatttcatggaggaccagaaggaggcaggaggcgtctcagagccgctgtagcacgaggttttgcggctcaggccccagctgcgtaccagggtctgggcactgtaccctccagggctgcaggaagggaggcaatggtggaatggggttggggttgaggacccagcagtccagcgtggggtggctgggtgggagaggcggcgccaggctccaggagcttcctgcctggggtccccaaagctattgggatgggagaaagctggccgtgctctggacgggtgtgggaggcctgtggcaagaaagggactcaagacagccctggaagcaggagcgaggggaacccaggtcagcaggggatggcgctggtgtggcccgtcatgggttcccagagtggcctcagcgacacttctggtcccacccgttccttccagccctgccactcagcaagaggtggggcccccctgcccccatgagccccatggaggagctgtatgtcacctgcggcccagcccagctaagttctccagggacaagcaacgagggggaggaagggaaggaggaggaggaggaggggcggtgaggctcatcctgtctgggggtcctccttggccgccctgagtgtgtgggggactctgccaggcaggcactggggcttggtggggggccctgacctcccatgacctctcgccgaccctccccccgcccgctgccctccacgctggacgacgggtgctgcagcaccttcaggcccacagacacccggcagggtcccctctgtgccctcagtccatcctcccgttcgtttggg

SEQ ID NO: 20249 - DNA, 918 bp, Artificial sequence
  DNA replication origin
ccatcgtgggggtctgagcacacatgctcggcagatgctggatctgtgctgggcttctgagcatcagaggcctcagtgtgcccctccaggcttcctggtcacctccattgggtgcagcaggaagcccccgggctggggcagggacaggagctcagatggagacaggaggttcaacagctaatgtccccactgtgacaggctctgctttccaccagtgtggctgggagcacctggtggtggggacacccagaggggcctgggtgggagacccccgcacctgctcccacctgcacactgacctcccgcctgtctctatgggggactctggccacctatgtacaacagagggggaattagactgtggccaccctctccagaactgcaccccgttcctttctgcagcaggacgggctggccaagagcaaccgattgtcgagataagaggccgatagctgtcgggcacggagctggtgggcgccaggctggcggggcgtggggcaagcctccgggaagcgactgatgagagagcagcgggaggaccagaggtgatgacgaaggcagggcgggagtgggacgggggccgcacaacagagaccctaacctgagcccgctgacccagccgtctgacccctgtccagggacaggtgggtgcggggtgtgagcagagaggacggaggcaggtgtggctgtgggcagggtggcttctctaaggtcccccgtggtagtgggggatctttttgtaggacggagtcatgggcagcctgggccagccagggaggccctgccagtggggaaggaggtggctgctcctacggctgggccagaggtgtccctgatgtccgtggatggtcctggcaaccaagaaagcggctgctcttcctcctccacacagccaccttggtgagggagacggggcgg

SEQ ID NO: 20250 - DNA, 1052 bp, Artificial sequence
  DNA replication origin
ggcaaccaagaaagcggctgctcttcctcctccacacagccaccttggtgagggagacggggcgggtcagggacggggcgggcgcaggaagcccagctctcaggcggtgaagggggcgggtccaggagggggtgtgaggctggctgggaggccccgggaatgcgcgcgacggcaggccgtctgcccacccgtgccacctgccctccccccacgggccctcggcccagctcctggtggccgtgagcttgtcccgcagctcggagatgctgcttagcggggcgcctcgtcattggtcgtgcgcctgctcagtctggggcaggggctgggacagcgtctttaatccccggtgccggtgcggggatcagggcaacgtggagtgagacagcgaagggatggcgccgtgagccctcagcgcggggagacacacgccgggccggggcgccaggagcgggggtggcggggaggggagggagggaaggctggtgacgtcagtggttccagttccgcagcagcggaggccgcggccggggacgtgagacaccagctgacgcccggagcctcacaacctctgcacacacattctcctgagggccggtgcctggaaacaaaggccacccccgccggccggaaacttctaggctggcaatggagatgggacatctggtgaccccctctgtatcctcctctcccttggggtcctccaggaagggctgcgtgatcaatgacccacttttttgttttgtttttgagatggcctcttgttctgtctcccaggctggggtgcagtggtgtgacctaggttcactgcaacctccacctcccgggttcaagcgattctcctgccccagcctccctcgtagctgggactgcaggtgcgtgccaccgcgcccggctaatttttttttttttttttgagacggggcctccctctgtcgcccaggctggagtgcagtggcgctatctcagctcactgtaaactccacctcctgggttcatgccattctcctcccgagtagctgggactacaggtgccctccaccacgcctggctaa

SEQ ID NO: 20251 - DNA, 2261 bp, Artificial sequence
  DNA replication origin
gctccacaaggtcatatgtgttctctttatatattgctggaattgatttgatgttttgttaagggatttttgtgtctaggctcctgagtggactttaattttcttgtcatgtccttgcatggttttggcaccagggtgatgacagtttcacagaggagctgggacatggcccgtcttcctctgtgtcctggaagtgtctgtgtagcggggtgcttttcctccattagtgtttggtgggctccactggtgagtcttggcctggacgtctttgtgagactgggccctttcctaactccggcaacagaccttcgtgctcgagagccctggctcctttggggctcctgctcccaccttacacgcgacagagggggaccgagggctgtggcatcacagtcgtgggcatctactggctggccacaccctggtacaccctctcctggggcaccccagtaccaggcccgctggaaggaagggcagtcatcctgttgatccccacaaagatggcagcagggagggcgcggcgtgctatggagaaggcgttgagtctggggttttgtgcagcaccttcaagaggggacagcagggccaagggaggctgggagggcgatttgaggataggcactcaagaggctgaaggctgactagcctcttgcgcccggaggacaggcagggagccagaagagaggccccagactgagccccagaggccaccaatggcataggctgctcagacacagacagggaagaaaaggcctcagggctgcagtgagggttgggagagggatgcaggctggcaaggaggtgggaaggaagaaagcaagaattttggccactggagtagccggatgcaaacggtcaatagggcaaaatgctgctgaggatgtcacaaaggtgcgtctgactctgctgcagcctgggaggccaggtgaccatggcagcagagagagggcatctcaggtcaagtgcccctgccctctggctgtggcctgacgccctctcctggtctcctgcacaccctcggcctctgttggcacctggaccagaccactcccagtcagcctccagccagacctcactgcttgacagtttctccagctggaggtcccagtctacattcagctaaaaatgtctgctgtccccactcacagcagcagcagcgggggaaaggggagtgccctctgcctctgtcccatgctctcagcccccctcccctgcccccactggtggggccctgattgctcatgctcagaggccccagaattgggtagggaggacccttagtccacagcatttgaagggaagcagggcgggcgggtgcaggccgagagtggacaggtgctttggggcccactcccctccccagctggaaatacagacagcccaaagagcaggagggcgcactgggaagaccccgcagtttcctgagctcatacgggcttaccagcgtggggagcggaccacggtcagcagcagtgtgtggcagagcccgcaggggaaacgttgcccgcagaccatacacgggcaagatctgggacccccacttctgcagcgttccgggtctccctcacctctcccctcccaccaccttctgcagcacgggcttaaggaaataccagtgtttttctgcaaagaaacagagggtccgtccaggtctggctgcctcttcggctgcctgtgtttagacctccaaaggctgctcccggcaacccctgcccagctgctcaacctgaaagaggggtcggtagcaagggccgggaggcgccagggcgctgcggccggatcccaggtgagttccttgactccgcgccgcgcaggtcactgtggcataactgggaaaaccgccgcttctccctcgggagcggaggcggagggccacgtcctccctgggggtgcacaatctctgcttggacaacgcccgcgtgcagtagccccacagactcccatgcagcccccccgccacgtgtgccgcatccgcgccctgcatgcaacacccgccccctccagcgcagcatgcccctcgctggcgtgcagcaccccccatgtgtgcagcacccctgccccgaatacagcacctctccccagtacagcactcccgccccgcatgcaacactcgcccccctccagggcagcatccccatcccccgcgcgtgcagcaccccctcgaggggcgggaaactctttgggacacccggggtcacgccctgcagggtaaaacccccgtccagggcagccatctgcaccccctcgccatgggcccactg

SEQ ID NO: 20252 - DNA, 2106 bp, Artificial sequence
  DNA replication origin
ggccggggcggggaccggggccggggaggccgcgctggcagcgcgctgggtggggggcgcccgagggaggccccggccgcgaagccgcaggcccggcccgggccccggccgcgaacaatgggcggcccgtgcgcccccgtccgctcgtgcgccccggttccgccgcggatcccgcaggccgcttggctgcggtcggccgggcgcggcccaaggacacgcggcgcggcgcggggcgcgcaggcggacaggggcgcacgggacggcgcccctcgggccccgctgcaggtgcgcggcccgggccgcattgtgcgccccagcgaccgggcccattgtgccgcgggaggagggggccgcgcgggcgcccatctgccgtctgccgcggccgcgctaataggcgtgctgcccgagcagctgcgcccccggcgggactcccacctccgcgcgccggccaccggggcctccgggcaggcccgatctccctccgcggtgggggcgggagagtgcggggacctgcagagggctggacagcgccttgcgctgctccggctcgggctcgggcgggcggagcgtctgtgacctgcattcccacggggcagggagaggccattggtgctgggaccagaagtgcgtgggacctgacccgtggagcagccccgcggcctgccggtggagggggcttcccggtggggcctggctgtcattctagggaacaggccgggtccctgcggggccgaacccaggccagaggcaacccagctaccctcgcatgtggccaactctccccggcccgctgggtttggctagcccttcatctggtcaggcacattcacagagtcgcctttgtggaggctggggctcagccattttctttcttctctcaggaccggcctgtctcttggtgtccccgaggtcccacggcactgcctctcccttccaatccgagaagttccttagacccgggcgggcaggggtggagggaaggaggaggagagcgctggtgcagggtggaggctcagcccctcacggctgcacagaggaggagctgggaggtggcgttggggaaagaaagtgggccaggcccaggctcttgggggagggccgtggctgtgatgtaactacggcagagctgcaggaaggggtttagactgaggggttcaggggagctgcctcaccttgggtgcacagccttccgccacccgccacggcacggaagggcccctggccacagggcaggacctgggcaggtggggtggtgcagcctgggttggagaaggaggtggcattcagcccatgtcacctgagttcaaaattctcgtctttcccggaaagaaaaactagtgtgtgaaatccgtggtgaaggaggggcccagggcagcaggatgcaggagtcagtgagataatccaattacggtcccaataaaatgttattataaggaaacatctgcgtgtaaatgaagacacgatgagttatgtgctgtgcgcggcctcggtgggtaggggctggtctccactcttcatggcattctgctggcggcagttaattacgggaggtttccactgtaattaacagtaatgaatacaaaaggatgggctgtgtgtgtctacaacgtgctgagagagatatttagaaaacagctcgagggggggcacaaagcggcccctctctcccgagttatgacgggcagagcgcaagcgtgtcaccgggagggccctggagaaggccaccatttctgtgcgtcttctgttgctgctgctgaagggtcaccaggagttgggtggacatggggcctggagtgtgtgtgctgggccacttggcaccagatgccaggagagctgccaggtcccaagctcaagagggagataggcttcctgccaggagacctccgtgggagaacgggaggctgggcttctggccgccaccacccgaggacgatctgatcctgccgttgagaacgcttctccttccagggacctggccacaggggagctgtggaggccttgcttggggggccattggtgtggacgcgactccagccccttccccgtgtctgtggctggcagctttgtttggccctctctgttcatctctctcagcctgagaccttg

SEQ ID NO: 20253 - DNA, 3265 bp, Artificial sequence
  DNA replication origin
cacttggcaccagatgccaggagagctgccaggtcccaagctcaagagggagataggcttcctgccaggagacctccgtgggagaacgggaggctgggcttctggccgccaccacccgaggacgatctgatcctgccgttgagaacgcttctccttccagggacctggccacaggggagctgtggaggccttgcttggggggccattggtgtggacgcgactccagccccttccccgtgtctgtggctggcagctttgtttggccctctctgttcatctctctcagcctgagaccttggaaggaggagctgctcgacttgaggtggccactgagagggaggtggtcagtggcagtggcagtgagccttgtggtgccacgagagcccttccacccggctgacccaagctggggcctgctggacggtgggccaaagatgtggtccgaaacctgcccttggggagtctggccgtgtggggaggggagaccacgcagcacccccaccggggcctggaggacgcccttctagacgccgcagggtccggtcggctgtcttcttctgcctttcagcgtgagcgctgcatggtctcacctgtacggcacctccctgtcttgttgggtctgtgcgtcctgcagggccagtgtggctgtagggtcgtccttctgcatggggcgtcctctgcacagctcccctcggtggctgtgggggttgccttcagtggtctcactgccggtgccaggcaccaggtgaagccgtcagagcactgagcatctgtggaagcctcctcgccggctgcttggtggtttctggccaagacttagggggatgtaggctggggttggggtgggaacccacctgcaaaggtgctgccttagcttttcttggggctgagaaaggcttgtgtagcctcatctgagcttgacccctgcagagatgccgagacacagtccctgccagcaagggcaaccatggaggttggagggcgcagacactccgagttggagcatgcaggtccaggagggtgtgtggcacgggctgggtggcttttgtccctgcgcgcctttgtccctgtgccccatcagtacgtggagcagggcaccttcttgcccaaacctcggcttagctcctgaaatctgggaggcctgggagggccctgtgggaggagctggagaacctcgggcccttggagctgttcttgggggcaggcgggtgggctgcatgggacgatgaggggcctgccttcgggaatcctctgtctggggggcgggagaaaggaataatggccgcgatagggctccctgcgagggaacgaaggagctaggatgaggggctgccctgcagctcacctggcagtgttcacctgctgtggcgtgggggagggacctaggctgccagggacctggggccgcccctccatgttctcaatggcctttaggaaggttgagccctggtggctgccagggtggagaggggtcctgggatgggaggagtcattgaagatggaacaggtgaggggagggagagcctgtgcctgggagaccctgggggtgaccccaggcccagaagctggaggcagatgtggaggggaaggaagctggtctgagatggggtctgtttagaaagttgagcaggacgggcagcgatgggctgtggtgtgcaggtccctggagatgggccatggagatgggtcctggagatgggtcctggagatgggcccctggagatgggccatggagatgggtcctggagatgggtcctggagatgggtcctggagatgggtcctggagatgggccatggagatgggtccctggagatgggcccctggagatgggccatggagatgggtcctggagatgggtcctggagatgggtcctggagatgggccatggagatgggtccctggagatgggccatggagatgggtcctggagatgggtcctggagatgggccatggagatgggccatggagatgggtcctggagatgggcccctggagatgggccatggagatgggtcctggagatgggcccctggagatgggccatggagatgggtcctggagatgggtcctggagatgggtcctggagatgggccatggagatgggcccctggagatgggcccctggagatgggccatggagatgggtcctggagatgggtcctggagatgggccatggagatgggccatggagatgggtcctggagatgggcccctggagatgggccatggagatgggtcctggagatgggtcctggagatgggccatggagatgggtcctggagatgggccatggagatgggtcctggagatgggtcctggagatgggcccctggagatgggccatggagatgggtcctggagatgggtcctggagatgggccatggagatgggtcctggagatgggccatggagatgggtcctggagatgggtcctggagatgggccatggagatgggtcctggagatgggcccctggagatgggtcctggagatgggtcctggagatgggtccctggagatgggccatggagatgggtcctggagatgggtcctggagatgggcccctggagatgggccatggagatgggtcctggagatgggtcctggagatgggccatggagatgggtcctggagatgggtcctggagatgggcccctggagatgggccatggagatgggtcctggagatgggtcctggagatgggccatggagatgggtcctggagatgggtcctggagatgggtcctggagatgggcccctggagatgggccatggagatgggtcctggagatgggcccctggagatgggctgtgcagggctgagcccggagagcgcatgggtagacaggacccggcagcctccccagccatgaaggtgaaggtggactcagcgtggggtgtctgctgcgagaccccaggaattctgtggccttccccacatcaggccctggccatctgaccccagctgttttgtcagggcagcagcagcctggggctggactgaacccctcatctgccctgcacggggtttctacaagctgaggtctcaggacgctgttctcaggggcgccgtgcacagagcccggggagccagcatggtgggtagccctcccatctgaagtctccctggccccctgaagtccctggaaaggcccatttggtgtcgctgggcgccatgtcagtgactgcgccagggtggaggcctcaagatgctgcccctggcgtcttcctgccctgcatgccctccacaggg

SEQ ID NO: 20254 - DNA, 1018 bp, Artificial sequence
  DNA replication origin
gggcagggcccagaactgcacagtgatgccccacagtgccaccatctaggcacagccccacataggtggatgccggcggccggcagtcacggggaccagcccgcctcctctcctggtgccggctgcccagcagggctgctgacttcagagacagcctgaccctccccaggtgcccaaagaagctagtctgtgcccagtgaggactggaaggcacagaagccctcaagcaagcgccaccaggtgatggcaaaggggccttcccgacggctcctcctgagcgccagtggccgacggggaggcacagcccactcaggctgttcccagggactggggtctgacctgccctcgggccagcctggagggggtctcctgtctgcttcaaagcacccagagcgccggagcagggtgaggccatgatgagagggcccggggtcactccgcagactcgggagtgagaaccaggagagctcgcttaggcccaggtccgggagccggtccgagcaactctggtgtcctggggtacaggccttgctggccccatgcagtcctcgaggcggctgtaagggaagagggaccaggagtgggggacgtgggtggaagggaagagggaccaggagtgggggacgtgggtggaagggaagagggaccaggagtgggggacgtgggtggaagggaagagagacgaggagcgggggacgcaggggtccacacacacctggcacagcgacaaccttaagacactcccagccaccctcagagcaaggaagggacctggccacctcggcagccaacgatggtggggacccagaggccctggagcttgggtcgtgggcaggagccacggcccttgatagtagctccagctgggcctgcgtgagatttgccagaaacagatccccttgaagcctagaggccaacctcacatcacagcccaggccctgcattccccagtggttctggacacaactccctgctcgggcagatggtggagcaggcggggcagcagccagccacggtg

SEQ ID NO: 20255 - DNA, 904 bp, Artificial sequence
  DNA replication origin
tgcaggggtttgggcccccgccctcctgtgttgccaaataccagctccgctcgccccccatgcaatttgctgagctctctggggtcctgagtggcagggacagcccaggtgtggctcagtttatctttttattgagacagagtcttgctctatcacccaggctggagtgcagtggcgtgatctcagctcactgcaagctccgcctcccgggttcatgccattctcccgcctcagcctccccagtagctggaactacaggcacccaccaccatgcccggctaatttttgttttgttttgtatttttagtagagatggggtttcaccgtgttagccaggatggtctccatctcctgaccttggcagccttggcctcccaaagtgctgggattacaggcgtgagccactgcgcccggcccagtttatctcctaagaagggacctctggcggctgggcagggagaggaaggccaggcaggaggaggggaaggctgggcaggaggagccgctggccgagggacaccctgacctcggcaggggagcgggcaacaaacagtgtgaggagctgggacagagttgggaggttcctgtctccgtatcttgggtgggtttaggagcctgtgggggcttgtgggggtctgggaaggctggggatggaatggcacaggtgcagaccagcgtctgacgtggacagaaggggcgcctggggctgggccaatcactcggcaaggggtgtggggcctgcggggccaaggagcaggggctggatggggtcactgccacgcaggtaggcaggaaggaccgagcgctggagatgcgggctgctggctggggccacactcaggaaaggacggacctccccacctcggcacagagcacaatctttaggctgccctgagcccaagag

SEQ ID NO: 20256 - DNA, 1024 bp, Artificial sequence
  DNA replication origin
acggtgaaaccccatctctactaaaaatacaaaacaaaacaaaaattagccgggcatggtggtgggtgcctgtagttccagctactggggaggctgaggcgggagaatggcatgaacccgggaggcggagcttgcagtgagctgagatcacgccactgcactccagcctgggtgatagagcaagactctgtctcaataaaaagataaactgagccacacctgggctgtccctgccactcaggaccccagagagctcagcaaattgcatggggggcgagcggagctggtatttggcaacacaggagggcgggggcccaaacccctgcagaggatgccagcaagccccaggctctcaggatgggccacacggagctggcatgaggaggcctgcagaggccaggacagctgtgtgtccagcactcggccgcctgctggctgtgctgctggagggtgcgggggtgggcctgtcgctgggccacatcccagggcctgtggtggggctggcagggtgtcagcctgcagcttggaaaagaggagcccaggcatctgctccctccacgaggtacacgcatgtgtgtgcatgtccatgtgcaggtttgtgtgcgcctgcatatctgtgtgtctgtgtgcgtgtgtgtgtgtggtgcgtctgcatgtgcaggtgtgtgcgtgcgtgcctgcctgtgcgtgcaaacgtgtgtgcgcatgtgtgtggtctgtgcatccttgtctgcctgcacctaggatgacaggcggaggctcctagggtttcccagggaagggggtcccaacgtcaccacagcgacttggtagccattccctgggctgccgagggtggggcctggcaggtgcagagcggagggagctgcaggccctggaggaggctgctgtggtggctgtggtgtctgcgtgggtcccccacatctgatgtctccttcccacccctgccctctctgagcttggtgtgggtcaccggctctgactggctcccgctggccacctctgctgtgtccacgacagcccc

SEQ ID NO: 20257 - DNA, 997 bp, Artificial sequence
  DNA replication origin
gctggagctttctcttggccacctgaccagttcccctccctgtgtccagcagtcctctgcagtcccacactcatgccccaggaatccatccagctcctgctgatcctctcatagcccctggctttggggagggtggagtccagggtcccaggtcaccatccaccttagaagtccagcgtccagccccagggcagcagccacgggagaactggggagaaggctgtatggggtgggggtcttcacacagcggccaccaggctgggggtatcctgaggtcaaagcctgtgccacgtccccccatcttcccaggagacacctgagtgctatggccactccttgtcaggtccagggcctggaccctcaaggacacccctgtggctgccatcctgacaggcggaattcatcgcagaccctcaacctgatggcacaggtcagggttcacgtcggaaccctccccgctggtccttactagatctgagagtgagtcaggtggggtgtgtgtgtgtgcacatctgcctgtgcaggggtatgtgtgtgcacgtctgcctgtgcaggggtgtgtgtgtgtgtttggctgtgcaagggtgtgtgtttgcctgtgctggtgtgtgtgtgtgtgtgtgtgtggctgtgctggggtgtgtgtgcatatctgcctgtacaggggtgtgtatgtctgccttatggaggtttatgtgtgtctgcctgtgcaagggtgtgtgtgtgtatgtatctgtatacaggtgtttgcctgtgcaggtgtgtgtgtgtgtgtgtgtatgtctgtgcaggggtgtgcatatgtgtctgcctatgcagggatgtatgtgtgtctgcctgtacagggatgtgtgtgtatgtgtgtgcctgtgtaagggtgtgtgtacacacatctgtgtgtgccgtctgaccctggaggcatgggcctggctttcctcagggcctgcatttccctctctgtttctctgccccgccccagccatccccttcacccctt

SEQ ID NO: 20258 - DNA, 1322 bp, Artificial sequence
  DNA replication origin
gctcatttaaaacagttggagtgttggtggttttgtaacgaactggtcagagcaccttccgtgagaagggccttttcccccagttcaccggggctcccctgctcagggtgtgccgggggctttgagtcacttctgtgtctccttggaggctgtgtggcgtccgcggaagttggtgtctgtgcggtgtggttctgtttatgggtgttgtagagaaggcgccgtccagagacagagccactgctgaggtgggtggggggtgtatgaagggcacaaggacgctttgggggtgtcaggtatgatggccctcaggtcatggtttcacacgcgtgtgctttaaatgcgtgctggctgtcacgtgtcagtcgtgcctccacagagcttcaggaaccaccgagatggggagcctgccggagacacaggttttctgagcgcaccagcggctccaaaagcagagggaagagccctgcgtgcaggtggggcgctcatggcgtcggcctcgcagagcggtgacggacacagagtccgtgtttgggggggtttgggacgtcggcctcgcagagcggtgacggtcgcagagtctgtgttttggggggtttgtgacgagtccgtgtttgggggggtttgtgacgtcggcctcgcagagcggtgacggtcgcagagtctgtgttttggggggtttgtgacgagtctgtgtttgggggggtttgtgacgtcggcctcgcagagcggtgacggtcgcagagtctgtgttttggggggtttgtgacgagttcgtgtttgggggggtttgtgacgtcggcctcgcagagtggtgacggacacagagtccgtgtttgggggggtttgtgacgtcggcctcgcagagcggtgacagttgcagagtccgtgtttgggggggtttgtgacgtcggcctcgcagagcggtgacagttgcagagtccgtgtttgggggggtttgtgacgtcggcctcgcagagcggtgacggtcgcagagtccgtgtttgggggggtttgtgacgtcggcctcgcagagcggtgacagttgcagagtccgtgtttgggggcgccgtgaaagcacccagcgtagtcatgctgctgtgtgcgatgggtgctgggcccgcagacttcggtgcttcaaaggcctcactgctgagcacgagacgccgcttttgatgtcgtcaggctctctggtccccgggagtggactcgggggctccgagtgcagggctcacactgtgtctttgagggctggtcacccacccaggcacacctgtggccctgagtcagcactgcctgacgcccaccctcaggagcccccgcct

SEQ ID NO: 20259 - DNA, 1126 bp, Artificial sequence
  DNA replication origin
cacccagcgtagtcatgctgctgtgtgcgatgggtgctgggcccgcagacttcggtgcttcaaaggcctcactgctgagcacgagacgccgcttttgatgtcgtcaggctctctggtccccgggagtggactcgggggctccgagtgcagggctcacactgtgtctttgagggctggtcacccacccaggcacacctgtggccctgagtcagcactgcctgacgcccaccctcaggagcccccgcctgcctagggtgggaccatgggggaggctggtcctccattctcaggggctgggggacaccccttctggttgagaaggccacaggtggcccccccgccacccggcaggcacagcagggcaccaccgagaccactgtggcctgaggaggagcttcagcagccacttggtaggagggccttcgacggcccttttgtgcagaaggtgggtgttccccagtctcagaggccagggcccttgctggctggggtgggggctccagcccagggccccgctgaggggggcaggagcaggggcggagagaacagccgtgcgtctgccttttctgctcccatcaccatggcaacagatggagatttggcaggaaggaggagggggcgggctttggaggaggcagcccaggtttggagaccagctggggatcctcaggggcctagggtgggggctccagtctcaggctggctagttcctccttcctggtcactgagccagccttgctgaggggagagcgggttctggacgtgctctgagcttccttcctcacagccttgctcctgggccagatcagcaggaaagcagccagtgccccgccatggcctgcccgggtggggtcctgaagctggggccggagcagggggcacagttctgccccatctggccctagtttggggagggagcctggtagggcaccagcctcaccccatgagccctgagggccaccccagccgatgggcacgtccccgccggccctgcatctgtccttcctccctctgctccccaagagagcccaggtctggcccagcggtgggcaggggaggggccgcacatcacagagtgccagctggccacactcccggcccacagctgctccagccgcacctccac

SEQ ID NO: 20260 - DNA, 1237 bp, Artificial sequence
  DNA replication origin
acagcagtcctgcggtgggtggagtctcagctgcgccgccccgtcctgcggtgggtggagtctcagctgcgccgccccgtcctgcggtgggtggagtctcagctgcgccgccccgtcctgcggtgggtggagtctcagctgcgccgccccgtcctgcggtgggtggagtctcagctgcgccgccccgtcctgcggtgggtggagtctcagctgcgccgccccgtcctgcggtgggtggagtctgagctgcgccgccccgtcctgcggtgggtggagtctcagctgcgccgccccgtcctgcggtgggtggagtctcagctgcgccgccccgtcctgcggtgggtggagtctcagctgcgccgccccgtcctgcggtgggtggagtctcagctgcgccgccccgtcctgcggtgggtggagtctcagctgcgccgccccgtcctgcggtgggtggagtctgagctgcgctgccccgtcctgcggtgggtggagtctcagctgcgccgccccgtcctgtggtgggtggagtctcagctgtgctgccccgtcctgtgattggtgaactctgagctgtgctgctctgtcctctctggtctgtgaagtctgagctgtttggtaggcggggccgagggagcaggcgccctcagaaaatgcgagacagggtcgggttgcggggagggcgtccagtggtgggaggggcccagcagagctgaggtgtctgtgggaaaacctttactgagccagggacagtggctggggggtcagataaggcagccccagcccagaggggatcctcctgcctgctgggagtgggcaacggtgccctggctgcacagatcaacccaggcccgttggatcactagccctggccgcacacagcaaccccgcgtcccaggcaaccctgcgtcccaggcccgtcgggtctctggcccagggcacagtagtggcagtcactcgcatgggacgggaccgcccatggcctcccaccgtgcacgccctttctgactgctgtaggcctgaggggtggatgggcggggctcactgcaggcgctgcccccggcaccccaggccctggcctccttcttcccatgttaggagcctgcgttcagaacccgcattcctggggaggatggggctgggcagggactggggtgggtctctccccatctcatggcaccagctcagacctaagccaggatctctgactggagccagccagatgtccagctgccatgag

SEQ ID NO: 20261 - DNA, 1198 bp, Artificial sequence
  DNA replication origin
agcagttgtctcccaagagatgcgccgccccttccctctgcacctggcactggtgggcggtggaggctgtgggatctattgatgttctgagcgtgtgctgagggcctcgctccttcctgccccctgccccagctcctgtgtcggggctgttaccgtgggtgtgcagggtgggggtgcatagagcctgggtgcccccagactgaggaggccgaagggtcggggagcaagggcctgggtgctaatgaaggaacaaggcttcaatgtctgtggcaacttcagaggcccctctcggggcaggtgggagaacccccagcctggggagcaaacctgccggcccagcaccggggtctctgctggagatgtgagcacggcggcctgaccagggcccgggagagagggggcaggtgggggtggggtcggggcaggctgggggtgtcactgggcctgcagggggtctagcctgaggttggggtgccccacggggggagggtggcgcccgtgcctgggctgcatcatcgggtgtattcgaggcggggtcagagccaactgtgtgtcgggtgagagcccagcccagcccagccccagctgtgggccccccatgagcccctcacgggagcatgcaggtggatgatcaggggtgagccaagtagattgggggcgggggctggccaggcctcatcgcagctcacagcccccagccccctcctgagctgtttggtaccctgtgtgtgcagagtcccaggtggggcctgccctcctccagccgctcctccaccctgtctgccgtgtgccacccatggggtgctctggggaggggtgggggtccctgtattgctggggaaggtgtgctgaccacaaggggagcagcttatggggccgaggctggctcaggatgccggaggctctgcggtgggccctggcgagtgaggagctgtggggacggtgcagaggggcctgtgcacctcctgagtttgcagttgctacagtgcccccaccccgaggatgcatggctgacagtccccactgggtggccttgacaaaggtgtggccagggcagggcctctgaggagctgaagacctgcttccaaggacactcctccctgacagtcctgtccatggtgctggaagagctctggcgaccccacaggcaggcaggcctgaccgtccaaggctcggctgcctgtggggaactggacac

SEQ ID NO: 20262 - DNA, 1371 bp, Artificial sequence
  DNA replication origin
ggagcagttccggaggccacaggggtgccgaggggtccaccatggccccacatcacagctggaggatgtgggggtggaatggtgacccccaaaagatgtgtgtcccagtgcctggggcgcatgaatgtgacccgacttggaaaaacagcctctgcagaggtttctaagttatggatctcaatataacatagccccagatttggggtggacactaaacccaactaccagccttcctatcagagaaaggccgaggaaagtgtggctggggacacacggggtgggatgggggcgccacgtgagggtgaaagcaagatgggggtgggggagcacttctgcaggcccaggggcaccgggaacactcagcgggggaggcctggggcacccggaacgcccagcgggggaggcctggggcacccggaacgcccagcgggggaggcctggggcacccggaacgcccagcgggggaggcctggggcacccggaacgcccagcgggggaggcctggggcacccggaacgcccagcgggggaggcttggggcagggcttccttgaggccttggaagagccagcccaccctggaccttggacttcccgcctccagaatgtgaaagagcacgtctctgctgttcggtgaccgggtctgaggagccccagggagctcgcgagtgccgtcctctgctcacacgactgtgggccgcatccttcatcatgaacctcctaaggcacctcaaattccagaaccactgtggccacagcacacccctacccctcccacagtctcagaacttctccccacacacactctccacgtgcctgaacctggccagaggcctcggctcctaactgaaggctctgcactgaagtatttacgaggtctcgaactcacccctagcctcaagacgctaaggacaggacagtggggagggtccctggttctgccgtttctgaagcctggacggccacgaccccaccgtctccaccacgtaccccacaaggcaccatgtcccccacgaggcaccgcatcccccacgaggcaccgctctgggggaggccctgaggtacatggaggcacagctcttggggaggtcctgggtgcatggggcctggaggtacctggacattaaccctccgggctgctgtctggctgagctaaggctcccaagctgcattgccctccccttgatcttcgcaaagctctgttccctttcccaggaggggacacagacacctgaggagctcagaaacccaggtctgagagacctcgaggtccatcctccggacaccacatcaccaggttgggactggctgtggggcttgctgggtgggcagcggcccccagctggggccagcacaagcttcatctccgtcac

SEQ ID NO: 20263 - DNA, 1208 bp, Artificial sequence
  DNA replication origin
gcaggaccccctggcctgcatgcttccccttcctggggctcacacacagcacctcgtgggcccagagtgctggcgggaggggtgttctccccgcctccatgggcaaagaatctggggcccttgtcagagaccgcggggtcagtgggattggcgcccaggccctgctgtgacgccacgtgtttcccactcagcgaggctgttcctgccaggcgtggggactcggaccctggtcctgagtgctgccccgaggcccgtgatgggaagcctgacgtctgcatcgtcctgcgctgcgtggccggtcggtcccggcgctctcagcacttggagtctcagctccccgggtcatcagtccaagccactcagcaggtggcttcggcttaaggcctctcaggtggctctggtgaaggcgtcacccagggctgcctgatctgcaggctgggctggaggggctgcttcctggggggtcccgcaggctgtgtgggggcctcgggtcctcagcacgtggacgccctgcagggcactgctgccagacatgcccactgagctccccagagtccaggaggaagctgtggtgtccttgtggtctgtggatgaggcccgcttggtcccagaggtgcgggttggtgacagcgacggggcaggttgtcacctgtcctggtctctgggagccgcctcagtggggtggaggcagggcaggcctgtccaatgaccccaccccctcaggacgtttcctccgtgcagcctgggccaggggccacgggaggctcttcacctacaggggacgcattcagcaccgaggtcagcagcccatcccgagccccccacacccccgctcgtctcccactctgtgtcctctccactggccttggggtagatgagctgcccccgtcctttctttgggaacccacccccttctgggcgagggtgggtagcaggcacccgacagggtccccaggtggcactccaggccgtggcactagatgtgcactgtggagatgggaagaggtgtggggcaggggagggcgtggggggaacgctgagtttcctgggtacacctgccccggggccagtgcctcaggcctctggagagcggatttgcggcctcatggctggggagggctgaggttctgctgtccggtgtggtgccacggtgagcacacctcacctgtccagccttccccctaaacccagtgctctggacggtgggc

SEQ ID NO: 20264 - DNA, 1336 bp, Artificial sequence
  DNA replication origin
ccactggccttggggtagatgagctgcccccgtcctttctttgggaacccacccccttctgggcgagggtgggtagcaggcacccgacagggtccccaggtggcactccaggccgtggcactagatgtgcactgtggagatgggaagaggtgtggggcaggggagggcgtggggggaacgctgagtttcctgggtacacctgccccggggccagtgcctcaggcctctggagagcggatttgcggcctcatggctggggagggctgaggttctgctgtccggtgtggtgccacggtgagcacacctcacctgtccagccttccccctaaacccagtgctctggacggtgggctggcccctggctcctagcctgtgcgcgcccattcaggaaagcaaacaccagcacacaccggtccctgtggggccttgggtgctctgggcacccagctgcatgggacgggcagggccacgtggccatcagggcctggatgggggcctggcacacagcgggcactggggatgtgtgtggggcgtgctccggggatgtgtgtggggcgtgctccggggatgtgtgtggggcgtgctctggggatgtgtgtggggcgtgctctggggatgtgtgtggggcgtgctctgctggcgactgggcttggatctgtggggtgtaaatacctgagacggcccctccaggggaaagaagaggcttgaactgtcactttaatcctttcagactccgcaggagacagagcacgccggggaggacacatgtagcccttgggggtgcccagtcctggcaaatctcggtctcgagcctgggtctgtccccgcaaatgtagagtgtgcagggaaggccctgggttgctgggaacttgcagaggccctgggtgaaggtgccgcgtgtcttctctgtgtgactcctgcctggccctgggtgaaggtgccccgtgtcttttctgtgtgactctcacctgtgaggtgtcctccctccaggaggtggttgctggcaacgggggtgggggcaacagatgggccagcagccacgtggtggggagcagagaggacctgggggtgcagacacaggatgtggcggggctgctggggaggagctcaggatccctcagccaagtgcatgtggggagggccctgtagtggccagcagcaggcaagtctatgaaacgggaccactccgcctggtgggaagccccctgggtctgcatgcgggagatgggggggcggcaccccaggctgtccccatacctgctgcgcaactttagtctggtgcgtgccggggcggtgagggggctgcgcggggtccttccccagtgccaacactgcc

SEQ ID NO: 20265 - DNA, 4529 bp, Artificial sequence
  DNA replication origin
ccctttgatttttttgggaaattaatcctttgtctcacgcgtcaaacctccattcccccggccccatcggcttttagctttattttgccctttccgtcagtttcatctgtgtggcgtcacgcctggatctgggtgagcccaggccgggtgggggacccaggaccttgccgaagaagcgggcttccccagaggcagggggagctgcaggccgggcagtgacacaggctgggcacagaggggagcccagtgccaggggtggggggtggcctcggcagggtgtgctcatggaggaagagctgcttctccctgaaggcctttgatccagcacaaggcttgtgattcgctcagccggaggagcactcaggagggcctagagcccttcatccataatccagggcggctggaggcgcccacagcgcatccctccccaggcacgaggctggcctgcatcccggggcaggggtccctgcaggaaggactcagccccacacacggaaaggagcaagagctcaatgtcccccaaacctggctgcaaggctaaggcgtggtccgtgacaaaagcctctggtccgaagggcatggagcccctaaaaaccctcaggacaaactcctgggaggatgcagccggaggccaagacagaggctctcaaaggagggaggaaatgacccagaaatgcccagcatgaggcaccctcaggagaccccaaaggatgaagggcccacaccctgccccagggcatcatgagggtgcaggggtgaagcaggagggaggctgtggtcaaagcccccaagggcaccgggacagcattcccagggtaggtggcgaagccctggtggctctgcattttcacaaaagatggccccaaacaggaggggagtcattagggcacagccaccaagggcacagggcagctgttagacagtggcaaaacctgaccagaccgcagaagacgctcactgctgagcacagtggcaaaacctgaccagaccgcagaagaggctcactgctgagcacagtggcaaaacctgaccagaccgcagaagacgctcactgctgagcacagtggcaaaacctgaccagaccgcagaagacgctcactgctgagcacagtggcaaaacctgaccagaccgcagaagacgctcactgctgagcacagtggcaaaacctgaccagaccgcagaagacgctcactgctgagcacagtggcaaaacctgaccagaccgcagaagacgctcactgctgggcacagtggcaaaacctgaccagaccgcagaagacgctcactgctgggcacagtggcaaaacctgaccagaccgcagaagacgctcactgctgggcacagtggcaaaacctgaccagaccgcagaagacgctcactgctgggcacagtggcaaaacctgaccagaccgcagaagacgctcactgctgggcacagtggcaaaacctgaccagaccgcagaagacgctcactgctgggcacagtggcaaaacctgaccagaccgcagaagacgctcactgctgggcacagtggcaaaacctgaccagaccgcagaagacgctcactgctgagcacagtggcaaaacctgaccagaccgcagaagacgctcactgctgagcacagtggcaaaacctgaccagaccgcagaagacgctcactgctgagcacagtggcaaaacctgaccagaccgcagaagacgctcactgctgggcacagtggcaaaacctgaccagaccgcagaagacgctcactgctgggcacagtggcaaaacctgaccagaccgcagaagacgctcactgctgggcacagtggcaaaacctgaccagaccccgcagaagacgctcactgctgagcacagtggcaaaacctgaccagaccgcagaagacgctcactgctgagcacagtggcaaaacctgaccagaccgcagaagacgctcactgctgagcacagtggcaaaacctgaccagaccgcagaagacgctcactgctgagcacagtggcaaaacctgaccagaccgcagaagacgctcactgctgggcacagtggcaaaacctgaccagaccgcagaagacgctcactgctgggcacagtggcaaaacctgaccagaccgcagaagacgctcactgctgggcacagtggcaaaacctgaccagaccccgcagaagacgctcactgctgagcacagtggcaaaacctgaccagaccgcagaagacgctcactgctgagcacagtggcaaaacctgaccagaccgcagaagacgctcactgctgagcacagtggcaaaacctgaccagaccccgcagaagacgctcactgctgagcacagtggcaaaacctgaccagaccgcagaagacgctcactgctgagcacagtggcaaaacctgaccagaccgcagaagacgctcactgctgggcacagtggcaaaacctgaccagaccgcagaagacgctcactgctgggcacagtggcaaaacctgaccagaccgcagaagacgctcactgctgggcacagtggcaaaacctgaccagaccgcagaagacgctcactgctgggcacagtggcaaaacctgaccagaccgcagaagacgctcactgctgggcacagtggcaaaacctgaccagaccgcagaagacgctcactgctgagcacagtggcaaaacctgaccagaccgcagaagacgctcactgctgagcacagtggcaaaacctgaccagaccgcagaagacgctcactgctgagcacagtggcaaaacctgaccagaccgcagaagacgctcactgctgagcacagtggcaaaacctgaccagaccgcagaagacgctcactgctgggcacagtggcaaaacctgaccagaccgcagaagacgctcactgctgggcacagtggcaaaacctgaccagaccgcagaagacgctcactgctgggcacagtggcaaaacctgaccagaccccgcagaagacgctcactgctgagcacagtggcaaaacctgaccagaccgcagaagacgctcactgctgagcacagtggcaaaacctgaccagaccgcagaagacgctcactgctgagcacagtggcaaaacctgaccagaccgcagaagacgctcactgctgagcacagtggcaaaacctgaccagaccgcagaagacgctcactgctgggcacagtggcaaaacctgaccagaccgcagaagacgctcactgctgggcacagtggcaaaacctgaccagaccgcagaagacgctcactgctgggcacagtggcaaaacctgaccagaccccgcagaagacgctcactgctgagcacagtggcaaaacctgaccagaccgcagaagacgctcactgctgagcacagtggcaaaacctgaccagaccgcagaagacgctcactgctgagcacagtggcaaaacctgaccagaccccgcagaagacgctcactgctgagcacagtggcaaaacctgaccagaccgcagaagacgctcactgctgagcacagtggcaaaacctgaccagaccgcagaagacgctcactgctgggcacagtggcaaaacctgaccagaccgcagaagacgctcactgctgggcacagtggcaaaacctgaccagaccgcagaagacgctcactgctgggcacagtggcaaaacctgaccagaccgcagaagacgctcactgctgggcacagtggcaaaacctgaccagaccgcagaagacgctcactgctgggcacagtggcaaaacctgaccagaccgcagaagacgctcactgctgagcacagtggcaaaacctgaccagaccgcagaagacgctcactgctgagcacagtggcaaaacctgaccagaccgcagaagacgctcactgctgagcacagtggcaaaacctgaccagaccgcagaagacgctcactgctgggcacagtggcaaaacctgaccagaccgcagaagacgctcactgctgggcacagtggcaaaacctgaccagaccgcagaagacgctcactgctgagcacagtggcaaaacctgaccagaccgcagaagacgctcactgctgagcacagtggcaaaacctgaccagaccccgcagaagacgctcactgctgagcacagtggcaaaacctgaccagaccgcagaagacgctcactgctgagcacagtggcaaaacctgaccagaccgcagaagacgctcactgctgagcacagtggcaaaacctgaccagaccgcagaagacgctcactgctgagcacagtggcaaaacctgaccagaccgcagaagacgctcactgctgagcacagtggcaaaacctgaccagaccgcagaagacgctcactgctgagcacagtggcaaaacctgaccagaccgcagaagacgctcactgctgagcacagtggcaaaacctgaccagaccgcagaagacgctcactgctgagcacagtggcaaaacctgaccagaccgcagaagacgctcactgctgagcacagtggcaaaacctgaccagacc

SEQ ID NO: 20266 - DNA, 1197 bp, Artificial sequence
  DNA replication origin
gaaatttgagcacagcgcgtgcacggaaggatggcggccactaaagcccagtgggaatgccagccaggatctgggtgtctgggcgcacctaggagtggggtcccctgtgataacctgggccggctctgcgtgtctgggggcacctaggagtggggtcccctgtgataatatgggccggctctgcgtgtctgggggcacctaggagtggggtcccctgtgataatatgggccaggatctgcgtgtctgggggcacctaggagtggggtcccctgtgataacctgggccggctctgggtgtcggcgcacccaggagtggggtcccctgtgataacctgggccggctctgggtgtctgggggcacccaggagtggggtcccctgtgataacctgggccggctctgggtgtctgggggcacccaggagtggggtcctctgtgataacctgggccggctctgggtgtctgggggcacctaggagtggggtccccgtgataacctgggccggctctgggtgtctgggcgcacctaggattggggtcccctgtgataacctgatccccccatggttccaacatgccccaacatggaatggcacatgagtgcgcctgaggacctttgatggtaggaaagggcctgggttgtgggctcctgggggcatctccagtgtcaaggccacagctcaggccaggtggggctcaggggtgtggccgggctgtcctgggcaggggcaagtatctggctgtgaaaagagtggggagaggagaaagggagggtgggccgaggcgcggagggggaccgggaccgtgtgcccagccaaggcacattcccagagcaccctgcctgccttttaggtgggtctgggaaggaaggggctgccgggccgtggaggtctagggcagtgctgcctggggagctacctggggcccgtcctggtgtcctggggtgaacacagggccggggctcaggtgcagagcatctcagcagaggaggggtgccggtgggggtctcagcggaggaggggtgccggtgggggtctcggcggaggaggggtgccggtgggggtctcggcggaggaggggtgccggtgggggtctcggcggaggaggggtgccggtgggggtctcggcggaggaggggtgccggtgggggtctcggcggaggaggggtgccggtgggggtctcggcggaggaggggt

SEQ ID NO: 20267 - DNA, 907 bp, Artificial sequence
  DNA replication origin
ccttttaggtgggtctgggaaggaaggggctgccgggccgtggaggtctagggcagtgctgcctggggagctacctggggcccgtcctggtgtcctggggtgaacacagggccggggctcaggtgcagagcatctcagcagaggaggggtgccggtgggggtctcagcggaggaggggtgccggtgggggtctcggcggaggaggggtgccggtgggggtctcggcggaggaggggtgccggtgggggtctcggcggaggaggggtgccggtgggggtctcggcggaggaggggtgccggtgggggtctcggcggaggaggggtgccggtgggggtctcggcggaggaggggtgccggtgggggtctcggcggaggaggggtgccggtgggggtctcggcggaggaggggtgccggtgggggtctcggcggaggaggggtgccggtgggggtctcggcggaggaggggtgccggtgggggtctcggcggaggaggggtgccggtgggggtctcggcggaggaggggtgtcggtgggggtctcggcggagggctgcggctgaggtatctctgcagaaggctgcaggtgggggtctcggcagggtgtgcgggggacagccttcttgggccaggcaggcacctcgagggcaccctggctcccagctgagggtggctgaaggctgaagggaggggatttgggtgccttgggatggggagagggcgaggggggccacagagacctgagaagcccaaagggccggcgtggagggaagacacagctttgcaggggcagcgtgacgccagcactgagctgttctggacagcgacccaggcgggcaggggcctccggccctggagcgggtgggacccctgctgtccaggacgtgggaggaggcccccaacctgcac

SEQ ID NO: 20268 - DNA, 1085 bp, Artificial sequence
  DNA replication origin
tgctcttgctcctccctccagccctgcccacctttctcctgcctccaagcagagtgggcacccctgaggggacaggctgcagctgggcagttcagttgctgcaggacctgctgtgctagcaggcggggcttcagtgttcccagctagaatggagaggagttccctgcctcagagcacccctctcctaccagggcacagcttggcagaggggagctgcaccttcctcttccactggggcctggcctccgtcggctccatccggtggtgtctggtcaccatggagaccaggcaggccccctgggtggagggtttctgggctgtgacccacctctcagtggggagggggcggccccggctgctgggaagcctgaccctgggtgtagaggaagaggctggggctcccagctgctccgggtcccacccacagtgggacctgggctggcagcgtgcgaccctcccagcactggggccagtcgagccccctcctctcccttcctctccattcgctccttggcatgcagggctgcgggtggggcaggacccggggacgaggccagtgggagtggccaagagaggggaggcttgtggaaggtgctaagggttggggactgtgacatgttgggcaccccccagctgctggggtgtggaggaattaaccagactaaactggggaggcctggggaccctatggggaggtgggggtggggttaagggctgctgagggctgcctggatggggctggcagggtcccaccctgccttggaggagaaacagaggccctgggagtgatggggccaggacagcgcctggcagagagatccagtgcggggcgtagctggggagagtcccatgctgaatttgggaggtgcctgtgagccccgactaaaggagggcctggggatgcgggaaaggggaggtgtccctgtcacctgcaggcgctgtgcacagatgtccgcctgggagggaaggacttggggacaggctggccaactcgccagggctgggaccccatcacaagactggccctagctccaaagcctggtccacgctggctcctgagggctgggaccccaggccgtggcctc

SEQ ID NO: 20269 - DNA, 1418 bp, Artificial sequence
  DNA replication origin
agtcttcaaggagcctgggttggggtggggtggggtgagggtggagggacaggtgaagggatggttctgggggcacagccgccagggagggtttggaacccacaggctgagtgtggcgggtgctggggccaaggctcggtgcatggggtagcctcgggactctgccctgcctgctctggccctcacaccctgtggtcctcagtggcacaggcaccgagcagggagaccacgcagccgcatccaggggcccagggactgtctgggcctctgtggggggaacaggaggtgtgagggccaggggaagggggtgaggaaaaggttggcctggccctccccttcctgccctggtgggctcccagcaccgcccccgtggggtctcagccacatggagggtcctgaggggctggttcctggtgagaggcccgtgggacgctgcatgcagctgcttgggggccgctccacccaggctgaaccagctcgggggggaggcctgtgagggtggtggcccctggtgtggctgtggtgatgtaggggggctgtacagccaagggggtggcaccttggtgcatgctcagagctgccgtgcggactgggatgactggctgtcccaggagctggttttggcaggagtcaagggcccagtgtggggatgggagcagaggttgtggtgaagcccccagggcaggggaaggtgtgaagcccccagggcaggggaagatatgaagcccccagggcaggggaaggtgtgaagccctcagggcaggggagggtgtgaagcccccagggcaggggaaggtgtgaagccctcagggcagaggaaggtgtgaagccctcagggcaggggaaggtggtgggggccagggtgggattctgggcaggggggcggccaggcccaaggctcagcataggccacatggtgtccagagggggtgggacaacacccagggccagacctcgggagaagccgcgagcccggccatgcccacctcctgggctctttcctgttcttgggccttggcctgctgtgcccatcccccccgcactcccctgccctcccctccgagaaggcctccccaggaccccactgcaccggcaccgtgtcaccatgaggaagccatgccccttgtcacagtccaccttgccagcatcagggccaggaccacccccgcccccccagtcctctggtgacagtttctgagcccctgctcatggtggggcaggcgggctccccacaccccaaccctgggtttcctctccccagctacacacgagctggccacctgcacatgctccccacgagaatgcagaaacccaggccagagcaagcgtggacgttgctgctgggggaaggggagctgctgggttcagccaggccctcagccagctcaccctgagggcagcccccagcccagccctgt

SEQ ID NO: 20270 - DNA, 937 bp, Artificial sequence
  DNA replication origin
gggggggatggtgcacttgaggggcagctaatgaggaggggatgatgcacctgaggggtagctaatgagggggatggtgcacttgaggggtagctaatggggggacggtgcacttgaggggtagctaatggggtggacggtgcacttgaggggtagctaatggggtggacggtgcacttgaggggtagctaatgggggggaggggatggtgcacttgaggagtagctaatgggggggacggtgcacctgaggggccactatggggggacagtgcacttgaggggcagctaatggggggcacggtgcacttgaggggccgctaatgggggggatggtgcacttgaggggtagttaatgggggggatggtgcacttgaggggcagctaatgggggggagggtgcacttgaggggccgctaatgggggggacggtgcacttgaggggtagttaatgggggggatggtgcacttgaggggccgctatggggggacggtgcacttgaggggcagctaatggggggacggtgcacttgaggggtagctaatggaggggacagtgcacttgaggggcagctaatggggaggaggagatggtgcacttgaggggcagctaatggggggcatggtgtacctcggaatagcaccatagggggtgtagtccttggggcacagggggcatctgtggtagcgcactgggtgtgggggtccctggggagtggggggcaccaggggtggggcctcaccatatggagtggctgtggcagaagtccagcgcagagatgatctgccggaagaacttccgagcctccttaggcgtcagcctccccttcttcaccaggtagtcgaagagctcaccacctgacacgtgttctagcaccaggtacctgcaggagacggggccaccagtgcgcccagctgtggctgcccgccgcccctcc

SEQ ID NO: 20271 - DNA, 1274 bp, Artificial sequence
  DNA replication origin
gtgggggtcagcgtgggggggcaggtttggggagaggccagggcagggttgagggggccagggtctcaccaccagcaaggcgaacaggatgacgccgcagctccacacgtccgccttccggccgtcatacttctccccctgtggacagcagtgcccgggctgttggggggcgcagggcagggcgggggccttggagggcctgggctcagagggagtcggcccggggacaggcagcctagcagcacctgggggtgcggcaggctggggtcccaccagggtcaggtccccgccaccctgggccccacagagctgcacgcggcggcgctgactcacccggatcacctcggggcaggcgtagtggggggacctgcgggcaagggcagaggtcagcggcggggctccgggcgctgccaggccctccccccagggtgatggtgcaccgcagggccctcaaggaggcctccagggctgtggtgccagacgcccccacattccctgcatccccaggcgggcttttgggaggagatcaaggtggggcactgggtctctgctgcgcccaaagctgtctgcccactcggctgggcaggggccagggggtccccaggagaggggcatgtaagtgggtcccagcctctctcccaggcaggccagggccagggctgtacccctacccttactgtgccgggaggcctgtctccccaccaccaccaggctgtggggtactgggaggctcaggcacattgtggggggcctgcctgtggggtgccgggaggctcaggcaggctgggggcctctcagtccactggctcctcttcccccagcccagcctgtcccccagcctctctccagggcagagggccacgtacccacagctggtctccaacaggctgtcgccaacctgcagggacgccatgccaaagtctgcgatgcggatgttgttcttctcgtccagcaggaggttttcaggtttcagatccctgtggctggggaggagggtggtgaggctgaacagggccagtctctgccttgagcgcctccccgccctggagaccccctgcccagagcccactgcctctccaaacgccaatcacacataagggccaatagcagcccagcctggtgatgtcataggcagccaatcagaagtcgcctgcctggtccgtttggctctggcctttggtcaggcatccctgtttctcctgccatgccctcctgcaccctggcaggctccttcctgccccctcctgctccctagcacacctgctctggcctag

SEQ ID NO: 20272 - DNA, 963 bp, Artificial sequence
  DNA replication origin
gggaagaggagccagtggactgagaggcccccagcctgcctgagcctcccggcaccccacaggcaggccccccacaatgtgcctgagcctcccagtaccccacagcctggtggtggtggggagacaggcctcccggcacagtaagggtaggggtacagccctggccctggcctgcctgggagagaggctgggacccacttacatgcccctctcctggggaccccctggcccctgcccagccgagtgggcagacagctttgggcgcagcagagacccagtgccccaccttgatctcctcccaaaagcccgcctggggatgcagggaatgtgggggcgtctggcaccacagccctggaggcctccttgagggccctgcggtgcaccatcaccctggggggagggcctggcagcgcccggagccccgccgctgacctctgcccttgcccgcaggtccccccactacgcctgccccgaggtgatccgggtgagtcagcgccgccgcgtgcagctctgtggggcccagggtggcggggacctgaccctggtgggaccccagcctgccgcacccccaggtgctgctaggctgcctgtccccgggccgactccctctgagcccaggccctccaaggcccccgccctgccctgcgccccccaacagcccgggcactgctgtccacagggggagaagtatgacggccggaaggcggacgtgtggagctgcggcgtcatcctgttcgccttgctggtggtgagaccctggccccctcaaccctgccctggcctctccccaaacctgcccccccacgctgacccccacacccggccgcccgcagggggctctgcccttcgacgatgacaacttgcgacagctgctggagaaggtgaagcggggcgtgttccacatgccgcactttatcccgcccgactgccagagtctgctacggggcatgatcgaggtggacg

SEQ ID NO: 20273 - DNA, 1054 bp, Artificial sequence
  DNA replication origin
ctgaccctggtgggaccccagcctgccgcacccccaggtgctgctaggctgcctgtccccgggccgactccctctgagcccaggccctccaaggcccccgccctgccctgcgccccccaacagcccgggcactgctgtccacagggggagaagtatgacggccggaaggcggacgtgtggagctgcggcgtcatcctgttcgccttgctggtggtgagaccctggccccctcaaccctgccctggcctctccccaaacctgcccccccacgctgacccccacacccggccgcccgcagggggctctgcccttcgacgatgacaacttgcgacagctgctggagaaggtgaagcggggcgtgttccacatgccgcactttatcccgcccgactgccagagtctgctacggggcatgatcgaggtggacgccgcacgccgcctcacggtgcgtgccctcggagcggggcggccccagagcgtggcgggggggcgcgggggcgggcgtgtgcctgtgtgtgcacaggtgtgtgcccagacgtgtgggcacccaggtgtgtgggtcggtgcccaggtgtgtggacgtgtgcacaggtgtcggcttgtgttcaggtgtgggtgaccaaatgtgggcccatggccgtgtgtgggtgcccaggtgagtgttcaagtgtgtgtgcgcacccaggtgtgggagtgcccaggcgtgtgtgggctcgtgttcaggtgtgtgggtgcacaaatgtaggcacatgcccaggtgtgtgttcaagggtgtgggggtacccaggcacatgcccaggttcatgtgattgggtgagggcgtaggtgtgggcatgtgcacgtgtggggaggtgtgtccaggtgcttatgagcacttgtaccagtgtggggtgtgcacaggtgtggggggctgtgtgcacatgtaggtgagacctggctataagttacacaaaagcactggtgcttccccatcacggccatcctgcctccagacgctgctggggcaagctccaggcagcgtgaatagttctgctgagtgcccccagcagctgtg

SEQ ID NO: 20274 - DNA, 1095 bp, Artificial sequence
  DNA replication origin
agaggcgcgagacgcgctggcacacggggccgccggctcctccggggcagcgctcccacctcaggccccgtgccccacccgggagcagccccagacgcactcctcggacagcaggtcctgcagcagcttgttgcggtctcggaagcagcccagtgagtgcatgctgtccagcacgtcggggtcgatgtcctccaggctgggcagcgagcggatctgcaccttgcgaggaatgggctgctctggttcgggctcattcttgccccctctgtggacacaggacgggccacccgctcatcagctccggccgggcctgggcggctgcgagggtgggacgcccgccctcacctggggcccttcatcctgccactctccctgtgcccagcccggggaggcctcctgcgtcctgcccgcaccccgcacccagcgcaggccacggagggccaaggcagggcaggacctgcgctgggccggcgccctccccccgcctttcctagcagggcctccaggccacagcaacaggcaaagcaggcgattagtgggtggaaaagctacttacatataccatatgtgtttctgaatgtgctctagctacaaggaaagagaaacagggagttagtacggacgagggacggaaagagcccacattaggaggtgagggggaaggcaggggcgctgggagcacggagagagcaggagagggtgagggcaagtgagtggggggaaggtggggaggaagatagggagggggctgcgttcccagaggctcaaggccagcacccctgctcctgcctctcccaagtggagaagaaaacacacacctcaaggaggagagaagtcgggggagctggagtcggagggggtgctccaggtaggggcaggggcctggggagcggagggagagggggagggagggaagctggagccagggcagccccaggtgcctgtgctgcctgggctgggcccctccgtggctctaggaaggaaccaaggcaggagagcagggagcagccaggagggagctgaagccagaagaacccggcccacctgtgcggcggggcagggctgggtgcaggtgcaggcaggaggctgggaggg

SEQ ID NO: 20275 - DNA, 1728 bp, Artificial sequence
  DNA replication origin
gaaccaggagaagatgatttacttcctcctcctggaccggaaagaaaggtacccgagccaggaggatgaggacctgcccccccggaacgagataggtatgggtccaggggtggcctccagcccggcctgcactgccccaccggggtccgggggctgtctggcctgaccttcgtctgtactcagaccctccccggaagcgtgtggactccccgatgctgaaccggcacggcaagcggcggccagaacgcaaatccatggaggtgctcagcgtgacggacggcggctccccggtgcctgcgcggcgggccattgagatggcccagcacggccagaggtgtgtgtgccccgaggctgctgggcctccctccctgggccctggctgcgcggcactgccgcctggctcatcgctacccattggcctggggtctcggctgaggccattgggtggggctgtatgggctaaactgggcttagctgggctgggctgggctgggcttggctgggctgggctgggcttagctgggctgggctgggctgggagctgagctgggctgggctgtgctggactggactgggctaggctgagctgggctggcctgggctgggctgggctagtttgggctgggctagactgcacttggttgagccgagctgggctgtactggactgcgcggctgagcagggttgagttgaattagggtgggcggggctgggctgagctgggctgagctgggctaggctgcactagaatgggctgagacggatttgactgggctgagctgggcagggctgggctgagctgggcagggctgggctgggctaaactggatttggctgagccgagccaggctgggcagggctgagctgggctgggctggcttgacccaagcttggctgggctgagctgtgatatggtcacaccatgctcagagccatcagcccagcaagcctgtccccctggtcccagcaatgctgggcccgtctctgggtggcaagtgtggtgtgtgtggccagggacatcacagaactcagcagtgatgagcagacccgtggccggaggaagggcacccagcccctctggagcctctgctgggtgggggcagggctgggctgcccgcacgaggccctcagcaaatccttggagccggtgcggcctcttggggatgagctcaaacgtccctcaccaggtggcagcttccaacacttggggacagcccttgggcccaggagcacaccaggaggtccaggagcccgggcagcagtctctggtctgccctgtgatctgggcctcagcaccccagggccccctccttgtactggagatgtggggggtgggacaggcgtggcctgttcctcgggaacttgggggaagctgtggggaactgcaaggtagcttggcagccatcaggctaaacctgttccagccccagccctggccagagtactggtggtcccagttctggcagctcccaggccatggccccctgggagtcctaggccctccccagggtttcaggctggcccagcttccaacgtggggtcccagcccccagaacctccttcccagggcccagtcagcgcagccctgacgccagtactagggggtagcaaggggccctcctatctacattctactgtcctgaccttcagtggcctgcatgtcatgggggcaccacaacctgtagcccaggtgcctgcctcctgcctgcgtggccacctccccggact

SEQ ID NO: 20276 - DNA, 774 bp, Artificial sequence
  DNA replication origin
gcagagtgagggcacacaggtgagggtcccaggtaggcacggggccagggctcaaagagaaggaccccgaccggcagccagcacactgcagccttgggggcggcgccacccgcccaggctcgcaaaactggccccaggtagaggcccctcttgacggcggcgcctcctgccctcctcagctcctgcaggtgggcacaggacggctgctcggcttcaactctggccggccccaggggcagcagggccaccgaggcccaccggacacagcacaggggctggcaggaggagcggctcggcctgcagccacgccgggctctagccccaggccctgtaagccatggtgcgtggtccctcacaggcaggcgtgggccacgcctcagcagccccacccctcctcggcctctgcctggcccgcgggcccttgcctggcttgctggctggcttcaccgcagcaggagccctgcagcccagcccgccaccagacccgcccatgtgcctgcccggcctgaggcaggacagcgtgtctggggctgggaggtgcggggacgggtggtcggggtgtatacctgtcttctttgctgaattggggatgggcctcagcgatatccaggcttttactgaacattgctttactacagcagaacagagcgagaaaacacagttactgacggccacacgcgggcacaggtcggcccccagggcccgggccacaccgggtaagaactccacgtggctctgaggccgctgcacaaagatggcgagagaggaggctgg

SEQ ID NO: 20277 - DNA, 1300 bp, Artificial sequence
  DNA replication origin
tgctgtagtaaagcaatgttcagtaaaagcctggatatcgctgaggcccatccccaattcagcaaagaagacaggtatacaccccgaccacccgtccccgcacctcccagccccagacacgctgtcctgcctcaggccgggcaggcacatgggcgggtctggtggcgggctgggctgcagggctcctgctgcggtgaagccagccagcaagccaggcaagggcccgcgggccaggcagaggccgaggaggggtggggctgctgaggcgtggcccacgcctgcctgtgagggaccacgcaccatggcttacagggcctggggctagagcccggcgtggctgcaggccgagccgctcctcctgccagcccctgtgctgtgtccggtgggcctcggtggccctgctgcccctggggccggccagagttgaagccgagcagccgtcctgtgcccacctgcaggagctgaggagggcaggaggcgccgccgtcaagaggggcctctacctggggccagttttgcgagcctgggcgggtggcgccgcccccaaggctgcagtgtgctggctgccggtcggggtccttctctttgagccctggccccgtgcctacctgggaccctcacctgtgtgccctcactctgcctgccctggctgccctcagggctggcgccgtctctcctgcccctgccccagcaactgtagctcagtgttcccagcagctgcctggccggataggaccagggctcggcccctccaccccggggtttccagcgcctcttctgtcttcctcgtgcccagtcacgagctctgggcgggctcgacaggaaccacaggtccagggcctcactggtggctgctgcccccatgagggctgtccgcgctcccagctcagccctgaaagctctgggtccagttccagccctgggtgtcatcctggcccagacaggctgggttgtgcatggggtccccgtcgcctccctgccccttggctgtgtctggtgagggagttggagggtcgtcaccgtggggaccagcccccgggtgtccgggagccaggtgtgtggccagcgtggcactctccacggtccggggcctgggccgtggtgtggactagcgaggcccctcgtggccggctggcggtgggcaggcctggtgggtagtgcaggccgggcttttactcttctctgtcctcttctcttcggcggctgcctcggcccctccctgcatttccttcctccaaggatggcagctgccactgtctgggcacgtgggcgccggctcgtccgtgcagtgtggtggaac

SEQ ID NO: 20278 - DNA, 2325 bp, Artificial sequence
  DNA replication origin
cgtggagaaggagcaccccgttggccataggggaagggttccatgcccctctcccggccagcctggtgtcaggtaccaggaggcctccagcaggggccacttactctggggacgactctggtgtcaggttggacatctcctccggcgtcggaactgtgcacacaggatgaacaggaggaaaggcgtggtgaccgctccatccttcccctgccctggccaccttgcgccgaggtcagggtcatcaggagtccacccacacacactgggacagcccccccaggggcactggtccaccccagctcccggccaccttagaggcccactggcagtggcgccccccaggctaaggggagctgtccccgcctctggtgctgaagtcggctgtgccttctccagcagcactggctggcccttggtgccccacacatggggcctcctgactggcagtgccccctcggtggccagctctccttgctgtgtgcctggccccaggacacagagtgggtagactcaggaacacagaatgtctggaggggataccagcctgtgcgacaggtaggacacaggctgctgctgggcgctttcgggacagtgagacgtgggcaggcccaggccacccctgcagctacaggcccctcggactggtctggcactgccgggcggggccctccccaaggcagcctctgctctctcccagccccactctggcgcctccgggcagacactcaccttgcagtttccggcggtggaagcggggtgagcccagaaagctgttcttgatggagttgagccgcgccctccagggcacccctccgacgctggggctggacgggggcgtggggttgggcgtgccagccgggctctcctttggcgtgtggacaggtgtccccttgggggtggggaggggactgccccttggtgaggggtgaggggtcacctgtatggtggggacagatttggtgtttggttcaatcccggcgggtgggggccgggggggcacccgcagggcaggcgggcccaggggtggtgccagctggggacaaaggccagtggcgggaggccgggctggggtgctggccgggaaggggttggacttggtgccctgcagaggcttgtcggtcagcttggccttgcacggcaaggtctgggtcttggggtcgggccgcagggcggcctgcagagggaggacgtgtccaggcctcgaggcgctcccacaagcttcgggctccgtggaggtggccagggggcgggccacgaagggcggctcggggggcggtgggggcaggacaagcttcctaataggctacggggaggcgcagggagcgagcggggtgggggcagccgcgcggcacatgcaccccagtcccccgcatgcacacggcacaggaggaccagaaagaaacaggcgggagcgggagggtggggaggcaggcaggcatgggcaggaggattagccacaaaagaaaagaagtgacacacaagaaaacaaacaaaacaaaacaaaagagcgtgcagttagcagagcagcctgcgccacagagcagcagccgccacaggagcgtgggcatggggggcgcctggggctgcttcccagggtccgcgaggctgcccccaccctggcacacgctgactgggagggttggggcctctgtgcatccgagctgggtgggggcggggggtcactcacccgggggctgctgagtgggctggtggaaaggcctgaggaggcaccgctgatggaccgagacctggaggtcacaaggtacagggccactgctcagccagggggcagtggagcagcaggtgctgggctctgctccccccaggtaaaccctccaggaggcctggagcccgggccaagagcctcgaggccctgggtcctgctgcacaccctgtcaattcaggagggcccagggcgcctggctgtgcccagccccactggggcccccatcagagcccacgtgtgggggccaccccatgccagcagcccaggcacagcacaggatacggcatcagacagccgcggcaaaggaccatccagcgtgggggtggacggaaggacgaggggacagacgggagcttcctgtatgcagccccttctgctccaggcctcgtgctggctccagcctcccacctgccaagccccccctggctgagctctcacagggcctgcagcctggtcctccatgtccctagatgcccgtgagggatgcctgggtcagcggccggcccttcccttgtccacaaccaggagggcctgggcagggccaggctggggcagctgctggcagggacggtggggccttgtcccaccactgccctact

SEQ ID NO: 20279 - DNA, 1297 bp, Artificial sequence
  DNA replication origin
gggtgccctggagggcgcggctcaactccatcaagaacagctttctgggctcaccccgcttccaccgccggaaactgcaaggtgagtgtctgcccggaggcgccagagtggggctgggagagagcagaggctgccttggggagggccccgcccggcagtgccagaccagtccgaggggcctgtagctgcaggggtggcctgggcctgcccacgtctcactgtcccgaaagcgcccagcagcagcctgtgtcctacctgtcgcacaggctggtatcccctccagacattctgtgttcctgagtctacccactctgtgtcctggggccaggcacacagcaaggagagctggccaccgagggggcactgccagtcaggaggccccatgtgtggggcaccaagggccagccagtgctgctggagaaggcacagccgacttcagcaccagaggcggggacagctccccttagcctggggggcgccactgccagtgggcctctaaggtggccgggagctggggtggaccagtgcccctgggggggctgtcccagtgtgtgtgggtggactcctgatgaccctgacctcggcgcaaggtggccagggcaggggaaggatggagcggtcaccacgcctttcctcctgttcatcctgtgtgcacagttccgacgccggaggagatgtccaacctgacaccagagtcgtccccagagtaagtggcccctgctggaggcctcctggtacctgacaccaggctggccgggagaggggcatggaacccttcccctatggccaacggggtgctccttctccacgtggccccacctcccactgcaggcaggcccgtctcggccactgagtctctgaagttcgaattcccggctgtgaggggaaggccagccaggggaggagcccccagccctgttgagaagcttcaggccttgggagagcctagggttggctggaggcgagcagggggtacactgggcagagtctccccagggcctgagctcgccaagggcagagaccgggtcgctcaggtctcaaggagaaagcagcccgtgttaagaacaaaggggcagcaggcctggtgggaacacgtgtgcaggggcggagcggagcagccaagccgaggtctggccccgccgcctttctgagccgtgagaggtgccactgcagagactctacagcgcccaggtgctgagatgccctgggggccgctgtgactggtgtctggacaaagatgtccccagagagaccccttcccagcgcccaggccctctccctcctctccacgatggcc

SEQ ID NO: 20280 - DNA, 1542 bp, Artificial sequence
  DNA replication origin
actcccctttcccttgcccattcctggagctgcctcctcggccactgtgcggcctgggagtcctgccggacaagcacggggaccaggtccaaccctcactcagcccctcgacgcctcctcagtgtcctgccggtctcggcggctgtctgttctgggttcaaaactccgagggccaccactggccctgaccttaccccagccccatgccagggcctggagccaggaagtgcacaaagcagcctggcagttctggaagcacaggtgagtttctacatggtcgatgttctgcccgatgaagagacaggacagatggtacaaacgtgactctctgctttgcggcccaggggtgcagcatttggcaaaaatagtcccatgtgtgaaagatgcctgacggcccagggaggccaggccgacgaggggtgaggggcctgcactgtgactccagcacccacgtggtgggcagtgcacagcctggccggacactagtctgggtgttgctatgaagctatttttagatgagacgaacttaaatcagtcgcctgttgagtctggcgggggacccttcctcacagggtgggtgcatccgccaggttcggtcttcctggggaaagaacgcccctcgaggctgcaacctggaaactgcctgggcttccagctagcacttcagactcaaggacatcagccctgagtgtcccagacaaccgcatgcatcccttcctgaagccagctgcctcccttggtgctgttcctctggggtgcctggttgacatggggctggcagcagctggggctgggggttatctcaggtccccagcaagcgagttgtcgccaaagagggactgtgggaggcatccgtgctggaccctcgtccaaggcgtctgtgcaggaccctcaataagggctgtcacaggcatctgtgccgggcccttgggtggggctgtgggaggtgtctgtgctggaccctcgggaacggctgtcgcaggcatctgtgccgggcccttgggtggagctgtaggaggcatctgtgctggacccttgggaaggggtgtctgtgccgggcccttgggtggggctgtgggaggcatccgtgccggacccttgagaggggtcagggcctccaggccatctcaagatgggggaggggagaagcgcaggcagccacagtggcatcaaagccaccttctcggctttgatgttttccaccttctctgaggaagataattatgagtctgttcatgaaagcttttggtagcagcagaaacggcaatgtcagggcctaggcggaaggttcccaagtctgctgagccctgtgcatctgggcttgcgacaatacctacacacctccgacctgggcacccagctggaagggccacctgatcggcgcagaaaggccactgggtggaatcctggcacaggctgcagatgctgctcctggggcttagcactgagcagtttccacaggggcccctggtttaaagccagcagcaggacgaaggttctcgtcttactcagtccacagctggccacatcttcatttcccgg

SEQ ID NO: 20281 - DNA, 968 bp, Artificial sequence
  DNA replication origin
tcccaggccgcacagtggccgaggaggcagctccaggaatgggcaagggaaaggggagttgtgaggccgctgggaggggcctcagaatcagtcgggagagggcaccactgagccccagccctgctggcccctcctcccggtccctgcctctgcctctcagcacacctggttccacctccaggcagcaacggcaggggacgccagcagagcgtgccacctctgaacagccacccaggcgcgctctgcctgagtctcgggctgtgctagaggcgcctctggccatggtcctctcacggctgggcttcctggcccccgcgctggtgggtggggttcgggtgctcttgagctggagagcagagggcctctgcatgttggggtgagcctgccagcaagacaggagtagccttctgtggcctcagaagcgcctccccactctcctgttggaagcgagttgcaggccccgcctgctcctgggggtggggggcacagctgacttcaggagcccagcttgagccacctctcacagcggccttggtgagggggggctcacctgtggggggctcacctgtggaggggcatccccagacttgggagtgggtggcatatgggccagggtcagggcgttagggcttggagaaaggttagggttggggttggggttagagccacggtgatggtcagggcatatgggctagggttagggcgttggggtcagggccatgggttctggctagcactgtggagacagccgtttctatcacgaagcgatggaagattccgccgttccaaccccagattcgagggaggcaggggtgtggacggtgccacacctcaatcctcacagcctctgtctcccactgcccaggctggcgaagaagtcctggtttgggaacttcatcagcctggagaaggaggagcagatcttcgtggtcatcaaagacaaacctctgagctccatcaaggctgac

SEQ ID NO: 20282 - DNA, 955 bp, Artificial sequence
  DNA replication origin
cccagcgcacagggcccaggctggcacacagccgcctcactggggccggcatggggaggggctgagtctgaggttagccgtggcaaccaggggcagcatgaagggatgtggtgagggaggaggccgaggaagtgagcagcctgtggggacggggacggggacgctgaggacccctgaggccagggtccaagtgcagtctgaggcctgccctgcccagcgctgggctctcctggccctggagccttctgcaggggctccaagctgtccccacagcgtaagggaagctcagctgcagccagggcagcagtggcctgagtgcccgggggcagagcatatggtggggtgggggccagtccctagctagagaggctgccgaagcgaaccacggcctgatcttgccaagaccctggggccagggagggcgcccgggcagtggtgagcacagggcaggacagcagccctggggaggcaggctgggggcggtgggggaggcgggtggggggcagcccctgtgatgcctgggcgctgggtgcagcacagggtggggcagggccggcaaggaaggggcgtcctgatgggactgggtgctggagtcctggcaataaactttctccatttgaggcttttagggcctttctgctcctcctaacccaaagatgcccagcaaagacaaatgaagcccacccaagaccccgagcgcgaccactctgtggagagccacccggcctccgagggcagggtgagaccagggaaactgagacacctgagggctggggctgtccactgagggccagcagagccccaccggtccctagggccatggcctcacaagggcttctccccgagtctgatggaaatgtccccctctgagacccacccagctggagccttccttctgccccacgtgccagctgcccaggcctgtccggcacacacctagggctgctggggacca

SEQ ID NO: 20283 - DNA, 1476 bp, Artificial sequence
  DNA replication origin
ccagcacaggccgggcgccttacctgccagcgtcagaggctactctcgtagctggtggccaccttctggcccttaagcccagcaccccagcttagtcctggcgctggtggggggggttctacggtggacaagaggcgcctttcagtgtggtgcggctgcgccctatgtccctggcgtgcagaggcgaggcgggtggtcccgccaggccagggaggggctctgctccctgaggggtgcagccacagctcggggcagggaggtgggggcgtccgtcaagaggggccaggaggctgcgcccgggtcctcacgcctcccgtccgcgcagcaccagctggccacgccccactcgcaggccgcaggttggccggagctgagcccgcctcacctgacaagtgctgggccgcaggcgggtcgtgtgtgctcagcagctgggcctggatggtctccaccaccctcttgaagcgacggctggggcctaggggagacagggggttatgccctggacgggcctgggcccggagccgccctgggggcgccagctcacctgagagcagggtgaaggtgacggagtagatgccgttctccttctgcgcctccccaccctccgtgtaggtgatatcaacctggaacttgaccggcttctggaacacggctggcccccccgtggccttgtactcggcccggaagctcgtttgggagatgacgctgtggctgagactgggaatctgtggagagagagcagcgtgagcgtggctggcctggcaggtcccaccctggccctctggggaggcagccctggggcgagccagccccaccgtgcacacattgtgagcacccaggcacctctgcttccgtgaggggcacagtgcggttggagacggctggagcagggggaggggcgtttccagcccccaccctccaaagctttggtccacttagcgggcacagctaagcccctgccgggcttttctcaggcagccacagcacaggatgaccaggaccttacagaggagccttaagggcaaagatggaggtggaaggtgacccctgcagcctgaggtgggggtccagggtggagctgagtgggaggtggggggtctgggagctgccactgagagggaggtgcaagggcggggctggggctgtgccctcctgctggggcttcctgggactcccactggttgcgggacctatggtgctgggcactggctgggtgggcttcacagtaccgagggggcagctgcaggaagcagaactcagggccacccagcgcacagggcccaggctggcacacagccgcctcactggggccggcatggggaggggctgagtctgaggttagccgtggcaaccaggggcagcatgaagggatgtggtgagggaggaggccgaggaagtgagcagcctgtggggacggggacggggacgctgaggacccctgaggccagggtccaagtgcagtctgaggcctgccct

SEQ ID NO: 20284 - DNA, 1008 bp, Artificial sequence
  DNA replication origin
acgccagggacatagggcgcagccgcaccacactgaaaggcgcctcttgtccaccgtagaaccccccccaccagcgccaggactaagctggggtgctgggcttaagggccagaaggtggccaccagctacgagagtagcctctgacgctggcaggtaaggcgcccggcctgtgctggggcggggaggggctgcgggcaggtcctcggcggagccaggctggccctgagcagggccctccatgcccacccacaggtctcggccctggacaggccaagcatgccccgggcggcccatctgctagggcagcctgcacaggacctgggagagcagtgacaaggccctgccctcgggactccccgccatggcaccctaggagggccgcgggctgcctgacgggctgtgacttctcatctctccatacttcctgacagcccagggtcatgcctccagcagggcagaggggcttgagcccagccagagcgggggcttcaccacagcctgatgggctcacacaggggagggttgccccagcctggaaccaccagggtctaggacccgagggtccgtgccactcggcatacggcagggagggctccccccactcccctgggcccatgtgtggtgggggcagggcggagcactgggcacatgcatgggcctggtctgtcagcaagggggtgtgggtgtgcctctgaacgctggtacggcgtgggggcgctgggcgtcgtgggggagcacccggctggaccctgggggtcccctctcccagcctgcatctcagcagctccgtggcatgctagggtcacctcctgtgtttccatgtggggtcctggaagccaaagagggccccactgcccctccccatgacatcctcattccatcatcatgccatcacctgtgggagcccccccagagtgtgcttcaccttgctgcgggctgggggctgaggtccccaacagccctggccctaaccgaagccccagtgggtggaggagtagcccccttct

SEQ ID NO: 20285 - DNA, 1857 bp, Artificial sequence
  DNA replication origin
tgggaggcaggctggggggctgggggcaagcagctagagtcatgtcccgggtccctgggatgggggcagtcctgagaagaggggcggaaatggggagcccacccttcttggggccctgtgctcactgcccaggtgtgtcgatggaggcccctcaatcccacttcctaagcctaacccccacctgagccctgagctgtgggcccctccgctccctgccaggcacagcctccagtggacagagggatgggcaccggcccctcccctaggccacagcctgcaccagtgggaccagcgggaccctcactggcttcaggccttgggagccccttcttgggcctgccctgatcctagggcctggcagaggtgagtctggccaggaaccccgcctgggcttgctgtggtaggggagcgacctgggctgctcctggtagaggatggggccggggacatctgggctgctgggtgcctacatctacacagggaggccgggacaacccgggcggcaggtggcggccacagcgggctgagggtgagcggtgaagtggcaggtggaggtgccaggtgagcgtgggggattcttaccacatttggaaagccgccccgtcatcatttccatacagttagtggtgtctggagtacagaatggagagaggagggagggagtgagtgaaaggctgtcctgggccttctggctggacgcccacagcctcgatggggagggggtggagccaggagtgggtagggccccagaggcatgggtggggaatactgggggggccagagccagagggggcggggcttataaggggcagtgcaggggcagggcctggagtgaggcggggctgcggaggcagggaacaaggcggagccacctgggcagcagccggacctccagcagcctgagcctgagcctggatatggccggtgccctgggtgggcctagcccctcccctgggctgacaactctgccctggccgtggcctgcatcctcactgtgccactcagcagctccagggccctgtggcttccggctgcccttcaactcaaggcaggcaccctcttcctcggccctcttccctactgctgggcctggggatgttggtgctgccagtccaggactggggtgggagcaaggccctgggaggggctactccctcaaggccctcactggcgcctgcacagggtggacacacgccctggtctgcctgtgcctgctcactgggggctctcagcctcccctccctcggccgcagtctctgggggggtgggcagtgtctgaggaggccccctgctggctagccaccttccacacatccttggagctgggctcactggacaaaagcatccagtgtgggaggggggcagggctgggaagggctgggcgtagcgagatcacggggataggctgggctccccaagtccacagggagatagatggggcccagaatagacccccaagagcctctgcagtgggctccactgaggtcagggtccggggcaggaatggagaggggcttggagttggctccaggggagtgctgcgtgctgacaggcggtaccacactttaaggggccaggctgggggagctttgcctacagcccacgcaggagcgctcgactgaggcacccagatggctgctcaggtgcggggacaccctgggcagtaccccggggcccgtttctgcttgccctaccagacaagccctgtccatccctggcctaggtggctgccctgtcgttccctggcctcggtttcccttcctaagatgaaggctttcaaggctcagagagccagaggctgctgccggccgacggcatggcctccgctgtagggaagcgccacgtgtacctgcgggg

SEQ ID NO: 20286 - DNA, 991 bp, Artificial sequence
  DNA replication origin
tctcgtctgaaaaaagttgtttaattacgtcaaagaagttactcaatgggctgcctgggtacacagaacagagacaaaaaaaaaaaaaaaaaggaaaaaagaaaaaaaagggggagagaaagaggaggggagggaaggagagagaaagagaacaaacaaacaaatgaacgaagaggcctcgacgagggaaagaacccagagatgaggctgagatggggccgagcggggaccggtgggcggcaagcagggtgggcaggcggcggccggcaggggccctgtacgctgggggctgtgcggtggggaagctgtgcgccgtggggccaggaacttaggaccccagcgcctccgagctgttgcgcaggacccagtgctcctttggcgaagcgaggctcggggcaggtggtgagacccctccctccccaccaaggcctggcccggaaggccctgccccaccccccttccctccccaccttgcagccgtgagggccgacccaccccaacgccggagatgacagcgtaaagacaagggcctgctgggagctctgaagcctcgcaggaccctgggggcagctgctggccccactgcatgaggcccagtggatgacagggagagggtgtgcccaccacacctccccagagaggcctgaagcccgacccctggccagcttggacacagtttagcagcagacagacagatgaacagatgggtggacaagcatggaggggtggatgtgggaggcaggctggggggctgggggcaagcagctagagtcatgtcccgggtccctgggatgggggcagtcctgagaagaggggcggaaatggggagcccacccttcttggggccctgtgctcactgcccaggtgtgtcgatggaggcccctcaatcccacttcctaagcctaacccccacctgagccctgagctgtgggcccctccgctccctgccaggcacagcctccagtggacagagggatgggcaccggcccct

SEQ ID NO: 20287 - DNA, 1041 bp, Artificial sequence
  DNA replication origin
ctcccagggcagctctgtggacgccgcagtctctgcgtggaccctgctgaggcctgctgctggcctcctccaggccgcggtggactcccggccactggcctcacacagcatgggcctggacttgcccttctgctgcggcggcagaggggcagctgggccagggcgtcgtgccagtggagcccacggccctggctgccctctgtggcaggtatggctgggaccatccccgctctagctccaggggctgtgctcagcctgggcccctcactcccaaggctgggtcatggcaccctatccggacccttcccaagtaaggagtgggaagaaggctcattctccaggaaaaggcccaggccctgggtggccgtgcaggccttgtggggtggcagaggtgccgtgcaaagagagctccgcccaggccctggccctcaacgggagcccgcctcaggctggggcagcctcgggggatggccccacacatcggaagtgacctctgaccttggccgcccggaatctcaccctcttcagctgggcagagggtagctgcattcacactggcgcagcccaggggctgcaagtggggaacaagaagctgtcccgggctgtcacagagccctgcgcgcccgccctgcccagatgaagacctgcgtcgctgtctttgcggaagggatttattgttccggagctgcagctgctcacagttatgacaggggtacactgcaggggcttgcccatttccgtggcgcctgctggagtccgcgtgtgtccgaagcacaaaaggggaaggcaagcaagaggcagtttgcttcgtgtcctcgatctccgtggagagccccttcccgcctgtaccgcctggcgtttgctgtcctaggtgtttgcttttgttcttatgtatagaaatcccagcctgtggcagaggtctaatgttaacagaagcgttaaaatctatacacgaggtgggtgggaggcaggggcaggcaccgaagcagacagacgactccatggcagaggcatgcatcagacccgccgtcccccacggcc

SEQ ID NO: 20288 - DNA, 1370 bp, Artificial sequence
  DNA replication origin
aacatgtctggagtcagctgggggcgtctcctccgacatccacgcgtaccctaaggccttcaccgcctggtccgccacctccccacgagggcccgcactgactccgtgaccctgggctgcatggtgagtcagtgcctggagccaaacccagttcccagagagaggcctgctgggtgccacccacccttgtcttctgatgctctgcgtggacccccagagtggaggccccaggacacccacagaacttgactgaaggggctgagcgtaggaacctgaggcagggaccggcgctggcctaggtagcaaggaggtcccccggcgagggagggcaagaacaggggcgggtggcctggtggggccaccctctggctgaggccccgtctagggtgtgcagggagctcctggctgaggccacagggagccagcctggcacacagcctgggtcgctgtgtgctggcgaacctggggcctggctgccgagcggaggctgggtggaagattggactgagagtgctgtagggcacagggggctgggggccagctccactggggctgaaggggctaggaggacaccgggattccagccagagcctccaaggcagcctcagatggagcgtgtgtggagcccgtgggacggccttaggaggtgtccagggcgcgcattcgtgccggtctcacactcaggatgcagctgcagggtccccagggcacgtgggagtcgcgggcatgagttcctttgggaagggtgcctgggatgagggctggcgctgggcgttgggggcgcctgctgctaggccattgtctggtggacctgtccctctcctgggctgaggggactgtgctgtgcgctgtcctccactgggatgggttcttgctgtaagacctggagtcctggtcaagccttcctgcctctgcctccgtttccctccgtgaacaggaggcctgtacactgaggggggtctcagtgttgagggctcagcctcgcccccagctgcagccatggctcactaagtctctatctatggtctgtgttctgaaaggcagaatgatggtctccaaaagagatccgtgtcctaatcctaagagactgtctccttagatagcacagcaggatggaagctgcagatggaatcaggttcccggtcactgacctgaggaaggggaggttatctggatgggcccagtgttgtcaggagagccaagggcactgagcagggaggcagcggaggaagacagcgcggcgtgggaagggcctgagtcagcagtgcaggcagctcctagaagctgggaaaggaaggcacccagaaagaactggccctgcagactagcccggtgaggtccgtttgaggtaagttcattttgcctccagc

SEQ ID NO: 20289 - DNA, 1716 bp, Artificial sequence
  DNA replication origin
acccaggctcagagcccacctgttggaatagtgtgagggactttgttttgggggctgtgcacacagcatctgcccttctgcttcttccaagtggtcacggaagccctgtgggtgggctgaggtccagggtccactccccagtcccttcagcgccatctctgtcctgcctgcggccggggcctgctcccacagtcctccctccacatcgaaggacttggtctttctgtgccccggggctcctagccagcagcacagggggagctgggagcagggcgcagggcctcggcacttccctgggtgaggggcagctgggccactgaggcagtgactgggcagacctctgggcctggacggcacagagcctgtttcagagcctgtgagcctgcggggggcgccgcagaggtgttttctccactgggcaaagccaagaatgactaaggacgagaagagtgccatggaggtgtcgtgtgctctgaggcctcctcggtagctgccgctggcttggaccgagcaatgggctgcctcagagtgactgcttcctgcccaggcctgggccttcgctgagagcctgcccttctgggaaggagggcacttgaggtcagggagacgtgggtgctgccaggcgttcggggctttcccatggaagtccctctgttggtgcccgcacagccgttcctggagcagaggccatgtcctgcgcgtccccttggtcctactacctttgggccagtgcccgtccacctgccccatgggaatgagtgacccggtccaaagaaggtaggcttgcaggaggcttgtctcacagtgcactaagctccggggcccggccagccctgggtgctggggacagggtgagactgggggagcagctcggggaggcccagcctggagggcctcgtgcgtacttttcttctgtgttctaggagagcaggtgtggacgggaagaggcagggaggctgaggtgccagtgccggagtggcggctgctcactacctcctgaccacagccagagcctgggagagggaagccaggtctccaggttctgcccctgcccagccctctctgaggaccggaggtggaaggtagccccagcctggaaggctggcaagggggcaggaactgccagtagggcagcctccctgagtgggccctggggcacaccctgagagtgagcgcgctgacagctgctcctgctggcagccctgcgtgaccgaccaccaggtaactgccacctggagcttgccagttgacacagctcctaagacacagagcagggagacggcttgtagcccgcttggcagcctgggccactgcaacccacccctccaaatgggaaggccgagcccaggctgtagctgcccgggtggggtgtggtgtgctgtgctgtgagagcacagggcagggaggtgcaggcccacctgccggtggtcagggccaggcccagcgtcatggggagagccttccctgtggtggacacgctgggcatggcctggcacaggctggtgtggagtctgggtgcctcgctgtgctggggcgaggggctgcaggctacacggaagctcaccctgtctgtcccacccctgtactgtgaggaccccaagtgcccacgctgcatgtggcccatccacacctgtgcttcctcttcctcagaccccacgccctgtgctctggagagatggcagagtgggagtgccagggcccaggggccctgcccct

SEQ ID NO: 20290 - DNA, 1240 bp, Artificial sequence
  DNA replication origin
gcctggaccagactaggcacgcttggtgtgctccccccaccctacccggcaccttgtcctgactgttcccccgcccccgtgccaccctcaccattgccttgcctggttgcctggcttcttgtgcccgaagcctccaccatccccagcttcctttatgctctgccctccaacccccagcagctcattctccctgtcatgggcctctgcacggccttctctgtccaggccatgcctcccgagagtgggcaggtctgcgtcatgcacctcctggtcccagccctgctactcacgggggcctccccaggcctggagcccgctcttcctgtggctccctttgccacttgggtgacctgccagcacctgtgtccctgctgttggtggagcccccgagggcagaccggcagccgtgagcacggtgcctaggtgcgtgtggcaccacagggctgtgggatggccttgccaaggcagaggaaggcctgtgggcgcatggacgtcctgagcctcaccgggctgtttgttctgtagagaccagttacgcactgctcagagcatggcttagggactggcctagtggggaaaatgaaactgcagcctgttgggcctgctgctgctgctgcttagggaggcgggggccggcctggggccatcctctgctgtggctcctggagagtgtgtctgtgctgggttggtgtgctgtctccccgtgcgcccaggctgtgtgtgtgcgtgcagtccagacaccacaactcccatgggggctggtattgatgggggtgagcctaccctggctgctttcctgatggctctgtgctccccgcagcagctggtacctcaggctgtgtcctgactcctacagggcttcacaccgacagaggtgctgggacagcttctgaggggcagtggctggagatgctggggtctcttgattggcaggaagcacaggaagtatggctcccatgcgggtgggggatgctcctgatgaccccgtgttgtcagggggctgtcactgccagtggggtccacgctgactcaggatgaggagagagcattgccctctcaggtgtttgcattttcaggatgtggtggtctcctgtgtgcagaccagccagaaggaaggccggggccgtgccgctctgtgcgcccccatggggagctgctgtgggcatttctgttgggctgggtgccctgtggtcctggctggcagcagcctcagcccagcaccgtccaggcaccgcagaag

SEQ ID NO: 20291 - DNA, 1144 bp, Artificial sequence
  DNA replication origin
actgcacgcacacacacagcctgggcgcacggggagacagcacaccaacccagcacagacacactctccaggagccacagcagaggatggccccaggccggcccccgcctccctaagcagcagcagcagcaggcccaacaggctgcagtttcattttccccactaggccagtccctaagccatgctctgagcagtgcgtaactggtctctacagaacaaacagcccggtgaggctcaggacgtccatgcgcccacaggccttcctctgccttggcaaggccatcccacagccctgtggtgccacacgcacctaggcaccgtgctcacggctgccggtctgccctcgggggctccaccaacagcagggacacaggtgctggcaggtcacccaagtggcaaagggagccacaggaagagcgggctccaggcctggggaggcccccgtgagtagcagggctgggaccaggaggtgcatgacgcagacctgcccactctcgggaggcatggcctggacagagaaggccgtgcagaggcccatgacagggagaatgagctgctgggggttggagggcagagcataaaggaagctggggatggtggaggcttcgggcacaagaagccaggcaaccaggcaaggcaatggtgagggtggcacgggggcgggggaacagtcaggacaaggtgccgggtagggtggggggagcacaccaagcgtgcctagtctggtccaggcaaggcagtggtgagggtggcacgggggcgggggaacagtcaagacaaggtgcccggtagggtgggggagcacaccaagtgtgcccagtgggtctggtcagcacacggcagctctgtggcttatgccactgtcccgagagggctgggctggcgccagaggaacgtccacattcatctgtgtttgttcactgggggacacgtgcagggagcaggtattcctattgatcaaaacttaggtagtggggcaggagtggggtagggtgaggggcagctggaacccacagacactgagcgacagacactgcactgggaagaggagcagacctggagcaggctctgcagactccacgaggagctgccacagaggcccgcaggccagtgacgggtgccagtgtggcctggccccgccacc

SEQ ID NO: 20292 - DNA, 1459 bp, Artificial sequence
  DNA replication origin
accaggggcaaagtctcatctctgactccccactgctggcacagccacacacggtggtcctgctgcccactgcccactctctccgcatccttagacccttcctctctcctcacattcgacctcctcagaacttcctgaagtgggtgcttgggaagtaactctttcagaactcacacatcagaaaatattttcattctactcttacatcattgacaggttaactgatgctgaagtctactctggaaatccttttctgactgcattttgaagaccatcttctactttccaggttggaattcatattctggttctcagtacactgtagataacctggtgctacgctctgaatgtgtcccccaaaggcatgtgctggaaactgaacacccagtgctgcagcgctaggaggtggggcctggtggggggtgattaggggtggggctgggaggtggggcctggtgggaggtgattaggggtggggctgggaggtggggcctggtgggcggtgattaggggtggggctgggaggtggggcctggtggggggtgattaggggtggggctgggaggtggggcctggtgggcggtgattaggggtggggctgggaggtggggcctggtgggcggtgattaggggtggggctgggaggtggggcctggtggggggtgattagggatgcgggatgctctgccctaggaatggattaatgtgattctgaaagggcttggggctgtgagttccacctcttgcccttccacctctccccacgaggtgacactgcacaaaggctcttgccagacatgggaccctccatcttggaattccaaacctccaaactgtaagaaataaacctctgttctctgtaaaccactcagtctcaggtattgtttcagcggcacaaacagacgaaggggttttgttttgctttgttcttctctctggaagttgtaaaaatatgctctttatccctggtgtcttctggtgtcgccttttcattcactgcattggacactgtgtgagcccatttcatctgtgaattcatttctggacaactgtggcgttcctttggtgatttcctcccttctgtttcctgctcttcctggaactcctaccaagctacagtgacccctgcctgatgctcggtttccgtacctttgtgctcctggtgtccatgcctgatacccgccctgcgcagtcggcctgctgggaagggcgcgcagcaccatctcccacacctcactggctgtccgatcctcctctctcaggcactctttgctgtgcaccggacgctcctttctgtacaagtctgctcttgctacgtggtctttacaactctgaggagacccacgaacgctatgctttactctttggtttgggctggcttcctgctttttcatctgctttggtctatctggtgacccctgccccctcacatcacatgtggcaggaggcactgcaaagc

SEQ ID NO: 20293 - DNA, 1392 bp, Artificial sequence
  DNA replication origin
tatatatatgtatatatatgtgtacatatatatatgtatatatatgtgtacatatatatgtatatatatgtgtacatatatatgtatatatatgtgtacatatatatgtatatatatgtgtacatatatatatatatgtatatatatatatgagacaaagtcttgctctgtcacccaggctagagtgcagtggcaccatctcagctcactgcaacctctgcctcccaggttcaagtgattctcctgcctcagcctcccgagtagctgggactacaggcatgtgccactacgcctggctaatttttgtattttcagtagaaacagggtttcaccatgttggctaggctggtattgaactccagacctcaggtgatacacctgtctcggcctcccaaagtgctgggattacaggcatgagccactgctcctggccaggacagggcagctttctgggagcagaggctgcagccctccctctactggacctcagtgaatcctggctagcgggacctttgatgggggttgttgcagccgcctgcaggtcctgggggaggaagtggcctggagggccgtgcgtgaatgggcaggtgacagccctggatgtgggtagcagcatccaccagagatgagcaggagcacccagcctgcctccctgtggtgccgccgtggcctgtttacttagccacacctggagatagggaggcagagggcaccctctcagagagcactggcagctgcttcaggtcatgcacacggagctttcggctgcacctggctcatgggacggccccagccataatcccaggtgacactgattatcagcatcctcatgccctgcctgcattccggtcaccccaggggcaccaggcccccacggagagctaagccaaatgcaggggctgtcctggcctctggaggggaggcggggatgactgaagcctggagaacactgcccagcctgctcccaagggtgaccaccttgactgtttcctcaagacccagggaggagcatccctttggtaggcaggtcatggtgggacaatggcgggcttgagagcagatgtttctggaaccccagctgcccgcccactcgctgagtgacctcggacaagcctctggtcctccaggagcctcagcctcctctctggattgtcactgcctggggattaagtgagggagcaggagcaggacagcaggcacagtgcgatcagcaggagggcatctgaggcgtttgttgaaggcttggaagagctggcggcaccttgggaccgggaggcagggcaggcttctgcgccaccatccccaaatcagactctgttcaggtctaggaggtacagggaatgctgaaccatgggggtgctggggatggaggggctgcccaggcaggcgctg

SEQ ID NO: 20294 - DNA, 1388 bp, Artificial sequence
  DNA replication origin
gtggtcatagagcctgcacacgcctccttctcccaccgatacctgttatgggtgggattgtgcatcccacattcatatgtcgatgtcctgaccccagtacctcagaatgtgacctcattatttggaactagggtcactgcagaagaacctagttaagatgaggccacactggagtagggtgggtggacggccttgtgaaaggctgcagcgaggggctgaggcagatgctccctcctggccctccacggagcccacctgcctacacctggatcttggactcatggcctccagaccttgtagagacatttcttttctttttctctcccttccttcctttctttcctccctccttccttccttccttccttccttccttccttccttccttccttcctttctttccttctttcttctttttttgttttgttttgagacagaattttgctctgtcacccaggctggagtgcagtgacgccatctcagctcactgcaacctccacctcccgagttcaagggattctccggccttagcctcttgagtagctgggattacaggtgcctgccactacacccggcttatttttgtagttttagtagagactggggtttcaccatgttggccaggctggtgtcttactcctgacctcagatgatccgcctgcctcagcctcccgaagtgctgggattctaggcatgagccaccgcgcagggctggagagacgtttctgttgaagccgcctggtttgcggtgcttggctccagcagcctcaggccacacacaatatcccagggcggcaccctcaatgccaggccctgctgggaagtcaagggccgaggtgaacatgccctctgcacggtaggggattcagagtgccgccctgcacctgggctgggggaggagcgcagagcacaccggcagaccagggaggggcccttccaggaatgcgctttgtagacagctgggtagggctggggcggactaaggggcctgcggggtctggcggaaccatccaggtgagggcgtggtggcgggagagccaagaacagcagctaggtgtactgcttacctgagaagggggggtggccgcgaagggggttggaggcgttgggatgggggcctagtcagacgcaggtggccgctgccatttggcattgcccggtctggaggacagggagaaaacctggctggagacacagctggtcactgactgcctgagtccctggggccgcggtgtgggcgaccttcctgcgggacccgcaagcccagagcaggtgcaggttgtgggtacagctgaggcagccgaaggaccaaggggagggccttagaaggagggtgggctgggggcgcggggtggagacagggctgtgccttcctcccagcaggtggg

SEQ ID NO: 20295 - DNA, 2327 bp, Artificial sequence
  DNA replication origin
tgaatggcaggtgggttgggggagtgtctaagaagagtggttctttgtgggcaagatgaagggaggacttgctgttaaggggaagccatggagtctttgaggggcctatacaatggacaccagcagagggtgccccaacctccccggaagggcgcagggcacagggcagggcgggccctggacagagggtgggagaggaggggctgattctcagcagagcttcacaacaaatgccttgtgtccatggtgggagcacgtggggaaactcaattatccctgcaggcagctggggctcggcggcacagtccctccagagaaagcacagccttctggcccaggggtgagggtctagacctgtaaggcagcccacagtcccaggccccactcctgcccctgggaatgggtctcctggggtaggagcctctgtggaagacactaggccctgaaggcgtgatgatggcttgtttgtgaagcgagtggtccctgactgtggggaccagagctcagaggggatcctggtggggcgaggggaacatgcgtgtgcctcccacccccaagcagggcgatgccagggcaggcctttgccaaacactaggcaagtgcctgggtggatgcccttcagtccttccaaactgagcaggtagacttgtcttgcttcagaacccttcaatgtccccctccagaggggctgggttgggggtggcctcagggagggaaggggtatgggagctgaactggagttgagtgagaatgctggggagagggaggcctcagtagtggggtgagaggagaggaactcagtgaagggccttcattctggaaggtgggcggggggagggggacgggtgctaggtccaggggcatctctcccagtctttgcagacaccacccatgaaaccaaggaacagtggcctgtccccaggcagctcccaggaggaagctctgggaaggaaaggggaagacgccgcttaccccttccccgccaggaattctgctgccccccccccccaccaagtccagtgccctcccactctgccccagcacatgcgccctcatggctgagcgcacctgcagaacgcactcccgccccccacacacctggggcctccgaccaggacagcgcagggcaggtgactacccaggaagggtaggggaatgtagggggactggtggcaccgttggcatcgccggccgaagcctgcccctgactgacgcaattgccggccggtcgcagctataaatagccaaggagagctggaaatagaagccagggaagggccagaggcgggtggagggaggagcttgggcttgagcacctgatgccagaggaggaaaacaaaactccattctagggctcccctccctcatcccaccccagcccagaggggcgtttgcacccggaaacgtttggggaagcagggtgaagtcaagaacctgcccaacagtgggcggggcctccctgccgcgagggtcggggcgcgtggagcctgcgctggccacagcccgcggtcttcggctctgggtcatctgcggggcagtggcccctcctgatatccgcccgcccccactcccaagcagaaagagattccggtgcctctccaccctccccaccccactccctccgtcaagcccctggcccaggagacccccgacagccctggaacacagggccgattggcgagatcagtggacactaggcctgcccagagcctagccggtgggggcggcgtcctgggggtgggaggggggcttgtggggcagtttccatatcttcctcgcccaacccaatccttcggccagcggcaggaatggggctcagagactttgccggcctggggcagggcgcactgcagccagtgtggaagccagacccaaaccggacggtcccggtgcctggttctgctcggtcacctcttgcccacctacccagcgggcgctcacaagctgggggcccaaaagaggaacagaaaaccagaggactgggggggctttgaggctgaagggcgaaggcccttcccggacacccttgagccctccaccctgagcccctagcagcgccagggagtgacttcagtccgggttcctactgtggggcctccgcctctcggagggcattagggctggcaaggcgcggccgatggggcccttcgcctgtgtggaccgtaacaagaaactccaggaggggcaggattgagggcagtaggacggggttggtgtgggcgaggggaggtttgggtccccccacctctccgggcagctggtggcggccccgccctccctgagggcaaggaacccgcagccgggaggacggcggctgcaggccagtg

SEQ ID NO: 20296 - DNA, 944 bp, Artificial sequence
  DNA replication origin
agcgaaggtgggtgggtaataatgttacattgcgttagttgcacttctgttagtcttacattaaagccagcttgtgcttacctccattctccattggactgcagatgggtacctggtctttgcatacagaaggtacccagtgaatgtccaatgaataagccacatactaactgtcttggagtgggacatcacaggagagaccctctccaaggcccagggagaggaacaggcttggtcaatgtcccttagagggtcaggggccaagttggggctgggcttggttcctggtctctcaggcaccattcctctgcctgccgagccatccctggaagtaagctggaggctggtctcagtggcacccctgccagctgccactgtactcctgtggatggacttaccaaggcccttccggagctcagaactgaagagactgagcaggagaaagggcagagggccagttctcaggaagcctttcaggaggagagttttggcctctgaaggccaggttgtgtttggaggggctgggggcaggtggggcaggaggacattgcaaaggtccacagcatgggagaaaaggcagaggtaggagcgccctgcggggagccaggcagaagctgaaggcctctggccaaggcaaggcccgacgggaagagggtgcatctcgatggggctctgaatggcaggtgggttgggggagtgtctaagaagagtggttctttgtgggcaagatgaagggaggacttgctgttaaggggaagccatggagtctttgaggggcctatacaatggacaccagcagagggtgccccaacctccccggaagggcgcagggcacagggcagggcgggccctggacagagggtgggagaggaggggctgattctcagcagagcttcacaacaaatgccttgtgtccatggtgggagcacgtggggaaactcaat

SEQ ID NO: 20297 - DNA, 902 bp, Artificial sequence
  DNA replication origin
agtgagcagccagcaggggggcgaaggtcctgtgttggccactgcctcctccagtgctgcaggaggcgggctgaggccccacctggtggctttcacctgacccagccctgagtcctctccaagcctctctccggcccctcccacctggccactgcctcctccagtgctgcgggaggcgggccagggccccacctggtggctttcacctgacccagccctgagtcctctccaagcctctctccggcccctcccacctggccactgcctggcattgggatcgccccaaaatggacccggcccctcctgttatttgctgggaagtccagcggaggagagggtgcaggtcccccgctgagcctccagtctctgtagactgggctgccggcccttcagccccccttggagcccctcccgccacagccgcaccttctgctcccggcccctccctttgtatttggagacaatgtgttgtaataaagcttaaagtggatgttttccccacgactccgcgcctcttccttcagactggtggtgggcagggtgggggcagaggctgctgggaggcaggcctgaggccagagcctggtgtgttgggtctggaaacttgccccaggctcacaccgcgggtgagctctgagaatagtccctgggggccaggcatgggcacaggtcctcagctgcacctttagggtgtaaaacacactttttcagttgttacaggctagtaaaagcttaaataacttaaaacgatataaaacctcagtgttacccaccagtcccctcactcccacaatcccaatgtgaacagttggatgcttccctcccagcccctccatgtgtgctgtgtgctgtgtgcatgtgtgtgggtgcatatacgtaccagcagaaataggggtctagct

SEQ ID NO: 20298 - DNA, 900 bp, Artificial sequence
  DNA replication origin
ctcaggactgggtcctgccctgggctgcctctccggccaagcccctggcctcttcccacagtgactggccccactcctagaccctaggacatctgaagggcaggggtcccaatggcccgagggggtatggggcaggggcagcaggctgacccacctgggcccaaaagccacttgtgtttgggggctggcatgccacctagagagagagcaccctgggaaaggggtgaatgggagtttctctcctgagcggccccatgggggtgggggcaaacgagggggctttacctgtcttgaggcagtgctccctaagtgaagcaggcctatcccagcagcacaggggcttggctggcgcctgaactccctgtgtgagcagcacctgctcacagagcccctcagcctgcaggtgcacacctgaattccaagttctgcctggggcatggctgggaggggggcggggcagacctggaacagaaccctaagaccaccccctcctcatacctgggggtccagggcttcctgcccagtggagccagcactggctagccaggcgcctcctgcctgacccccggaggccaagctcctctcctgcaatggtgccaccctgcccggcaggcagctctgggggcatgggcaagggagaagggagggccgcagccctctaggaatggcctttctgagccactctgtggctggactggggctctggcaggagttgggggcactaacacctctgtcctcccctgggctgcacctcatctgacgttccagaaccccctgcccgaagcccctacacacactgttctatttctcagcccctctgaacaccctggcaccatgaagcccaatgcctgtcctcccctgccagagaacagctctggggcaacgggcagcggggtgccc

SEQ ID NO: 20299 - DNA, 1250 bp, Artificial sequence
  DNA replication origin
ctgctaggggcgtaggcagacttgatgtccagggagaaggagcgcttgaggcggttagtgtcctgcaggcggtccgaggagaggtgcaggccgcgcaggccctgctgcagtgcgctggtcgccgggggcgtggggggcgcggggggctccccgcccgcgctcaggccgccctccctggcagccgcattccctgtggcagcgctctctgaggtaggtggtggcagccgtggcagcggggccccggcggcaggactgggcggaggctccggcgtccctgagggggtgcccgggtcgccctgcagggcggccagcagcttcaggctgcgctcgtactccagcagctggcccaggaagttgaagttgggcgagatggacgggcgcctgtccttcacgaacctgcgggggaggaggctcagtcccaggcgcccgccggggccaggctgcccacctgacgcacccgctgggcacccacgagctcatgtgcgccaggctggtctcaggccctcctcccttgccacgggtcctggacggtggggtcattctggtgcaagtgggcagccgggggaagggaagcgacgctgtgagccacaagtgcgcgactggggaaggtggtacctgtaggcgtcgtcggaggacatgcccatggtcttcatgatgtaggcgatggcgatggtggcagagcgggagatgccagccagacagtggacgatgacttggcagctggagagcttggctttatctgggcaggtgggccatgggggccaggtgagggctaagactgcacagcttctccctggcccaggtaggggaccccacccgcccaactgccaacagttccggctacttcctggggacccctcctgtgtctgtggccacacacagctctagccttcctctagccaggtccctgccctccgcccaccgcagactcaccgatgaactcgatggacttgtccagccagggcagcagtttttcacagtagttgtcgttgatggggacccgcatgaagcggctctcgcagatgaagtcaggcttggggcaggagttgctggcgttgaggacgtagcttattccattttgcgtcatcagatcctggaggggcgggagggcgggttggaaaggggtgggagaagctcggggcgggagtgaaggtggaggcttttcctgccctgccgtcaggagggcctttagaatcctgggagccttggaatttgtcccagatcccagtgtatccaggggagggcccagg

SEQ ID NO: 20300 - DNA, 1240 bp, Artificial sequence
  DNA replication origin
cacgtgtgcagcgggtgcccactgcctgctctgcgtgcccccagtgccccgggcttctccactctccgtcctcccctgctgggtggagtacagccataaccagacagcaaatgccccgagggctgtgccagggtgatgtcatgcctggggacggggagggcctctcggaagccctggcctcctggtcctggcacccaagcccaggcctggggctcccagccagctggaggcagggaggcattgcatcagtgcaggggaggaggaaggcccagcctggccccaggccatgggtatgggagatggccgggctcgtgagggcctctcctctgggctgtgtgacacacaccctcagcaggagacccctgtggcctctgagcccacccctgcctgggcccagcgcgtgccgtgatggccagccacctcaacgccacctttacgggcatcctagcggcgtcctcagctgggtcagcccctaattagcatgaggaggaatgtgggcgtaggtgcaggctgtaaatgtgtggcagtaccccctccccccaccgcgggcagagcaggtgctccgccagaggcttgccggctgggctcaggctcgggtctgggctgggtgtgactgatcctcagcagtagatggggtgccctaggcggacagggcaccctaggcggacagggagccctaggtgttctctcaacccacttgacggccctcctcctacagggggcttcgccaccttctcctcctgcttccccggcctctgcgagggcaagcctgctgccctgctacccatgagcctctcccagccctgcctgcctgtgcccagcgtgggcctgacccgcatcctgcctcacctctacctgggctcgcagaaggacgtcctaaacaaggtgtgtgtgcagtggagttcggggggtggtcaatgggaaaggggcaggagctccagaagcagcttggcagcggagcgggggatgagggaggaaaggagctgaaggcagtggatgagctgggtgtgggagaagcatgggtgggggcccaggaggaccccaggctccccacccatgcccctggaaggaccacagcagggcttgcgggagggcccggcagggctcgggggaggagcggggagctggcatgccaagctgcggatgtcactgggcctctggccagctctgaaagaatcccatgttttaaaaatggtgacgagggaaaagggtaaaagccaccacccaggcaatcataaaa

SEQ ID NO: 20301 - DNA, 1629 bp, Artificial sequence
  DNA replication origin
cggagctcatccagccggctgcacgcagccaggtacccagcccactgcccaccaggcatgcatcacgtccagggtccacagctaaggggccctcagctcgggcagcacccccctcctctgccttccagtccaaactcgactccttggggtcacagccaggggcgtgtggagcagtcctccctggcacttgcctctcaccgctgcctgttgcccctgctcagggcatcccccgcacccccgcccgcagcacccttccctaccctccctccagggcctccttgctcagcttctgcacagaggtgccgggccctccccacgcagataggactgtgtggccagggccaacccaggctcacagaggggagcagtgagtggaatagcaaggtgtgaccacatggcagtgggagcagcccagctggcctacacgggacagggacagctgtgtggtccacttccactgctgtgaggacaggaggggtggtcaaaaggcacacgtgagcagtccatgtccccgtcccacagcttcccccagcccgcagagtattcagggacccagaattctctctgtggccccccaggaatgtccttctggggaaggacagctcattctgcccaggaccatcaggtgcagctggggagggaccagcggggctgttgacctgtgaaggtggcggcacctcctccttctactgcctcgcaggggacaagggtgacaagctcttggccctggaggctttgagaggggtctgggtcactgataggccctgttcagagctgggacatgggaggactcaagtgggatggccactggccaggagtccgcccaccccaaggccagaatcggctccctttggtttccaacaaggggaatctggtgattaatgacccccagcaaggactcccggcagagtgcgatcccattggctgccggtgacgtcacccagcccagggttggcggctcagctggcttaagggctgagtgtgtgcttgcagggcgggggcaccggtgctgtctgagcaaaagccgctcaacatctgggctggcccttggggtgggggaggagggcaggaggaacccagcttccagctgctgcctccggaattggtgcaggggcctggggtcctgctgcagccctctgtttctccgctgggggttggggaggggatagggtggggagcagaattgctggctacacagttagccccactgagagcccacacccgaaggcatgcgtttcagggccgagcttctctgtccctccgccaccctgggagccagccaggtcctatcctgggctcccatcgcactcacctgtgtctcctccacacaggcctggcccagagcgtccgtccccttcacccatgtgcatggcatgggggcacagctgcgcagggcaggagtccacccctccctgcccccatggcttgctgtgtggtgtgggtgtgtgcatctgggcctctggcagatggaggagagtgtgtgactgcacctgccctcccctccaggcagcaaggtgacagctgcctgcctcccatcatctgatgcccttactattcccttgagccagcatatctgggacggggccagggcatcgataggtggaggcggcatgctgatctctgccccat

SEQ ID NO: 20302 - DNA, 2737 bp, Artificial sequence
  DNA replication origin
gcggacccgggcccagcccacgcccgcccgccgcgttgccgcccttctccccgcagctccttctttgggtgtggaatgggggggggacaaaaatccaggacccaccagggccgcctgagatccagcgcggatctgcgcgagcccccgacgtcccgaacgtcacccccgcgggggccagaaccggagcaggcggaccctggcccggagtcggtccgggaggtgtggagcctcggccgtgggagggacgcgacggcctctggcctgggacacccgggaaggggccttcccctgtcgggggggagggctgcagatccatccccccagtgtccaggccgcactgcctccccatcccggggtgcccagccggcccctgagggataaagcccccgcgcccttccgcctgctgcagaggcagccgcggcgctgggggaggggctggcacagccaggctgctgcagccacctcgctaggcccagctgcccagcctgggatgcggagcagaccaggtggggatacctaatagtctggcctggaggggagggggcaacaataggcccagccccaacagggtcaccccttctgggagaatctgcctccgtctccctgctgcggggtgtaccggcctctgctgaggggaataggggctctggtgctgcagtgatggggggcggggacactgtgggatggaggagggggtggcaggatgtagcgtggctccgcagtgctcttgctgtgcagcttggggtgggggtggggtgctgcaggccagggaagctccttttgtgccccagcggggggtctgaggggagatccaaaccccggcactctcccttgcctcccttctggcacagcccacccagagacactgttgcacctagggcggtccaggggtgaatgtagcaccccaggccccagccctccaccaggaggacagtcccatgcattcactgctaataagcactggatgcggatggcagatcatgtgaccccagctggaagttcatcctgaagtctcgctgaaatacctcctgctgcagccagccgggggctgcacgagtgtggctgggcaggttctattcccctggtatcctctgtcctcggggaggcttctgggaataaagtcccattaacagaggtgcagaaagacgcttagagtcagtctctgctccaggacccttctcttctcaggctggggctgaagtcagggcctagaggctgccactggacaggtgcctcgaaggggcatcagctagggcctggggagacctaggtgtcacttcttgcagaaggcagggaaaggggcagacccacagtgagagagaggtggttggactctggccatgagaactgcacccgctgaggccccctctgccggagttgctcagggcagtgaaccttggaagcgccacactggtcctgatgtttagcatgtggcacagtgaccaggaggagggacacaggtctggtgggaagggagggaacctggatatgtccggctctgagactcgactgtcacggccccttgtgccaagtcctcccatcccctgccctgcccggaccccgttcctgggatcggagggagccccccgccccaccccactttctcccaggtccacagcttccccaggccagcggagcagagtgtaggccagcttgggtcctacagcactagccaagggagctgaggggaggcagggatgagggcatctgggggagcccagtgagggaagatgagctgacctgtgtgagtgcagggtccctgcctcccagagttgccacccaccagtctctcctcagcctccttagtgtgacgatttctgcctccagaagcatccctgggtaacagtgagccggacagctccaagagcctgcctaggtgtgagggggagacacagtcccatccccccatgcttgacagtcctggcagctgtctctgaaggtagtgagtccccatttctaggtgctgagcagaaggtaacatggtaaggatgctgtcagttgagagctgggggtggcctgggactccctggtcccgtctgtgctcagggacaggaatgtgctgcacagagacgctgggtgtgggagctcgtgtttgtaaggagtctgaagctgacccctcgggtactggagtcctggggttctcaggggatcctgcatacagagggcaaggacgtgcgtgtactctagtgtatgtccagcccacgcgtgtgcacatattcacgcgtgggtacttgcacacagggcaggtggattgtgggtaaggagcaccagccctgtgtgtggagtgggtgtgcaaagaggtgtgttctggcacgcacagagggcagtgtgcacgcagcactggagccaggcgtgctgtgtcccaggggagggtggcggcctggtgcctcctggaaggtgtgggcctgggaggagccttcttctgactttggacttggaaactgcttcctcctgggctcaaagacttttgaaaagggtgtatggggctgtgctagggggcatcctgtccccagccctgcctctcaccccccaacccctaggcactggaatagcagggccacaggtactcaggagggcttggcatgtggggccgtgaaaggagaggcatggaaccaacaccatccacatttccttacctctgttcccacatggccagtgctggccccactgatctgcaccagactgtccttagtgtctctgctccccaccccacccaacctgccccatccctggcata

SEQ ID NO: 20303 - DNA, 1602 bp, Artificial sequence
  DNA replication origin
ctgcctcgggtcacacatccgcgaactccgggggcgggctccccaggacgccgccgaccccccacgacccccagccctcccgcttccgtggaaagccgccccgacgacccctgtgcgggctgttgaggggccgcaccccgccgaccgctgtgggaacacctccgcgcgtgcggcggggacgcggcgagtccggggcaggaagaacgcacgggtaattgcaccttcggcaggtgttgggcgggagcaagggggtcagactcgcgctgcagggggagggcgggggaggcctcgctgtcctggaggaaggggacaaagacccctgcccaggagcctgggagcctttgaaagtaatgattttttggcgggggggggttgtcacgagacaccctagacatttctaaaaggccccctccccgctgccgggtggagagggagcgtggggggatccgccttctgcccccgagcccccagccagcctgggccccccagggtcaccctggggctctgaagggggcttcggccgctggttgaatgaagggccacagaaaatgaagctggcgcaacgaccgcagaaccctcagtgggcaccaggaccacggagctcagggtgccaatggtgatggctgggggtggggagtactgtgggcagcaggggatgctgagcggggtttggggctccccctttccatactcagtcttcctgccagcctcagagctgagtacaccgttggcgattaataagcgcttgcagctcccttccctggccagcctgaggggagcggcagtggcccgtatggggtgggggtggcggtggagtgcgtcctggcgcagagctggcacacagcacaaacaaacgccttggcgggagtgggtctgtcccggaagggagcccaggggttattggggttggggctgcgccccaaagcgggagggccctgcgagaagggaggccctggctggagggggaccctgagactggaggtgccggacccggatgcggggccaggtgagtagggctgcctgctgcagccttgctgggtttgaaaagtgggggaggcttggccctgggagggggcaggaggattcaggctgagacccggagggggcgaaggaggtccttgaggaggcagtcacaggcctgaaaggacctgggacccgcaggcatgggagctgttagccgttagatagaggggctgtcgcctggggggaagcctcacctggcttgttccccctgccaggcctaggtgagcccgatgggcgtgtcttctgcccagctgggatgtggccagcatctgcctgtggcctgggagtgcccattgtcccctaagagctctggttataccctgggcagctactggccaggctggagcaggtggcaggcagcgacctttagtccctcctggaggctcccagggggcggtttggaggggaatacggctcccctggagggcctgggctgtccctggggggcagagtgccctgggcggcgattgttataatccccgtagccattttcatgcaaataagcactgagagcgttaggttctgcccctaaccaggctggcggactagggaggtggcaccctggggaggacggtggtt

SEQ ID NO: 20304 - DNA, 1232 bp, Artificial sequence
  DNA replication origin
cctgctgtgtcctgtatctcgtgctttctgtcagaggtatgcctcaaaggaccgtgggggtccatatctagggaccgtggggggtccatatgtcgggaccgtgggggtgtctatatctcgggaccgtgggggtccatatctaaggaccgtgggggtccatatcttgggaccatggggggtctatatgtcaggaccgtgggggtctatatctaaggaccgtggggttctgtatctcaggaccgtgggggtccatatctagggaccgtgggggtccatatctagggaccgtggggggtccatatgtcgggaccgtgggggtgtctatatctcgggaccgtgggggtccatatctaaggactgtgggggtccatatcttgggaccatggggggtctatatgtcaggaccgtgggggtctatatctaaggaccgtggggttctgtatctcaggaccgtgggggtctgtatctagggaccgtggggatctgtatctagggaccgtgcggatctgtatctagggactgtgggagtctatatctaaggaccgtggggtctatatctagggaccgtgggggtccatatctcaggaccgtggggatctgtatctcaggaccgtgggggtctgtatctcgggaccgtgggagtctatatctagggactgtgggagtctatatctaaggaccgtggcgtccatatctagggaccatgggggtccatatgtcgggaccgtggggggtctatatctcgggaccgtgggggtccatatctaaggaccatatgtcgggaccgtggggttctgtatctcaggaccgtgggggtctgtatctagggaccgtagggatctgtgtctagggaccgtgggggtctatatctagggactgtgggagtctatatctaaggactgtggcggtctgtatctcgggaccgtgggggtctatatctcaggaccgtggggctccatatctcaggaccatgggggtctgtatctaaggaccgtggaggtctatatctcgggaccgtgggggtctccatctaaggactgtgggggtctagctgctctcttccaacagtgagcacgtggcctccctctctagtgcagacagggagaggagctgaacatttcgtctacccgctcagttagggattgggccacttcagtcaatcgtccctctgtgtggctttcctggagttttggttaagagcctggccagtccgtgtcttcttatccctgaca

SEQ ID NO: 20305 - DNA, 1039 bp, Artificial sequence
  DNA replication origin
gctccggctgtgggggctgtggctccggctgtgggggctgtggctctggctgtggaggttctggctccagctgctgtgtgcccgtctgctgctgcaagcccgtgtgctgccgtgtgccaacctgttcctgctccagctgtggcaaagggggctgtggctcttctgggggctccaaggggggctgtggctcctgtggaggctgcaaggggggctgtggctcttgtgggggatccaaggggggttgtggctcctgtgggggctccaaggggggctgtggctcttgtgggggatccaagggtggctgtggttccggctgtgggggatgtggctccagctgctgtgtgcctgtctgctgctgcaagcccatgtgctgctgtgtgccagcttgttcctgctccagctgtggcaaagggggctgtggctcctgtgggtgctccaagggggcctgtggttcttgtgggggctccaaggggggctgtggctcctgtggaggctgcaaggggggctgcggttcttgtgggggatccaaggggggttgtggctccggctgtgggggctgtggctccggctgcggtgtgcccgtgtgttgctgttcctgttccagttgtggctcttgcgcggggtctaagggaggctgcgggtcatcctgctcccagtgcagttgctgtaagccctgctgctgttcctcaggctgtgggtcatcctgttgccaatccagctgctgcaagccctgctgctcccagtccagttgctgtgtccccgtgtgctgccagtgcaagatctgatttctggctttgcaggactcttaccatggccaggcattcctgcccagcctttacctccttttcctggcacccagtgagccagactctccttccccacccactaccctatctcccaccctcctgccttgccaagcatgaacacttctctttgaccttctaccaagaaatgccatgggcccatgcatccaagaagaatgactttcaaggcctcccttccaggcatctggagaccagccccccaccgccccagccac

SEQ ID NO: 20306 - DNA, 928 bp, Artificial sequence
  DNA replication origin
gatgctcaactgagccagaaggaagtcactagcaaagaggaaaaaaatagagctctggaaaaatagtgtaaacagtcacaagaaagggaccctgtgtcatgcctgacatctggacaggtatataaagagcccaggctcagggagctccacacctgcacctccctctcacctgctcctctacctgctccaccctcaatccaccagaaccatgggctgctgtggctgctccagaggctgtggctccggctgtgggggctgtggctccagctgtgggggttgtggctctggctgtgggggctgtggctccggccgtgggggctgtggctctggctgtgggggctgcagctccagctgtgggggatgtggctccagatgttatgtgcctgtctgctgctgcaagcccgtgtgctcctgggtgccagcctgttcctgcaccagctgtggctcctgtgggggctccaaggggggctgtggctcctgtgggggctccaaggggggctgtggctcctgtgggggttccaaggggggctgtggttcttgtggctgctcccagtccagctgttgtaagccctgttgctgctcctcaggctgtggatcatcctgctgccagtccagctgctgcaagccctgctgctgccagtccagctgctgtgtccccgtgtgctgccagtccagctgctgcaagccctgttgctgccagtccaactgttgtgtccctgtgtgctgccagtgtaagatctgaggctctggacccagaccttcaggtttctcctgtttggtgaaagcatttcttatggttccctgagtcagttcgtcccacacatcctccctgaggcacctgcacctgctctagctcaccatccatgcacacacctccttccatggctcagctctcctctgggccctgccttcagcctcctcactccag

SEQ ID NO: 20307 - DNA, 1247 bp, Artificial sequence
  DNA replication origin
gaagtccagcaaacaaataatcacatacccaggaagtgctgggaatgatggagtgaccaaggtctcagagcaaccctacccagggatataagggggtccaggctcagggggctccacacctgcacctccatctcatctgctcctctacctgctccaccctcaatccaccagaaccatgggctgctgtggctgctctggaggctgtggctccggctgtgggggctgtggctccggctgtgggggctgtggctctggctgtgggggctgtggctccggctgtgggggctgtggctccggctgtgggggctgtggctccagctgctgtgtgcccatctgctgctgcaaacctgtgtgctgctgtgtgccagcctgttcctgctccagctgtggctcctgtgggggctccaaggggggctatggctcttgtgggggttccaaggggggctgtgtctcctgtgggggttccaaggggggctgtggctcctgtgggggctccaaggggggctgtggctcctgtgggggttccaaggggggctgtggctcctgtgggggctccaaaggaggctgtggctcttgtggctgctcccagtgcagctgctgtaagccctgctgcttctcttcaggctgtgggtcatcctgctgccagtccagctgctgtaagccctgctgctcctcctcaggttgtgggtcatcctgctgccagtccagctgctgcaagccctactgctgccagtccagctgctgtaagccctgctgctcctcctcaggttgtgggtcatcctgctgccagtccagttgctgcaatccctgctgctcccagtctagttgctgtgtccctgtgtgctgccagtgtaagatctgaggctctggactcaggcctcatgtgagtcctgctaatcctgtcttccaaagctgtgacctgtccttcattgttgagccccaaatcattgctcagggtccattccctgctgtagaacgatgccatatctggctgccttttcctaagaagagtccaccctaattaatgtccattgtctctcctaacaaattctctccccaagtcaactgcaattgcagctgaatcacccctcacccactagcctcgcctttgctcatcttttcagaggcctgagctcctgaacccacttgcagtcctgtcttttccagctggagcagctgggcataagcgtcccacctgcaacaaggtgggcgtttaagaggcttccttggagtggctttgcatgtcc

SEQ ID NO: 20308 - DNA, 1148 bp, Artificial sequence
  DNA replication origin
tcatctatatggcaagcctgcacatgcagccctgaacccaaaataaaagctgaaagaaagcttgtctccaggctaggttgccttagaaggcactgggcatttgggctcccccagctctggaatttttttttggaggtggggatctattcaactcccggctgccttcgagcttgtgtcccgcagctggcgttgtgtgcagtcctgccttctcctgtctggtttttcaaggccctgtgagattgcagataagcccaagctcctccgcatctccacgtctggctcctgcatgcactaggggcttcttagggcctgatgtaccgcacagctcagcatacagacccttcctcatccttccgctgaagtggcctggccctgagcttccctccctcccacgggacggcagtgcctccacggctgacaccaccgccctcaccacctttccctctccccacctctccccacataccagactgtgagcttggatttactctgctctgtcatctctggagcccaacacaacaaggggcccagagcagaaagctatagacgttagttctgtgcatgaagacatggaccatgacatgaaagatgctgaggggagagaaatgggaacaggcccaggggtggaggcaagaagatggtgcttctgggaatgagagagaggtgggaaggagagaaccacaagacagtgagctttgtgcttagagactttgtttatttagagggtcaggattcagtcttgatatacagacagccagagagattgagggtcgatcacactcctgaaagaaggagcagctgtcagggtctaaggggtctgatctgcctctggggcctcagtgggccgctttggatcttaaatgagtgaggagcagggagaggaagttcaggagaagtagtaggcaatgagccagaaggggtcctcagtcagtttcgggagcactggtgtggagtggatgaagccagtgaggacacagtggagacagtggagcaccagagaacccagggcaaggaagctgggcagccgggcccttcaccagtcaggccacctgcagtctgcagtcagagcctcagatcttacactggcagcacacggggacacagcagctggactggcagcagcagggcttgtagcagctggattggca

SEQ ID NO: 20309 - DNA, 903 bp, Artificial sequence
  DNA replication origin
gggtggggtggtctggggtggagtggtcttgggtgggatgggctggggtggaggtggtttggttggaggtggtctggggtgggatggtctgaggttggaggtggtctggtgttggagatggtatggggtggggtggtctcgggtggaggtggtttggggtggagtggtctggggtgggatgggctggggtggaggtggtttggttggaggtggtctggtgttggagatggtatggggtggaggtggtctcgggtggaggtggtctggggtggagatggtctggggtggagtggtctggggtggaagtggtctggggtgggatggtctgagggtgggggtggtctggggatgggtgatctaggggtggaggacatctgcggtggaggtggcctgaggtggggtggtctcgggtgcaagtggtctggggtgcggtggcctgggggtgaggttgtctggggtgaaggtagtctggggtggaggtggtctggggtagggtggtctggggtggaggtggtctggggtggaggtggtctggggtgtgatggtctgaggttggaggtggtctcaagtggaggtggtctggtgttggaggtggtatggggtggggtggtctcgggtggaggtggtctgggagtggaggtggtctgggctggaagtggtttgtttgcctgcattccagctgaaaacaagttcagacaacttcaaggctgggatgagatgagacagaacgaggccctttcataatttcatctaaacacggacaaatcaagatcccggtgccagccatgaaatgccaaacctccccttctctctgctaacaggagctgggccttgcctggggtcagacttttgccagctggtcatgcgggctccagctttctgacagcctccaacccggggtga

SEQ ID NO: 20310 - DNA, 1496 bp, Artificial sequence
  DNA replication origin
ggcaccaccttgcagggtgccctgctggtccagcatgcgggagccctggcacccatcaaccccagaatgaggcacagcgggcagctggggatagagcccgtggcatcccagagggtgctgcccaggcatgtcctggcactcttctacctggatgcccatgccactcagagaggggcaccatgactggctgtcctgctcgaggaaggaggtaccccagcagcacctcattctgtggttgggacgcatttccctgggatccaaggggctgtcagccctgggggaggcccaggtgaaggagcccactcgtgggcccggcccgcagtgcccccactgtccctggaggccccctgtgctccaggtggcccggcaggctcacgctccacagggagcttcaggaagccccaggagatgagtatgcagggcccagggccttggagcacagccaggccttctccatccactgaggaacacttcttcctttgactacaaacaatccctactttctcctaaatttctgtgggaaaataaactcttgagtacgtgacaccaagtggcatgaggccccacagggtgcaccagacccgaagccgcgggttccagggggctcctgatgcaggaggaatgtgacagtggagaaggcgtgtgctcctcaaggaagaaggggacgggaatgggaacagaggcacacgcaggccacagccccctaccccctgcccagcctcaggcctgtctgtggacagctgcatccgcccggataacccaggccctgctgcggtcacagggagccctgaaatcacaaggctgttatcttagtttatgtttcctcaaaaacagacactgagccaaaggctggagggcaaagctcacgggttgggggcggattcggggaagcgcagggaagagggaggaggaggccaaggaggcctcagtgcaggaacagctgctggggaccctctgcaaggctgcaggggacgccatggtgtcctctgagttatttctctttcattagtacagattgcccctagaagggcattagcctccctgactccagccttccccacaggctggactccatgctggtgtccacaggtgacctcgaggtgggcgaagatgtgcacacagggcccagctgtgtctgctgcagtcggcttgtgcgtatcacaagctgacgcgacatgaagcccttcagagtcccctcaagtaaaggcttggggaagtgagctcccaccgacacatgggcggccattgctgcatccttcattccccatcatacagataagagagacagggtggtaggggtgggggagagaaaggggagagaaagggagagagcgggggaaagaaggaagagagagagcaagagacagagaaagacggagagagaagggagagagagcaagagagagggggaagagaagcagagacagagatggagacagagacggaaacagaggcagagacagagatggagatggagacagagacagagatggact

SEQ ID NO: 20311 - DNA, 1057 bp, Artificial sequence
  DNA replication origin
ctaactttatttaagatgacatgtggagagactggaaggacaccttcgctctgtctgggaagccgtgaggctgagggggctgtcccccgcccgggtcccgtggggagcccatcttctaccaacccatcccaggttcagcagggtctcttgcttttgttcggagcgcagcaggaggccactgaggtgcccacaaaggggagagatgggaggcagaccatgttctcagtgaccactgtctctgctgtgtgatgaggggttgtcttggggaggaaagaatgcatgtgaccggcaaagctgcagaaactcagcttagaacaggtcacaatcatggtagcaaacactggggtggggaagtcggccctgactgagaggccaggatggatcccaggtacgtctctgaggggaaaggaacagggcccgtcacgagcaggaggtgccgctgaggaaaagcaagtttctgatgtgactcctgacttctcacaatggggcgtggcaccagcaatcagaagggtaaaggctgtgggtcgaatcagaaggtgcatcatacgtatgccgagatcagacgcctgtgacacggccaggaggtgtgcagaacacagcccatgatgagactgccccttgggcacagttagggactgcaggatcatatttaaaatttctggtgcacagatgttgtgtaaagagactgggagagcgggagattgggagaggggaaggagaggaggagggggagaaggagaagagagaaggcctccaggagcctcagagctgatggacgcggagaagctgcgaagcctacacaggggacagccgggagggtaggggcagcaggtgagaggagagagggcgttaagctggacggggtgagctgtgcgggtcaccacaggcgcagagggatgatgagcacagaacactgccttcgggggcttgggtgaccacgaagacgtgtgtcaggctggagaccctaccctgcttagaagctgaatgtcagtctatgactgtctcatgggtaccaataaacatactccccatggccctgtcccactctccacggccc

SEQ ID NO: 20312 - DNA, 997 bp, Artificial sequence
  DNA replication origin
gattagtcaggacggagctccagtttcgcgcgatgaaaaggtgctggagctgcatggtggcgacagtggcacagccacgtgcaggttcccaatgccacggaactgtgcacttaccatggggatggtgggaactctcatgtacccgcatttgaccagagaggaaggaaggaagggaggggggagggaggagggagggaggtagcagagaaggaaggaaggaagggaagggggagggaggagggaggaggcagggagggaagaaggaaggaagtgagggagggaggaagggagagagggatggagggagggaagaaggaaggaaggacggaccagcctgttaggctgactgacagagtaccccctgtcctccaatgctgcccacggcaggcatgtggcagtggctgacagggagtgagtctggaagcgacccttgtcggggcagcctccttggtcctgtgattcaagacagggtgaaagtcagtggcggccattggtgcctctggccggggttcctcacaggggcccgcaaggggacagcgaatggagcgtggagggtggagggctccttctccagaccggagcgatgggttcgggagccattctgtgcctgtctttgctgctgggctgaggagctggatggcatgctgggagtagtgggagctgctgaggagtttggtcctggagcgaagaggctgaatccgcatgtctggagtcaccgtggagggcacagctagagggagcagcagggtgtcccagggagaagacaccagggctggaattagagggacatcaaggctgatacttagaggcatccaatatatggggcctgcctgatgggctgctctcaggtgggatttggggggtgtgagaggggtcagtgcccaaatgaccatggggtccgtggcctgtatgcccagtcaggtgacgacgccattcagaaagtagatctcatggggtgcccggctgctgagtctcaggccagatctgcagtgagtgt

SEQ ID NO: 20313 - DNA, 748 bp, Artificial sequence
  DNA replication origin
ccagttgagagcacattctctacctttttcacttggatcagctaattgccaaatgttttcatttttgagaagaagtaaaattgcagagatttgggatttagggaaggaatgcaaggatcaattttgcctaattacgaaatgtctcggcggtcactgtgacgggtcccagagtcggccgtgtggaccccggggcctcccgggcggtggggggccgggggctctgatgcagatgtttacctgatgtcgtgggcctgaatctggtttacattggaaatcagactgtttacaggccagcacatctgcctcttcctctggctctccttcattctgctgtaatgttctgcaggtctcgctggggtctctgtgggaatatctgtgacacggagtgagccaggccagcccggggcggccccatccggggacagcagctcacggcctggccccgcgtgcgcagccggggcctgggttggcggtggagatggggagggtctggggcccctgggtgggtggtgggggtaccgtcagcccggctgcagggttccagcggaggacagggagccttctccatccctgaaaaccatcgcggggacagtggactcatcaggatgccgggaccctctagtgtgttctggaagcagaggctgggtgtgggcacgggaacctgtgattgtccccagacaccgagaggtccacaggacccccagtgcccagaccccggctgcagatcggggggtccagtcatgtgtcg

SEQ ID NO: 20314 - DNA, 1096 bp, Artificial sequence
  DNA replication origin
cttccttaattggcattttccagttgagagcacattctctacctttttcacttggatcagctaattgccaaatgttttcatttttgagaagaagtaaaattgcagagatttgggatttagggaaggaatgcaaggatcaattttgcctaattacgaaatgtctcggcggtcactgtgacgggtcccagagtcggccgtgtggaccccggggcctcccgggcggtggggggccgggggctctgatgcagatgtttacctgatgtcgtgggcctgaatctggtttacattggaaatcagactgtttacaggccagcacatctgcctcttcctctggctctccttcattctgctgtaatgttctgcaggtctcgctggggtctctgtgggaatatctgtgacacggagtgagccaggccagcccggggcggccccatccggggacagcagctcacggcctggccccgcgtgcgcagccggggcctgggttggcggtggagatggggagggtctgggggcccctgggtgggtggtgggggtaccgtcagcccggctgcagggttccagcggaggacagggagccttctccatccctgaaaaccatcgcggggacagtggactcatcaggatgccgggaccctctagtgtgttctggaagcagaggctgggtgtgggcacgggaacctgtgattgtccccagacaccgagaggcccacaggacccccagtgcccagaccccggctgcagatcggggggtccagtcatgtgtcggggaaggaggaggggagcaggggccacagacagggggtccaggagggcagggggtccaggagggcagaggacccaggacagcaaagggtccgggagggcagaggatccaggaggacagggggtccaggagggcagggggtccaggagggcccaggagggcagggggtccaggaggacagggggtcctggagggcagggggtccaggagggcagggggtccaggagggcagagggtccaggagggcagagggtccaggagggcccaggagggcagggggtccaggaggacagggggtcctggagggcagggggtccaggagggcagggg

SEQ ID NO: 20315 - DNA, 983 bp, Artificial sequence
  DNA replication origin
gggagggaggaagggagagaagcaggaaggaaggaaggaaagaaagaaggaaggaagggagggagggaggaggagggaggaggaagggagggaaagagggagggagggaaagagggagggggggagcagagaaggaaggaaggaagggaagggggaggaaggaggcagagaaggagggaggagggaggcagggaaggagggggagggaggagggagggagggagcagagaaggaagggagggaggcagggagggaagaaggaaggaagtgagggagggaagaaggaaggaaggaaggaaggacggaccagcctgttaggctgactgacagagtaccccctgtcctccaatgctgcccacggcaggcatgtggcagtggctgacagggagtgagtctggaagcgacccttgtcggggcagcctccttggtcctgtgattcaggacagggtgaaagtcagtggcggccattggtgcctctggctggggttcctcacaggggcccgcaaggggacagcgaatggagcgtggagggtggagggctccttctccggaccggagcgatgggttcgggagccattctgtgcctgtctttgctgctgggctgaggagctggatggcatgctgggagtagtgggagctgctgaggagtttggtcctggagcgaagaggctgaatccgcatgtctggagtcaccgtggagggcacagctagagggagcagcagggtgtcccagggagaagacaccagggctggaattagagggacatcaaggctgatacttagaggcatccaatatatggggcctgcctgatgggctgctctcaggtgggatttggggggtgtgagaggggtcagtgcccaaatgaccatggggtccgtggcctgtatgcccagtcaggtgacgacgccattcagaaagtagatctcatggggtgcccggctgctgagtctcaggccagatctgcaatgagtgcgctgcccca

SEQ ID NO: 20316 - DNA, 2030 bp, Artificial sequence
  DNA replication origin
gtttgtccgtggagcttttcctgcacggctcacatagaacgggctgtgaggtccctccactgagcagcacgtgccaggccgggtgcccacgactgttgggaaaacccaggcctgtattccaggaagcaaaggtctttagatgaaggttttaagaatgaaaattaacccacagaatggtgaggtcagttggagcctggattccatggggtaagacagccacagccaggtgggcatcctgctccttccctttcccctgtccctgcccaccggccatgccctagagtaggggcacactcggaccccagcccagcgcccacccatgctgcctgcaggcctgcgaggtcccacaaccccttggcatgcagcgacagcccggggccaggtgtgggtgaggcttgggatttcctggcacagctgacttcatgttgtggcctggcagcctcgggtggtgtcggcagatgcaggaagccacgggcgcagctccctgcctgtcccggccgtgggtgctaatgcagagtgggttctgtggctggtcacacaggcagccgggtgggtgcaggtcatcccggggatggccttgcactgtctgatccccggggaggggagggtcttttcgctgaccacgctgtttgctgcgtgctttttgtttgccaagggctgcaatgtttgtcgtctgccgcagtgtttgctgccgggtgaagaatcgctggccctgtgttgtcacctgggcccaccgtgacaaggtccccacctctgttgtgggactcgggggcaaagttccctgctgttcacgctgcaagtgacaagggccttggtctctgaaccaggagcctctgagtcctgccccacagggctgagccctggctgggagcaatgttctttgggggagacagcagcttcctcacttccatgtacagccagatgccacgggatgtggggagtgcgacagggccgtggggagtgtgacaaggccttggggagtgtgacagggctgtggggagtgtgacagggccttggggagtttgacagggccgtggggagtgtgacagagccgtggggagtgggacaaggccgtggggagtgggacagggccgtggggaatgggacagggccgtggggagtgtgacagggccatggggagtttgacagggccgtggggagtgggacagggctgtggggagtgcgacaggtctgtggcgagtgtgacagggctgtggggagtgcgacagggctgtggggagttttgaaagggccatggggagttttgacagggctgtgcggagtgtgacagggctgtgcggagtgtgacagggatgtggggagtgcgacagggctgtggggagtgtgacagggctgtggggagtgtgacagggctgtgggaagtgcgacaggtctgtggcgagtgtgacagagctgtggggagtgcaacaggtctgtggcgagtgtgacagagctgtggggagttttgacacgtctgtggggagtgcaacagggctgtggggagtgtgacagggctgtggggagtgcgacagggctgtggggaatgtgacggggctgtgtgggagcaggtggtcctgtggggcatcccggggtctgtgctcaggctgtgggaggtggggctggcaggggatcctggagaaacacctttgggggctcaggtttggtggagctcccacttccacagtggctctgagtggggcctgagcaggttttcctggcagtggctgagggtgggtgggcctggtaggtactgggctgctcagaagccagccagctccatgttgcccacctcagcctcccaggcttctcagggcccagctgtgctctgtccctggggcccttccctccccggacactgctcacccctggcaagggctctgccctgggacacaccctgctagaccctcagatctgatcccagcccttcccatgtgactccctgggtgctcccagatgactgggatgtggggaaggatcaaagagcactttggttgtctctgtaactcttctagtgattagataagggctgg

SEQ ID NO: 20317 - DNA, 1278 bp, Artificial sequence
  DNA replication origin
gcagggatgggctctgtccccttggaactcaggcacagtcatgggggtgccggtcagccctgaagacaagctgatgagggtgcactaggaaaagtgcagggcatcggcgaggcacacgaaggaggtggggaggtgaagatggagaagaagccgaggcagtggccatgggtgtggagcttcgcgctgtgggtgcccagctggtctgggaaaccgcaggaaatcccgcagctcaggtgcgcagtgggaaggacttgctattccgtgggaaggcaggcaaaccttcccagggaaggggcatggccgtgcgcctcatgttttgggaagctcgtgccctctggggtagcgaggccagcttggaggggagtccagtggacagaggtggatgcaagtggagggagctgagcctgggctggggctggcagcagagggctggacagcagggcgcctgcgtggcagctgtgcagtcagtggggttgactggtttggaaggtaaggtgggggagaagcccggaggattcctgtcccttgacttggacagcccagtggagagggctgtgtaccaagggcaggaaaccagggagaagaagatgttgactttaagataccaagcagagaagggaagagccttctgggctggagacgtggggtgcctcagaagggaggaccttgagctagcagcagatgggacaaacgcaggggacagggcacagccgtggcaggagtgcagcgagcaagattctggtcacagtcctgacccagaaacctgcagaggaagggagggtggccagcacctgcccgtgggcctggggtgcagcccaggcagaggtggatggagggggtgctcagggaagaggggaggggagtgtgtgacctcaaaatgggagggcttgggggtcagagtcgagagaggggacagggtggggaccatgtgggactcttgagcactgacccttgaacccaggcagtggtgggatgggagggcaggaggcggcgggctgcgaggctgatgcggggctgcacggagctgtcattgagcctcttggaggatggtgggagaagtgccaggggcggctgaaagccttgccgagactgtgggcagcctggttgtgggcacttcggatgcttgcaccattagacccagaggcttcctggacaagcctgggctggaagaggatggcagaggctgctgggccttggaagagagagggtcctggcttctagttcctggggcagctaaggccaaccccagtgtccaggtgtcttccatgttatgcctgg

SEQ ID NO: 20318 - DNA, 1082 bp, Artificial sequence
  DNA replication origin
atgtccctgccaaatctatgttgcagcgatccccagtggtggagagggcctggtgggaggtgtttggctcatgcgtgtagatctcatggcttgatgctgtcctcaccatagtgagtgaattcctgagagctggttgctttaaagtgtgaggtgcctcccccttatccctcccttgtgaggtgcctcccctttatctctcccttgctcccactcttgccatgtgagatgcctgctcccactttgccctccaccatgactggaagcctcctgaggcttccccagaagcagataccagcaccatgctgcctgtacagcctgccgaaccatgagccaattaaacctcttttcttataaattactctctctcaggtatttctttacagctgtgcaagaacggcctaatactaaaaccatgggactggatggggcaccaagggagtgaacatgaaggaaggagaggatggagagctgagccctggagccctgcagtgtcagaaggttagggagtcaaaagcaattaggaaacgggcccgagaagagtgggccaagaagcagggaaggcaaaggggcaccagggtgctaggtggcggaatgggctgaaaagtacaagcagaggtgggacatagaggatgaggcagccatgtgggggcaggggagatggatggtgctgggtgggtagaggagagggaggaggagagcgggagagagaacaggctgatggctgggagttgggtgagtccatcgaagcaagcaaggaaggaaaatggaaggacattctgatgatgaattgagggctaggtggccaggcagttcttctatgactgtgaatattgatggatgacagatgggtgaatgtgtgaaggaaaaagagcaggggtgggcagatgtgggtacagagaggaactggctctggctatagagatggatggaacaggtcactggaggaacaggggagaggaaacacaaggaagggatgacatataagtggatgaaagggcaatgttatggtttgactgttcatgtcccccaaattcctgtatggaaatcctaacccctaaagtgatggtaggaggtggggctct

SEQ ID NO: 20319 - DNA, 1167 bp, Artificial sequence
  DNA replication origin
catgcgtgggattggcacccttataaaaggggccccagggaggccctcggccctactggcaaatgaggacacagaagttgacagcctgcaacccagaagagggtcctgatcagaacctgactatgctggcaccctgatctcagacttcgagcctccggaacagtgagaagtaaatacccagtgtttataaaccaactaatctatgataattcattagagcaggctggacaggctcatgccactcaacttggaggcaggtgaatgggatacctgaataaagccaaggaaggaaagatgggatggatgtgcctggaaggtcagatggtcaacgagatgagtggtggggtgggtggacacatgcctgagaggaaacaagagagaatggacattttacagctgaatgattagctatattagtaaagcacgtaggcggatggtagaaagaatgaaggggatagaaggggagaatgcatggccgaaaagtggggcaaaagaaaggaaaagaaaaaaatgagagggaaaagaagaacgtgagaaatttatgcatgagcggttagagacaaggtggatgaggaaggagggaatagagaaagtgacagtggctggattgagctgacagttggggtgagctgaggcacgctgagtatgaaggaggcactcagtgaatgggtgagtgtgactcagctaggggagcagcaggaggaagggcgggtggatgtcttgaagggtgaatagatgtgttgccacatgaggtcacaggatggagggatgattgggtctattgacaggtagggcttggaaggaaagtgggcaattactgagaaagtgagactagatgaatagtttagtgggttgatgcataaggttggtggggacaggatgggagagcagggcagggaggggagcctgaatgatcatgtgtgaacacaggtggatggaaggttgggtggctatttggaggggttgaaggaaatgtgggaggatggattgaatataagtttgggtggatggacggagggaggatgaacagatgatggatggatggatggacagatggaggatggatagatggatggaggatggatggatagatggatggaggatggacagatggaggatggatggatggatggacatatggatggatgaaagataaatggatggatg

SEQ ID NO: 20320 - DNA, 810 bp, Artificial sequence
  DNA replication origin
ccggtgccctcctccccaccccgacgcaccggaaggaagggcttggctcacgtttagcctcatcatcacatttccccagcccagacttgagtggccaaggccagatgtactccaccaatgcagctgccctgccgggtgggggagaagacaggggatgcagggagagaagaggctgggcagaggctggctgggaggaaggacgcctggccagcttcgcctctgctccatccttgagctcgagccccaccccgcccggcatcgcaactgcggtcggcgttcccctcctgctcctgactcatcatgattgccaaccccggcgttgcccactggcacgggcaccttcaacctcgggcctgcggatccatccctgggctctgacacaggggcctgtgtgtgagccagcacgtgtcagtgtatgtgtgtactcacgtgtaattgcataagtgggcatgtactgtgagtgtaactatgtgtgcatgtgaatgcattgtgtgcatgagtgtgtacatatatttttgtgtgtgcatgtgtgtgcatgtgtatgactgtgtgtaggcaggagtgtatttgcatgtgtgtacatgtgaatgcatatgtgtgcatgtgtgtaattacgtgggtgggcatggtgtgtgtaaatgtgtgtgcacaagtgtgtgagggcgtgtgtgcatgtgtggtgtgtgtacctgtgtgcatgtgtgtgtaattgcatgtgtgcatggtgtgtgtaaatgtgtgtgcacaatgtgtgagggtatgtgcatgtgcgctgtatgtacctgtgtgcacgtgtgtaatcacacgtga

SEQ ID NO: 20321 - DNA, 946 bp, Artificial sequence
  DNA replication origin
ccctggctgtgggcgctcggcccctctccctctcaggggagcacacgggtagaacaggtgcagttgaggggccaagggatcaaaggacagtgaggggtcctgatggtgggtcccagagaggtcggggtactggctaggtctgggcgggcaggggtctgcccttccctctcctgagccatcagggcctggctttctgctcagccagctcagcggaacctgcaggaggggctgggagcgggggttgaggggggcggggttgctcaggctcaggggacatgggacgtagacctgggcagcagccacttctccgtgtgcagggatggggccagcgtggggctgaagagggcttggaatcctacccctatggaaaggaagaggggccaccttcttatccagctcctcacccggagcccaagggcaggtgcttacacagctctgccaagccctgcgtggagaccagacctgggtggccagggcagcccagggaagaggggtgtaaacaggtcctgcacctccccagctcagggctgcgagaagagctggctggtagcagagcaggtgctgggcagacatgaccctgtccccctgagggcaaggtggagcagcagggactgagatggtgggagggaggctgtgatgggctcacagtgagaggggcagccgtgtgtcaatgtgtctggtgctggagcccttcctggggaagggagcgtgagggcgagggcaggccccggtgccctcctccccaccccgacgcaccggaaggaagggcttggctcacgtttagcctcatcatcacatttccccagcccagacttgagtggccaaggccagatgtactccaccaatgcagctgccctgccgggtgggggagaagacaggggatgcagggagagaagaggctgggcagaggctggctgggaggaaggacgcctggccagcttcgcct

SEQ ID NO: 20322 - DNA, 728 bp, Artificial sequence
  DNA replication origin
ggaggcgccgtccggggggctgcggcagacccggatggggctgggggctgcagagcctcggccgcagaccccccggcgagcgccgcacgggagctgggaacgcggggtggcgcagagcgcgagcgacttggtgcctcgttggagaagtgttcatttcacagcctgttattgtgcgtctatgtatggcccgggggtgcgtggctccgggcaagtgtgcgcgcttggggtccccaggttggaggtggggggcggtgcgcacgagttggagaccccgcacctgtgccggttcttggtgctcgtggctgagcctgcatcgccttgtgtggggagttgtttactcgtcaatggctctgagcgcgcccgcgggtgcgccccggggtctggagagcccgcggtgcagcccgcggtggagcccgtggcggtgcccgtggcggtatcgggtgtccgcgggcgccgtgggcaggtgctttggccgctctgctagctctgccggttggcggctgaggcagcgtcgctgtgggtccggcgccccgtgtgtgcggggttgtttggggtgctggggcactctgtgttttgcaacagtgtcagtctcagcgttggtgtgcttcggggcggggggtgctgttgtgtgtgtcagtgggtgagtgtttatgcgcagatggcgaagtgatgaaagccccaggtccctgccaaggctgctgcgaagggctttggcatcgtccgtggcc

SEQ ID NO: 20323 - DNA, 1925 bp, Artificial sequence
  DNA replication origin
tcccctgtcacctacccagtgaccctgggcaggccctggaccctcgggcccaggcaaccctctcctgctatggaggcctcctcactgcctgaggccttcagggcaaactggggtggggcagcactgggcagaggctgtgtggcaggccagggtctcccagaaggtggtggctggccgggtaagcccagctcagatgctggggagacatgggggcatggcacacaggccacactcagcctgggatcaggccccgtctgaggacaccgggtccagttttccctgggccaggcccttggaaaggaggagggagttggggagggagaacggaaccctggttctccgacaggccccatccacccacggcctgtgggctccagggagagcatggccagggtgcccaaggagacgaggaggaggctcctcatgcttcatgacccctcctgctcgttagggtttatcaacatcatttaagatcagccttgtgctgtgggttcctggcgtgctgtggataacactgtgcccgggtcagcccaggcatgaggggcggggactaggctggaaagaggaggggcttgcagagggctgggcttttccaggggattagggttcagaacagaggtttggggagagaaagggttcagagtcaggcacaggcaggcagacaggaccccaagcaggactggccttccagacaggaaagagggttgcggagacacaggaggccagttgagagtggcagaggagaaaggagtttcatgggaggatggggcttggagagagatgagggagggaaaacgggggccgccatgcatcctcagcttccgggggactttggagagggtcgaggctcagtgggagctggaggttggtgaagaggacccagctcagggaacctgcgtggtgaagtgggggacttggagggagggagggaaggctggagttttctccatggggaggaactcatggggactgttatggggatggaagatcagctggcgtcaagcataccgtgagagtgaggatgtggtggggtagcggaggcggctgaggctgggaggacaggcattggtcaggaaaaatgattcacagggaacaaagtatcctcaggggaccaggctcagaagggctggtagggatcacagagaggctgtgggcaggtgagtaaaccagcctccagggagacaagtgtccttagcagccaggacctcagcacaggaccagagctcggaacgggacactttgccctgcgagcagatggagcatgacctggggtctgcgcaggagaggccacattctcccagactctgggagtgaactggagtggggccccggctgggtgaagtcagactccaggaaagggggcaggagctccgatgggcaggagtgggctcagccaggaaggaacagagtagggggtgctgaaacttaccggaaggcctggacttggtgggctaaggagggaagggactggagggtggtcttgggggccttgtggacttggttagggacaggatggggcagagacgggcagtcaggtagggggcctgctggggctcaggggactggagcttcgtcaggaggggactgagctgctggaactgagagtcaacaggccagaagggcaggacccaggggcgggggtccctggaggcagcagggcccaggcgctggggtggagcgccatggggagagtgggaagaggaagagggtctctcttggggaggcagatggggagggttccgggagcgtccagtcttccacggggctgggggctccgcgagagggatggggccgggtggggtggggaggaagacgcagtgggtccggggagatggaggtggcgcggacaccctggtcgggggctgtaggggtcccatccctgcgggaccttgcaactccccagggtcgcggcttccgaggccccc

SEQ ID NO: 20324 - DNA, 2229 bp, Artificial sequence
  DNA replication origin
acaggggatcatgtactaagaggggtcacagcagtgtcagggtggtagtggtggccttggggctccccctgccagccccagccccagccccagcccccggcgctcacctcgccctgaatcagcggcacggccccgatggccttctgcagctcgcgcacctcatccaccgggcccaccatgagggaagtgcctgtgtccacaatggcctcacagccctccttgcacagggtcagcccgctggccacctccaccctgcggggagtcagggcgtgaagcccctgccgggactggagtgtgccctgggggcccagtgcccctccctgggagcccctcccctggctgggctgcactctcctcccctcagggctcctggaagcacagccggctgtaagccctccagggaagagggtgggagaggagacacagagtggtagagggggtgggagaccctcaggtggtggtgaggggcatggagggatggaggggatggaggggcatagagggatggaggggatggaggggatgaagggatggaggggcatggagggatggagggatggagggatagacagatggaggggatggagggtcatggagagtcacagagggatgtggggatggagggatggagggatggaggggatggagggatggagggatggaggggatggagggatggaggagatggagggtcatgaagagtcacagagggatgaggggatggaggggatggagggcatggagggatggacagaagggatggtgggtcatggagagtcacagaggcatggaggaaatggagggatggagggatagagggaatagaggggatggaggtgatggggagcatggaggggcaaggaggggcatggagggctggtctgaccccatctctttcttgcccagctcccactactccccacatgcaacccccacctgcagaaccggggtcctccagggtctccgcacaccgcccccgcccacagaacccaggggagccgactgcagccactactcactggtccaggtggacctgccagtaggccttgcgggtgacattcaggtaggacagagaacccttgtaatacttggagtctgtgccacccagcatcagctcacccccaggctgcgcatctgggtccctaggaggaaaagggaggagtcagctgccacgccaccccccaagcacaagagtgccaggtcaggagtaagagggtgaatgtggcaatcagggagagcttcctgaaggaggggcctttctgaaactgcagggatggaaaggcccagaaggcaggaggagggacagactcccttcttcccggggtagggctgctctgcgtgggcccagcctggcccagaagaggttttcctcaaccctcaggttctcctggtctgctcaggagccaaggttcagccagacatcagggtcaaggctagcggcagacaaggaagtgagtgccaggagctccactggggaggaccctgtctgtctgtctggaagaaaaaaccaaagaaggcttccaggagggagtgatggcacaatctgggaagttgggatggctggttctggccgcagggcctctgcactggctgctcctgggaacaccctccacctgcatccccgagccacgtccgctcatctccccctcatccagaccactgatggccagccaaggtgctcctgggcaggagcgcactgcacttcctaggacctgcaacccatgtcgcccgggtttgtttctaaacattgctcaagtacagctttcaacgcagcaaatcctgccggtcctggtagagaagctctctgtgtctggggcggttctgccatcccgccagagcgtctgcagctaagctggccaccatcccactgcctgtcactcgaggcagtgccaggcctgacccagtcctcccaacaccgattggggcctccgccctcctccagcctcctccgcctttgcctcttgtcaacacctctgcaatcccaagtgtagaaacctgatcagcgcctcccacccctcctctcctcaccaaacatgctttcagaagccctcagaccctccctcctgcctggctccacttcctgcccaagctgctgccttgagactacacctgggcactcacaaccatgtgcacctcccccacctgggcactcactctgtgtgcccctccttccacctggcactcatgcctgtgtatgcctcccccgacctgggtactcataccgtgtgc

SEQ ID NO: 20325 - DNA, 3285 bp, Artificial sequence
  DNA replication origin
ccaccccgccccccgcccgggcgctgtgcgcgtgcgccgaggttgccccgcccaggccaggccccgctccgccccgccccgcgcacgccggccgcgcccacgtgaccggtccgggtgcaaacacgcgggtcagctgatccggcccaactgcggcgtcatcccggctataagcgcacggcctcggcgaccctctccgacccggccgccgccgccatgcagccctccagccttctgccgctcgccctctgcctgctggctgcacccgcctccgcgctcgtcaggtgaagcctcaggggccggggctcagggacgggcaggggtcgcggcgccgaggtcccggggcctgtggtgactttcgcgctcccctgtggcccccacgagccccttgcgccccccgcgctggaatgcacctgtgccgccctgcgcggcctcctgcacggaccacccgcctacggggcgccgggctccggaggtgcaggggacccggggcagaggcgccagatgcctctcccccatatgccaccctgggttgtaccttgaggactgcagactgaccgcagcctccctggagacggggcggggcggggggaggtagtgctcattcggggcaggtggaattggggtctgtactgagcgcccttgttgctggagacctaggtcaggcctcagagcccccgagtctgggcgagtccatttccttagggacccctttaccacctgtgaactgggggctttaaaagtttgctccagcggctcttatcacaggccctgggctgggagacccctcgagaccctaggagttcccatgtccctgagagaggaggaggcatggggagtgggtcggctcacccaccccgggcctggggttgtgctgtagtgaggcccacacgctcctcaggccgatcccctgtgccaggtgaggccaccgattgggcctggatgggatggggcccggccatgcctgaccagctgggcagaggagggccatgctgcagtctgctttcttgaccccctccccagcccttgcaaggcagcccgcattcccaggaggggtatgctgacccatcccattgggcacctgccccacccttgctctgggcctttgtgggagacctgggatctgcgatgggtccactgccttttggcaggtgggtgaggtcagaaggctgcaggggctggagctggctgggccagctgggtaggactgagcctcaccaaaggctgtggggaatggcccgggggcgggtagccccaattaaagtcgttgtgggggagtagccacaagcctgagcctgccttgaccttgccagcctatccacaggcctcccctctccaaggaggacagacacagcagaggggaaacgatcctggggcttcttggagggaagggtagctgaatccaagccctcacccgattccagctcttgtgcgactgatactattacacctgcttcctggtccctggagggcgtgtccctcccccaggacaaaacctggagctcttccagcccaccagctcttaggcaataatctcatcttccgggatcacgcccctgacaagccaggaaaagccagctatgaccttgtactctcaagtccctggggcagggaagaggttttatttaagtgattaaaagcccaggggagcttccttggaacaaggagtgggttcacaccaaggggaaggccagtggccctgggggaggagcagggacccctctctctcttactcgcttcctgggtttagaactcaggaccccgatctcagtctggagctccctcctgcaccctggctggcggtgtgctgggtgacaggactctggaggggtaccctgagtgcagctgtcggaggaggcagggcggtggggggggcagcacagaagcctctaaggccccaggtgcagtcctggacctcgtggagccgcatggagtgaggagaggtgcggatgcccagaaacagatgtgggatgagggcactgggcagccacagggtccatgtggaggaggacaggtagtcaaggagggcttctggaggtggtgtggagggcccatctgatggccagaggaggccaggcagagctgccagtgccagcctggaggtggggccaccttcgtgcaggtgtctgggggtggagagcaggtgtgatgggggctgggtacagtgggctgcctcagagcactttgggcaggagtgacaggtacccgccagcaccctgagcagccatgctggccaccatcctggaagagaccagcgcaggtgcagagggaggacgggagacccttgggggctttggagcctccagaatggctgaggagaggagggttgggcacactggcccccaggttgggtgtgtggggctgaggtgggtggcgggtgaccacttcttaggactgtggcctgtgcaacctggcggggggcaatgggttgccattcactgacttgggggagctgggccagcagtttccaggtgacaggcaggagtttggttttggctgtggcgactctgagattccccaggggcctccaggtggatgtgcagcattggcagcgtcggccggcaggcgggagggcctccctgatatgccccgacccgtggttgacaggatcccgctgcacaagttcacgtccatccgccggaccatgtcggaggttgggggctctgtggaggacctgattgccaaaggccccgtctcaaagtactcccaggcggtgccagccgtgaccgaggggcccattcccgaggtgctcaagaactacatggacgtgagtatgaggtcttagccctgctgcaagcggagccactgtcaggagagctccgtggcagtatggggaacattcccacctcctgttctcagcagcgcagtttgagtggctcacctggccacggtggcgtcccggctcagccacactcctttcttccccattctggaacctcctgccactggcccctgtcattgcagggtcttggtcctgctagggcctgggagggtgattgggagtggcctcgggccttggtgccagctcgcctgagggggcggtccttgggcctgcctgagtgtggccggctgacctggagcctttcactgctgtcctgctgggaggcctgtggtgactcgtggcctccccagcccctccccatcttcttcctctcgcaacagcccctcctgtgcccactactccttcagggggaagcaggatccaaggtggagcactctggaagccacctagcaagctggggcttggtcagcctggtcccagctctatggggtcagttcgaggccagg

SEQ ID NO: 20326 - DNA, 938 bp, Artificial sequence
  DNA replication origin
tccctcctcttagggctgagtcactgcactctcagagctggggccaccatgaccctcaagagaaagggggctgcggcaccctggggctccagccacaggcagctttagttctgcaagagcagttgaggaggccagggagggaattagctttttgtcagctgactttggacaggactggggctggtggggggaaaggtggaggctgtgaatggctggcacagttagggcagggggaggggctgcccaggcacaggtgggggaggggaagggatgctgggcacaggtgggggaagggaagggagtgcccaggcacgggtcggggaggggaaggtggtgcccaggcacaggcgaggtttgggggagagggtgtccaggcacaggtgggggagggggaggggcgcccaggcacaggtcagggaggggaaaggggtgctgggcacaggtgggggagggggagggggaggggggtgcccaggcacagctgtctggcttccctccaggtccaggacatggcatctctgggtgtcctgctgggaagggacccagcttggctgaaggtgcactgtgcctttagcatccccccagtcctccaccctgaggttatccagctcacccaccctggccgctgcccctgaccttcagtctgtctctctgtgcaaggaagaggagtggcatgcagggctcacagttgctggaggcctctgctgtgtcctcttccaggagcctcaacctctacctgcctccagaaatgagcacccccgagtcctgagcttactgtggggcccagttctgcactggctgccggggtgtgcgtttctgggcatcccccagggctggacaggcctgggtgctgtggaggagagccggatgccagtcatcagttggggttgaactggatgaccttttaagctaacctcctgctccccaccctctgcata

SEQ ID NO: 20327 - DNA, 2509 bp, Artificial sequence
  DNA replication origin
agaggggatggagaggagatggagaggggatggagaggggatggagaggagatggagagggggatagagaggggatggagaggggatggagaggggatggagaggagatggagaggggatggagaggggatggagaggagatggagaggggatggagaggagatggagaggggatggagagggggatggagaggggatggagaggagatggagaggggatggagagggggatggagaggggatggaggggggatggagaggggatggagaggggatggagaggggatggagaggggatggagagggggatggagaggggatggagaggggatggagaggggatggagagggggatagagaggggatggagaggggatggagaggagatggagaggggatggagaggggatggagaggggatggagaggagatggagaggggatggagagggggatggagaggggatggagaggggatggagaggggatggagaggggatggagaggagatggagaggggatggagaggggatggagagggggatggagaggagatggagaggggatggagaggggatggagaggggatggagaggggatggagaggagatggagaggggatggagaggggatggagagggggatggagaggagatggagaggggatggagagggggatggagaggagatggagaggggatggagaggggatggagagggggatggagaggagatggagaggggatggagaggggatggagagggggatggagaggagatggagaggggatggagaggggatggagagggggatgcagaggtggatggatggagagggaatggagaggtggatggagagggaatggagaggtggatggagagggaatggagaggtggatggagagggaatggagaggtggatggagaggtggatggagagggggacggcagcgtttacttcttcccctctggttctcctagaaataaggatggcagacaggttccagcgcgagtcccataggagcagagctgcccacacagtgggtggctaaaacgacacatagtcattctctcacgattctggaggccggaagtccagactcagtgtcgctgggctgaaatcgaggtgtcagcagggctggttccttctggaggctccaggggtgaacctgttccttggccttgcccgtttctagaggttgccttggctgggccttggctgggccctacccacatcttcaaagccagcactctaacctgcttccatcttctcatcgccttctctgcctcctcccctgcctttccctccaaaggacccctgtgatgacctgaggcccaccccaataatctaggatagcctcccatctcaagatctgttgagtcacatcgtcaaggtccccttgacctgctaaggccacatcttaccgaagtcagggatgaggatgtcaatgtctctgaaggaggtgttattttacccacaacgctgccatttgttgaaatggaggatgttgggtgaggaaaaggggttcaacttggggccgagagagtgtgcagtgcccatggactgaacttgcaagtggaggtgtcccctgggtctgcaggatgaggccagaagcaaggctggtggagttcagacagagctctggaagggaccagctggtggtggcatctgtgtgaaaacaagggcaagccagaggagtaagggcaaggggaggggcctgaatcctgaagccccctgctccagaactggagtgttgaagcttgcggtggagagggatacactgagaaaggctgagctgaggagctggggctgggctgggtgggatgagtgatcagggctgagctggtaggatgggaccatcagggctgagttaggtaggatgggaccacagggggctgagctgttgggagggggccatcaggggctgagctgttgggagggggccatcgggggctgagctggtgggatgacaccacagggggctgtgctggtgggatgggaccatggaaggctgagctggtgggatgggaccacgggaggctgagctggtgggatggggccatcaggggctgagctggtgggatgggatcattgagggctgagctgggtggcattggatcatgggatctgagctggtgggatggggccattggggctgagttgggtgagatggggccatcagggactgagctgggtgggattggatcatgggggctgagttggggggatggagccatcagggtgatgtggtggggatggggcctctggtgttgggttgggtggaatgggctgcttggtttagctagggcggtcctggtggttgatggttctgccccagttcagacaggctgggttggcctgagatgcttgtttctgatgttgggcttgtgagtgtcaggaagagttgggcaatgcctgtggctttcccctaggggctcttgggacatctgaatgtcccacagaacagaggcatgacttgtgcctcagtagctggagggtgttggagcaa

SEQ ID NO: 20328 - DNA, 1720 bp, Artificial sequence
  DNA replication origin
cggaaagggggttctcggggtccgtggctccccctgctccttgtgcgcctaggctgggtcctcttgggaggaccactgccaggcaggaggcagccctgctcgtggctctgtaccgtgctcccaaagtctccaccgagagcacccagcagggtcctgtctgcagagtgcaggccctcacctgcccgggccttcgctgctgtttgccaagggtttgtgctgcacgttctgtggccagatgtgatgtggatgctgtgatgaacaggacagacagaaatccctgccctccaggagcgaatagtagggggtgggagacatgggggacgtagtaccaaacacaggggtggtgactggaagagcagcaaaggggaagggcgggaccacttctggggatgcctggggtccgggtaaggatgcggaggcagggaggaagccagcctcctgcccggcgggcacaaatgccccaggccaggggtacaggcgggcaggtgccggagcgcacagaggagggagctgcaccctgcaggctgcgccttgagtgtcccatggggagtctgcagggctgagaacaggagggtgaggacaacctcagcaggttgtcggggccactggcactcgttgagagaagggtgtgatggggcgcgggagacgcagagaaagaatatggggtggctgggtggggtgtggtggctgacaaggcagggtgaggtggcagattttgctggtgggctggatgggcggaggtggtggtgatcgggggagggtgaggaagagcctgtctgaaggggatggtcagaactgccaggggcgacttgctgctaggaccccagcgcatggccgacgggcagccggacgcaggtctgaggatggaaggagcgccctggctgagatgcgcgtgggaccccttagcccaagaggatttccagcctggaggatttccggggtcagcaggaaatcacaaggggtcagggtggacacagaggtggcaaggaaaagctggggaggggacaaagctggagacagagcagccatcggggaaaggaggatgtgtgtggagtcctggggccaagcacaggaagggctcccagaagcgaccggggagctcgtccgcactctgatgcccctgacacggccacatgcagccctcaggaccttgctggggcagctccgagtggctcaggtttgaaggaggtggagaggaggtgccaggagctggtgtctgaggctgactgtctcggggagtgtggctgggaaggggcaggggagcgacgtggtggccaggatgctcttaaagctgctggaaggatctggcagcgggaggagtaatccctgcaggtgtgagggtggcagctgtgatgctgggaaagatgttccctaatccagtggggtgcggcagtcagcaccgggaggcagaggcgaggccgtggagaccactgagggcgtctgcagcatccctgggcccagacctcaggcccttggcctgcaagagaaaccccccggtagtggaaagttcactccctccctgaatgtcatgcaccagcgaccgctgaagcccaagtccaggtgacctctgagcatatgatgtgaggggcccttcctgtggtctgcaggccagccagtgacttccttccccttctggaggtggctcccgcagccatgtgctagggttgtcatgtgaggctggcctaggcttccaggccctgaggccacagcaccatgccac

SEQ ID NO: 20329 - DNA, 1232 bp, Artificial sequence
  DNA replication origin
catacgcctgcttgctgatccacatctgctggaaggtggatggcgaggccgggatggagccgctgatccacgcagagtatttgcgctcgggaggagcaatgacgttgatcttcatcgtgccaggcgccagggcggtgatctctttctgcaccctgtgggtgatgctggggtgcatgctggtccctccagacagcactgtgttggtgtactggtcttcgaggatgtccatgtcacacttcatgatggagttgaagatagtttcgtggatgccacaggatttcatgcctgagggggaaatgagggccagcctcagcttccacagcatggccccgagggtgaccttcctgtgggcagggccaggagggggtctccactcaccccggaaggaaggcgggaagggctcctcggggcagcggaaccgttcgttgccagtggggatgacctggctgtcaggcagctcatagctcttctccagggaggagctggtggtcgccgtggccacctcctgcttgaagtccagggcaacatagcacagcttctccttaatgtcacacgtgatcgcccgctcggccgtggtggtgaagccgtagccatgcgcagtgagatctttgtgaggtagtcagtctggtcccggccagccgggtccagacacaggatggcatgggggagggtgtagccctcatagatggacactgtgcaggtgaccccgtcgctggagttcatcatgatgccagtggtatggccaggagtgtacttggacagcacggcctggatggccacgtacatggccgaggtgttgaaggtctcaaacatgatctgggtcatcttctttctattggctttggggctcgggaggcctcggtcagcagcaccgggtgctcccgcagctcgttgtagaaggtgtggtgccagatcttctccatgtcatcccagctgctgatgatgccatgctcgatggggtacttcagggtcaggatgcctctctcgctctgggcctcgccacccacatagaagtccttctgacccatgcccaccgtcatgccctggtgtctggggcaccccacgatggaggggaagacggcccagggggcatcgtcgtcggtgaagctggccttgcacatgccagaggtgttgtctatgacaagcaaggtgatattatcatccatggtgagctgggtgggtgtggacagacggcaggtgtggagggcggcgggtgtggagggcggcgggtg

SEQ ID NO: 20330 - DNA, 1228 bp, Artificial sequence
  DNA replication origin
cgggtgctcccgcagctcgttgtagaaggtgtggtgccagatcttctccatgtcatcccagctgctgatgatgccatgctcgatggggtacttcagggtcaggatgcctctctcgctctgggcctcgccacccacatagaagtccttctgacccatgcccaccgtcatgccctggtgtctggggcaccccacgatggaggggaagacggcccagggggcatcgtcgtcggtgaagctggccttgcacatgccagaggtgttgtctatgacaagcaaggtgatattatcatccatggtgagctgggtgggtgtggacagacggcaggtgtggagggcggcgggtgtggagggcggcgggtgtggacgggcggcgggtgtggacgggcggcgggtgtggagggcggcgggtgtggagggcggcgggtgtggacgggcggcgggtgtggacgggcggcgggtgtggagggcggcgggtgtggagggcggcgggtgtggagggcggcgggtgtggacgggcggcaggcgtggagggtggcggaatgggccagggcaaggctctgtgctcacagggcggacttggtctgggcctttcctcctttttctaacttcataagtgagatgattagctcattaattcccacctctcctcctttccagcttaaagctattggttttcctggaagcgcagtcagccctccatatgtgcctgttccacacttgcggattctaccaactccaggtggaaaacacagtttgacaaaggctgtgtctgcactgaatatgtccatgttctttccttgttattgttccctaaacaatacagtatagcaactatttatgtggcatttacatcacattaggtatggtaagtaacctagagatgatttgaaggagacagaaggatgtgtgtagattatatgcaaacacaatagcatttcacatcaggaacctgagcgcctgtggattggggtatgtgtgggaggtcccagaacctgtccccactgatcctgagggacgaatgtgctgtttgagcagcatcctcaagctctgatagtattttctgctttcattatgcattagttctgaattttatgtaatttccaagatgatttatcctttgacctccagctattttagaatgccctttttcatgttaaaaatgcatgttagatcatcttgttgttgttgttttggttttctaatttatttgcaatctgatcagagacag

SEQ ID NO: 20331 - DNA, 1228 bp, Artificial sequence
  DNA replication origin
ccgcccacgtctcagagacagtctgtgcattgtcgccctgttccaagaacagctgccgtgcagccagcaggcacattccagggtttggccaaaagccaatgcaaaccctcatactgctggcactagcagcaccgagtgggggcagacgcagggactgacctaggtggggcacgaggggagaatggggacccacagtttggagccgtgtgctcaaagccttccctgtacacacaggggcctggagagcagggggtgtcggggtgtgggagcccagtccccgacagaggcatgtcctggaccagctgccagagggaccagcgagtgtgcaggctggaggaatgttccagggccctccaccgcgttgccatttcctgcccaggctgccttggccacccacccactggctgcccgggctgggacacatggcggcctggctgtcagatgtgtcagcatcgccttgggacagggtcccaaggccagagaagtgggggacagaggcaggcagtaggggtgtgacacctctgggggctgcagacccctgcccctgctccaaacctggctgggacgctgggtgctgtgaggctgtggcccagggagggagcccattggagcccattgaaacccgcgcccccacccactctgactctttgcgggaaggcccttcgctcagcctcccaagtttcctggcagtgcgctccctggaggtcagaaaatgacgtggtgtgcatgcaatgtctcctgtcctggggattcctggggtcaccctggagctgccccagctttccaagccctgtgtgagtgcgagctgggtcctacccaccagggcccccgtgggagagatgagcgggcaggctatgggatacgcaggggccgtctgggctctctgggaggtggatggggggctgttcaggttttctggggaagaagaggaggcctaattcaggctctgtggtgggcagggtggtttgtatccctggataggagggcagtgggtcccaccctgtggggtccccacacttaggacccggaagtcgcagttgacccccaggttggagagccccggggcccccacctgtcctggtgctgcatcctccctgccccgccccctttctacttgctcgggattccagcctcgttcccacggctgctggccccacactctccaggcacccccagctcaggggcagaccagaggtttggctttcggagccccccggggttcctggta

SEQ ID NO: 20332 - DNA, 1031 bp, Artificial sequence
  DNA replication origin
cccccgcccggcccctaccctcctcacacttggttccccccagcccacagcacctgaggatgccctcttccaagccaggcagccctgcacctcaggacccctccccgtcgtgcagaacctgctcaaaccaggttcagccaggccacctcctgctgcccctcaccaaggccagcctgacgggcccatcgccccctcctgcaaagctaggtagggctcagggtgcccccagccccaagggacccttggaaataggctggagcccagatgctcagcctctgcgtcttggggagaccttcctcccaaagggagttgcccagctatcacgggccagcagttccggccacaaggtggggttcctgcagccctggcccccgcaccccctcctaccccaggagagagttccccgtcaccagaggcagtgctgtccgagagctggacccgccttcgggtgtctgagaggaaggcctggtggctggccggccacaggaagtggtgggcgtcaggtgagagcatttacacctggggggctgccagccccagcactcggggaaacgttgcttttccagaggaagggctcacggaaaggtgttcccacggaagcagaaaccattccgtatagactcaccctggagggaagcattagcaagcctgaaatggtgcccgccttgggctaacatgaagtctaaaggaggggctcacccccgttctgcctggtgggggctgggggccctaacggggtggaattcagcacaaaacgtcatggcaggtctgggggtcctggggtgaccagggagggttccctggaagaggtgggctcacgctggccttggagggtgagtcggatggggatgcggagaggccttctaagcagcttggcagctgcaggagcagagcagccgccttcgtggggagagaggagccggtttccagagccttaaggagcccgctggagcggtggccaggggggagccggggaggagggaccgtctccctttcctgggaaaacatggcgtgaactcccagagaaggtt

SEQ ID NO: 20333 - DNA, 1154 bp, Artificial sequence
  DNA replication origin
gcagcgcctgaggatgaaggtgaggtggtggcaggtaggggcagggtgcagctgggagcggccagaacattccacacacactgactcagccgctgcctggactcgtccacctgcctgcctggccacccttcggcatgtgggtgggaaggaaggtggggcgggcgcagctgctggcccctgtacccgcctgcctagggcctggggagggagcacacctggctgggctggctcctgtcacctacaggcaggggaaccagggtgctacatggggcctacggtgaccccaggcccagggtgactccccagctcagctcttccctgactccacccgctccagagagcagcagccagccaggagactctgttcctccacattggcgcctcccctgctttgcccacaagagcctgggacccctcttgccatgtccaagtcagcctggcctcaggggcccagcccaggccatcccatcgggaataagcagctgttgaggccagataccctcacctctgcagccccccagtctggggcagagcaaggagacagacagaaagggaccctgccatgactccagacacacacacacacacacacacacacacacacacacacacacacacacgcacgcgcacacagcatcaatgccccactccctggcaggctgggagaggcagctgcactcccagaacggacccaaacccccagtgttcagatgagggggctgcagctcaaggaggggagggagggtccaggttccagccccacacgcatgttgaccctgtgaggtcagcaggccaggtgttttacagacgagtggaccgaggctgggagctctagttttgtggctctggaggccagcatggcctgggaagcccagcctgtccccagaacacaggggccagcacaatggagggattataggtacaaaaaggagatgcggaggtcagggccagctttccaggctgcaccctgtgcgcagggccccatgctcagaggggtccctgcttggtttaatgcgtgctggggccatcttgaaattcttaattttggaacaagatgctgcacattttcattctgcactgggcctcacaaatgacggagcttgtcgagttcgggggaccctttgggtgagtcccctgcagatgcagtgtgggtg

SEQ ID NO: 20334 - DNA, 1444 bp, Artificial sequence
  DNA replication origin
tgcgcgtgcgtgtgtgtgtgtgtgtgtgtgtgtgtgtgtgtgtgtgtgtgtgtgtgtctggagtcatggcagggtccctttctgtctgtctccttgctctgccccagactggggggctgcagaggtgagggtatctggcctcaacagctgcttattcccgatgggatggcctgggctgggcccctgaggccaggctgacttggacatggcaagaggggtcccaggctcttgtgggcaaagcaggggaggcgccaatgtggaggaacagagtctcctggctggctgctgctctctggagcgggtggagtcagggaagagctgagctggggagtcaccctgggcctggggtcaccgtaggccccatgtagcaccctggttcccctgcctgtaggtgacaggagccagcccagccaggtgtgctccctccccaggccctaggcaggcgggtacaggggccagcagctgcgcccgccccaccttccttcccacccacatgccgaagggtggccaggcaggcaggtggacgagtccaggcagcggctgagtcagtgtgtgtggaatgttctggccgctcccagctgcaccctgcccctacctgccaccacctcaccttcatcctcaggcgctgcggccctgagcccctgccaggaatgcacctttagcccaggcctgctcagtgagctccgccgacagccagccctgctcctcccgccatgaccctgcagacccctctgggcttccaagttcctgggggctgcagtgaacatgctccacctgcatggctggcaaaccatggtgggccccagctgtggtgcgtgctggggtagaggcaaggaagtgatgggaccgcagagatgagacccccagggatgagatgggacccccaggcagggcccagggtccagggcccaggagagagaagcagggagggagagagcttcctggtggaggacgcatcctacagtgggggcaagggtgctctgaggtccggtgaaggcagggactaggctgcccaggccctgcctgcttggctggggctgggggctgctgggaggtggctgggaggctgggcctgggcagctaagctggagctttggccagggtccagagcctccctcccttcagcttcctgctgcacagaaccctcgcccctggccaccccgtgctgcctccttgccctggcagacccagcactggctgctgctagtcagatggggtagcgggcaggggccggaggggccaccctcccagctgacccagcctcctgggccgcttcttccaaaccagcagggtagaaagatggggcacccaccagtctctcccagtgccccggccccagctggcaccacagctatacctgggcttattccagaccttgtcgccgggaccccctgtgagttgtgggattcccaagaggggtgtggggataacccagccaagtggg

SEQ ID NO: 20335 - DNA, 1054 bp, Artificial sequence
  DNA replication origin
ggcagacccagcactggctgctgctagtcagatggggtagcgggcaggggccggaggggccaccctcccagctgacccagcctcctgggccgcttcttccaaaccagcagggtagaaagatggggcacccaccagtctctcccagtgccccggccccagctggcaccacagctatacctgggcttattccagaccttgtcgccgggaccccctgtgagttgtgggattcccaagaggggtgtggggataacccagccaagtgggggctgcagctgtccacagatgcactcagcctggcctctaccccagggccccgctgggctctcattgccggcgcccttgccgcgggcgtcctcctcgtctcctgcctcctctgtgctgcctgctgctgctgccgccgccacaggaagaagcccagggacaaggagtccgtgggtctgggcagtgcccgcggcaccaccaccacccacctggtgaggagcggctccttgctcactcagtccagagagggcttgaaatccaggctccagagcccagggcagcgaggcgagttcagccccagggatggtttaacccccacagaggcagggcgttgaggaccttcctggcagggaaagtgggtgaacagaggtgagaaggaggccatgcaacaggggctgccccatgggcccgagggagccacagcgggttcttgaggaaggcagggggtaccccagatgccacgttttgggtgggtttggccggtctcacagagcgaagccgacgatttgtgcctgttgggtggcctggcctggaggcggggggtcttgacccatgtcatgcaagggctgcccgggagcccagggctctgatgaggcatgatgtcagcaccacctgccccttgtcccaactcactccaggtgcaacctgatgtggatggcctggagtccagcccgggggatgctcagcaatgggggtgcctgcagctctccctggagttcgactttggaagccaggaggtgaagggccccgctgcgcaggaccagcggttctgcgagtttccggaaagggtgac

SEQ ID NO: 20336 - DNA, 1139 bp, Artificial sequence
  DNA replication origin
ggggggcccgtgctcagccccgagccctgggatgccccttcggcaaccttgccctcccagagccctacgtgaaggtccagctcatgctgaaccagaggaagtggaagaagagaaagacagccaccaaaaagggcacggcggccccctacttcaatgaggccttcaccttcctggtgcccttcagccaggtccaggtgggccaccgggaggcaggggcagagcgagacccagtgccagaccacgatgactgtggtctttctcccccaactccaacctctggcctgtctctgcacagaatgtggacctggtgctggctgtctgggaccgcagcctgccgctccgaactgagcccgtaggcaaggtgcacctgggtgcccgggcctcggggcagcccctgcagcactgggcagacatgctggcccacgcccggcggcccattgcccagcggcaccccctgcggccagccagggaggtggaccgcatgctggccctgcagccccgccttcgcctgcgcctgcccttgccccactcctgaatgcaccacatgcctctgtctccccgctgagcccaggcacttgcccaggccgccctgcaggaccactgcaataaacgccttctcctgccactgtgtgtccggctggagcctggaggggatgcagaaatagggcccgggcccgctcaccagggtcccctgacaaggacgggggaggggctcctctccagactcagccaggccctgaggcctctgaccggtccctgcttgaccctcgggtaggggtggggaacctccccggggagcacagatctcccctctccgggccgcctgggaagaccggggaggtgggggccagagagtcgggaccacatgggatggggcgggctagagccagccctgtagggacagagtgggcaatggtgtctgggggctggtgagcatggagggaggacccccaacacctcagagacctgtgctgcagggccttccctgcatgagcagcagggggcagcagatgccttcggaagccgctggggcctttaggggctcagtcctggccggatgcccctcccagtccccacacatctgggctgccttagcggctggggcctccacgctgctgtctcctctgatcctccccacg

SEQ ID NO: 20337 - DNA, 1707 bp, Artificial sequence
  DNA replication origin
cgggcggccgtcctgacacttggcagccacggtcacctgcccctgccctgaccaccccactggccctcttgacaagtggggaaactgagttagcaggcaggcctgctgctggggaggcggggtggccggggaggggctggtacctgcacttcagacatggagcccgggatatgcagcggcgggcagtgctccgccaggtagttctgcttctctgcctcacggcggctctcctccttctccagctccgtggccgctatctgcagcatcacactctgcggtggggcaggcggtgaggggctgcagccagctcccctgcagacccacctgggccacccccccgggagcccacacctaccttcaggtgctgcctgcgggccgtgatggccctgttccgcttctgcagggcaggggacagggggtcgagtcagggcctccaggcctggagcacccccacccccttccacgctccctggccaggtcaggggctccggctccgggaccagcagagcctgggggctcctgaggccatgatgggcaggctgggcctccctggccccagaccttgcactgggacatggtgctgtgtggtgtgtgacactttgccaggtggcacatggtgctgggaggccagaggctgggggagaggagggccagttgggggcaggtcggccggtgaggtgggggcgggaagtgcaggaatcagaaagaagaagtgattcccctgtgaccaggccacagccacacttcccctgccccagaaggcttggggcagccacttcctctctttcagcagcgtcttggtgggtgggtggggcacttttgccagcggggagggccaggccatcttctctgggccttagggccttgaggctgtgacctatgacctatgctgagttgggggagccccctcctcgtcatgttttgagcccccagcaactacttacctcctcactgtccagggagggaggacgcaggcaggacggggagagaagacagaggttagggccatggctggcggggtcggagtgtgtgatggggtggacagggcaggaggtgggcagggtcactgtatgggggtacaggggtaccacttactctcccatcctgaggtcctgagcttggagcctgtggggagaggaagacagaggtgttggccaggcccttgccaccgtgatgcctgtgcccatcaggtaggtggtgaggggttcagggctcctgatgacagccccctcccgcccaccccctactctcacctcctccccctactctcacctccttcaaggacaatgtcttggaattccccagggtgagaagtaagaggagaaagtgttcccaaaatgtcccaggcatagcctgaggagctgcagctgtccccgagggagggtgggatgggccagcgcaggtggccgcctgagtgacgctgttatttttaaccctctctctttggctttgggcctaagtgcatggaagaaatccctcctcagtttggcctgggggctcaggttctggggcttcttgacccctaaactctccttccagggtccccagaggtgaagcctggtggtcagggagtgtctaatacctgcctctcgctacagctgcctccccaaagcctctccttctcactcccggacccgtgcaggccccaaagggggctgctggtggcatcccccaggcccccagacccccgccccaggaagtcctccc

SEQ ID NO: 20338 - DNA, 937 bp, Artificial sequence
  DNA replication origin
cacccacttatgcacgcaccctggtccacaccaccttcagcctcagtttaccctctgcattgggcagtggagtgtcccctgcatggcaccctggaggggcagtggtacagggcccccggcagggcaggtgtgggaggtggtccccaggcggggcaggtgtgggaggtgcttccccggcagggtaggtgtggtggtgctccccccgtggcacgcaccttctctgtgtcctccttcttgacctgcttcaggttggccctcaggtccatgcacaccttgtgcttcgagcccagcagggccttgagcatggcatcggccgacatgcgcaccctccgcagtgggggccgcttgaacttgccccgcagatcaaatagcttctggttcatgtcctccagctgtgggcaggggagccgggtgggagcccgaggtcccggtggtctcggcctccccggcccgccccgcctgcccgctgggccaccgcctacccgcctgccgccggcccgccgccaccactcacctccttgctggtcttctgcaccctcacctccatgtcgtacttctcctcttcagccgcatcgatcttggcgtgcagctgtttgcagagctcctaggggtgggtgtgggggcgggcggccgtcctgacacttggcagccacggtcacctgcccctgccctgaccaccccactggccctcttgacaagtggggaaactgagttagcaggcaggcctgctgctggggaggcggggtggccggggaggggctggtacctgcacttcagacatggagcccgggatatgcagcggcgggcagtgctccgccaggtagttctgcttctctgcctcacggcggctctcctccttctccagctccgtggccgctatctgcagcatcacactctgcggtggggcaggcggtgaggggctgcagccagctcccct

SEQ ID NO: 20339 - DNA, 1697 bp, Artificial sequence
  DNA replication origin
aagcagaactacctggcggagcactgcccgccgctgcatatcccgggctccatgtctgaagtgcaggtaccagcccctccccggccaccccgcctccccagcagcaggcctgcctgctaactcagtttccccacttgtcaagagggccagtggggtggtcagggcaggggcaggtgaccgtggctgccaagtgtcaggacggccgcccgcccccacacccacccctaggagctctgcaaacagctgcacgccaagatcgatgcggctgaagaggagaagtacgacatggaggtgagggtgcagaagaccagcaaggaggtgagtggtggcggcgggccggcggcaggcgggtaggcggtggcccagcgggcaggcggggcgggccggggaggccgagaccaccgggacctcgggctcccacccggctcccctgcccacagctggaggacatgaaccagaagctatttgatctgcggggcaagttcaagcggcccccactgcggagggtgcgcatgtcggccgatgccatgctcaaggccctgctgggctcgaagcacaaggtgtgcatggacctgagggccaacctgaagcaggtcaagaaggaggacacagagaaggtgcgtgccacggggggagcaccaccacacctaccctgccggggaagcacctcccacacctgccccgcctggggaccacctcccacacctgccctgccgggggccctgtaccactgcccctccagggtgccatgcaggggacactccactgcccaatgcagagggtaaactgaggctgaaggtggtgtggaccagggtgcgtgcataagtgggtgagcctgagctctctcctgccctctcctccacaggagcgggacctgcgagacgtgggtgactggaggaagaacatcgaggagaagtctggcatggagggccggaagaagatgtttgagtccgagtcctaggccactcgctgcccctacgcctgccccggtgcccggctcccagcagaacatactagggagatgcacccagagcctgccagggagggctggcctcaccaccaccgtcaataaaggatttgaatccccatggctggtctggtctggctctccccagcctcttgggccatgctctgggcccccgcatcggtggcctgcagtgtggtcagtggccagcggggaaagcctgggaggaggccacacggggcctgggatttcaggttgggagggaagctgcttccagcaaggaggtgagcctgggaaggcccctacaggggaatccaccccaggctgcacggggctgtttggtgagggccctgatagtgccccaggcgttcctggggctcggcctgggcacatccaacatgcagggctggggatggaggctgtgggaccgagccaggtctgggtgggagttcctgagataagtgggtctcacatttgcacagccacgcaaaggccctcccggggctccagagagatccacacatgtgacacacgtgtggcccccgcagtgctgggggcagccccctatgcctcccaagctgcccctcctcagggagctcatctgaggcaggaagccaagggccacattagaccccaggctgctgtccacgcgtgcccacccccagatcctcctgctcatccccctcccacatcactttgggacagacccccagccccggggcctccctgcttt

SEQ ID NO: 20340 - DNA, 2065 bp, Artificial sequence
  DNA replication origin
cccaagacccagccccatctggccaccaaggacaaggcagctgacaggttctgacaaggccggtgacagcaaggccacgttatcagccctgctctttgaaggctgacagagcaggcacgccaaggtccctgtgctcagatctgcgctggggaggctgccagcctgcgctgtgcccttgcccccgggaggtcccatcgattgatctgccggaggtggacgtgcagcggcagttccgcctcgggctgccttgagggactgacgtcagtgggctcccgggacggccttggctgtgtgcagtcccctgcttcccgggtaccctacagccctggcactcagctctgaccttttctgtagctggagccccacgccagtccgaaccccccacccgggccttctcctttagccttctgtaggggaaggcaccgagcagggcagcttggggccaagggggcactgcctggtgggtgcagctgtggcagaggtgcatggcaccccatgccagaatgatgggaccaggcaaggcccagggtgtaggaggccatgaggcacagaagtgaggcccgagacctggcctgtcggggggaagctgcccaagcccaagcctcagctgagacctgagggaggacaagtgtggaggcagagggtgctgcaggctggagcacgtcccatgcagagccaggcaggcaacaggcagagcgagggacaggcggcggtggggcctggccatggaccccttgcaggggacatggcacctttccagagcctgtgcctactgggaaagggggcgggacccaatcccacagggcgtcaggggggtgtggcagaggagttggggcaggcgcatcacacctggctgccaaccacaagattcaacttggccggggcagacacgctgtgtgggaaaattatcttttttatttcaaagcaaggaaatgttgaacacaaacacgaaattccaaagagtgaccctctggggtgagtggggtgggggcagagcaggggcagaatggagacaggacccctacgctgatgcaggtttgggggatgttttaattcttgggctggatagtagatgcacgggtgtttgttaaatttccaatagatgagtgaatgagtaaatgaaggagtaagtgagaggcctgcggaaagcaaaccagcaaatatcaaaccggcgcccctctgagcccggctccgtccctctcgggtgattctggtgtccctgctggaagtgaggcctgcagccagtaccccatggggctgtcccccagctctgcattctagaaaggcctcagcagggtggagcacagcggaagtcaccgctgggttggggggtgaggaatggagacgtggaaggggccgggtccccaggacttgttggctgagggacatgaggaaggcaggcaccttgctgggggcacgggtgggcagagactgttctccagggcaggagccgtgagaaagtggccttgggaggaggtgaggcactcactttggggctgctgggtttgggggccctgtggaaattccgaggggagacctggcccaggcagctggagcaggggctgggctggagatgtggatgtgggtgtcctgggtggtgagccgatgggcagaggtgcctaaggccagggcgagaggagacgagggggagggtagggacagccagggcagccggggcaggcaccatgagccccaggggagtcccggaagaggagggggacaggcccagggcaggggttgtgggcagccctgtgcgtggctctggaggtcggggaggacatggcctctgaagtcccaggtaacccgtgctgggctgtggccaggaaggggttggggaagactgggcacagcgggccaaggagggaggggtgggaggaagtgcacggggcacccctggaagttgcggctgctggagacagaaggcaggggttcctcgggggaggcagaggtgggtgcttctgcacacgcgggtgtttcctgctctgccgctgagccactgacatgcagacaccccagtgtccaggagcaaaccgggccccaggctctgctccctaaaaccgtcctc

SEQ ID NO: 20341 - DNA, 1206 bp, Artificial sequence
  DNA replication origin
aggagggggacaggcccagggcaggggttgtgggcagccctgtgcgtggctctggaggtcggggaggacatggcctctgaagtcccaggtaacccgtgctgggctgtggccaggaaggggttggggaagactgggcacagcgggccaaggagggaggggtgggaggaagtgcacggggcacccctggaagttgcggctgctggagacagaaggcaggggttcctcgggggaggcagaggtgggtgcttctgcacacgcgggtgtttcctgctctgccgctgagccactgacatgcagacaccccagtgtccaggagcaaaccgggccccaggctctgctccctaaaaccgtcctcccctgaaggacccagggctcctcggaagagaggttgactgcagggtggggcaggaaacgtgcaggaagagcctgacatgtcctttctgctaggaggccgtggtgacgcagagggcctgccctgtgcccccgctgatgggagcggccatcaggacacagaccggcagacaagataacaagcagtgtccgcggtaaatgtgctcaagttcatagttacacaaaacaacatctgcattccaaggaaacagaccttaaaatcttcaggaggaaaggagggagacagagagacagagagacagaggcagagagacagagacagagacaaacagagacagagagacacagagacagagacacagagacagagacagagagacagagacagagacacagagacagagacacagagagacatggagacagagacagacagagggacacagagacagagacagagagacacacagagaaagacagagagatggagagacacagaaacacatagagagaaacacaaagagagacaaagaggcagagagagggcaagagacagagggacacagagacacagaggcagagaggcagagagacagagacagaggcagagagagagacagagacagagagacaagagacataaagacagacacagaggcacagaggcagagaggcagaggcagagacagagaagcagagagacaaaggcacagaggcagagagacacagacagaggcagagacagagaagcagagagacaaagacacagaggcagagagacacggacagaagcagagagaaagagacagaggctcagagaaacagagaggctgagaggcggagaggcaggggtcg

SEQ ID NO: 20342 - DNA, 1275 bp, Artificial sequence
  DNA replication origin
gagctcgaggctccccacgcagcctcccaaagtgctgggattaaaggtgtgagccaccacacctggccttcatttttttttgtctctctccctttgaaaatctttagagcttggtgttgtctccactatttggcggcgtcagagtgaccggggccttcactcatgagaagctcaacctgcagcgacagcagggccggctgggacctgcaggcggggagctgatctgagagccgtgaagggcctcgctgtggacatgtgctccggggggcacgggacgcttcgtgagagggcggtgacaattgctgggttctgccccgatggcctctggtttgaggtggggggcccaggtgatttggggtgtgagtgagagattttggggagcttggtggggggggcggaggggaggatcagaaggaggaagctcgtggaaaccgtgcctggcccaatgccgcgctgattctcggcggcctgccggaggggcagccgcagagactggagcctgccaggacgcaggccttcccgatggctcgaggaggggacagggagtcaggagcagcttggcaaggagggggagcaatgggagatgacagggggtggtgaggaggtaggggtgactggggccaggggagggagaggccctggggccaggctgtgcttgtcgaggcggcggaggtgcttgcaggagggcaggagcaacaaggggatcggggggtttccagcgtggtcacggccagccccgcacaacggggaacactggctgccagaggactccagtgtacatggtggccccagcgtcttgtagggactgttagacaatcctcatgcagacccgtgtccccgtcctgaggtcccgtcacaggtgtatgcctcgccccagcagcactgacacagctgcaaataactccaggtccctgacttcgtggattttccctcccagaggaagagacggacagtgaacaaatgaaaaaacaagtccatggtcattctggaaaataaccaggagaagtcacagagatggctgggggactcacggagggcttcacggaggaggtgaccatgctggaactgaagggtgtgaaggagatggccacagggagagtggggagaagcttccaggcctggggcagaggcaggcttggtggtcctggtgtgatattcagcagctgggtggtccagggcgccgagccaggccttgctggggctgggggagagtcgggctgactctggggggcacataggagaggagtttagggaggcaggaggtgccagctgggt

SEQ ID NO: 20343 - DNA, 1710 bp, Artificial sequence
  DNA replication origin
acgagcgtgtgtgacagggtcttgctctgtcacccaggctggagtgcagtggtgcaaccagggcttactgcagcctctacctcctcggctcaagtgatcctcccgcctcagcctcccaaataactgggatcacaggtacataccaccacgcccagctaattaaaaaattttttgtgtgtacagatggggtctcaccatgtttcccaggctggtcttgaactcctgggctcaaaccatcctcctgtctcagcctcccatagtgctgggagtacaagcatgaaccactgcacccgggcagtgcatgcgtgtttgagaacggtgtgggccttgctgggtgggaggttaaacaggaacagagccttcctctgaagagctaagagtctacccaagaatcagatgcagaatcatttcttccctcagtgcctgaaactctaagggaggtgtgtggagggcagaccccggcccctccgttgtcctgtctccaaatctggtgcagggtccagcgagcagcacggggaccagcaagcggctgcatcaggtgatgagttagtttggattctgggatggagccagctgagggcatcagattccgggggatggagccaagcagggaagccttgaggggtgagccaggaggagctctgtgccaggcgggcaggacacagggacactccaggtgcagaggccacaaggcagatgtctgagaggtgcagacctggatttgaggggagaagccgggggttgggacctgtgtagcaggctggaggtgcgtgtagaagtcccagccgagcagggagaggcctgggcaggagatgctgtgtgctggcaccatgggctggaaaggacgtcccgcagtacaggccatcccgcagcgcccctccctggcaaatcactctgtgggcacacgcaggtgctggaggggtttgctgtggggagcaaagctgggggctgtgccctctccctgcacgcgagctggggtcactcggcccctttccttccactggccgtggccactggtgagcttgggaatctggcccaggagtgaagagagtgaggaagagaagctctcaacggggacagagacagacaggaaaggggcagggaaggcttcgagggggccgggtggatcggagggatgccaggagagggcagtgaccagacagctgcccctagcagagcggacaggccaggcggggtggggaggcagtactgggggagcccagggttcagggccagctgagagtggaagaagctctccagcaggcgcaaagagacatgggccaggtcagagaagatgggcgtcggtcggcacaaaaggccttgggtcggagagcttggctatttattttgtttgcttttagtttttactttattttttttttttaatttgtagagatagggttttgctatgttgcccaggctggtctcaaactcctggcctcaagtgatccgcccaccttggtcttcccaaatcctgagattacaggcgtgagtcatcagcctggccttcttcttctttttttctttctttaaattctcaaagcttttattttttgagatggagtcttgctctgctgcccaggatggagtgcagaggcgtgatctgggctgactgcaacctctgcctcccgggctcaagcagtcctcttgcctcagcctagctctacctccctagctgggaccacagacatacaccaccacacccggtta

SEQ ID NO: 20344 - DNA, 1512 bp, Artificial sequence
  DNA replication origin
gatggggaaactggggacccacagacaggtggcaggaagtcttgctgggacccccctctcacaacaagggtggaggtctcttccgcctgcctctgtgccctggactcactgggggaggcgcgtgggatcctaagcccatggtggatgcctgaagcgaggagaccccaagacgtgtcctggactgccagggaggagctggggactgtgggccctgttagcttgggaagaggcaaggtgggggctggggagcagctgttctgggatgggtggaactggcccgggcctggccacctgcccacaggactatctgagaggggctatcctgccttgagggtctggaggccgccaggcttggggcccagcaggcctcagggcagggcacccaaagctgcccttgacctgcggtaaaggacaaggccaaggattctggcaggtgcctgtgctgggtgccaggcaccgtgtgttggttggagtggggacatgagggggcatggcagaggttgtgtgtaggactgccagagctgggcagaaaaaccccgctgccaaaggcctcctagcgggcagctgtactctgtggtaccaatgggcatccagccctgtgctggggtgggtggagagggctagcggcttagtaactgggctccctggcagaggggagctgccggccagcaggcatccaggcatcacagctgagcctcgccaggggaacccgagttgcccccggtgcaggtcccagaagagatgggagggctcagggcgtgcggtgcagggacaggtagggctttgaggggcagaggggcgacgtgctaatggtcaggggatggggatccggtgctggggatagaggccggcctaggagcaggtcagcgggggctgtggcctggtgtgcggaagggaaggcgctggggcccaggttgcagaaagagtgtgatgcccgcagccacacaggacggacctgagaggaggcccagggtgacgctcacataccccaaaactgcagccagggctgctaccagtctctgccttggtgctgacagcagagggtcccggtctacccgacccggggcggtgcagggaccacctcccggccttcacacaaagctcctgtgctgttggtggctgcagtcactgtcctgtgtctgtgtccttggtggccgtcacattgctgtgggtctggtatgtgtgaggggtctgcatctctgacttcttgctgccaaatcccacttgggtacaggtgcggggggccactgaagggaccccgagtgccgtgagtggagtggaggctaagcagaggccggggctggctgagggctgggtcgggacgtccgtgcctgtccccagggagaggtgggaggatgccctgcccaggccgtgtgcagggagacaggcttctgggtgcacaacagctgtgtcccagctgcaaaacgggccctcctgtcagcaccacccccagccctggactaggtgctgctcctggtcacctcatgcccatagaagggcaggacatgagcc

SEQ ID NO: 20345 - DNA, 1655 bp, Artificial sequence
  DNA replication origin
ggccctcactctgtgaccttggatgccagtgctgctggctggaccttggtttctccatcctggacatgggtacatggtggttctgagtgccagcgagctgggcaaaccgccggatgtgagactgccgtcgcggagctgaccctcggtgagccctgaacatgcgtcccatcccacccctcgtccgtccggccactagccccgagtgttctccagtgagtcacagcagccaagcccaaccagaggaacagagggctgggctgctcctccctgggccagggccagaggacgcgggcaaggggggcctggctggcgagggcaccaggcccactttgtgcccactggccacctcttgggaccatgctgtgccaataccaaaccgaagatgctgcgttggtggcgtctctgcctcttgggtcaactctgcagtctggctggggggttgggcccaccaggaaaggcagcagcctccccatttggggaacagagagggttcttggggtgccaagccttctctggaggtgacaacaagagcagaggccgggaatgaacaaagggaaagtggagaaccaggagcgggggagaggggaggaggggagaggaagggaggggaggggaagggagggaggagggaaggagggagggagacagagatagggacagagacaccagagggaaaggagagaggagagaggggctgagtgcgagacggggaaggaggggacgggacaaagaggaaccagcgaagggtccaggcctgcgatgatggtgagggaggtggcaggttgacgaggggctggacaagaacggccgacgaaggagaagaacagaggagggcccgggcagggcctggcagagggcatgaggcactccgaggtgggaggcggcgatgggcagaataggcccctgtgcctggggcaggggcaccacagagggctaggggagaccgagaagcgggcagcggctaccaaggtggcctgagggcagaggcggagggaggaagggaaagaggaagggagggagggagggaaggaggcagccacgctgcccatcagcgcgccacagaggtctggctgagccccacgctgctgggctgggagagttttcgctctgacatttttactcttctcggaaggaggaggaggtggaggtggaagagatggaggcgggaggagaagggggctgggggaaacaaaagagaagcagctgctgagagtcctgaagtaggagaggggaaagggagacccacagtcagggagacccacagggatggggacacagggaccaggctgcctgcagggagccggcctgcagaccctcgtgccaggagccgaagggagggaccaggctgcccacagacccctgtgccaggtgccagagggagggaccaggctgcccaagggagccggcccacagactcctgtgccaggggccagaggggccaagacaggcaggcagagggtcacagggacaaggagaacaccagacagagagaagggacaggggaggggtgacagccagcgagagaccgagggccagggcagagcgccaaggaagtgcaggagtgagaggggccaggagaggcaggaaagccaaggagagctgggcacaggggggcaggggtgcgggaggagggcagcagagaggagggccagcag

SEQ ID NO: 20346 - DNA, 955 bp, Artificial sequence
  DNA replication origin
gggcagtggcaagccgaccgatgccagccctgccttccagtagctcgaggtccggccagcatgctccatgccatcaaaggaagtcagagcaggacagccctccaggttaggaagaagcaaggcagccttcaagcaggaggtggtgtttcagtttggcttaaaagcctggaagggttgaggaggagaaagggcactacaggcggctcagagtggctgacggtgcagagggatatctctgagactgcccaggctgggtcttgaggagccttgggccctccaaactctgctctcccacctgaccccatgaagggccacaccactactttacagaggaagaaacaggctgggagagggcaccacactggcccaacacctgcaggtggacaaggcccgggcaccttccctggccctgaggagcctcccactcagggttggtggctgcagccagggccggtaagctcagcccaaagttcagtttcatgatctgtgaagtgagggtgactgaagggtgcccaggatccgaaggaccccacgggaggccccagaagccacccagaggatgggcccttcattttgggggctcagagtcaagcagaatccctggggctcggggagaggtgtgagcaggtgacagtgcagccggcggtgcaggtgggacggcgtgagcgggtgacagtgcagtcggtggtgcaggtgggatggtgtgaatgggtgacagtgcagccggcggtgcaggtgggacggtgtgagcgggtgacagtgcagccggcggtgcgggtgggacggtgtgagcaggcgacagcgcagccggcagtgcaggtgggatggggaaggagaatgcatgggcagctgccaggagccaggaggaagagaggcctcaagcagcctccgcactcacacatgtacacgcaaccagcctggcaccctctcgctgcccacgcttggggcagcagag

SEQ ID NO: 20347 - DNA, 1334 bp, Artificial sequence
  DNA replication origin
ttagtgcacacgtgtcagccttgcttcatgtagctcaccttggtggctccccttagctggacaagggactcttgctgccctctgcccagcccccatcaggacaagttccaagggagttcaaagggacgggtccttatgccaccaacccactggctgaccaccgcaagtgaggtcccctcctcactgtctcctccccaggtccacagggactggccccgagcctgagcccacgcggcttcagtgcctcctccccaggtccacagggactggccctgagcctgggcccacgcggcttcagtgtctcctccccaggtccacagggactggccccgagcctgggcccacacggtttcagtgcctcctgagtgcggcttgctcacctggggctgcagttggtgctgggcccgctggacggatgctcatggccgagcccctggtgacaagggggtgagccaccgcacagccaggcaggggctctgcccctcctccgggggctgcacttccttctcttgggcccatttgttaagtagcactggtgagcctgggggattgaccccaggcactcctcaaatcccaggccacagagctcctggtggacagcagcgtcccctgggaaaacacattcccgttgggcagggagggaggtctgaccagcagagcctggaagcccaggaggaggaggcttatggggggccaggggtagggggaggctgggatgaggtgtgcccagccaggggcccactgcagatcctggtgctggtcctgaactcaggtgacagccggagaccctgccaggtggggaccagatcggagccatctctctgcatctgcacggacccaacaagtgggagctggggaggaggggtgagccgggctgccctcaactcctcagaccccacttagctcacccccatgggcatccctggctctctggcctctcagagtctcagcactgagtgcctggcctgggtgggcagtggcaagccgaccgatgccagccctgccttccagtagctcgaggtccggccagcatgctccatgccatcaaaggaagtcagagcaggacagccctccaggttaggaagaagcaaggcagccttcaagcaggaggtggtgtttcagtttggcttaaaagcctggaagggttgaggaggagaaagggcactacaggcggctcagagtggctgacggtgcagagggatatctctgagactgcccaggctgggtcttgaggagccttgggccctccaaactctgctctcccacctgaccccatgaagggccacaccactactttacagaggaagaaacaggctgggagagggcaccacact

SEQ ID NO: 20348 - DNA, 1702 bp, Artificial sequence
  DNA replication origin
aggaatgggctggcagcctgctgggctggccctgagggggctgggggaagccaggcctccaaccacagtgtccaaaagggtgtggctgccttgggcccatccaggcctgagatcctgagggtggggtagcccccgccctggcagggctggaagtcggtcttcggacagagcccgtcctgcccagaagcccaggcgagccagcagcaggggtgcagggaccgagtggcccagccccctgggcagggtgtcagggccagagcccagaggacggcggttcaggcttcagtcccagccggcgaaccagagctgggcagagcggccagcaagcggcagccagggtgccctgggcactcgacccccagatgcccctgctggaaccgtaaaggggaggcaccctgaggccagagggagcatggccccggggactgagcatccggctcagagcggcttggcagaggtcggtggactggggttaaccacagaggtctctggagggcagacaggagccactgcaagtgggagcttgtgggagagaagcccttgggtgacccctggatggggcggggaccattagggagaagggtgaggggcttggcccctgccccaggctccaagtgggctgagacccgggaggcttgagggtcggctgctacccatgacgggttggggaggtattggtgcgagctgaggtggtgcttgcggaggtgagattgagggccgggcctggccagggatgctgggaggggggcaaccctgtgcctggggctgtgagggtctcttgacgagaacaaaccctacctggggagaagtgacagagaaaagaaagaaagaaagcgaaggcacgagaaagaaatgagagaaagggagggaaaaatgctgagagggagggagagcaggggctgccttgaaggaggagggagggggagcagaagcgggtgcagggtggtggcaggatgggaagggcagagggaggggctgaggtgcgaatggaagctgtgtgagggtcccgggcactgccccttgccgccgaccccaggtgtgggaggaggggtctctcccacgtgggccgcacctagcaggtgccggggcagaaggctcagagccgctgtctcacacagcttcttggtgctccaaagacgggcggtaggaggaagatcaaagaagcgagaaatggatgctggaggaacgcagtgaggccaggcgagggctggcgagcttgccaaggagagggcgggcgaggaaaatggggcgccccacagaggagggggcgtggggggggctggttttccccgagactgagaaatgaatttctgcacccggactgggaccccctgggtcaggaccctccactcacattcaggagcagcacctcttctggcctctgtccctgcctggtcttccccacacccggttcttgggggttgaggggttggagccccagccacgtcatcagctccctgggacccctgcgtgagacgtgagaggtgcacctccgagcctccgtttgtgcatctgtaatggggatgataggactgcgcccctggcgaccattgtgaggacggaggcgctggctgcactggtgctcactgtgcctctttaaacggggatgtctggacctctggtgcagaggaccaaggccggtccacttgacctcagccatgaggacatcccaaggccatgtgagtctcccacggcccactga

SEQ ID NO: 20349 - DNA, 3616 bp, Artificial sequence
  DNA replication origin
acgtgccaaaagcctgcctcgtgagcacggcaagagctctgccagggcagtcccagctggcccaggcgccgcagcgctcccgagggccgtcgagcaaaggcgggaggcgcagccgggctgtcggtggacctgtaggtatcagggctccttggtcccctcctgcgggaagcaggcaccgagtggggctgcatgtagacgcatgcgagggtgagagctgcggcggaggacgctgatcgcggagtgcaggcgagggccccagaaaggtcccgcaggtcgcctcgctcgtggcacgggctcggcagcgttgtggttagtgacacggaggaagacagaaagccatatgcacagcacgcagaacaggaggaggggggaagaaagagcaggcacggggcaggcagagccgcagccacgccgccgggatgcagcaggcagggccacccacgagcagggcggggccctaacctccgacccaggctggtcgccgcagatgggggcagagatgtgaaacagctgcagagcgggacaagggtgctgccggcacagggctgaccacagagcacatcaaaagaggtagggcacccagcgcaagggaggtgatgggctggtcagcaggacatcaagccggttctggaccctgctctgaggacggtccctgacccagcctctgaggaccaatgggaagccaggggtagaggggttgggggaaaccaggctccattttccagtctcagcagggggccaaggcttgcggctctgcggaggccacaccatgaggtttccagggtcatagatgccctttggtcagcgctgtctgccgctgcacgggcacccctcctgttgggtgtctgggtagacttgggggtctgtccggctggcgtgggcacctttgggaggggggtgtgtgtggcgggcaggcctgggctgtagtcaccccagcccgtgctggtagagttggggtctgtccggctggcgtgggcacttttgggacggggtgtgtgtggcaggcaggcctgggctgtagtcaccctggcgcacgctggtagagttggggtctgtctggctggcgtgggcacttttgggagggggggtgtgtggcgggcaggcctgggctgtagtcaccctggcgcacgctggtagagttggggtctgtctggctggtgttggcacctttgggacggggtgtgtgtggcaggcaggcctgggctatagtcaccctggtgcacgctggtagagttggggtctgtctggctggcgtgggcacttttgggagggggtgtgtgtggcgggcaggcctgggctgcagtcaccctggtgcatgctggtagagttggggtctgtccggctggcgtgggcacctttgggacggggtgtgtgtggtgggcaggcctgggctgtagtcaccctggcacacgctggtagagttggggtctgtccggctggcgtgggcacctttgggacggggtctctgtggtgggcaggcctgggctgtagtcaccccagcccatgctggtagagttggggtctgtctggctggcgtgggcacctttgggacggggtgtgtgtggcgggcaggcctgggctgcagtcatcctggtgcgtgctggtagagttggggtctgtccgctggcgtgggcacctttgggatggggtgtgtgtggtgggcaggcctgggctgtagtcaccctggtgcacgctggtagagttggggtctgtctggctggcgtgggcacttttgggagggggtgtgtgtggcaggcaggcctgggctgcagtcaccccggtgcacgctggtagagttggggtctgtctggctggcgtgggcacctttgggagggggtgtgtgtggcgggcagacctgggctgtagtcaccctggcctgcgctggtagagttggggtctgtccggctggcgtgggcacctttgggacggggtgtgtgtggcgggcatgcctgggctgcagtcaccccggcccgcactcagactagtcctggcatcaccactctggggcgaagttgatgcaggagctcagggccctcatgcagcactgggtgggtcatgaagctcagggggcttcagcaatggaggaggcgaccctatcccatcccaagttggacagcagtcccagcggtggggggtgggggtatagggggaagcaggttcggattgggtgggtaaggaacccagaggaacagacccctccctgtgcacctctccccagaggtggaggcagggagagatggaggcagggagaggtggaggcagggggcagagacaagcctcaggtcatcaagagttgagggctggcatctgggatacagggaggatggggagaggggagggctgtgcgggtggggggcggctctgtctccccttggctgtgcctccctggggaccgctaggcatacgcacggccactgcaccccttcctccctgccaggaccctgcccactgcggcgaccccgaggctcagagcaggcacaggagcccctcctttgagagacttcctgccagctcccctctgtgcttcttgatccacatcatgggtcagcgctggtttcttggcaactgctaagatttgtaagggcagggaggagatctcactcctccgtctttgggtccctagcacctgacaaaataaactgctggctaaggaaagatggagggagggagggagggagggaggaaggaggggaggaaaggagggaaggatagagggaggagggaagaaggaagagggaggaagaagggaggatggagaagggaggaagggaaggagggaaggagaaggagaagaatggaaggaggagggaggagggaggaactggaccgaggctatggctatggaagaatcatgccctgggccatcccaggcaggctgagaagaaaaagctggaaccaagtctgggctagtctggtggttgtggggcaggaagtagccatcagggtggcaaccagaagagcagggagcccagcagaggagggaggccggcagaggagggaggccggcagaggagggaggctggcagaggagggaggctggcagagcagggagcccggcagaggagggaggccggcggaggagggaggccggcagaggagggaggccggcagagcagggagcccggcggaggagggaggccggcggaggagggaggctggcagagcagggaggccggcagaggagggaggccggcagaggagggaggctggcagagcagggaggccggcagaggagggaggccggcagagcagggaggccggcagaggagggaggctggggacagtgggggcaggccggggacagtgggggcaggccggggacagtgggagcagtgtcggggacagtgggggcaggctggggacagtgggggcagtgttggggacagtgagggcaggccggggacagtgggggcaggctggggacagtgggggcaggccggggacgggggggcagtgttggggacagtgagggcaggccggggacagtgggggcaggctggggacagtgggggcagtgtcggggtgaggatctggtctcccgacaccccttcccgggagcgagacctcaggcccagtcttcactccccagctgtgaaatgggtgagaacagagggtg
